United States Patent Application Publication US 2014/0259212 A1 - sequence listing, part 31

SEQ ID NO: 104963 - DNA, 993 bp, Pseudomonas putida KT2440
  CDS (1)..(993): transl_table=11
atgccggcagtgacagttcgagaggccctcatcgcccgggatcgcattaagcacctggtgcgcgaaacgcgaatggagctctctccaagcctctccgacttcatgaaagtgcccgtgtacctcaagctggaatgccaccaggcgactggtagcttcaagctgagaggggccacgaacgcgattgcgggccttacctctcaacagcgtgctctgggagtagtaaccgcttcaacgggcaatcatggtcgtgccctttcctatgccgcagctgccgccggcgttcgcgctaccgtgtgcctttcaaggcttgtcccatccaacaaggtggctgcgattcgtgcgctgggcgccgccgtgcaggtggttggtaactctcaagacgatgctcagttcgaagctgcccgtcttgctcaagaagagggccttaccttcatccctcctttcgatcaccaggacgtaattgcaggccaagccactttgggtctggagatcgctgagcaactcccttccgtttcgcaggtactcataccgctttcgggtggaggacttttctccggcgtgtccttggcgctcaaagcactacttcctcaggtgaaaacccatggtgtgagcatgaggcttggcgcagcaatggcacagagcctcgaggctggaaagcccgtgaatgttgaggaagtagccacgctggccgactcgctcggtggcggaattggtctgcgaaaccaatacacatttgaactcacccgtcgattcatcgaccgagtgattttgctcaatgaagactcaatcgcggatgcgatgctccatgcctacttagaagaacggctcgtcattgagggagcgggagcggtaggtatcgcagctctgcttaccaggcaggttgaagctcaagggccaatcgtgatcgtcgtgagcggtgggaatgtcgacatggctcaacaccaacgcatcatcctggaagctgtgcgcgaccgccgcccagcacgtgcttaa

SEQ ID NO: 104964 - protein, 330 aa, Pseudomonas putida KT2440
MPAVTVREALIARDRIKHLVRETRMELSPSLSDFMKVPVYLKLECHQATGSFKLRGATNAIAGLTSQQRALGVVTASTGNHGRALSYAAAAAGVRATVCLSRLVPSNKVAAIRALGAAVQVVGNSQDDAQFEAARLAQEEGLTFIPPFDHQDVIAGQATLGLEIAEQLPSVSQVLIPLSGGGLFSGVSLALKALLPQVKTHGVSMRLGAAMAQSLEAGKPVNVEEVATLADSLGGGIGLRNQYTFELTRRFIDRVILLNEDSIADAMLHAYLEERLVIEGAGAVGIAALLTRQVEAQGPIVIVVSGGNVDMAQHQRIILEAVRDRRPARA

SEQ ID NO: 104965 - DNA, 1515 bp, Pseudomonas putida KT2440; identical to SEQ ID NO: 12397
  CDS (1)..(1515): transl_table=11

SEQ ID NO: 104966 - protein, 504 aa, Pseudomonas putida KT2440; identical to SEQ ID NO: 12398

SEQ ID NO: 104967 - DNA, 1245 bp, Bradyrhizobium japonicum USDA 110
  CDS (1)..(1245): transl_table=11
atggctgacttgtcccaaaccacgtcctccgatctcagcggccttccggtcgcgcctggtgacattcaggcagccgccgagaccatccgcggtgccgtcgtcgagacgccctgcagctacagccgcacgctgagcaacatctgcggctgtgacatctggctcaaattcgagaacctccagttcacctcctcgttcaaggagcgcggcgcgctcaaccgcctcaccgcgctgacgccggaggagcgtatgcgcggcgtcatcgccatgtcggcgggcaaccacgcgcagggcgtcgcctatcacgccaggcggctcggcattcccgccaccatcgtgatgccggtcggcacgcccatggtgaagatcgagaacacgaagcaccacggcgcggaggtggtggtgacgggcgcgacgctggaggaggcggccgcgtttgcgcgcagccacggtgaagctcacggcatgatcttcgtccacccttacgacgatccgcttgtgatcgcggggcagggcaccgtcgggctggagatgttgaaggcggtgccggagctcgacacgctggttgtcccgatcggcggtggcggcctgatcagcgggatcggcattgccgcgaaatcgatcaagccatcgctgcggattcttggcgtcgaggcctggctctatccctcgatgtacaacgccatccatgacggcaatctgccggcgcgcggcgatacgctcgccgagggcatcgcggtgaagtcgcccggcaagatcacgactgaaatcgtccggcgcctcgtcgacgacatcgcgctggtcaacgaggccgagctcgagcgcgcggtcgcgaccctgatctcgatcgagaagacggtcgtcgagggcgccggcgccgccggccttgccgcgctgatgtccgacccgtcccgctttgccggccagaaggtcggcctggtgctgagcggcggcaatatcgacacgcggttgatcgcctccgtcctgacccgcgaactggcgcgcgagggacggttgacccagttgtccctcgacattcctgaccggcccgggcagctggcggcggtggctgcgctgctggccgaggctggcgccaacatcatcgaggtctcgcatcagcggaccttctccgacctgccggccaaggcgacgctactgcaactcgtgatcgagacccgcgacagcgcccatctcgacgaggtcatggcgaggctcagtgcttccggcttgagcgcgcgctgcacctga

SEQ ID NO: 104968 - protein, 414 aa, Bradyrhizobium japonicum USDA 110
MADLSQTTSSDLSGLPVAPGDIQAAAETIRGAVVETPCSYSRTLSNICGCDIWLKFENLQFTSSFKERGALNRLTALTPEERMRGVIAMSAGNHAQGVAYHARRLGIPATIVMPVGTPMVKIENTKHHGAEVVVTGATLEEAAAFARSHGEAHGMIFVHPYDDPLVIAGQGTVGLEMLKAVPELDTLVVPIGGGGLISGIGIAAKSIKPSLRILGVEAWLYPSMYNAIHDGNLPARGDTLAEGIAVKSPGKITTEIVRRLVDDIALVNEAELERAVATLISIEKTVVEGAGAAGLAALMSDPSRFAGQKVGLVLSGGNIDTRLIASVLTRELAREGRLTQLSLDIPDRPGQLAAVAALLAEAGANIIEVSHQRTFSDLPAKATLLQLVIETRDSAHLDEVMARLSASGLSARCT

SEQ ID NO: 104969 - DNA, 1218 bp, Clostridium tetani E88
  CDS (1)..(1218): transl_table=11
atgactatgggattaaaacttggagatgtaaagcaagcgcaaaataatattaaaaaggttgtaagaagaacacccttggtatactcatcaacttttacaaaattaactggatataatatttatattaagtgtgaaaacaagcaaaagacaggtgcttttaaattaagaggagcttataataaaatagtaagtcttaacgaagaagaaaagaaaaaaggggttatagcatcgtcagcgggtaatcacgcacaaggtgttgcctatgcagcatctgcttttggtataaattctacaatagttatgcccgttacagcaccattagctaaagttaatgctacaaaaggttatggtgccaaggtaattcaatgtggagaagtctatgatgaatgttatataaaagcacttcaaacgcaaaaagaaaatgggtatacattcatacatccttttgatgatgaacaggttatagcaggacagggtactataggattagaaatattagaagatatggaagatgtagatgctatagtagtaccagtgggtggaggaggcttaatatcaggaatagcactagctgcaaaatctattaaaccaaatgttaagataataggagtgcaaccatctattatagcttcctctaaagtatccttagagaagggaaaggttaccacattacctggagttaagtccttagcagatggtatatctgttagtactccaggagaaataacatttaaatatatgaatgaatatgtagatgatatagtaaccgtttcagaagatgaaattgcatatagtgtattttgtttattagaaagagggaaacttttagcagaaggtgctggagcggcagctatggcagctatattaagtgataagattaatataaagggtaagaatatagtatctctcataagtggagggaatattgatatagcaacggtttctaaaataatagacagagaacttataagacttagaagaagactaagatttatagtagaaattaaagatagaataggacagttaagtagcataataacagaaattgtatccacgggagccaatgtagtaaaattaaggcaagatactaattggaataaaaaaggattggactatgtaaatgttatgtttgaaatcgaagttcagacagtagaacaatcacaagaacttatagatgctttaacaaagaaaggatacaaactagaaataatatcatag

SEQ ID NO: 104970 - protein, 405 aa, Clostridium tetani E88
MTMGLKLGDVKQAQNNIKKVVRRTPLVYSSTFTKLTGYNIYIKCENKQKTGAFKLRGAYNKIVSLNEEEKKKGVIASSAGNHAQGVAYAASAFGINSTIVMPVTAPLAKVNATKGYGAKVIQCGEVYDECYIKALQTQKENGYTFIHPFDDEQVIAGQGTIGLEILEDMEDVDAIVVPVGGGGLISGIALAAKSIKPNVKIIGVQPSIIASSKVSLEKGKVTTLPGVKSLADGISVSTPGEITFKYMNEYVDDIVTVSEDEIAYSVFCLLERGKLLAEGAGAAAMAAILSDKINIKGKNIVSLISGGNIDIATVSKIIDRELIRLRRRLRFIVEIKDRIGQLSSIITEIVSTGANVVKLRQDTNWNKKGLDYVNVMFEIEVQTVEQSQELIDALTKKGYKLEIIS

SEQ ID NO: 104971 - DNA, 1548 bp, Vibrio parahaemolyticus RIMD 2210633; identical to SEQ ID NO: 12407
  CDS (1)..(1548): transl_table=11

SEQ ID NO: 104972 - protein, 515 aa, Vibrio parahaemolyticus RIMD 2210633; identical to SEQ ID NO: 12408

SEQ ID NO: 104973 - DNA, 990 bp, Salmonella enterica subsp. enterica serovar Typhi Ty2
  CDS (1)..(990): transl_table=11
atgcacattacatacgatctcccggttgcaattgaagatatcctcgaagcgaaaaaaagactggcggggaagatatataaaacgggaatgcctcgctctaactattttagtgaacgttgcaaaggcgaaatatttctcaagtttgaaaatatgcagcgtacgggttcatttaaaattcgtggcgcttttaacaaacttagctcgttaacggaggcggaaaaacgtaaaggcgtcgtggcctgttccacaggtaatcatgcacagggcgtttctctttcttgcgcaatgctgggtattgacggcaaagtcgtgatgccgaagggcgcgccaaagtcaaaagtggcggccacctgtgattattcggcggaagtggtgctccacggtgacaacttcaatgacaccattgctaaggtgagtgaaattgtcgaaaccgaaggccgcatttttattccgccttacgacgatccaaaagtcattgccgggcagggtactattggtctggaaattatggaagatctgtacgatgtcgataatgtcatcgtgcctattggcggcggcggtttaattgcaggtattgccattgcgattaaatcgattaacccgaccattaaagttatcggcgtacaggccgaaaatgttcacggtatggcggcgtcttattacgctggcgaaataaccgcgcaccgaacgaccggcaccctggcggatggttgtgatgtctcccgcccgggtaatttaacctatgaaattgttcgtgaattagtcgatgacattgttctggttagcgaagatgaaattcgtaacagcatgatcgctttaattcagcgcaataaggttattactgaaggcgctggcgcactggcctgcgccgcactattaagcgggaaattagatagccatattcagaacagaaaaacggtcagtattatttctggcggcaatatcgatctttctcgtgtatcacaaattacgggtttagttgacgcttaa

SEQ ID NO: 104974 - protein, 329 aa, Salmonella enterica subsp. enterica serovar Typhi Ty2
MHITYDLPVAIEDILEAKKRLAGKIYKTGMPRSNYFSERCKGEIFLKFENMQRTGSFKIRGAFNKLSSLTEAEKRKGVVACSTGNHAQGVSLSCAMLGIDGKVVMPKGAPKSKVAATCDYSAEVVLHGDNFNDTIAKVSEIVETEGRIFIPPYDDPKVIAGQGTIGLEIMEDLYDVDNVIVPIGGGGLIAGIAIAIKSINPTIKVIGVQAENVHGMAASYYAGEITAHRTTGTLADGCDVSRPGNLTYEIVRELVDDIVLVSEDEIRNSMIALIQRNKVITEGAGALACAALLSGKLDSHIQNRKTVSIISGGNIDLSRVSQITGLVDA

SEQ ID NO: 104975 - DNA, 1230 bp, Streptomyces avermitilis MA-4680
  CDS (1)..(1230): transl_table=11
atgagctacagcacagctgactccttgcccgcggtgacgctcgacgacgtacggggcgcccagaagatgctggcgggcgtggcgcgcatgaccggcatggagggcagcaggcatctgtcccagctggtgggcgcgccggtgcacttcaagtgcgagaacctccagcggacgggttcgttcaagctgcgcggtgcgtacgtgcgaatcgcgggactgctgcccgaggagcgcgccgccggggtcgtcgccgcgagcgccgggaaccacgcacagggtgtcgccctggcgtcgtcgctgctcggcgtgcgctcgacggtgttcatgccgaaggcggccccgctgcccaagatcagcgcgacccgggagtacggcgccgaggtgcggctgcacggaacggtggtcgacgagacgctggccgccgcgcaggagtacgcggccgagacgggcgcggtgttcatccaccccttcgaccatcccgacatcatcgcaggtcagggcacggtcggcctggagatcctggagcagtgccccgaggtgcgcacgatcgtcgtcgggatcggcggcggcgggctggccgcgggcatcgcgacagccgtgaaggcgctgcgccccgatgtgcggatcgtgggcgtgcaggcggcgggcgcggccgcgtacccgccctcgctggcggccgggcgcccggtgtccgtcgagaacccggcgacgatggccgacggcatcaaggtcggccggcccggcgacgtaccgttccggatcatcggcgatctggtcgacgaggtgcggacggtgtccgagggcaacctgtccagcgcgctgctgctctgcctggagcgggccaagctggtcgtcgagccggccggcgcgagcccggtggcggcgctgctgcgggagccgggcgccttcgaggggccggtcgtcgcggtgctgtcgggcggcaatgtggaccccctgctgatgcagcggatcctgcggcacggcatggccgccgcgggccgctacctggccgtccggctgcggcttacggaccgcccgggcgccctcgcgacgctgctcggggtgctgccgacggtcgacgccaacgtcctcgacgtgagtcatgtacggaccgacccgcggctcgggctcacggaggtggaggtggagctgcacctggagaccaaggggccggaacactgcgccgaggtggagcaggcgctgcgcgaggcgggctacacggtcatcgactga

SEQ ID NO: 104976 - protein, 409 aa, Streptomyces avermitilis MA-4680
MSYSTADSLPAVTLDDVRGAQKMLAGVARMTGMEGSRHLSQLVGAPVHFKCENLQRTGSFKLRGAYVRIAGLLPEERAAGVVAASAGNHAQGVALASSLLGVRSTVFMPKAAPLPKISATREYGAEVRLHGTVVDETLAAAQEYAAETGAVFIHPFDHPDIIAGQGTVGLEILEQCPEVRTIVVGIGGGGLAAGIATAVKALRPDVRIVGVQAAGAAAYPPSLAAGRPVSVENPATMADGIKVGRPGDVPFRIIGDLVDEVRTVSEGNLSSALLLCLERAKLVVEPAGASPVAALLREPGAFEGPVVAVLSGGNVDPLLMQRILRHGMAAAGRYLAVRLRLTDRPGALATLLGVLPTVDANVLDVSHVRTDPRLGLTEVEVELHLETKGPEHCAEVEQALREAGYTVID

SEQ ID NO: 104977 - DNA, 1002 bp, Bacillus cereus ATCC 14579
  CDS (1)..(1002): transl_table=11
atgataactagaaaactaccattacatatagacgatattaaaaaagctcacaaaattctagatagaaatgctcgtaaaacgccattagtaaaatctttttacttgactagtaaaacgggtggagaaattcatttgaaattagaaaatatgcaattaacgggttcttttaaatttcgtggcgcatttaataaaatgtcgcggctcacggatcaagaaaaagaaagaggtgtaattgcatgttcagcaggtaatcatgcacaaggagttgcattatctgctcatttactcggtattaagagtaaaattgttatgccaatttctgcacctcaggcaaaagttgaagcaacaaaaggatatggatctgaagtgattttacatggtgaaacctttgatgatgcaaaggtaaaatgtgaagaaattataagggaaacaggtgaaacatacttacatccatatgatgatgtagaggtaatggctggtcaaggtacaattggattagacattcttgatgatatgtgggatgtagatactgtcattgtaccaataggtggaggcggaattatttctggtatttctgtagcattgaaatcttttaatccatccattaatataattggtgtccaagcagataatgttcatggaatgaaggcatcttacgataaaggagcaatcgtagaacactatgaggcgcctactattgcagatggttgcgcagttaaaataccaggtgaattaacatttgaaattgtaaaagaattagtagatgatattgtaactgtatcagaaaaagagctggaagtagcgatgaaagatttattacaacgtgggaaagctgttgtagaaggtgcaggtgcattagcaactgctgcacttcttgcaggaaaagttgatagttatataaaagggaaaaaagtagtggctgttatatctggtgggaacgtggacttacagcgcatatcaagtgtatgtgagcacttttttgtcgctaatgaagtgaaatag

SEQ ID NO: 104978 - protein, 333 aa, Bacillus cereus ATCC 14579
MITRKLPLHIDDIKKAHKILDRNARKTPLVKSFYLTSKTGGEIHLKLENMQLTGSFKFRGAFNKMSRLTDQEKERGVIACSAGNHAQGVALSAHLLGIKSKIVMPISAPQAKVEATKGYGSEVILHGETFDDAKVKCEEIIRETGETYLHPYDDVEVMAGQGTIGLDILDDMWDVDTVIVPIGGGGIISGISVALKSFNPSINIIGVQADNVHGMKASYDKGAIVEHYEAPTIADGCAVKIPGELTFEIVKELVDDIVTVSEKELEVAMKDLLQRGKAVVEGAGALATAALLAGKVDSYIKGKKVVAVISGGNVDLQRISSVCEHFFVANEVK

SEQ ID NO: 104979 - DNA, 1512 bp, Nitrosomonas europaea ATCC 19718; identical to SEQ ID NO: 12409
  CDS (1)..(1512): transl_table=11

SEQ ID NO: 104980 - protein, 503 aa, Nitrosomonas europaea ATCC 19718; identical to SEQ ID NO: 12410

SEQ ID NO: 104981 - DNA, 1002 bp, Bacillus anthracis str. Ames
  CDS (1)..(1002): transl_table=11
atgataactaaaaaactaccattacatatagacgatattaaaaaagctcaaagcattctggatagaaatgctcgtaaaactccattagtaaaatcattttatttgactagtaaaacgggtggagaaattcacttgaaattagaaaacatgcaattaacaggttcgtttaaattccgtggtgcgtttaataaaatgtcacagctgacagatcaagaaaaagaaagaggagtaattgcttgttctgctggtaatcatgcgcaaggaattgctttatctgctcatttacttggtattaagagtaaaattgttatgccgatttctgcaccgcaggcgaaagttgatgcgactaaaggatatggatctgaagtagttttacatggtgaaacctttgatgatgcgaaggcaaaatgtgaggagattattagggaaacaggtgaaacatacttacatccatatgacgatgtagaagtaatggcaggtcaaggtacaataggattagatattcttgatgatatgtgggatgttgatacggtcattgtaccaattggtggaggaggaattatttctggaattgctgtcgcattaaaatcttttaatccgtcgattcatataattggtgtgcaagcagaaaatgttcatgggatgaaggcatcttatgacaaaggcaaaattatagaacattatgaggcacctacgatagcagatggttgcgcggtaaaaatacctggcaatttaacttttgaagttgtaaaagaattagtagatgatattgtaacggtatcagaaaaagagctggaagtagcgatgaaagacttattacaacgcgggaaagctgttgtagaaggtgcaggcgcattagctactgctgctctacttgcagggaaagtggatacatatattaaagagaaaaaagtagtagcagttatatctggtgggaacgtagacttacagcgcatatcgagtgtttgtgaacaattttttgtggcgaatgaagtggaatag

SEQ ID NO: 104982 - protein, 333 aa, Bacillus anthracis str. Ames
MITKKLPLHIDDIKKAQSILDRNARKTPLVKSFYLTSKTGGEIHLKLENMQLTGSFKFRGAFNKMSQLTDQEKERGVIACSAGNHAQGIALSAHLLGIKSKIVMPISAPQAKVDATKGYGSEVVLHGETFDDAKAKCEEIIRETGETYLHPYDDVEVMAGQGTIGLDILDDMWDVDTVIVPIGGGGIISGIAVALKSFNPSIHIIGVQAENVHGMKASYDKGKIIEHYEAPTIADGCAVKIPGNLTFEVVKELVDDIVTVSEKELEVAMKDLLQRGKAVVEGAGALATAALLAGKVDTYIKEKKVVAVISGGNVDLQRISSVCEQFFVANEVE

SEQ ID NO: 104983 - DNA, 1227 bp, Helicobacter hepaticus ATCC 51449
  CDS (1)..(1227): transl_table=11
atgaaaaagcagatatatgaaaaagtaataaaagccaagcaacgtttagaaaatgtgattattccctcgcctttaagctatgcacctatgctctctcttttagctcaagctgatatttatcttaaaaaagagaatctgcaactgacgggagcatttaagattcgtggagcgttcaataaaattgcctctttggttgaacaatctactcattcccaaatacagggcgttatcgctgcaagtgctgggaatcacgcgcaaggtgttgcctatgctgcaaagcattttggtataaaagccgtgattgtaatgcccgaagctactcctttacttaaggtaagtgcgacaaaagctcttggtgcggaagtggttttaagtggagataattatgatgaagcctatgctaaagctttgcaggttgctaaagagcgtgatttagtgtttattcacccttttgctgacgaggaggtgattgcagggcagggcagtattgcgcttgagatgatacaagaatgtgaggatttaaatgtagtagttgtgcctattggtggaggtggtttgattagtggtatagggagtgtgtataagcaactatatccgaatgtaagagttataggtgtagtggcaagtggtgcagacgctatgaaacgctcttttgagagtggtgctatccaaaaaatagaatctgtgcggagcattgctgatggtatagctgtgcgtgatgttaatgaggagaattttgcgcttgtgcaagaatgtgttgatgaaatagtgagcgtagatgatgaagaaattgcaaatgctattttatttttgattgaaaaacaaaaacttgttgttgagggtgcaggagcagcgagtgtagcaagtattttgcacaaaaagtttgcacttacaaagcaagataaagtagcacttgtgctaagtggaggaaatattgatattactttgcttaatgttattattgaaaaaggtttattgaaatctaatcggaagatgaagcttgaagtcgtgctcatagataagcccggtagtttgcaagggctaacaaatattttaagtaaagtgggtgcaaatatcgttcagattgaatatgataggacttctgttatgcttaaatatggagatgcacttgtaacaatggcattagagacaaaaaatgaagaacacaaagtgctcattcgcgagcaacttcaacattatggttatcattttaatgagattaattag

SEQ ID NO: 104984 - protein, 408 aa, Helicobacter hepaticus ATCC 51449
MKKQIYEKVIKAKQRLENVIIPSPLSYAPMLSLLAQADIYLKKENLQLTGAFKIRGAFNKIASLVEQSTHSQIQGVIAASAGNHAQGVAYAAKHFGIKAVIVMPEATPLLKVSATKALGAEVVLSGDNYDEAYAKALQVAKERDLVFIHPFADEEVIAGQGSIALEMIQECEDLNVVVVPIGGGGLISGIGSVYKQLYPNVRVIGVVASGADAMKRSFESGAIQKIESVRSIADGIAVRDVNEENFALVQECVDEIVSVDDEEIANAILFLIEKQKLVVEGAGAASVASILHKKFALTKQDKVALVLSGGNIDITLLNVIIEKGLLKSNRKMKLEVVLIDKPGSLQGLTNILSKVGANIVQIEYDRTSVMLKYGDALVTMALETKNEEHKVLIREQLQHYGYHFNEIN

SEQ ID NO: 104985 - DNA, 1248 bp, Rhodopirellula baltica SH 1; identical to SEQ ID NO: 12413
  CDS (1)..(1248): transl_table=11

SEQ ID NO: 104986 - protein, 415 aa, Rhodopirellula baltica SH 1; identical to SEQ ID NO: 12414

SEQ ID NO: 104987 - DNA, 1545 bp, Candidatus Blochmannia floridanus; identical to SEQ ID NO: 12417
  CDS (1)..(1545): transl_table=11

SEQ ID NO: 104988 - protein, 514 aa, Candidatus Blochmannia floridanus; identical to SEQ ID NO: 12418

SEQ ID NO: 104989 - DNA, 1218 bp, Bordetella parapertussis 12822
  CDS (1)..(1218): transl_table=11
gtgatcgatcttgccgccatccagaccgcccgggacatcctgcggggacaggtcctcaatacgccgttcacgcattcccgcacgctgtccgatatcctcggcgccgaaatctggctgaagttcgagaacctgcagttcaccgcctcgttcaaggagcgcggcgccctcaaccggatgctcaacctgaccgaggccgagcgcgccgccggcgtgatcgccgtgtcggccggcaaccatgcccagggcgtggcgtaccacgcgcagcgcatgggcgtgccggcggtgatcgtcatgccgcgcttcactcccacggtcaaggtggccaacacgcggcgcttcggcgccgaagtcgtcctggccggcgacaccttcgacgacgccaaggcgcgcggctacgaactggcgcgcgagcgcggcctggtcatgatccatccctacgacgatccagccgtgattgccgggcagggtacggtggcgctcgaaatgctgcaggcgcgcccagacctggacgccatcgtggtgggcatcggcggcggcggcctgatcgcgggcatcgccaccgccgccaaggccatcaagccggacatcgagatcatcggcgtgcagaccgagcgctttccgtccatgtacgccgccgtcaagggcgtggccatggaaagcggccactacacgatcgccgagggcatcgccgtcaagtcacccggcacgctgacccaggagatcgtcacgcgcctggtcgaccacatcgagctggtcaacgaaagcgatatcgagcatgccatcgtggtcctgctggaaatcgagaagaccgtggtcgaaggggccggcgcggccggcctggcggcgctgctgcggctgcaggaacgccgcgacgagcggttccgcggcaagcggctggggctggtgctcacgggcggcaacatcgatcccctgatgctgggcgagctgatcgagcgcggtatggtgcgcgccgggcgcctggcgcgcatccgggtcgacctgcgcgacctgccgggcgcgctggcgcaggccaccaagctgatcgccgacgcgcacgccaacattaccgaggtgcatcaccagcgcgccttcaccaccttgccagtgcgcaatgtcgaggtcgatttcgtgctgcagacgcgtggccatgaccacatccaggaagtcatcgcggtgctcaatgccgcgggcttcgcggccagcaaccacgatcactga

SEQ ID NO: 104990 - protein, 405 aa, Bordetella parapertussis 12822
MIDLAAIQTARDILRGQVLNTPFTHSRTLSDILGAEIWLKFENLQFTASFKERGALNRMLNLTEAERAAGVIAVSAGNHAQGVAYHAQRMGVPAVIVMPRFTPTVKVANTRRFGAEVVLAGDTFDDAKARGYELARERGLVMIHPYDDPAVIAGQGTVALEMLQARPDLDAIVVGIGGGGLIAGIATAAKAIKPDIEIIGVQTERFPSMYAAVKGVAMESGHYTIAEGIAVKSPGTLTQEIVTRLVDHIELVNESDIEHAIVVLLEIEKTVVEGAGAAGLAALLRLQERRDERFRGKRLGLVLTGGNIDPLMLGELIERGMVRAGRLARIRVDLRDLPGALAQATKLIADAHANITEVHHQRAFTTLPVRNVEVDFVLQTRGHDHIQEVIAVLNAAGFAASNHDH

SEQ ID NO: 104991 - DNA, 1218 bp, Bordetella bronchiseptica RB50
  CDS (1)..(1218): transl_table=11
gtgatcgatcttgccgccatccagaccgcccgggacatcctgcggggacaggtcctcaatacgccgttcacgcattcccgcacgctgtccgatatcctcggcgccgaaatctggctgaagttcgagaacctgcagttcaccgcctcgttcaaggagcgcggcgccctcaaccggatgctcaacctgaccgaggccgagcgcgccgccggcgtgatcgccgtgtcggccggcaaccatgcccagggcgtggcgtaccacgcgcagcgcatgggcgtgccggcggtgatcgtcatgccgcgcttcactcccacggtcaaggtggccaacacgcggcgcttcggcgccgaagtcgtcctggccggcgacaccttcgacgacgccaaggcgcgcggctacgaactggcgcgcgagcgcggcctggtcatgatccatccctacgacgatccagccgtgattgccgggcagggtacggtggcgctcgaaatgctgcaggcgcgcccagacctggacgccatcgtggtgggcatcggcggcggcggcctgatcgcgggcatcgccaccgccgccaaggccatcaagccggacatcgagatcatcggcgtgcagaccgagcgctttccgtccatgtacgccgccgtcaagggcgtggccatggaaagcggccactacacgatcgccgagggcatcgccgtcaagtcacccggcacgctgacccaggagatcgtcacgcgcctggtcgaacacatcgagctggtcaacgaaagcgatatcgagcatgccatcgtggtcctgctggaaatcgagaagaccgtggtcgaaggggccggcgcggccggcctggcggcgctgctgcggctgcaggaacgccgcgacgagcggttccgcggcaagcggctggggctggtgctcacgggcggcaacatcgatcccctgatgctgggcgagctgatcgagcgcggtatggtgcgcgccgggcgcctggcgcgcatccgggtcgacctgcgcgacctgccgggcgcgctggcgcaggccaccaagctgatcgccgacgcgcacgccaacattaccgaggtgcatcaccagcgcgccttcaccaccttgccagtgcgcaatgtcgaggtcgatttcgtgctgcagacgcgtggccatgaccacatccaggaagtcatcgcggtgctcaatgccgcgggcttcgcggccagcaaccacgatcactga

SEQ ID NO: 104992 - protein, 405 aa, Bordetella bronchiseptica RB50
MIDLAAIQTARDILRGQVLNTPFTHSRTLSDILGAEIWLKFENLQFTASFKERGALNRMLNLTEAERAAGVIAVSAGNHAQGVAYHAQRMGVPAVIVMPRFTPTVKVANTRRFGAEVVLAGDTFDDAKARGYELARERGLVMIHPYDDPAVIAGQGTVALEMLQARPDLDAIVVGIGGGGLIAGIATAAKAIKPDIEIIGVQTERFPSMYAAVKGVAMESGHYTIAEGIAVKSPGTLTQEIVTRLVEHIELVNESDIEHAIVVLLEIEKTVVEGAGAAGLAALLRLQERRDERFRGKRLGLVLTGGNIDPLMLGELIERGMVRAGRLARIRVDLRDLPGALAQATKLIADAHANITEVHHQRAFTTLPVRNVEVDFVLQTRGHDHIQEVIAVLNAAGFAASNHDH

SEQ ID NO: 104993 - DNA, 1545 bp, Prochlorococcus marinus str. MIT 9313; identical to SEQ ID NO: 12427
  CDS (1)..(1545): transl_table=11

SEQ ID NO: 104994 - protein, 514 aa, Prochlorococcus marinus str. MIT 9313; identical to SEQ ID NO: 12428

SEQ ID NO: 104995 - DNA, 1530 bp, Chromobacterium violaceum ATCC 12472; identical to SEQ ID NO: 12431
  CDS (1)..(1530): transl_table=11

SEQ ID NO: 104996 - protein, 509 aa, Chromobacterium violaceum ATCC 12472; identical to SEQ ID NO: 12432

SEQ ID NO: 104997 - DNA, 1212 bp, Wolinella succinogenes DSM 1740; identical to SEQ ID NO: 12433
  CDS (1)..(1212): transl_table=11

SEQ ID NO: 104998 - protein, 403 aa, Wolinella succinogenes DSM 1740; identical to SEQ ID NO: 12434

SEQ ID NO: 104999 - DNA, 996 bp, Gloeobacter violaceus PCC 7421
  CDS (1)..(996): transl_table=11
atgtcctcatccgcccccactttgccggtgagtttcggcgatatccaggcggctgctgaccgtttgaggggagtcgctcaccgcacgccggttctgacttcgcgtacggtggacgacctgactggagcgcaggtcttcttcaagtgcgaaaatttccaacgcatgggggcgttcaagttccggggagcctacaatgccctctcgcaactggacaaagcgcaaaggcggcgcggggtgctcgcctactcctccggcaaccacgcccaggcgattgccctggcgggacaaatcctggagattccaacgacgatcgtgatgcccagcgacgctccggcggtcaagcggcgtgccaccgaaggttacggcggcgaggtgatcctttacgagcggtctgaaaccacccgcgaagccctcgccgaccaactggcgcgcgaacggggactggcggtgatcccgccctttgaccacccccaggtggtagcagggcagggaaccgccggattggaacttttcgagcaggtgggggcgctcgatgtgctcgtcgtctgctgcggcgggggcggcttgctctcaggatgcgccatcgccgcggcggccgtgagccccggttgtcaggtagtcggggtcgaacccgcgcaggcggacgatgcgatgcgctcgttttatacgggcgtcctgcacacagtccacaaccccgccacgatcgccgatggggcgcgcactccatcgctgggagccgtcacctttccactggtgcgccactacgttcatcagatggtgaccgtggaggaggaagcgatcgtgcgggcgatgctgtttttgtgggagcggctcaagatcgtcgtggagcccaccggtgcccttggggcggcagcccttttcgaaggccgggtgcaggcagcggacaggcgcgttggagtcattattagcggtggcaacgtcgatttgcagcttctccatgaattcatacgcgatatcgataaggggtacagttaa

SEQ ID NO: 105000 - protein, 331 aa, Gloeobacter violaceus PCC 7421
MSSSAPTLPVSFGDIQAAADRLRGVAHRTPVLTSRTVDDLTGAQVFFKCENFQRMGAFKFRGAYNALSQLDKAQRRRGVLAYSSGNHAQAIALAGQILEIPTTIVMPSDAPAVKRRATEGYGGEVILYERSETTREALADQLARERGLAVIPPFDHPQVVAGQGTAGLELFEQVGALDVLVVCCGGGGLLSGCAIAAAAVSPGCQVVGVEPAQADDAMRSFYTGVLHTVHNPATIADGARTPSLGAVTFPLVRHYVHQMVTVEEEAIVRAMLFLWERLKIVVEPTGALGAAALFEGRVQAADRRVGVIISGGNVDLQLLHEFIRDIDKGYS

SEQ ID NO: 105001 - DNA, 969 bp, Photorhabdus luminescens subsp. laumondii TTO1
  CDS (1)..(969): transl_table=11
atgaaaaatatttctgtttatgatgatgtcattgccgccgcccggcgaatagaagcttatgcttaccgtacgccagtcctgacttcccgcactgctaatgaaatgacaggagccaggttatttttcaaatgtgaaaattatcagcgaatgggagcctttaaatttcgtggtgcttttaatgcgttatcacaatttaatgatgaacagcgccgcaatggggttgtcacttattcatcgggtaatcatgctcaggcaatttcattggcggctcgtatactgaatatttcggcgacaatcatcatgccgttcgatgcgccagtggctaaggtcgccgcgaccgaaggttatggtggcaaaattgttttctatgatcgttatacggacgatcgtgaacaaattagccgtgaattatcagaaaagcagggattgaccttaattcctccctatgatcatccgcatattattgccggacagggaactgcggcaaaagagttgtttgaagaggtcggtgaactgaatgcgttgtttgtctgtctcggtggaggagggctgctttcaggcagtgcgcttgcagctcgccatttctctcctgaatgtaaaatttatggtgtagaaccggaaaccggtaatgacgctcagcaatcatttcgtcagggcaaaattattcacatcgatacgcctaaaactattgctgatggcgcacaaactcaacatcttgggcaatatactttcgatattattcgaaaaaatgttgatgatattttcactgtttctgatgaagaattggtggatgcaatgcgattttatgcagaaagaatgaagatgattgtcgaaccgaccggctgcttgagttttgccgctgcccgcaaaatgtgtgagtcattgcgaggccaaaaggtagggattattgtcagtggcggtaatgtggatatcgaacgttactgctcgttgctggcaaaacaaccttag

SEQ ID NO: 105002 - protein, 322 aa, Photorhabdus luminescens subsp. laumondii TTO1
MKNISVYDDVIAAARRIEAYAYRTPVLTSRTANEMTGARLFFKCENYQRMGAFKFRGAFNALSQFNDEQRRNGVVTYSSGNHAQAISLAARILNISATIIMPFDAPVAKVAATEGYGGKIVFYDRYTDDREQISRELSEKQGLTLIPPYDHPHIIAGQGTAAKELFEEVGELNALFVCLGGGGLLSGSALAARHFSPECKIYGVEPETGNDAQQSFRQGKIIHIDTPKTIADGAQTQHLGQYTFDIIRKNVDDIFTVSDEELVDAMRFYAERMKMIVEPTGCLSFAAARKMCESLRGQKVGIIVSGGNVDIERYCSLLAKQP

SEQ ID NO: 105003 - DNA, 996 bp, Rhodopseudomonas palustris CGA009
  CDS (1)..(996): transl_table=11
atgccggccatgacccattccgctgtgctgcccgtttccgtcgccgatatcgatgcggctgccgaggtgctcgcgcccgtcgcggtgcggacgccgctgctgtcgtcgccggcgctcgatgccgccaccggcgcgcgcgttttccttaaaccggaagtcttgcagcgcaccggctcgttcaagtttcgcggcgcctacaacaaactggcgtcgctgtcgccggagctacggcgtgccggcgtggtcggattcagctccggcaatcacgcccagggcgtcgccgcggcggcgcagctgctcggcgtccacgccaccatcgtgatgccgtcggatgcgcctgcctcgaagcgcgaacgcaccgccggctttggcgccgaggtggtgctgtatgatcgcgaccgcgaggatcgcgaagcgatcgctcgcgacattgccgagcgcagcggcgcgacgttggtgcggccgttcgacgatccgatggtgatcgccgggcagggcacggtcggccgcgagatcgccgaggaccttgctgcgctggggctcgcgccggatctggtggtggcgccggcctccggcggcgggctgatcgccggcacagcgcttgccgtcaaggcgcggtttccccaggcgctggcgatgtcggctgagccggagggcttcgacgaccacgcccgctcgctggtggcgggacgccgcgagtccaatccggccggcggacgcacgatctgcgatgcgttgatgatgtcgatcccgggcgaggtcaccttcgcgatcaatcgcgtgctgctcgccggcggcgtggccgcgtccgatgccgaggtcggcactgcggtcggcttcgcattccgcgagctgaagctggtggtggagccgggcggagcggtggcgctcgcggcattgctcgccggcaagctcgacgtccgcggcaagaccgtcgcgatcgtgctgtcgggcggcaatgtcgatgctgacctgttcagccgcctgatcgcctga

SEQ ID NO: 105004 - protein, 331 aa, Rhodopseudomonas palustris CGA009
MPAMTHSAVLPVSVADIDAAAEVLAPVAVRTPLLSSPALDAATGARVFLKPEVLQRTGSFKFRGAYNKLASLSPELRRAGVVGFSSGNHAQGVAAAAQLLGVHATIVMPSDAPASKRERTAGFGAEVVLYDRDREDREAIARDIAERSGATLVRPFDDPMVIAGQGTVGREIAEDLAALGLAPDLVVAPASGGGLIAGTALAVKARFPQALAMSAEPEGFDDHARSLVAGRRESNPAGGRTICDALMMSIPGEVTFAINRVLLAGGVAASDAEVGTAVGFAFRELKLVVEPGGAVALAALLAGKLDVRGKTVAIVLSGGNVDADLFSRLIA

SEQ ID NO: 105005 - DNA, 1209 bp, Geobacter sulfurreducens PCA
  CDS (1)..(1209): transl_table=11
atgctcccctacacactgattcaggaagccgacgaccgactcaggaagcgggttcgtcgcaccgagctcatccactcccatcacttcagcgagaaactgggaatcccgatctatttcaagtgcgagaacctccagcgcaccggtgcgttcaagatccgaggcgccctgaacttcatgacgtcgcagccgcgggaggcactggcaaagggtgtcattaccgcttctgccggtaaccatgcccaaggagtcgcgttctcggccgacctgctgggagtgccgtccacggtgttcatgccggaaagcacgccgccgcagaaggtctttgccacccgtgactacggcgccgaggtggtactcaccggccgcaacttcgacgaggcatacgctgcagcggtccaggcgcaggaggaacggggcgccctcttcgtccacccctttgacgacccgctcgtgatggccgggcaaggcaccatcggcctggaagttctccaggagcttcccgatgtagccaatatcctcgtccccatcggcggcggcggtctcatcgcgggcatcgccacggccatcagagaaacccacccccacgtgcggatcatcggcgttgaaacagcggcggccccatccgcccactattcgctgcaaaaggggaagatcgtccaggtccccgtgacggtcacccttgccgacggcatcgcggtcaagaagccaggggtgaacacctttcccatcatcagggacttggtggacgaggtggtcttggtggaagaagaggagatcgcccttgccatcgtggcgctgctggagcgaaccaagctcttggtcgagggggccggggccgttccgttggccgcgcttctcaaccggcgggtgactgatctttcgggaaaaacggtctgcgtgctgtcgggcgggaatatcgacgtgaagaccatctcagtagtggtggaacggggtctggtggctgccgggcgctacctgaagctgaaggtggagctggacgatctccccggtgccctggcgcgacttgcgacggaaattgccgaggctaaagccaacatctccatcatcacccatgaccggcgctcgaaatcgctccccatcggcaagaccgaggtcctcatcgagctggagacccgggggttcgagcacattcaggaggttatctctcacctgcagggggtggggtatctggtggatgtgctgaaataa

SEQ ID NO: 105006 - protein, 402 aa, Geobacter sulfurreducens PCA
MLPYTLIQEADDRLRKRVRRTELIHSHHFSEKLGIPIYFKCENLQRTGAFKIRGALNFMTSQPREALAKGVITASAGNHAQGVAFSADLLGVPSTVFMPESTPPQKVFATRDYGAEVVLTGRNFDEAYAAAVQAQEERGALFVHPFDDPLVMAGQGTIGLEVLQELPDVANILVPIGGGGLIAGIATAIRETHPHVRIIGVETAAAPSAHYSLQKGKIVQVPVTVTLADGIAVKKPGVNTFPIIRDLVDEVVLVEEEEIALAIVALLERTKLLVEGAGAVPLAALLNRRVTDLSGKTVCVLSGGNIDVKTISVVVERGLVAAGRYLKLKVELDDLPGALARLATEIAEAKANISIITHDRRSKSLPIGKTEVLIELETRGFEHIQEVISHLQGVGYLVDVLK

SEQ ID NO: 105007 - DNA, 1212 bp, Bdellovibrio bacteriovorus HD100
  CDS (1)..(1212): transl_table=11
atgaaagtcagctttgcagacatccaaaaagcccgtgaacttctgaaagacatcatctgtccaaccgagatgagtcattccatcagcgccagcaacctgcttaaaagcgaagtgtacctgaagtttgaaaacactcagcgcacgggaagttttaaattccgcggggcctataacaaaatctccaatctgacagccgacgaaaaagcccgcggtgtggtcgccagctctgccggaaatcacgcgcaaggtgtcgccctgtcagcgaaactggccggagtcaaatccaccatcgtgatgccggagacagcctcgatcagcaaagcttccgcgacccgtgattacggcgccaacgtcgtgcttaaaggcgagatctacgacgaggctttcgaacatgcccagaaactggaaaaagaacacggctacaccttcgtgcacccttatcaggacccttatgtgatcgctggccagggaaccatcgggatcgagatcctggaaaaggttccagacctggatacggtgattgtgcccatcgggggtggcggtctgatcagtggtgtggcgttggcggtgaaggccatcaatccaaagatccgcgtgatcggtgtgcaaagcgaccgctctccgggaatggcgcatctttataacaaacagcctttgtcccagatcaaacgtgccgccacgattgctgacggcattgcgatcaaaaacccttcccaggtgatgctggacagtttcatttccaagtatgtcgatcaggtggtgacagtcagtgatgacgagatcgctgaagcgattgtgttcctgatggaaagagccaaaaccgtagctgaaggctctggcgcagcggcgatggcagctgcgatgtcccgcggactggatctgggtaaaaagacctgtgtgattatcagcggtggaaatatcgatctgaacatcgtttcaaagatcatcgaccgtggtcagattctgcgcggacgcctgtgtgagttgtccgtgattgtggatgaccttccggggaatttgagccgtttgactcaggcaattgcctctcaaaaagccaacatcctggaagtgcgtcacgaccgtgtgtcgaaggggctttcactgcgtgaaacccgcatcgacttcgttctagagactacgagcattgaacatgttgaacggattaagcgggctcttgaggaaactggagccaaggttatccaaagcacctaa

SEQ ID NO: 105008 - protein, 403 aa, Bdellovibrio bacteriovorus HD100
MKVSFADIQKARELLKDIICPTEMSHSISASNLLKSEVYLKFENTQRTGSFKFRGAYNKISNLTADEKARGVVASSAGNHAQGVALSAKLAGVKSTIVMPETASISKASATRDYGANVVLKGEIYDEAFEHAQKLEKEHGYTFVHPYQDPYVIAGQGTIGIEILEKVPDLDTVIVPIGGGGLISGVALAVKAINPKIRVIGVQSDRSPGMAHLYNKQPLSQIKRAATIADGIAIKNPSQVMLDSFISKYVDQVVTVSDDEIAEAIVFLMERAKTVAEGSGAAAMAAAMSRGLDLGKKTCVIISGGNIDLNIVSKIIDRGQILRGRLCELSVIVDDLPGNLSRLTQAIASQKANILEVRHDRVSKGLSLRETRIDFVLETTSIEHVERIKRALEETGAKVIQST

SEQ ID NO: 105009 - DNA, 1227 bp, Mycoplasma mycoides subsp. mycoides SC str. PG1; identical to SEQ ID NO: 12441
  CDS (1)..(1227): transl_table=4

SEQ ID NO: 105010 - protein, 408 aa, Mycoplasma mycoides subsp. mycoides SC str. PG1; identical to SEQ ID NO: 12442

SEQ ID NO: 105011 - DNA, 1002 bp, Bacillus cereus ATCC 10987
  CDS (1)..(1002): transl_table=11
atgataactaaaaaactaccattacatatagacgatattaaaaaagcgcaaaacattctggatagaaatgctcgtaaaactccattagtaaaatcattttacttgactagtaaaacaggcggagaaattcacttgaaattagaaaatatgcaattaacaggttcgtttaaattccgtggtgcgtttaacaaaatgtcacagctgacagatcaagaaaaagagaggggagtaattgcttgttctgctggtaatcatgcgcaaggaattgctttatcagctcatttactcggtattaaaagtaaaattattatgccaatttctgcacctcaggcgaaagttgaagcaacaaaaggatatggatctgaagtgattttacatggtgaaacctttgatgatgcaaaggcaaaatgtgaagagataataagagaaacaggtgaaacatatttacatccatatgatgatgtagaggtaatggctggtcaaggtacaattggattagacattcttgatgatatgtgggatgtagatactgtcattgtaccaataggtggaggcggaattatttctggtattgctgtagcattgaaatcttttaatccatcaatcaatataattggtgtacaagcagaaaatgttcatgggatgaaggcttcttatgacaaaggtacgattgtagagcattatgaggcacctacaatagcagatggttgcgcagttaaaatacctggtaacttaacttttgaagtagtaaaagaattagtagatgatattgtaacagtatcagaaggtgaattagaagtagcgatgaaagacttattacaacgtggtaaagctgttgtagaaggggctggcgcattagctactgctgctctacttgcagggaaagttgatagttatataaaagggaaaaaagtagtagctgttatatctggtgggaacgtggacttacagcgcatatcaagtgtatgtgagcacttttttgtcgctaatgaagtgaaatag

SEQ ID NO: 105012 - protein, 333 aa, Bacillus cereus ATCC 10987
MITKKLPLHIDDIKKAQNILDRNARKTPLVKSFYLTSKTGGEIHLKLENMQLTGSFKFRGAFNKMSQLTDQEKERGVIACSAGNHAQGIALSAHLLGIKSKIIMPISAPQAKVEATKGYGSEVILHGETFDDAKAKCEEIIRETGETYLHPYDDVEVMAGQGTIGLDILDDMWDVDTVIVPIGGGGIISGIAVALKSFNPSINIIGVQAENVHGMKASYDKGTIVEHYEAPTIADGCAVKIPGNLTFEVVKELVDDIVTVSEGELEVAMKDLLQRGKAVVEGAGALATAALLAGKVDSYIKGKKVVAVISGGNVDLQRISSVCEHFFVANEVK

SEQ ID NO: 105013 - DNA, 990 bp, Yersinia pestis biovar Microtus str. 91001
  CDS (1)..(990): transl_table=11
ttgaaaataaaatttaaaggaatcgagatgaatacgttgtttgatgccatcagagaggcccaccagatattacgcccacaagtgagagtcacgccgttggagcatagcccactgctatctcaacacagcggttgtgagatctatcttaaatgtgagcacctgcagcacaccggttcttttaaatttcgtggggccagtaacaagttacgtttactcaatgaggcacaacgccagcaaggtgtgatcaccgcctccaccggtaaccatgggcaaggtgtggcgctggccgcaaaactggcggggattaaatccactatttacgccccagaacaggcggcagccatcaagctggatgtgatccgtgcactgggggggcaaattgaattagtctccggagatgccttaaatgctgaactggccgccggtatcgccgctgagcaacaaggtaaagtgtatatctcaccgtataacgacccgcaggtcattgccgggcaaggcacctgtggcatggagatggtcgaacagcagcccgatcttgatgcggtgtttgttgccgttggtggtggtggcctgatttcaggtattgcgaccgtattgaaaacattatcggataaaacgcaggtgattggttgctggccagccaatgccaccagcctgtatacctgtctggagaaaggacagattcaggaggtggcagagcaagaaacgctgtctgacggaaccgccggtggtatcgaaccgggagcgatcacctttgcactgtgccaacagttaatcgatcagaaggtgctggtgagtgagcaagaaatcaaagaggccatgggtttgattgcccgtactgaccgctggatgattgaaggtgccgccggtgtggcactggctgcggcactgaaattggctccgcaatggcaaggtaagaaagtggcggtggtgttgtgcggtaaaaatatcgtgctggagaaatatctgggagctgtcagcggatgctaa

SEQ ID NO: 105014 - protein, 329 aa, Yersinia pestis biovar Microtus str. 91001
MKIKFKGIEMNTLFDAIREAHQILRPQVRVTPLEHSPLLSQHSGCEIYLKCEHLQHTGSFKFRGASNKLRLLNEAQRQQGVITASTGNHGQGVALAAKLAGIKSTIYAPEQAAAIKLDVIRALGGQIELVSGDALNAELAAGIAAEQQGKVYISPYNDPQVIAGQGTCGMEMVEQQPDLDAVFVAVGGGGLISGIATVLKTLSDKTQVIGCWPANATSLYTCLEKGQIQEVAEQETLSDGTAGGIEPGAITFALCQQLIDQKVLVSEQEIKEAMGLIARTDRWMIEGAAGVALAAALKLAPQWQGKKVAVVLCGKNIVLEKYLGAVSGC

SEQ ID NO: 105015 - DNA, 1332 bp, Strongylocentrotus purpuratus
  CDS (1)..(1332)
atgccctcagagcttcctaaggatcagggacagatttctgaagacgagggtgtagccatggaagctcacaagcagaccttgatcaacggacacgaccagtgcgatagccccaccttggaagaggatgctgacatcaacatcgatgagatcggagaggagtaccaacacgacccccattgcgaccccgacaaccccatccaggtcaaattccaggatgtcagcgcggcggcttacaagatcaaaagcggtgtgttgcgatcgccatgttcgaaatctaacctgtcaggattggtaggaatggatttatacttgaagaaagattacttacagactacaggaagtttcaaagagagaggagctcgtaacacacttctaatgctaccagaggagtacaagcagagaggggtgatagcagcatcggcaggtaaccacgccctagcgatggcctaccacgggagacagctgggtatccctatctttgtggtgatgcctaagattgctcctatcatgaaagtgaatcgatgcaagcagcacggagctaccatcctcatcaagggagaggacatcggagagtctaagaagctggctatgtacttggcaaagaagcgggggtacttctacgtcaatggatatgaccatccacacatcatctcaggccaaggcactatgggactagagatccttgaacaggtacctgacgtggatgcagttgtctgtcctgttggaggggcggggcttattgccggcctagcgctcgctatcaagagtcttaacccttctgttcaaatcattggcgtagagacggaccagactcagagcttcacagctgccctcgaggcaggcagaccaacctatttcaaagtaggaccaacactggctgacggtttggcagtaccagttgttggagtcaactcatttgccacatgccacaaactcattgacagaatggtgacagtcacggaggacagcattgccttagccatccttagattgattgagatagagaaggctgtagtagaaggagcgggggctacaggtttagcagccatcctcagcgggcatctccctgagctagcaggcaaaagagttgtggtgccgatgtgcgggggtaacattgataccaccgttctagggcgtgtcttggagaggggtctggctgtggacaatcgtatgatccggttcatcgtgacggtcagtgaccggccgggaggcatcgcagagctcacccagaaacttcttaggttgggagtcagtatcaaggacattttccacgagagagctttcctgaaaagtgcaatatttcaagttcagtcacactataaagatatgtag

SEQ ID NO: 105016 - protein, 443 aa, Strongylocentrotus purpuratus
MPSELPKDQGQISEDEGVAMEAHKQTLINGHDQCDSPTLEEDADINIDEIGEEYQHDPHCDPDNPIQVKFQDVSAAAYKIKSGVLRSPCSKSNLSGLVGMDLYLKKDYLQTTGSFKERGARNTLLMLPEEYKQRGVIAASAGNHALAMAYHGRQLGIPIFVVMPKIAPIMKVNRCKQHGATILIKGEDIGESKKLAMYLAKKRGYFYVNGYDHPHIISGQGTMGLEILEQVPDVDAVVCPVGGAGLIAGLALAIKSLNPSVQIIGVETDQTQSFTAALEAGRPTYFKVGPTLADGLAVPVVGVNSFATCHKLIDRMVTVTEDSIALAILRLIEIEKAVVEGAGATGLAAILSGHLPELAGKRVVVPMCGGNIDTTVLGRVLERGLAVDNRMIRFIVTVSDRPGGIAELTQKLLRLGVSIKDIFHERAFLKSAIFQVQSHYKDM

SEQ ID NO: 105017 - DNA, 1857 bp, Magnaporthe grisea 70-15; identical to SEQ ID NO: 12443
  CDS (1)..(1857)

SEQ ID NO: 105018 - protein, 618 aa, Magnaporthe grisea 70-15; identical to SEQ ID NO: 12444

SEQ ID NO: 105019 - DNA, 1746 bp, Gibberella zeae PH-1; identical to SEQ ID NO: 12445
  CDS (1)..(1746)

SEQ ID NO: 105020 - protein, 581 aa, Gibberella zeae PH-1; identical to SEQ ID NO: 12446

SEQ ID NO: 105021 - DNA, 1716 bp, Candida glabrata CBS 138; identical to SEQ ID NO: 12447
  CDS (1)..(1716)

SEQ ID NO: 105022 - protein, 571 aa, Candida glabrata CBS 138; identical to SEQ ID NO: 12448

SEQ ID NO: 105023 - DNA, 1704 bp, Kluyveromyces lactis NRRL Y-1140; identical to SEQ ID NO: 12449
  CDS (1)..(1704)

SEQ ID NO: 105024 - protein, 567 aa, Kluyveromyces lactis NRRL Y-1140; identical to SEQ ID NO: 12450

SEQ ID NO: 105025 - DNA, 1719 bp, Debaryomyces hansenii CBS767; identical to SEQ ID NO: 12451
  CDS (1)..(1719)

SEQ ID NO: 105026 - protein, 572 aa, Debaryomyces hansenii CBS767; identical to SEQ ID NO: 12452

SEQ ID NO: 105027 - DNA, 972 bp, Yarrowia lipolytica CLIB122
  CDS (1)..(972)
atgactggcgaaggaatcacctacaaggatgtcaagcacgcacacaagcgactcgacaaggtcgccgtcaagacacccgtgctgtcgatccagctcgacgacactcaatactttctcaagtgcgagaatatccagcgaaccggagccttcaagttccgtggagcctacaatgccttgtcgcagttctcgtccaagcaaaaggccggtggagtactaacgtactcatctggtaaccatgctcaggccattgcccatgctgctgccatgctcggaatcaaggccaccatcatcatgcccacggatgcccctaaaagcaagttgcaaggtaccaaggacctgggggctacaattgtgccctacgacagatacaaacaggaccgtgacgaggtagccaatgcaattctcacggaacatcccgaaatgacgctcattcctccatatgatcatcccgacatcatcgcaggacaaggtacagtggtcaaggagctgctagaggaaacaggacctctggacgatatctttgtgccgctgggtggaggaggactgctggcaggctcccttctggcagcagaaaaactcgctccaaagtgtaaggtgtggggtgtggagcccgagacaggaaacgacggtaagctgtcacttcaaagaggccaaatcgtgcatattgacaccccggtgacgattgccgacggtgctcagacccagcatctgggagaactcaccttccccatcattcagagacttgtcacggatatcaagacggtcaacgagggagagatgattgctatgacgcaatggtacgcccgaaagatgaagctggtggtggagccaactggatgcatggctttggcagcggcgttctcgtgctgtggaggcacccacaagaagcgagtgggagtcatcatcagtggaggaaacgtggatctcgataagtatgccacctatctaaccactccggtcgttcagcattga

SEQ ID NO: 105028 - protein, 323 aa, Yarrowia lipolytica CLIB122
MTGEGITYKDVKHAHKRLDKVAVKTPVLSIQLDDTQYFLKCENIQRTGAFKFRGAYNALSQFSSKQKAGGVLTYSSGNHAQAIAHAAAMLGIKATIIMPTDAPKSKLQGTKDLGATIVPYDRYKQDRDEVANAILTEHPEMTLIPPYDHPDIIAGQGTVVKELLEETGPLDDIFVPLGGGGLLAGSLLAAEKLAPKCKVWGVEPETGNDGKLSLQRGQIVHIDTPVTIADGAQTQHLGELTFPIIQRLVTDIKTVNEGEMIAMTQWYARKMKLVVEPTGCMALAAAFSCCGGTHKKRVGVIISGGNVDLDKYATYLTTPVVQH

SEQ ID NO: 105029 - DNA, 1590 bp, Yarrowia lipolytica CLIB122; identical to SEQ ID NO: 12453
  CDS (1)..(1590)

SEQ ID NO: 105030 - protein, 529 aa, Yarrowia lipolytica CLIB122; identical to SEQ ID NO: 12454

SEQ ID NO: 105031 - DNA, 1395 bp, Apis mellifera; identical to SEQ ID NO: 12455
  CDS (1)..(1395)

SEQ ID NO: 105032 - protein, 464 aa, Apis mellifera; identical to SEQ ID NO: 12456

SEQ ID NO: 105033 - DNA, 1764 bp, Aspergillus nidulans FGSC A4; identical to SEQ ID NO: 12457
  CDS (1)..(1764)

SEQ ID NO: 105034 - protein, 587 aa, Aspergillus nidulans FGSC A4; identical to SEQ ID NO: 12458

SEQ ID NO: 105035 - DNA, 1710 bp, Candida albicans SC5314; identical to SEQ ID NO: 12459
  CDS (1)..(1710): transl_table=12

SEQ ID NO: 105036 - protein, 569 aa, Candida albicans SC5314; identical to SEQ ID NO: 12460

SEQ ID NO: 105037 - DNA, 2019 bp, Ustilago maydis 521; identical to SEQ ID NO: 12461
  CDS (1)..(2019)

SEQ ID NO: 105038 - protein, 672 aa, Ustilago maydis 521; identical to SEQ ID NO: 12462

SEQ ID NO: 105039 - DNA, 1779 bp, Cryptococcus neoformans var. neoformans B-3501A; identical to SEQ ID NO: 12647
  CDS (1)..(1779)

SEQ ID NO: 105040 - protein, 592 aa, Cryptococcus neoformans var. neoformans B-3501A; identical to SEQ ID NO: 12648

SEQ ID NO: 105041 - DNA, 960 bp, Strongylocentrotus purpuratus
  CDS (1)..(960)
atgttatttgacaggatcctgagtgcctcaaaaagagtggcaaactatatcggaccaactccagtttttacaagtggcacggtcgacaaactgactggaaggaatgtgtttttcaaggctgaaaacctccagaaaactggctctttcaagattcgaggagctctaaatgctattattttattgaaagagaataaagtgcagacaaatggtgtggtgacccacagcacaggtaaccatggctcagggctggcctgcgccgcccagatggtcggggtaccctgcacggtagtggtaccccacaccacggcctcggtcaagatagatgccatcaggtggtatggagccgacgtggtcttctgtgaaccaacccaacaatccaggaaggaaacatgtgagcgtgtttcaacagaacagaacctgtcgtttgtccctgcgtatgacgactacgatgtcatggcaggtcaggggactattggtgttgagatgtgtgaacagatcccagaccttgatgccgttctagtcatgaccagtggtggaggtctcatagctggtatagctacggctatcaagggtattaagccaaatgtcaaagtgtatgctgttgaacccgagggaaaagatctccaaagatcgcttgaatcaggagagagaatgtgggttggtccacctaggaccctggacacggtggctgatgcgaccccaactcagcaggttggacagctcacctggcctatcgtcagagaccttgttgagaaacaagtgtttacggtgaaagatgacgagatcatttcagccatgaagttcacatggacaagattaaagctggtagtagaagcagcaagtgcaggtcccgtagcggcggtcttatcagacgagatgaaagctgtcaatccaagtgtaaagaatgtgggagtcctcatttgtggtggaaacgtgaatatcgatcagttgccatggtga

SEQ ID NO: 105042 - protein, 319 aa, Strongylocentrotus purpuratus
MLFDRILSASKRVANYIGPTPVFTSGTVDKLTGRNVFFKAENLQKTGSFKIRGALNAIILLKENKVQTNGVVTHSTGNHGSGLACAAQMVGVPCTVVVPHTTASVKIDAIRWYGADVVFCEPTQQSRKETCERVSTEQNLSFVPAYDDYDVMAGQGTIGVEMCEQIPDLDAVLVMTSGGGLIAGIATAIKGIKPNVKVYAVEPEGKDLQRSLESGERMWVGPPRTLDTVADATPTQQVGQLTWPIVRDLVEKQVFTVKDDEIISAMKFTWTRLKLVVEAASAGPVAAVLSDEMKAVNPSVKNVGVLICGGNVNIDQLPW

SEQ ID NO: 105043 - DNA, 1416 bp, Tribolium castaneum
  CDS (1)..(1416)
atggttcaattaaagttaaactgcagccgagacgacatgcgggagtctggcttctgctgcgaccccaacaaccccaacccttgtagccacaagaacaatggggccctagtggaagaccccagctgcaacccggactcacccctgaaagtcactttcgaggaaattacatcggctgcgtataaaatcaaatcggggattatcaacacaccatgcccgcgctcccacatgtcgcacttaaccggaatggatgtttatttgaaaaaagactttttacaaaatacgggaagttttaaggaacggggggcgcggtatgccatgttgatgttgtcaccggagcgcagacaaaacggagtcattgcggcttcgctcggaaaccatgcccaagcggtttgttaccacggctacctcctgggaatccccgtcacggtggtcatgcccataatagcccccataatgaaaatccagaagtgtaaggaattcaacgctaatgttatcatggagggcaaagatatggccgaagccaagaaaatcgccattaagatggcgaaggagaaaggttacacttatatcaacggttacgaccatccgcaaattatcgcaggccaaggcaccatagctttggaaattttggagcaagtggaagacatcgacgctattgtggtgcccacgggtgggggcgggcttttggcgggggtggcggtcgccgttaagacactgaaccccaaaattaagattatcggagttgaatccgaaaggtgtgcaagtttttccaaagccatggatgcggaaaagccggtgtccacggctattgaggggacactggcggatgggttggcggtaccaatggttgggtacaacgcatgggagacggcaaaatctctagttgataagatggtcgtagtgaaagaagagtggatcgcagtggcgatcttgaggatggtcgagttggaaaagtgtgtcgtggagggtgctggggctgttgggttggctgctattttggcgggacaacttgatgagttcaaggggaaaagagttgtgttaattttgagcgggggcaacatcgacaccacaattttgggtcggtgtttagaacgtggcctggcagccgatggccgacttgtcaaatgtaaagttactgtaagcgatagacctggaggtatttccgaattatgtaaactgatcggttccattggggtttccatcaaagacgtcatacatgaaagggcttgggtcacctctgatgttttcagtgttgaggtaaaagttgtgtgtgaaactcgggattatgcccatagtttggaactgagagaactattgttcaatcgatataaaaaggttaaatttgaaaatttgccagacaatctggcggtctcgtcgactagtgacgaatgcatatacaagcaacaatgtaattaa

SEQ ID NO: 105044 - protein, 471 aa, Tribolium castaneum
MVQLKLNCSRDDMRESGFCCDPNNPNPCSHKNNGALVEDPSCNPDSPLKVTFEEITSAAYKIKSGIINTPCPRSHMSHLTGMDVYLKKDFLQNTGSFKERGARYAMLMLSPERRQNGVIAASLGNHAQAVCYHGYLLGIPVTVVMPIIAPIMKIQKCKEFNANVIMEGKDMAEAKKIAIKMAKEKGYTYINGYDHPQIIAGQGTIALEILEQVEDIDAIVVPTGGGGLLAGVAVAVKTLNPKIKIIGVESERCASFSKAMDAEKPVSTAIEGTLADGLAVPMVGYNAWETAKSLVDKMVVVKEEWIAVAILRMVELEKCVVEGAGAVGLAAILAGQLDEFKGKRVVLILSGGNIDTTILGRCLERGLAADGRLVKCKVTVSDRPGGISELCKLIGSIGVSIKDVIHERAWVTSDVFSVEVKVVCETRDYAHSLELRELLFNRYKKVKFENLPDNLAVSSTSDECIYKQQCN

SEQ ID NO: 105045 - DNA, 1542 bp, Prochlorococcus marinus str. MIT 9515; identical to SEQ ID NO: 12465
  CDS (1)..(1542): transl_table=11

SEQ ID NO: 105046 - protein, 513 aa, Prochlorococcus marinus str. MIT 9515; identical to SEQ ID NO: 12466

SEQ ID NO: 105047 - DNA, 1218 bp, Clostridium difficile 630
  CDS (1)..(1218): transl_table=11
atgatgaatgttaccttaacagatgtaaaagaggctagagagaccattaagaacatagtaaaaagaactgacttacttgaaagtgttaaacttagcgaaaaaacaggagcaaatgtgttctataaatgtgagaatcttcaaaaaacaggttcttttaaattaagaggagcttgtaacaaaatagcgagtttaacagatgaagaaaaggcaaatggagttatagcttcaagtgcagggaatcatgctcaaggagttgcattgggagcaaaaatgactggtataaaatctacaatagtaatgccagcaactgcgcctttagcaaaagttagtgcaactaaaggttatggagcagaagtagttttaaatggtgcggtttatgatgatgcatatgcaaaagctgttgaaatacaaaaagaaacaggagcaactttcttacatccattcaatgataagtatgttatagcaggacaaggaactatatctcttgaaattttcgaacaattagacaataaagttgatactatactatgcccagttggtggaggaggaatcatctctggtgttgctgttgcagcaaaagcattaaatcctaatgtaaaaatagttggtgttcaaactgcaaatataccttcaatgaaagagtcaataaaaaatggaaaagtaacaacagcatttaatgatactacaatagctgatggtatagctgttaaaactccaggagatttaacttttgaaataataaatgaattggttgatgaaatagtagtggttgaagagacagaaattgcagaatcaatattatttatgatggaaagtcaaaaaatagtttcagaaggtgctggtgctgtatgtacagctgctatattaagtggtaagtatgtaccagcaaaagatgaaaatgtagtttgtataatatctggtggtaatatagacataaatacgttatatagaataataggtgttgctttagctaaagaaggaagaagatattcatttagtacaattatggaagataagccaggaaactttgctgagttaactagaataataagtgagaatggtggaaacattttaagtgctaatcaaggtaaattatcagcaggggaagctctaggaaaacaaagtgcggaatttatattagagacaatagattatgaccatatagctagaataaagaaagctatagaagaaaaaggttttaaaattatagaattataa

SEQ ID NO: 105048 - protein, 405 aa, Clostridium difficile 630
MMNVTLTDVKEARETIKNIVKRTDLLESVKLSEKTGANVFYKCENLQKTGSFKLRGACNKIASLTDEEKANGVIASSAGNHAQGVALGAKMTGIKSTIVMPATAPLAKVSATKGYGAEVVLNGAVYDDAYAKAVEIQKETGATFLHPFNDKYVIAGQGTISLEIFEQLDNKVDTILCPVGGGGIISGVAVAAKALNPNVKIVGVQTANIPSMKESIKNGKVTTAFNDTTIADGIAVKTPGDLTFEIINELVDEIVVVEETEIAESILFMMESQKIVSEGAGAVCTAAILSGKYVPAKDENVVCIISGGNIDINTLYRIIGVALAKEGRRYSFSTIMEDKPGNFAELTRIISENGGNILSANQGKLSAGEALGKQSAEFILETIDYDHIARIKKAIEEKGFKIIEL

SEQ ID NO: 105049 - DNA, 1524 bp, Herminiimonas arsenicoxydans
  CDS (1)..(1524): transl_table=11
atgactaccgactatctgaagaaaatcctcaccgcgcgcgtctatgatgtcgccgtcgaatcgccgctggaactggcgccaacgctgtcgcagcgcttcggcaaccagatttatttcaagcgcgaggatattcaaagcgtcttcagcttcaagctgcgcggcgcctacaacaagatggcgcatttgccgccggcacaaatgaaacgcggcgtgatttgcgcctcggccggcaatcatgcgcaaggcgttgcgctgtcggccgccagactgggctgccgggccgtgatcgtgatgcccaccaccacaccttcggtcaagatcgaagcggtcaaggcgcgcggcggtgaagtcgtgctgttcggcgactcctactcggatgcctaccagcacgcgctgacgctggagaaaaaactcaagctgactttcgtccatcccttcgatgatccggatgtcatcgccggccagggcacgataggcatggaaatcctgcgccagcactcagggcctatccatgcgattttcgttcccatcggcggcggcggcctgattgccggcataggcgcttacgtgaaagccgtgcgcccggacatcaagatcatcggcgtgcaaactgtcgattccgatgccatggcgcgcagcctgcaaagcaatcgtcgcgtgacaatgacagacgtcggcctgttcgcagatggcacggccgtcaagctggtcggagaagaaactttccgtctggccaagctgtatgtggacgacatcatactggtcagcaccgatgaagtgtgcagcgccatcaaggacgttttccaggatacgcgcagcatactggagccttccggcgcactctccgtcgccggtgcgaaagcgtatatcgaacgtgcgcatgcagacaagaaaccgatcaagaacgaaaccctgatcaccattgccagcggcgccaacatgaacttcgaccgcctgcgctttgtcgctgaaatggccgatgtcggtgcggcgcgcgaaggcgtgtttgccgtgaccattcccgaagaacgcggcagcttcaagcgcttttgcgaactggtcggtccgcgcaacgtgaccgaattcaactatcgcctcagcgatgccaaacaggcgcacatcttcgtcggcctgcaaatcgccgaccgcgacgaggcaggcaagatcgccaggcgtttcgagaaacacggattcaagacgctggatctgacgcacgacgaactcgccaaaggacacatccgtcatctggtcggcggcaagagcgatctaacccacgatgaactactgtatcgctttgaatttccggaacgtccgggcgccctgatgcgcttcctcgacagcgtggcgccgcactggaatatcagcctgttccactaccgcaatgaaggcggcgatgtcagccgcattctggtcggcatacaggtgccgaaaaaagaaatgaaaaccttccgcgcctcgctggccggattgggctatcgtcactgggatgaaaccgacaatcccgtctacaaactgtttctgtaa

SEQ ID NO: 105050 - protein, 507 aa, Herminiimonas arsenicoxydans
MTTDYLKKILTARVYDVAVESPLELAPTLSQRFGNQIYFKREDIQSVFSFKLRGAYNKMAHLPPAQMKRGVICASAGNHAQGVALSAARLGCRAVIVMPTTTPSVKIEAVKARGGEVVLFGDSYSDAYQHALTLEKKLKLTFVHPFDDPDVIAGQGTIGMEILRQHSGPIHAIFVPIGGGGLIAGIGAYVKAVRPDIKIIGVQTVDSDAMARSLQSNRRVTMTDVGLFADGTAVKLVGEETFRLAKLYVDDIILVSTDEVCSAIKDVFQDTRSILEPSGALSVAGAKAYIERAHADKKPIKNETLITIASGANMNFDRLRFVAEMADVGAAREGVFAVTIPEERGSFKRFCELVGPRNVTEFNYRLSDAKQAHIFVGLQIADRDEAGKIARRFEKHGFKTLDLTHDELAKGHIRHLVGGKSDLTHDELLYRFEFPERPGALMRFLDSVAPHWNISLFHYRNEGGDVSRILVGIQVPKKEMKTFRASLAGLGYRHWDETDNPVYKLFL

SEQ ID NO: 105051 - DNA, 978 bp, Burkholderia vietnamiensis G4
  CDS (1)..(978): transl_table=11
atgaccaacccgacccttcccacctacgacgacgtcgcggccgccgccgcgcgcctgcagggccacgcgcaccgcacgcccgtgatgacgtcgagcacgctcgacgacgcgctcggcgcgcaagtgttcttcaagtgcgagaacctgcagcgcatgggtgcgttcaagttccgcggcgcgttcaacgcgctgtcgcgcttcgacgccacgcagcgccgcaacggcgtggtcaccttctcgtcgggtaaccacgcgcaggcgatcgcgctgtcggcgcgcatgctcggcatcccggcgacgatcgtgatgccgcaggacgcgccggccgcgaagatggccgccacgcgcggctacggcggcaacgtcgtgacctacgaccgctatacggaagaccgcgagcagatcggccgcgagctggcggagaagcacgggctcacgctgatcccgccgtacgaccatgcggacgtgatcgccggccagggcacggcggcgaaggagctgttcgacgaagtcgggccgctggacgcggtgttcgcgccgctcggcggcggcggcctgctgtccggcaccgcgctcgcgacgcgggcgctgtcgccgcaagcgaagctgtacggcgtcgagcccgaagccggcaacgacggccagcaatcgttccgcagcggcgcgatcgtgcacatcgacacgccgcgcacgatcgccgacggcgcgcagacgcagcatctgggcaacctcacgttccagatcctgcgacgcgacgtcgacgacatcctgacagcgaccgacgccgaactggtcgacagcatgcggttcttcgcaacccggatgaagctcatcgtcgagccgaccggctgcctgtcgctcgcggccgcacgcaagatgaaggacgaactcgcgggcaagcgcgtcggcatcgtgatcagcggcggcaacgtcgacctcgcgaacttcgccgcactggtttccagtcccgccgcatga

SEQ ID NO: 105052 - protein, 325 aa, Burkholderia vietnamiensis G4
MTNPTLPTYDDVAAAAARLQGHAHRTPVMTSSTLDDALGAQVFFKCENLQRMGAFKFRGAFNALSRFDATQRRNGVVTFSSGNHAQAIALSARMLGIPATIVMPQDAPAAKMAATRGYGGNVVTYDRYTEDREQIGRELAEKHGLTLIPPYDHADVIAGQGTAAKELFDEVGPLDAVFAPLGGGGLLSGTALATRALSPQAKLYGVEPEAGNDGQQSFRSGAIVHIDTPRTIADGAQTQHLGNLTFQILRRDVDDILTATDAELVDSMRFFATRMKLIVEPTGCLSLAAARKMKDELAGKRVGIVISGGNVDLANFAALVSSPAA

SEQ ID NO: 105053 - DNA, 1533 bp, Synechococcus sp. WH 7803
  CDS (1)..(1533): transl_table=11
atggacgactatctccaaagaattcttcgtgcgcgggtctacgacgtcgcccgtgaaaccccccttgatgtagcgagcaatctcagtcgccgtctcgccaacaccgtccgtctcaaacgggaggatctgcaacccgttttttcgttcaagcttcgcggggcgtacaaccggatggcccagctgtcccaggaggagctgagccggggtgtgatcgcctccagtgcggggaaccatgcgcagggtgtcgcactcagtgcgtcccatctccactgccgggcagtgattgtgatgccggtcaccacaccaagcgtgaaggttgaggccgtgaagcaacttggcggtgaagttgttctccacggagagacctacgacgaggcctatgccgaagcctgccgtcgcagcgagaacgaacatctctgcttcatccacccgttcgatgacccggatgtcatcgccggtcagggaaccgtgggcatggaaatcctgcgtcagagtccccgtccgcccgatgccatctacatcgcgattggtggaggtggcctgatcgggggcattgcggcctacgtgaaaaccctgtggcccgatgtgcaaatcattggcgttgaaccccacgacgctgccgccatgaccctctcgctggaggccggtgaacgcattcgacttccgcaagtcggattgtttgctgatggtgtggccgtgcgcgaggtcggtgagcacaccttccgcctggtgcagcgttacgtggattccatcgtcacggtcagcaccgacgagatctgtgcagcgatcaaggatgtcttcgaagacacccggtcgattctcgagccggctggggctttggcagtggcaggtttgaaagcggatgtggctcgacgcggcctgaaagaccagcacctggtggctgtcgcttgcggagccaacatgaattttgaccggttgcgcttcgttgccgaacgggctgaattgggcgaggagcgggaagccatgctggctgtggagattcccgaacaaccgggaagcctgagacgactctgcgaactacttcacaaacgaagcctcactgaattcagctaccgcatgggtgccggcgagaccgcccagatctttatgggcatccaggtggctgacctccaggaccgctcggatctgctcgcttacctgcgcagtcatggctatgagtgcctcgatctcagtgatgacgaactggcgaaagttcaccttcgccacatggtgggagggcggctgcccatgcgcgttgatccagccaaccagcaaccccaggaattgctctatcgcttcgagttcccagaacgcccgggagcgctcatgcgctttgtcagcgccttgcatgcggactggtccatcagcatttttcactaccgaaaccatggggcggacgtgggtcgcattgtggtgggggtcctggtgaaacccgatgagctccaggactggcaggtggtgctcagagaacttggctatgcgagctgggaggaaacgtcgaatccggcttatcgcctctttctgggggcctga

SEQ ID NO: 105054 - protein, 510 aa, Synechococcus sp. WH 7803
MDDYLQRILRARVYDVARETPLDVASNLSRRLANTVRLKREDLQPVFSFKLRGAYNRMAQLSQEELSRGVIASSAGNHAQGVALSASHLHCRAVIVMPVTTPSVKVEAVKQLGGEVVLHGETYDEAYAEACRRSENEHLCFIHPFDDPDVIAGQGTVGMEILRQSPRPPDAIYIAIGGGGLIGGIAAYVKTLWPDVQIIGVEPHDAAAMTLSLEAGERIRLPQVGLFADGVAVREVGEHTFRLVQRYVDSIVTVSTDEICAAIKDVFEDTRSILEPAGALAVAGLKADVARRGLKDQHLVAVACGANMNFDRLRFVAERAELGEEREAMLAVEIPEQPGSLRRLCELLHKRSLTEFSYRMGAGETAQIFMGIQVADLQDRSDLLAYLRSHGYECLDLSDDELAKVHLRHMVGGRLPMRVDPANQQPQELLYRFEFPERPGALMRFVSALHADWSISIFHYRNHGADVGRIVVGVLVKPDELQDWQVVLRELGYASWEETSNPAYRLFLGA

SEQ ID NO: 105055 - DNA, 936 bp, Thermus thermophilus HB27
  CDS (1)..(936): transl_table=11
atgccttccctccaagacctctacgccgccttccgccgcatcgccccccacacccaccgcacccccctcctcacctcccgcctcctggacgggcttttgggaaagcgcctcctcctcaaggccgagcacctgcagaaaacggggagcttcaaggcccggggagcgctttccaaggccctcgccctggaaaaccccaaggggctcctcgccgtctccagcggcaaccacgcccagggggtggcctacgccgcccaggtgctcggggtgaaggccctggtggtcatgcccgaggacgcgagcccctacaagaaggcctgcgcccgggcctacggggccgaggtggtggaccggggggtgacggcggagaaccgggaggaggtggcccgggcccttcaggaggaaacgggctacgccctgatccacccctttgacgaccccttggttatcgccgggcaagggacggcggggcttgagcttctggcccaggcggggcggatgggggtcttccccgaggccgtcctcgcccccgtggggggcggggggctcctcgcgggcctggccacggcggtgaaggccctctcccccacgaccctcctcctcggggtggagcccgaggtcgcggacgacgccaggaggagcctggaggcgggaaggcttttccgcttggaagcgccccccaggacccgggcggacggggtgcggacgctaagcctgggggagcacaccttccccatcctcaaggagaaggcggacgggatccttgtggtgagcgaggaggcgatcctcgaggcggagcgcctcctcttcacccgcaccaagcaggtggtggagcccacgggggcccttcccctggccgcggtgctggagcacggggcgaggcttccccaaaccctcgccctcctcctctccgggggcaaccgggacttctctccctag

SEQ ID NO: 105056 - protein, 311 aa, Thermus thermophilus HB27
MPSLQDLYAAFRRIAPHTHRTPLLTSRLLDGLLGKRLLLKAEHLQKTGSFKARGALSKALALENPKGLLAVSSGNHAQGVAYAAQVLGVKALVVMPEDASPYKKACARAYGAEVVDRGVTAENREEVARALQEETGYALIHPFDDPLVIAGQGTAGLELLAQAGRMGVFPEAVLAPVGGGGLLAGLATAVKALSPTTLLLGVEPEVADDARRSLEAGRLFRLEAPPRTRADGVRTLSLGEHTFPILKEKADGILVVSEEAILEAERLLFTRTKQVVEPTGALPLAAVLEHGARLPQTLALLLSGGNRDFSP

SEQ ID NO: 105057 - DNA, 1206 bp, Picrophilus torridus DSM 9790
  CDS (1)..(1206): transl_table=11
atggaattcgatgatatattatatgcaaaatcagttgtatcaaggtatctgcacaggacgcctgtttttcattcaaagaccttcagcgacatgttccacggagatatattttttaaaatggagaatttccagaagaccggctcatttaaatcaaggggtgcagttacaaagttctcaaggttaagcgatgaggaactaaaaaacggtgtcataacggcaagcgctggaaaccatgcgcagggcgttgcatatgccgcatcgatctttaaaacagatgcaaagatagtaatgcctgaaaacacaacaccggcaaaggtaaacgctgttgaggcatacggcggccatgtgatactaaccgggagatcatacgatgaatcacatagccatgcattaaaaatagcaatggatgaaaatagaacatttatagaggcatacaatgatgaggccattatagcaggccagggtacaatagcacttgagctctttgaggatcttggaaatcttgatcagataatagtgcccattgggggtggcggtttaatatccgggatagcctttgccgcaaagcacataaatccaaatgtaaaaatcataggggtcgaatcagaaaaggcaaatgcaatgatgctatcattaagggaaaacagaatagttccatacacaagctctgatacaatagccgatggcatagccgtgaaatatcccggggatataacatttgacattgtaaaaaactatgttgacgatgttgttacagtaaatgatgaaagcatagcctattcattgtttaaactgcttgagcgtgaaaaggttcttgttgagccatccggggcagttggtcttgccgcactctacgagggtaagatagactcagaatcaaagaaaactgcaataatactatcaggcggaaacataaattttctgctgctatcaaaaattatatacaaatccatggagatggagaataaattaataaggcttgagttcaaccttcctgacaggccgggaaccatggtaaaaatagtaaacgcaatatcaagcgttggcgcaaatatataccatgccgaggtcgataatttaaaaaagaacacgcctataggctatcaaaatcttacatttaccgtaaacatagttgacgcaaatagaatagaaaaactattgaacgcactggactcccttggatataaatataatataataaattaa

SEQ ID NO: 105058 - protein, 401 aa, Picrophilus torridus DSM 9790
MEFDDILYAKSVVSRYLHRTPVFHSKTFSDMFHGDIFFKMENFQKTGSFKSRGAVTKFSRLSDEELKNGVITASAGNHAQGVAYAASIFKTDAKIVMPENTTPAKVNAVEAYGGHVILTGRSYDESHSHALKIAMDENRTFIEAYNDEAIIAGQGTIALELFEDLGNLDQIIVPIGGGGLISGIAFAAKHINPNVKIIGVESEKANAMMLSLRENRIVPYTSSDTIADGIAVKYPGDITFDIVKNYVDDVVTVNDESIAYSLFKLLEREKVLVEPSGAVGLAALYEGKIDSESKKTAIILSGGNINFLLLSKIIYKSMEMENKLIRLEFNLPDRPGTMVKIVNAISSVGANIYHAEVDNLKKNTPIGYQNLTFTVNIVDANRIEKLLNALDSLGYKYNIIN

SEQ ID NO: 105059 - DNA, 1002 bp, Bacillus thuringiensis serovar konkukian str. 97-27
  CDS (1)..(1002): transl_table=11
atgataactaaaaaactaccattacatttagacgatattaaaaaagctcaaagcattctggatagaaatgctcgtaaaactccattagtaaaatcattttatttgactagtaaaacgggtggagaaattcacttgaaattagaaaacatgcaattaacaggttcgtttaaattccgtggtgcgtttaataaaatgtcacagctgacagatcaagaaaaagagagaggagtaattgcttgttctgctggtaatcatgcgcaaggaattgctttatctgctcatttactcggtattaaaagtaaaattgtaatgccgatttctgcacctcaggcgaaagttgatgcaacgaaaggatatggatctgaagtggttttacatggtgaaacctttgatgatgcgaaggcaaaatgtgaggagattattagagaaacaggtgaaacatacttacatccatatgacgatgtagaagtaatggctggtcaaggtacaataggattagatattcttgatgatatgtgggatgttgatacggtcattgtaccaattggtggaggaggaattatttctggaattgctgtcgcattaaaatcttttaatccgtcgattcatataattggtgtgcaagcagaaaatgttcatgggatgaaggcatcttatgacaaaggcaaaattatagaacattatgaggcacctacgatagcagatggttgcgcggtaaaaataccaggcaatttaacttttgaagttgtaaaagaattagtagatgatattgtaacagtatcagaaaaagagctggaagtagcgatgaaagacttattacaacgcgggaaagctgttgtagaaggtgcaggcgcattagctactgctgctctacttgcagggaaagtggatacatatattaaagagaaaaaagtagtagcagttatatctggtgggaacgtagacttacagcgcatatcgagtgtttgtgaacaattttttgtggcgaatgaagtgaaatag

SEQ ID NO: 105060 - protein, 333 aa, Bacillus thuringiensis serovar konkukian str. 97-27
MITKKLPLHLDDIKKAQSILDRNARKTPLVKSFYLTSKTGGEIHLKLENMQLTGSFKFRGAFNKMSQLTDQEKERGVIACSAGNHAQGIALSAHLLGIKSKIVMPISAPQAKVDATKGYGSEVVLHGETFDDAKAKCEEIIRETGETYLHPYDDVEVMAGQGTIGLDILDDMWDVDTVIVPIGGGGIISGIAVALKSFNPSIHIIGVQAENVHGMKASYDKGKIIEHYEAPTIADGCAVKIPGNLTFEVVKELVDDIVTVSEKELEVAMKDLLQRGKAVVEGAGALATAALLAGKVDTYIKEKKVVAVISGGNVDLQRISSVCEQFFVANEVK

SEQ ID NO: 105061 - DNA, 1539 bp, Acinetobacter sp. ADP1; identical to SEQ ID NO: 12475
  CDS (1)..(1539): transl_table=11

SEQ ID NO: 105062 - protein, 512 aa, Acinetobacter sp. ADP1; identical to SEQ ID NO: 12476

SEQ ID NO: 105063 - DNA, 975 bp, Erwinia carotovora subsp. atroseptica SCRI1043
  CDS (1)..(975): transl_table=11
atgagcgacttacgcctcccaaccttcgacgatgtggtagccgcagcggaacgcattgatggctatgccaataaaacgccagtgatgacatcacgcacggtcaatgatgccttcggcgcagaggttttcttcaagtgtgaaaactttcagcgtatgggcgcattcaagttccgcggagccatgaacgcgctgttgcagttctcagatgagcagaaagccgcaggcgtggtcaccttttcttccggtaaccatgcgcaggccattgccctttccgccaaattacttggcattccggcaacgatcgttatgccgcacgatgcacccgcagcaaaggtcgctgcgacacgtggctatggcggaaacgtggtggaatataatcgatataccgaagatcgtgagcagatcggtagagatctggctgaaaagcagggtctgacgctcattcccccttatgaccacccgcacgtcattgcaggacaaggtacggctgcgaaagagctgttggaagaaaccggtgagctggacgccctgttcgtctgcttgggcggcggtggattgttggcaggttccgcactgtccgcgcgtcagctgtctccacgctgtaaaatttatggcgtcgaacctctcgcgggcaacgacgggcagcaatctttccgcagcggcaatattgtgcatatcgatacgcccaaaaccatcgccgatggcgcacagactcaacatctgggcaactataccttcccgctgattcgccagaacgtcgacgatattctgaccgtgacggatgacgacctgattgacgcaatgcggttttacgctgagcgcatgaagatcgtcgttgagccgacggggtgcctcagttttgcggcggcgcgtaatctcagggaatcactacacggcaaacgtatcggtatcattatcagcggcgggaatgtcgatatcagccgctacggcgcatttctgaccggcagcgtttga

SEQ ID NO: 105064 - protein, 324 aa, Erwinia carotovora subsp. atroseptica SCRI1043
MSDLRLPTFDDVVAAAERIDGYANKTPVMTSRTVNDAFGAEVFFKCENFQRMGAFKFRGAMNALLQFSDEQKAAGVVTFSSGNHAQAIALSAKLLGIPATIVMPHDAPAAKVAATRGYGGNVVEYNRYTEDREQIGRDLAEKQGLTLIPPYDHPHVIAGQGTAAKELLEETGELDALFVCLGGGGLLAGSALSARQLSPRCKIYGVEPLAGNDGQQSFRSGNIVHIDTPKTIADGAQTQHLGNYTFPLIRQNVDDILTVTDDDLIDAMRFYAERMKIVVEPTGCLSFAAARNLRESLHGKRIGIIISGGNVDISRYGAFLTGSV

SEQ ID NO: 105065 - DNA, 1251 bp, Leifsonia xyli subsp. xyli str. CTCB07; identical to SEQ ID NO: 12479
  CDS (1)..(1251): transl_table=11

SEQ ID NO: 105066 - protein, 416 aa, Leifsonia xyli subsp. xyli str. CTCB07; identical to SEQ ID NO: 12480

SEQ ID NO: 105067 - DNA, 1233 bp, Symbiobacterium thermophilum IAM 14863; identical to SEQ ID NO: 12485
  CDS (1)..(1233): transl_table=11

SEQ ID NO: 105068 - protein, 410 aa, Symbiobacterium thermophilum IAM 14863; identical to SEQ ID NO: 12486

SEQ ID NO: 105069 - DNA, 1002 bp, Bacillus cereus E33L
  CDS (1)..(1002): transl_table=11
atgataactaaaaaactaccattacatatagacgatattaagaaagctcaaagcattctggatagaaatgctcgtaaaacgccattagtaaaatcattttatttgactagtaaaacgggtggagaaattcacttgaaattagaaaatatgcaattaacaggttcgtttaaattccgtggtgcgtttaataaaatgtcacagctgacagatcaagaaaaagagagaggagtaattgcttgttctgctggtaatcatgcgcaaggaattgctttatctgctcatttactcggtattaaaagtaaaattgtaatgccgatttctgcccctcaagcgaaagttgatgcaacgagaggatatggatctgaagtggttttacatggtgaaacctttgatgatgcgaaggcaaaatgtgaggagattattagagaaacaggtgaaacatacttacatccatatgacgatgtagaagtaatggctggtcaaggtacaataggattagatattcttgatgatatgtgggatgttgatacggtcattgtaccaattggtggaggaggaattatttctggaattgctgttgcattaaaatcttttaatccgtcgattcatataattggtgtccaagcagaaaatgttcatgggatgaaggcatcttatgacaaaggtacaattatagaacattatgaggcacctacgatagcagatggttgcgcggtaaaaataccaggcaatttaacttttgaagttgtaaaagaattagtagatgatattgtaacagtatcagaaaaagagctggaattagcgatgaaagacttattacaacgcgggaaagctgttgtagaaggtgcaggcgcattagctactgctgctctacttgcagggaaagtggatacatatattaaagagaaaaaagtagtagcagttatatctggtgggaacgtagacttacagcgcatatcgagtgtttgtgagcaattttttgtggcgaatgaagtgaaatag

SEQ ID NO: 105070 - protein, 333 aa, Bacillus cereus E33L
MITKKLPLHIDDIKKAQSILDRNARKTPLVKSFYLTSKTGGEIHLKLENMQLTGSFKFRGAFNKMSQLTDQEKERGVIACSAGNHAQGIALSAHLLGIKSKIVMPISAPQAKVDATRGYGSEVVLHGETFDDAKAKCEEIIRETGETYLHPYDDVEVMAGQGTIGLDILDDMWDVDTVIVPIGGGGIISGIAVALKSFNPSIHIIGVQAENVHGMKASYDKGTIIEHYEAPTIADGCAVKIPGNLTFEVVKELVDDIVTVSEKELELAMKDLLQRGKAVVEGAGALATAALLAGKVDTYIKEKKVVAVISGGNVDLQRISSVCEQFFVANEVK

SEQ ID NO: 105071 - DNA, 1539 bp, Mannheimia succiniciproducens MBEL55E; identical to SEQ ID NO: 12489
  CDS (1)..(1539): transl_table=11

SEQ ID NO: 105072 - protein, 512 aa, Mannheimia succiniciproducens MBEL55E; identical to SEQ ID NO: 12490

SEQ ID NO: 105073 - DNA, 1269 bp, Bacillus licheniformis ATCC 14580; identical to SEQ ID NO: 12487
  CDS (1)..(1269): transl_table=11

SEQ ID NO: 105074 - protein, 422 aa, Bacillus licheniformis ATCC 14580; identical to SEQ ID NO: 12488

SEQ ID NO: 105075 - DNA, 1056 bp, Burkholderia mallei ATCC 23344
  CDS (1)..(1056): transl_table=11
gtggctgcgcgcggcgcgcgaagctgggacaatggccgcttccttgtccaacgcgttttcgcactcgccgccatgtccgttcaatccgcctccgaccttattttgccgaccttcgacgacgtgaccgacgcagccgcccggctcgccggcgtcgcgcatcgcacgcccgtcctcacgtcgagcaccgccgacgcgcgcgcgggcgcgacgatcttcttcaaatgcgagaacttccagcggatgggcgcgttcaagtttcgcggcgcatacaacgcgatttcgcacttcgacgccgagcagcgccgcgcgggcgtgctcacgtattcgtcgggcaaccatgcgcaggcgatcgcgctcgccgcgcgtctcgcgggcatccgcgcgacgatcgtgatgccgcacgacgcgccggccgcgaaggtcgcggcgacgaagggctacggcggcgaagtcatcacctacgatcgctacacggaaagccgggaggagatcggcgcgcggctcgcgcaggagcgcggcatgacgctcgtgccgccgtacgatcacccgcacgtgatcgccggccaggggacggccgcgaaagagctgatcgacgaagtcggcgagctcgacatgctcgtcgcgccgctcggcggcggcgggctgatcgcgggcaccgcgctgtcggccgccgcgctgtcggcgggctgcgcggtgatcggcgtcgagccggaggcgggcaacgacgcgcagcagtcgctcgagcgcggcgaggtcgtgcgcattccggtgccgcggacgatcgcggacggcgcggcgtcgacgcacgtcggcgcgtacaactttccggtcatccagcggctcgtcaagcggatcgtcacggcgagcgacgcgcagctcgtcgatacgatgcgttttttcgcggagcggatgaaactcgtcgtcgagccgaccggctgcctcggcgcggccgcggtgcttgacggcgtgctgcccgtcgcgggcaggcgcatcggcgtgatcctgagcggcggcaacgtcgatctcgcgcgctacggcgagttcctgcgcgggtga

SEQ ID NO: 105076 - protein, 351 aa, Burkholderia mallei ATCC 23344
MAARGARSWDNGRFLVQRVFALAAMSVQSASDLILPTFDDVTDAAARLAGVAHRTPVLTSSTADARAGATIFFKCENFQRMGAFKFRGAYNAISHFDAEQRRAGVLTYSSGNHAQAIALAARLAGIRATIVMPHDAPAAKVAATKGYGGEVITYDRYTESREEIGARLAQERGMTLVPPYDHPHVIAGQGTAAKELIDEVGELDMLVAPLGGGGLIAGTALSAAALSAGCAVIGVEPEAGNDAQQSLERGEVVRIPVPRTIADGAASTHVGAYNFPVIQRLVKRIVTASDAQLVDTMRFFAERMKLVVEPTGCLGAAAVLDGVLPVAGRRIGVILSGGNVDLARYGEFLRG

SEQ ID NO: 105077 - DNA, 1242 bp, Azoarcus sp. EbN1
  CDS (1)..(1242): transl_table=11
atgtcgtccatcccggtgccgctcacattgcccgatctcgtcgccgcgcgcgaacgcatccgcgatgcggtcgtccgtaccggccagtggcagaatgacgcgctgtccgacgaactcggcgtgccgctgcaactgaagctcgaaaacatgcagcgcaccggctcgttcaagctgcgcggcgcgacgcacaagatcggccgcctgctggaagccggtgctcggcccgccggcgtcgtcgcggcgtcggccggcaaccacgcgcagggcgttgcgcgcgcggctgcgcgggtcggcctcggggcggtcgtcgtgatgccggcgaacgcgccgctgacgaagatccaggcgtgtcgcaagctcggtgccgacgtgcgcctcgtcggcgacacgctcgaagccgccagcgacgaagcgcgccggctggccgacggcgaagggctcgcgctgatccatccctacgacgactgggacgtgatcgccggccaggcgagctgcggcctggagatgctcgaagacgcgccggacatgaccgtcgcgatcgtgccgctcggcggcggcgggctgctctccggcgtcgcgctggcgctgaagctgcagaatccggcgatccgcgtcatcggcgtgcagaccgacgcggtcgcgccgtggcggcatttcttgcgcgacggcaccctcgaggcggtgcggccggacgcccacacgatcgccgacggcatcaaggtgaaacggccgggaatgctgacgcggcaggtgatcgcgcgccacgtcgacgacatcgtcaccgtcgacgacaacgcgatcgccgaggcgatcgtcacgctgctcgaacgcacgcgcacgatcggcgaaggtgcgggcgtggtcgggctcgcggcgctgctgcagcgcaaggtccgcctcgggcccgacgaccgcgcggtggtcgtgatttcgggcggcaacgtcgatatgacgctcgtcgggcgttcgatcgactacggcctcgcgtcgagcgggcggctgatgagcgtcgcggtgatgatttccgatgcgccgggccagttgctcgcgctgctggcgacagtcgccgaactcggcatgaacgtgcgccatgtcgagcaccgccgcggcgaactgcacgtcgcggtcggcatgaccgaagtgatcctgcagatcgagacgcgcgatgccgagcaccagcacgcgctgctgacgcactttgccgcccagggccttgccgtgcgcaacctgctcgcgggatga

SEQ ID NO: 105078 - protein, 413 aa, Azoarcus sp. EbN1
MSSIPVPLTLPDLVAARERIRDAVVRTGQWQNDALSDELGVPLQLKLENMQRTGSFKLRGATHKIGRLLEAGARPAGVVAASAGNHAQGVARAAARVGLGAVVVMPANAPLTKIQACRKLGADVRLVGDTLEAASDEARRLADGEGLALIHPYDDWDVIAGQASCGLEMLEDAPDMTVAIVPLGGGGLLSGVALALKLQNPAIRVIGVQTDAVAPWRHFLRDGTLEAVRPDAHTIADGIKVKRPGMLTRQVIARHVDDIVTVDDNAIAEAIVTLLERTRTIGEGAGVVGLAALLQRKVRLGPDDRAVVVISGGNVDMTLVGRSIDYGLASSGRLMSVAVMISDAPGQLLALLATVAELGMNVRHVEHRRGELHVAVGMTEVILQIETRDAEHQHALLTHFAAQGLAVRNLLAG

SEQ ID NO: 105079 - DNA, 1008 bp, Silicibacter pomeroyi DSS-3
  CDS (1)..(1008): transl_table=11
atgacgacgaaaatcactcttcaggacagcatcagggcgcgggcgcggattgccgggcgtatccgcgaaacccctttggtggaatcgccctctctcagcagtctgagcggcaggcaagtcctgctaaagctggaaagcaggcagatcaccggcagcttcaagctgcgcggcgccaccaatgcggtcttgtcgctgacggatacgcagcgcgcggcgggcgtggttggggtatctaccggcaaccacgggcgcggactggcctatgcggcggcagaggccgaggtgcgttgcatcatctgcatgtcggaactggtgccgcagaacaaggttgacggcatcagatcccatggcgccgaggtgcgtatcctgggccggtctcaggacgatgcgcagcaggaagtcgaccggctggtcagagatggcatgaccatgctgcccccctttgaccatccggatatcattgccggccagggcaccgtcgcgctggaaatgctggatcaggcgccagaccttgaaaccgtgttggttcccctgtcgggtggcgggctgatttccggtgtcggcatggttctgaaagcggcgaacccggatatccgggtgatcggcgtcagcatggaacgcggcgccgcgatgtatgaatgcctgcaggcgggcaggcccgttcaggttgcggaactgcccacattggccgactctctgggcggggggatcgggctggacaatgcctatacattcgaaatgaccaaggcgtttgtcgatgaggtggtgctggtgtccgaggctgaaatcgccgccgccatccgccatgcctatttcgaggaacgcgaggtgatcgaagggtccggcagcgtcggcatcgcggcgctgctggccggcaagatcggcaatcccggccgttgtgtgtcgctggtgagcggtcagaacatcgctatggacctgcacaaacgcatcatcgacggtgaagacgtggatgtggaagccgacatcaaaggaggcgcagatgcctga

SEQ ID NO: 105080 - protein, 335 aa, Silicibacter pomeroyi DSS-3
MTTKITLQDSIRARARIAGRIRETPLVESPSLSSLSGRQVLLKLESRQITGSFKLRGATNAVLSLTDTQRAAGVVGVSTGNHGRGLAYAAAEAEVRCIICMSELVPQNKVDGIRSHGAEVRILGRSQDDAQQEVDRLVRDGMTMLPPFDHPDIIAGQGTVALEMLDQAPDLETVLVPLSGGGLISGVGMVLKAANPDIRVIGVSMERGAAMYECLQAGRPVQVAELPTLADSLGGGIGLDNAYTFEMTKAFVDEVVLVSEAEIAAAIRHAYFEEREVIEGSGSVGIAALLAGKIGNPGRCVSLVSGQNIAMDLHKRIIDGEDVDVEADIKGGADA

SEQ ID NO: 105081 - DNA, 1245 bp, Bacillus clausii KSM-K16
  CDS (1)..(1245): transl_table=11
atgaccacgcatttacaggatattattcgagcaaatcaacaaattaaagatgtcgtgacgcatacacctttgcaaaaagatcaggttttgtctgaacgatatgattgcacagtttatttaaaacgagaagacatgcaagttgtcagatcttttaaaattcgcggcgcctattaccaaatttcttctctttcaaaagaagaacttgccgctggggttgtatgcgcaagcgctggaaaccatgcacaaggggttgcctactcatgccgcgctttaaaagtcaaaggtgttattttcatgccgactaccacgccaaagcaaaaagtcgcacaagtgaaattttttggcagggactatgtggacgttagattaattggcgatacgtttgatgattcttatgcggacgccattcaatactgcgaagagcaggaaatgacgttcatccacccatttaaccaagacaaagtgattgctgggcaaggaacagtcgggcttgaaattatgaatgacattgaggaaacgccagactttgtgttttcatcaatcggcggtggtgggcttattagtgggatggcaacgtatataaaaagcgttagcccgtctacgaaaatgattggctgtgaaccagccggtgctgcatcgatgacagaatcaattaagcaaggcaacgttgttgagttagacgaaatcgataaatttgtcgatggggcagctgtgaagaaagtcggcgacaaaacatttgaaatttgcaaagagctgctagatgacattattgttgttccagaaggaaaaatttgcacaacgattttaaacctttacaatgagaatgcgctagtcgctgaaccggcaggggctatgcctattgctgctcttgatttgtatacggaacaaattaagggaaaagtcgttgtctgtattgttagtggcggcaacaacgacatcgggcgcatggaggaaatccgggaacgttcgctcatttatgaaggattgcagcattactttatcgttgaatttccacagcgagctggggcgctacgtgagtttattaccgatgtgctcggcccggaagacgacattactcgctttgaatatacaaagaaaaacaataaatcgaacggtccagtattaattgggattgaactgaaatgcagcaaagattatgatgggttaatcgaaagaatggaaaagattggatttgcctataatgaagtcaacaaggatgaaaatttgttttctttgctgatttga

SEQ ID NO: 105082 - protein, 414 aa, Bacillus clausii KSM-K16
MTTHLQDIIRANQQIKDVVTHTPLQKDQVLSERYDCTVYLKREDMQVVRSFKIRGAYYQISSLSKEELAAGVVCASAGNHAQGVAYSCRALKVKGVIFMPTTTPKQKVAQVKFFGRDYVDVRLIGDTFDDSYADAIQYCEEQEMTFIHPFNQDKVIAGQGTVGLEIMNDIEETPDFVFSSIGGGGLISGMATYIKSVSPSTKMIGCEPAGAASMTESIKQGNVVELDEIDKFVDGAAVKKVGDKTFEICKELLDDIIVVPEGKICTTILNLYNENALVAEPAGAMPIAALDLYTEQIKGKVVVCIVSGGNNDIGRMEEIRERSLIYEGLQHYFIVEFPQRAGALREFITDVLGPEDDITRFEYTKKNNKSNGPVLIGIELKCSKDYDGLIERMEKIGFAYNEVNKDENLFSLLI

SEQ ID NO: 105083 - DNA, 1212 bp, Campylobacter jejuni RM1221; identical to SEQ ID NO: 12501
  CDS (1)..(1212): transl_table=11

SEQ ID NO: 105084 - protein, 403 aa, Campylobacter jejuni RM1221; identical to SEQ ID NO: 12502

SEQ ID NO: 105085 - DNA, 1515 bp, Pseudomonas fluorescens Pf-5; identical to SEQ ID NO: 12511
  CDS (1)..(1515): transl_table=11

SEQ ID NO: 105086 - protein, 504 aa, Pseudomonas fluorescens Pf-5; identical to SEQ ID NO: 12512

SEQ ID NO: 105087 - DNA, 1554 bp, Psychrobacter arcticus 273-4; identical to SEQ ID NO: 12513
  CDS (1)..(1554): transl_table=11

SEQ ID NO: 105088 - protein, 517 aa, Psychrobacter arcticus 273-4; identical to SEQ ID NO: 12514

SEQ ID NO: 105089 - DNA, 981 bp, Psychrobacter arcticus 273-4
  CDS (1)..(981): transl_table=11
atgatcacaaatgatgatggattagtgattccaacccttgatgatatgctagaggcgcatgagcgcattaagccatatatccatcgcactcctgttttgacctctcgctttttaaacgaaatggcaggctgtgagatgttctttaaatgtgagaactttcaaaaagcgggtgcctttaaagtacgcggcgcatcaaacgcggtgtttggtctgtctgacgaagccgcaaaaaatggcgtctgtacacacagctcaggcaaccatgccctgtctttatcttatgcagcgggtcgacgcggcgtaccgtgtcatgtggtgatgccgcatagtgcaccagaagctaaaaaagcggcagtccgtggctatggtggtatcattactgagtgtgagccatcaaccacttcacgcgaagaagtgtttgccagagttcaagcagaaacaggcggcgactttgtccatccgtacaatgatccacgcgtaatcgccggacaagcgacttgctcacgtgaatttctagagcaaatggaagagatcggtcaaaaacctgacatggttgtggcacctattggtggtggtggcatgatttcaggcacttgcttaacgctatcgaacctagcccctgatgtcaaaatttatgctgcagagccagtaaatgctgatgatgctgcacgctcatttaaagccggttatattatcgctgatgatgcacccgatactatcgctgatggcttaaaagtaccgcttaaagatttgacctggcattttgtcagtaattatgtgactgacattttgactgcgactgaagaagaaatcgttgaagcgatgaagctgacttggactcatatgaaaattatcatcgagccaagttgtgcagtaccgcttgctgtcatcttgaagaacaaagacgtttttgcaggtaaaaaggttggcgtcatcatcactggtggtaacgttgatctagacaaattgccttggaactaa

SEQ ID NO: 105090 - protein, 326 aa, Psychrobacter arcticus 273-4
MITNDDGLVIPTLDDMLEAHERIKPYIHRTPVLTSRFLNEMAGCEMFFKCENFQKAGAFKVRGASNAVFGLSDEAAKNGVCTHSSGNHALSLSYAAGRRGVPCHVVMPHSAPEAKKAAVRGYGGIITECEPSTTSREEVFARVQAETGGDFVHPYNDPRVIAGQATCSREFLEQMEEIGQKPDMVVAPIGGGGMISGTCLTLSNLAPDVKIYAAEPVNADDAARSFKAGYIIADDAPDTIADGLKVPLKDLTWHFVSNYVTDILTATEEEIVEAMKLTWTHMKIIIEPSCAVPLAVILKNKDVFAGKKVGVIITGGNVDLDKLPWN

SEQ ID NO: 105091 - DNA, 978 bp, Colwellia psychrerythraea 34H
  CDS (1)..(978): transl_table=11
atgagcagttcacctaaccaaaccatgaatattccaagctacgaggatgtactcgtagcccacgaacgtattaaaccctatattcacgaaaccccagtattaacctcacgtttccttaatgaattaacaggtgctgagttattttttaaatgtgaaaacttgcaaaaggcagccgcttttaaagtgcgcggagcctgtaatgctgtttttggtttaacagacgctgaagcaaaaattggtgtggctacacattcatcaggtaaccatgctttatcgttatcttatgccgctggacgacgtggcatccccgttaccgtagtgatgccgcgtacagcgccgcaagctaagaaagatgccgtaattggctatggcggagtcattgttgaatgtgagccttctactagttcacgcgaagccgtctttgctgacgttgttgctgagtcaggtgcagactttgttcatccttacaacgacccacgcgttatcgctggccaagccacttgtgcaaaagagctggttaatcaggtacttaatttagatgctgtggtagcgccaattggcggcggcggcatgatatcaggtacttgcttaacactctctactactaatccgacaatcaaaatttatgcggcagagcctttgaatgcagatgatgctgcgcgctcatttaaagcgggtcatatcattgctgacgatgctccagagacagttgccgatggtctaaaagttccacttaaagatctgacttggcattttgttaaaaaccatgtcaccgatattttaacggcaaccgaagacgaaattgtcgcggcaatgaagcttatttggatccgcatgaaaattgtagtggagccaagcagcgcggtaacactcgcgattattttgaaaaatcccgaggtatttaaaggcaagcgtatcggggtaattctgactggcggtaatgtcgatttagacaaattaccttggatgaataaatag

SEQ ID NO: 105092 - protein, 325 aa, Colwellia psychrerythraea 34H
MSSSPNQTMNIPSYEDVLVAHERIKPYIHETPVLTSRFLNELTGAELFFKCENLQKAAAFKVRGACNAVFGLTDAEAKIGVATHSSGNHALSLSYAAGRRGIPVTVVMPRTAPQAKKDAVIGYGGVIVECEPSTSSREAVFADVVAESGADFVHPYNDPRVIAGQATCAKELVNQVLNLDAVVAPIGGGGMISGTCLTLSTTNPTIKIYAAEPLNADDAARSFKAGHIIADDAPETVADGLKVPLKDLTWHFVKNHVTDILTATEDEIVAAMKLIWIRMKIVVEPSSAVTLAIILKNPEVFKGKRIGVILTGGNVDLDKLPWMNK

SEQ ID NO: 105093 - DNA, 1536 bp, Pseudomonas syringae pv. phaseolicola 1448A
  CDS (1)..(1536): transl_table=11
atgagccaaggccagcacgatctgctcaatcattacgcccgcaagatcctcacctcccgtgtttatgacgtggctatcgaaaccccgctgcacggcgctcgccagctgtcagagcggctgggcaatcaggtgctgctaaaacgagaagacctgcagccagtgttctccttcaagattcgcggcgcgtacaacaagctggcgcaattgaccgcagaagaggccgcacgcggcgtggtcacggcctcggcgggtaaccacgcgcaaggtctggcactggcggcacgcgaactgggcattctggcgactatcgtcatgccgcgcaccaccccggaaatcaaggtcgaaggcgtgcgctcacggggcgccacggtggtgctgcacggcgactcctttcccgaagcgctggcctattcgctgaaactggtcgacgaacagggtttcgtctacatccacccgtatgacgaccccgatacgattgccgggcaaggcaccgtggcgatggagattcttcgtcagcaaccgggccaactggatgcgatctttgttccggtcgggggcggcggtctgatcgccggtatcgcagcgtatgtgaaatacctgcgcccggagatcaaggtgatcggcgtcgagccggacgactccaactgcctgcaagcggcgatggccgcgggggagcgcgtggtgctgagccaggtcgggctatttgccgatggtgtggcggtggcgcaaatcggccatcacacctttgaagtgtgccgtcattatgtcgatgaggtgatcaccgtcagcaccgatgaaatctgcgcggcgatcaaggacatctacgacgacacccgctcgatcaccgagcctgcgggcgcgctgggtgttgccgggatcaagaaatacgtcgagcagcgcggcatcagcggtcagacactggtggccatcgactccggggccaacgtcaacttcgaccgcttgcgccatgtggcagagcgcgccgagctgggcgaaggccgcgaggcgatcatcgccgtgaccattcccgagcagccgggcagcttcaaggcgttctgcgaggccatcggcaagcggcagatcaccgaattcaactaccgctaccacaccgatcgcgaggcgcacatcttcgtcggcgtgcagactcacccggagaacgacccgcgcagcgcgctgatcaccagcctgaccgggcagggttttccggtgctggacctgaccgacaacgaactggccaaactgcatattcgccacatggttggcgggcatgccgagcgggtcaatgatgaagtggtgctgcgcttcgagttcccggagcgaccgggcgcgctgttcaacttcctcaaccgtctgggcggccgctggaccatctcgatgttccactaccgcaaccacggcgctgctgacggccgggtggttgccgggctggtggtgtcggaggaagagcggcatctggtcggtactgctctggatgagattggttacccgtattgggacgagagcgagaacccggcgtaccggttgtttctgggctga

SEQ ID NO: 105094 - protein, 511 aa, Pseudomonas syringae pv. phaseolicola 1448A
MSQGQHDLLNHYARKILTSRVYDVAIETPLHGARQLSERLGNQVLLKREDLQPVFSFKIRGAYNKLAQLTAEEAARGVVTASAGNHAQGLALAARELGILATIVMPRTTPEIKVEGVRSRGATVVLHGDSFPEALAYSLKLVDEQGFVYIHPYDDPDTIAGQGTVAMEILRQQPGQLDAIFVPVGGGGLIAGIAAYVKYLRPEIKVIGVEPDDSNCLQAAMAAGERVVLSQVGLFADGVAVAQIGHHTFEVCRHYVDEVITVSTDEICAAIKDIYDDTRSITEPAGALGVAGIKKYVEQRGISGQTLVAIDSGANVNFDRLRHVAERAELGEGREAIIAVTIPEQPGSFKAFCEAIGKRQITEFNYRYHTDREAHIFVGVQTHPENDPRSALITSLTGQGFPVLDLTDNELAKLHIRHMVGGHAERVNDEVVLRFEFPERPGALFNFLNRLGGRWTISMFHYRNHGAADGRVVAGLVVSEEERHLVGTALDEIGYPYWDESENPAYRLFLG

SEQ ID NO: 105095 - DNA, 1533 bp, Dechloromonas aromatica RCB; identical to SEQ ID NO: 12519
  CDS (1)..(1533): transl_table=11

SEQ ID NO: 105096 - protein, 510 aa, Dechloromonas aromatica RCB; identical to SEQ ID NO: 12520

SEQ ID NO: 105097 - DNA, 933 bp, Thermobifida fusca YX
  CDS (1)..(933): transl_table=11
atgacgtcacgcatcactgtgtcccgtcaggtccccacgaccttcgacgtgcacctcgctgtccaacgcaccgctccctatctgcgtcgcaccccgctcctgcgcactcgtctgcggggccgccccctgctgctgaagctggagcatttgcagctcaccggtgcgtttaaactacgcggcgccttgaatgcgctactcaccggggacaggggtgaacgggtggttaccgcctcgggtggcaaccacggcctcggagtggccaccgccgcgcacctgctcggcggtacggccaccgtgtacgtacccgagaccgttcccgcggtcaaggagcggcggttgcgggacgccggtgccgacgtggttcgggccggcaccgagtacgcggcagcggaagccgcagcccgcgcctacgcggacaccgaagggctccgctacatccacgcctacaacgacccggacgtggtcgcaggccaaggcacgctcggccacgagatcgtcgccgacgcacccgactgcgatgcagtcgccgtggccgtaggcggcggcggtctcgccgcaggcgtgagcctgggcatcggcgacgaacggctcaccgtcgcggtagagccgcgcggctgcgccagcctgcacgccgcattcgccgccggcgagcccgtggacaccccggtcgattcagtagcggcctcggccttgggcgcctcccgggtgggcgacatcccgttcgcggtactgcgcgaccgcaacgtgacctccaccctcgtctcggaccccgagatccttgccgcccgcgacctgctgtgggaggaattccggatcgcggtggagcccgccgcggctactcccatggctgcctggctggccgggcacgtccccggcgaactgccgtgcgtggtgatctgcggcgccaacgccgactggcgtcccctggactga

SEQ ID NO: 105098 - protein, 310 aa, Thermobifida fusca YX
MTSRITVSRQVPTTFDVHLAVQRTAPYLRRTPLLRTRLRGRPLLLKLEHLQLTGAFKLRGALNALLTGDRGERVVTASGGNHGLGVATAAHLLGGTATVYVPETVPAVKERRLRDAGADVVRAGTEYAAAEAAARAYADTEGLRYIHAYNDPDVVAGQGTLGHEIVADAPDCDAVAVAVGGGGLAAGVSLGIGDERLTVAVEPRGCASLHAAFAAGEPVDTPVDSVAASALGASRVGDIPFAVLRDRNVTSTLVSDPEILAARDLLWEEFRIAVEPAAATPMAAWLAGHVPGELPCVVICGANADWRPLD

SEQ ID NO: 105099 - DNA, 1536 bp, Prochlorococcus marinus str. NATL2A; identical to SEQ ID NO: 12521
  CDS (1)..(1536): transl_table=11

SEQ ID NO: 105100 - protein, 511 aa, Prochlorococcus marinus str. NATL2A; identical to SEQ ID NO: 12522

SEQ ID NO: 105101 - DNA, 969 bp, Ralstonia eutropha JMP134
  CDS (1)..(969): transl_table=11
atgaccgaactgaagctaccaacgtacgcagacgtccaggaagccgcgaagcgccttgatggcgttgccaaccgcacgccggtcaatacgtcgcgcacgctcaatgacatgctcggcgccgaagtcttcttcaaatgcgagaatttccagcgcatgggagcgttcaagttccgcggcgcgtacaacgcgctggcgaagttcagccccgcgcaacgccgagcgggtgtggtggcgttctcgtcgggcaaccatgcgcagggcatcgcgctgtcggcaaagctgcttggcattcccgccaccatcgtgatgccgcacgacgcaccggcggccaaggtcgcggccaccaaaggctacggcgccaatgtcgtgatctacgaccgctacaccgaggaccgcgaagccatcgggcgccgcctggccgacgaacacggcttcacgctgattccgccctatgaccatccggacgtcctgtccggccagggcacggcagcaaaggaactgttcgaggcggtcggcgcactggacgtcgtgctgacgccgctcggcggcggtggattgctatccggcaccgcactgaccacacgcgcgctgtcgccgcaatgcaagctctttggcgtcgaacctgaagccggcaacgatggacagcagtcgttccgcagcggcgccatcgtgcacatcgataccccgaagaccattgcggacggcgcccagacgcagcatctcgggcagtacacgttcagcatcatcaagcgggacgtcgacgatatcctgacggcgtccgatgcccaactggtggaagcgatgaagttctacgccacacgcatgaagatgatcgtcgagcccacgggctgcctaggcctggccgccgccatgcatatgaaggatgcgctgaagggcaagcgcatcggcatcatcatcagcggcggcaatatcgacctggagcggttctgcgaactggtgtcggcgtaa

SEQ ID NO: 105102 - protein, 322 aa, Ralstonia eutropha JMP134
MTELKLPTYADVQEAAKRLDGVANRTPVNTSRTLNDMLGAEVFFKCENFQRMGAFKFRGAYNALAKFSPAQRRAGVVAFSSGNHAQGIALSAKLLGIPATIVMPHDAPAAKVAATKGYGANVVIYDRYTEDREAIGRRLADEHGFTLIPPYDHPDVLSGQGTAAKELFEAVGALDVVLTPLGGGGLLSGTALTTRALSPQCKLFGVEPEAGNDGQQSFRSGAIVHIDTPKTIADGAQTQHLGQYTFSIIKRDVDDILTASDAQLVEAMKFYATRMKMIVEPTGCLGLAAAMHMKDALKGKRIGIIISGGNIDLERFCELVSA

SEQ ID NO: 105103 - DNA, 1518 bp, Thiobacillus denitrificans ATCC 25259; identical to SEQ ID NO: 12527
  CDS (1)..(1518): transl_table=11

SEQ ID NO: 105104 - protein, 505 aa, Thiobacillus denitrificans ATCC 25259; identical to SEQ ID NO: 12528

SEQ ID NO: 105105 - DNA, 990 bp, Anabaena variabilis ATCC 29413
  CDS (1)..(990): transl_table=11
atgtcacagcttaactctgtaaccataactgatgtgcaagcagcacagcagcgtcttgctggtattgcccatcgcacacctgtgttaacttccacaactgtcaacgatcgcactcataatcaagtctttttcaagtgcgaaaattttcaacgcacaggtgcttttaaatttaggggtgcttataatgccttagcacagctatcaccaacacaaaaacacaaaggtgtgttgactttttcttcggggaatcatggacaagcgatcgcccttgcaggtaagttactcaacatccccacaactattgtcatgcctgatgatgcacctgtcatcaagcaaacagctaccaaaagttacggtgcagaggtaattttatataatcgccaagaaacgaatcgggaagaattggcgcaaaatctcgcaagcgatcgcggtttaaccctaattcctccatacgatcatccccatgtgatcgctggacaaggtacagccgcattagaactggtgcaagaaattggtgaactggatttgctgttagtttgttgtggcggtgggggattaatttccggttgtgcgatcgccgctaaagctcttttacctaatttgcgcgtaattggtgtagaaccaacactcgctgatgatgctactcgttccttttacaccaaaaccctacaaaccgtcacaaatccccatactatcgctgatggtgcgcggactcctagcctgggacagatgacatttcccctagttttacaatacgttgatgatatggtgacggtatcagaggaagcaattattcgcaccatgtttttcctctgggaacggctgaaaatagtcgttgaacccacaggcgtattagccgcagccgctttacttgaaaatgtagtcaaagcacaaggaaagagaattggtgtgattatcagtggtggaaatgtagatttaaccaaagttgctagttatgtcaacttagtcactgaatttggtaatgggtga

SEQ ID NO: 105106 - protein, 329 aa, Anabaena variabilis ATCC 29413
MSQLNSVTITDVQAAQQRLAGIAHRTPVLTSTTVNDRTHNQVFFKCENFQRTGAFKFRGAYNALAQLSPTQKHKGVLTFSSGNHGQAIALAGKLLNIPTTIVMPDDAPVIKQTATKSYGAEVILYNRQETNREELAQNLASDRGLTLIPPYDHPHVIAGQGTAALELVQEIGELDLLLVCCGGGGLISGCAIAAKALLPNLRVIGVEPTLADDATRSFYTKTLQTVTNPHTIADGARTPSLGQMTFPLVLQYVDDMVTVSEEAIIRTMFFLWERLKIVVEPTGVLAAAALLENVVKAQGKRIGVIISGGNVDLTKVASYVNLVTEFGNG

SEQ ID NO: 105107 - DNA, 1206 bp, Carboxydothermus hydrogenoformans Z-2901
  CDS (1)..(1206): transl_table=11
gtggtagaaattaaagatgttcaggaagcaaggattaggctattgggggttgctcaccgcactttaaccgcttattcggcaacctttagccggctggcgggagcggaagtgtattttaaatatgaaaacctgcaaaaaaccggttcctttaagctgaggggagcttataataaagttgccagtctgcccgtaaaggagcgggaacggggcgttgtagcggcctcggcgggtaaccatgcccagggggtagcttttgcttcgtttagtgccggaattcccgcaactatcgtgatgccggaaggcgctccgctggctaagattcaggcgacccagagctacggagcaaaggtaattttacacggggttagctatgatgatgcttttttaaaagcgaaagaaatcatggaaaaggaaggagcaacttttgtccatgcctttgacgaccccaaagtgattgccgggcaggggaccatagccttagaaatgctcgaagatgttcctgaactggatatgctggtggctccggttggtggtggcggactgatagccggtcttgcagtggcagcgaaagcgataaaaccgcatctgaaagtcataggggttcaggccaagggggcaccatcggcgtatgcttctttaaaagaacgcaggaaagtaacgttggcttcggtgtcgacaattgctgacggaattgccgtcaaaactccgggggagttgacctcgaaaattatttttgatttggtagacgacattgtcctggtggatgatgaggaaattgcccaggcaatattaatgatgttagaacggggtaaagtaatgttagaaggagcaggagcggtgggggtggcagcgcttttagcccagaaaattccggtacgggggcataaagtcggcgttgttttgtccggtggaaatatcgatgttcataccatctcgatcataatcgaacggggtctggtaaaatccggtagatatgtacggataaaaactattttagatgataaaccgggagccttacaaaagcttttggagttaattgccagggaaaaggccaatataatttttatcaaccatgaccgcattgctccccacgtgccgataaagcaggcggaggttgagctggctctggaaacaagggatttatctcacattgaaaaaattctggcggttttaagagaagcgggttatcagattctacaaaattaa

SEQ ID NO: 105108 - protein, 401 aa, Carboxydothermus hydrogenoformans Z-2901
MVEIKDVQEARIRLLGVAHRTLTAYSATFSRLAGAEVYFKYENLQKTGSFKLRGAYNKVASLPVKERERGVVAASAGNHAQGVAFASFSAGIPATIVMPEGAPLAKIQATQSYGAKVILHGVSYDDAFLKAKEIMEKEGATFVHAFDDPKVIAGQGTIALEMLEDVPELDMLVAPVGGGGLIAGLAVAAKAIKPHLKVIGVQAKGAPSAYASLKERRKVTLASVSTIADGIAVKTPGELTSKIIFDLVDDIVLVDDEEIAQAILMMLERGKVMLEGAGAVGVAALLAQKIPVRGHKVGVVLSGGNIDVHTISIIIERGLVKSGRYVRIKTILDDKPGALQKLLELIAREKANIIFINHDRIAPHVPIKQAEVELALETRDLSHIEKILAVLREAGYQILQN

SEQ ID NO: 105109 - DNA, 1230 bp, Carboxydothermus hydrogenoformans Z-2901
  CDS (1)..(1230): transl_table=11
atggtttcactagaagaagtaaaaaaagccagtgaaattttaggcaaaattgcccacaagacacctctcgtgtataataccactctaagtgaaatgactggtaaccatatctatttaaaaatggaaaacttacagcgtactggttcatttaagttaagaggggcttattataaaatagcgagtttaagtgaaaatgaaaagaaaagaggagttgttgcttcatctgctggcaaccacgcccaaggtgtagctctggcagcaaccctttatggaatccgttccactattgtcatgccaagacacgctccattgtccaaaataaaggctacaagtcaatatggagcaaaagtagtattgcatggtaacgtttatgatgaagcgtatgaagaagctaaacgaattcagttagaaacaaaagctaccttcattcatccatttaatgatccacaagttattgcaggtcagggaactatagcgttagaaattttagaagatttaccagatgtggaagtagttgtagtgcctatcggaggtggtggtttaattgcaggaattgcagttgccataaaaaacttaagaccaaaggtgcatgttattggtgttcaagctaaaaatatgccttccatggcagagtcattagcccgaggacaacttacaaatataagtggccaccccacaattgctgatggtattgcggttagaaaccctggggacttaacttttgaaattgtaaaacattatgtagatgatattgttactgttgatgaagatgaaatcgctagtgctatattgtttttgatggaaagggcgaaaaccgtagctgaaggggctggagcggtatccgttgcagctgttttaaatcgattatctcattataaaaaaagtaaaattgtagcacttataagtggtggaaatattgacgtaaatcttttatcacgcattattaacagaggtttagtaaaggatggcagaaaaattttcttgaataccgttattccggacaagccaggaactctaagccaattactccagataattgccagcacaggagccaacgtgttatcagtaattcacaatcgagaagctataaatgtcccattgggttcggctcaggtagaattggagcttgaaacagctgaacctgaacaggttgaagagattcaaagtcttttaaaacagcaccattattttgtcaatatttccccaacgcttacttcattggatgtataa

SEQ ID NO: 105110 - protein, 409 aa, Carboxydothermus hydrogenoformans Z-2901
MVSLEEVKKASEILGKIAHKTPLVYNTTLSEMTGNHIYLKMENLQRTGSFKLRGAYYKIASLSENEKKRGVVASSAGNHAQGVALAATLYGIRSTIVMPRHAPLSKIKATSQYGAKVVLHGNVYDEAYEEAKRIQLETKATFIHPFNDPQVIAGQGTIALEILEDLPDVEVVVVPIGGGGLIAGIAVAIKNLRPKVHVIGVQAKNMPSMAESLARGQLTNISGHPTIADGIAVRNPGDLTFEIVKHYVDDIVTVDEDEIASAILFLMERAKTVAEGAGAVSVAAVLNRLSHYKKSKIVALISGGNIDVNLLSRIINRGLVKDGRKIFLNTVIPDKPGTLSQLLQIIASTGANVLSVIHNREAINVPLGSAQVELELETAEPEQVEEIQSLLKQHHYFVNISPTLTSLDV

SEQ ID NO: 105111 - DNA, 1209 bp, Geobacter metallireducens GS-15; identical to SEQ ID NO: 12537
  CDS (1)..(1209): transl_table=11

SEQ ID NO: 105112 - protein, 402 aa, Geobacter metallireducens GS-15; identical to SEQ ID NO: 12538

SEQ ID NO: 105113 - DNA, 1269 bp, Rhodospirillum rubrum ATCC 11170
  CDS (1)..(1269): transl_table=11
atgtcgcccttccccccgtttccggccgcttcggccgtccccgccgtcaccctggccgatgtggaagccgcggcccggctgatcgcccatgccgtgccccataccccgctgctcccctcgcgcaccctgtcgcggctgaccggggccgaggttttcatcaaattcgagaaccaccagttcaccgcctcgttcaaggagcgcggcgcgctcaaccggttgagcgcgctgagcgagaccgagcgggcgcgcggcgtcatcgccatgagcgcgggcaatcacgcccagggcgtggcctatcacgcccagcgcctgggcattcccgccgttatcgtcatgcccgctgacacgcccttcgtaaaggtcaagcacacccgtgatttcggcgcccgcgtggtgctggaaggcgagaccgtggccgaatcgcggctggtggccgagcgcatccgcgaggaggagggactgaccttcgttcatccctataatgatccctgggtgatcgccggccaggggacggtggccttggaaatgcttgccgatcagcccgacctcgacatcctggtcgccccgatcggcggcggcggcctgctgggcggcatggcggtggcggccaaggcggtcaaaccggccattgagatgatcggcgttcaggtcgggctttatccttcggcctataacgccctccacggcctgccgccttgcaccggcggcgccacggtggccgagggcatcgccgtcaaggaaccgggcgatctgaccttgccgctgctgcgcgctttggtctcgcgcatcatcctggtcgatgagacggcggtcgaggaagccatctcgctctatctctcggtcgaaaagaccgtggccgagggggcgggggcggcgtcgctcgccgccctgttgaccgagccccagcgctttcgcggcaaaaaggtcggtctggtgctgagcggcggcaatatcgatccgcggatcatggcctcggtcatcatgcgcagccttgtgcgcgagggccgaatcgcccatctctcgatcaggatcggcgacaagccggggcaactcgcccgggtggcgacggtgatcggcgaaaccggcggcaatatcgtcgaggtccgccatgaacgcctgacctcggatatttcggtcaaatccaccgatctgcgggtgatcctggagacccgcgaccatacccatctggccgagatccttgaacgcctcgccgccgccggttttccggccaacgaacgctcgttcagcggcccggccgccggcgattaa

SEQ ID NO: 105114 - protein, 422 aa, Rhodospirillum rubrum ATCC 11170
MSPFPPFPAASAVPAVTLADVEAAARLIAHAVPHTPLLPSRTLSRLTGAEVFIKFENHQFTASFKERGALNRLSALSETERARGVIAMSAGNHAQGVAYHAQRLGIPAVIVMPADTPFVKVKHTRDFGARVVLEGETVAESRLVAERIREEEGLTFVHPYNDPWVIAGQGTVALEMLADQPDLDILVAPIGGGGLLGGMAVAAKAVKPAIEMIGVQVGLYPSAYNALHGLPPCTGGATVAEGIAVKEPGDLTLPLLRALVSRIILVDETAVEEAISLYLSVEKTVAEGAGAASLAALLTEPQRFRGKKVGLVLSGGNIDPRIMASVIMRSLVREGRIAHLSIRIGDKPGQLARVATVIGETGGNIVEVRHERLTSDISVKSTDLRVILETRDHTHLAEILERLAAAGFPANERSFSGPAAGD

SEQ ID NO: 105115 - DNA, 1146 bp, Burkholderia thailandensis E264
  CDS (1)..(1146): transl_table=11
ttgacgacgtcggcgcgccgcccggccggcggcggggccgacgctacggcgcgtcacggcgatggccgtgccgcgccgttttctttttcggccgctgcgcgagtcgggcgaagctgggacaatgaccgcttctttgtccaatgcgttttcgcactcgctgccatgtctgctcaacccgcctccgacctcgttctcccgaccttcgacgacgtgaccgacgcagccgcccggctcgccggcgtcgcgcatcgcacgcccgttttcacgtccggcacggccgacgcgcgcacgggcgcgacgatcttcttcaaatgcgagaacttccagcggatgggcgcgttcaagtttcgcggcgcgtacaacgcgatttcgcacttcgacgccgagcagcgccgtgcgggcgtgctcacgtattcgtcgggcaaccatgcgcaggcgatcgcgctcgccgcgcgcctcgcgggcattcacgcgacgatcgtgatgccgcacgacgcgcccgccgcgaaggtcgcggcgacgaagggctacggcggcgaagtcatcacctacgatcgctacacggaaagccgggaggagatcggcgcgcggctcgcgcaggagcgcggcatgacgctcgtgccgccgtacgaccatccgcacgtgatcgccgggcaggggacggccgcgaaagagttgatcgacgaagtcggcgagatcgacatgctcgtcgcgccgctcggcggcggcgggctgatcgcgggcaccgcgttgtcggcggccgcgctgtcggcgggctgcgcggtgatcggcgtcgagccggaggcgggcaacgatgcgcagcagtcgctcgagcgcggcgaggtcgtgcacattccggtgccgcggacgatcgcggacggcgcggcgtccacgcacgtcggtgcatacaactttccgatcatccagcggctcgtcaagcggatcgtcacggcgagcgacgcgcaactcgtcgacacgatgcgtttcttcgcgcagcggatgaagatggtcgtcgagccgaccggctgtctcggcgcggcggcagtgctcgacggcgtgctgcccgtcgcgggcaagcgcgtcggcgtgatcctgagcggcggcaacgtcgatctcgcgcgctacggcgagttcctgcgcgggtga

SEQ ID NO: 105116 - protein, 381 aa, Burkholderia thailandensis E264
MTTSARRPAGGGADATARHGDGRAAPFSFSAAARVGRSWDNDRFFVQCVFALAAMSAQPASDLVLPTFDDVTDAAARLAGVAHRTPVFTSGTADARTGATIFFKCENFQRMGAFKFRGAYNAISHFDAEQRRAGVLTYSSGNHAQAIALAARLAGIHATIVMPHDAPAAKVAATKGYGGEVITYDRYTESREEIGARLAQERGMTLVPPYDHPHVIAGQGTAAKELIDEVGEIDMLVAPLGGGGLIAGTALSAAALSAGCAVIGVEPEAGNDAQQSLERGEVVHIPVPRTIADGAASTHVGAYNFPIIQRLVKRIVTASDAQLVDTMRFFAQRMKMVVEPTGCLGAAAVLDGVLPVAGKRVGVILSGGNVDLARYGEFLRG

SEQ ID NO: 105117 - DNA, 1266 bp, Novosphingobium aromaticivorans DSM 12444
  CDS (1)..(1266): transl_table=11
atggaaaatgcagcgctcacgcccgtagtgcagggggccgccgacgacgcggacgccctgctgactctcgccgacgttcgtgcggcggcggagcgcattgccggccaggtggtgcgcaccccgaccctgcacagcaagacgctgagcgcgattaccggcgcgaacatctggatcaagttcgagaacctgcagttcaccgccgcctacaaggagcgaggtgcgctcaatgccctgctgctcctttcgcaggaacagcgcgcgcggggcgtgatcgccgcgtcggcgggaaaccacgcgcaggggctttcctaccacggaacccgcctgggcgttcccgtgaccatcgtcatgccgcgcacgacgccgacggtgaagatcatgcagaccgaggccgtgggcggcaaggtcgtgctcgagggcgagaccttcgacgaggcctatgcccatgcgcgcaagctggagcgcgaactgggactgacgttcgtccacccgttcgacgagcgcaatgtcgcggccggacagggtacggtcgcgctcgagatgctcgaggatgcgcccgagatcgacatgctggccgttcccatcggtggcggtggcctgctttcgggcatgggcacggcggcgcgcgggatcaagccggagatcggcctgatcggcgtgcaggcacagctcttcccgtcgatgttcgcgcggctcaagcacctcgatttgccatgcggcggcgatacgctggccgagggcatcgcggtgaaggagccgggggcgttcacctccgccgtgctgcgcgatctggtcgacgatgtggtgctggtgaacgaagccgcgctggaatcggccgtggcgctgctgctccagatcgagaagaccgtggtcgaaggcgcgggcgccgcggggctggcggcggtgatgcagaaccgggagctgttcgcgggccgcaacgtgggcgtcgtgctgacgggcgcgaacatcgatacgcgcctgctggccaacgtgctgctgcgcgatcttgcacggtcggggcgcctcggccgcctgcgcatcacattgcaggaccgtcctggcgcgctgttcaaggtggtcgaggagttcaaccgtcaccaggtgaacatccttgaagtttggcaccagcgcatcttcacttcgctgccggccaagggcctgaccgccgagatcgagtgcgaggcgcgcgatcgcgagcagatcgaccggctcgtcgccgggctgcgcggcaagggctacgacgtcgagcaggtcgaactggggtag

SEQ ID NO: 105118 - protein, 421 aa, Novosphingobium aromaticivorans DSM 12444
MENAALTPVVQGAADDADALLTLADVRAAAERIAGQVVRTPTLHSKTLSAITGANIWIKFENLQFTAAYKERGALNALLLLSQEQRARGVIAASAGNHAQGLSYHGTRLGVPVTIVMPRTTPTVKIMQTEAVGGKVVLEGETFDEAYAHARKLERELGLTFVHPFDERNVAAGQGTVALEMLEDAPEIDMLAVPIGGGGLLSGMGTAARGIKPEIGLIGVQAQLFPSMFARLKHLDLPCGGDTLAEGIAVKEPGAFTSAVLRDLVDDVVLVNEAALESAVALLLQIEKTVVEGAGAAGLAAVMQNRELFAGRNVGVVLTGANIDTRLLANVLLRDLARSGRLGRLRITLQDRPGALFKVVEEFNRHQVNILEVWHQRIFTSLPAKGLTAEIECEARDREQIDRLVAGLRGKGYDVEQVELG

SEQ ID NO: 105119 - DNA, 1221 bp, Desulfitobacterium hafniense Y51
  CDS (1)..(1221): transl_table=11
ttgaccatgtccacactgctgacgttagaacagattcaagaggcacaacaggccattcacccttatattcaccggacacttctggatcattcaagcaatctaagcgccctggccgggacggagatctaccttaagctggagaatctgcagaagaccggttcctttaaagttcggggggctatgaataaagccttgaagctttctgaagaggagaagaaaaaaggaatcctggccgcttccgccggcaatcatgcccaaggggtagccatggcggctgcccgtatcggtattcccgcaacaattgtcatgccggaaaatgcccccctagccaaagtgtccgctacggaagggtacggagcccaggtcattctgtccggagcggtttttgatgatgcttatcagaaggcagtagagatccaaaaggaaacaggagccacgtttatccatgcctttgatgatctggaagttatggccgggcagggaaccatcggcttggaagtttttgaggagctgcctgaagtggatacggttcttgtccccatcgggggaggagggctgatcgcaggggttgctgtggctttgaaatccctgaagccttccgtgcgcgtgatcggtgtccaagcggccggagcggcaagcatggctcacgcgctgagcataggcaggcccgagccattagggcaggccagtactttggcagatggcattgcggtgaaaagggcaggtgatctaaccttcgcagcagtccgccattatgtggatgagatggtgacggttgaagaagaagagattagtcaagctattctcctgttgatggagcgcaccaaaacccttgctgaaggagccggggcggttgccgtagcggcggcgcttcagggtaagctggatcttaaggagcagaaaacggttctcatcctgagcgggggaaatattgacgtgaatttcctggcccagattatcgagcgggggctgaggcgttccgggcgtaccatggcctgtcagcttcttttgccggatcaacccggcaacttggaaaaagtgatcgagcttatagcccaggaacgggccaatatcatcaacatcgaacactcccgctatgatttagccgttcccctgcgctcagcccgtgttcatatgctgttggaaacccaaagctttgaacatcaaaagcgcattatccagcgtttagaaggtgccgggtatcccttgactgttaactga

SEQ ID NO: 105120 - protein, 406 aa, Desulfitobacterium hafniense Y51
MTMSTLLTLEQIQEAQQAIHPYIHRTLLDHSSNLSALAGTEIYLKLENLQKTGSFKVRGAMNKALKLSEEEKKKGILAASAGNHAQGVAMAAARIGIPATIVMPENAPLAKVSATEGYGAQVILSGAVFDDAYQKAVEIQKETGATFIHAFDDLEVMAGQGTIGLEVFEELPEVDTVLVPIGGGGLIAGVAVALKSLKPSVRVIGVQAAGAASMAHALSIGRPEPLGQASTLADGIAVKRAGDLTFAAVRHYVDEMVTVEEEEISQAILLLMERTKTLAEGAGAVAVAAALQGKLDLKEQKTVLILSGGNIDVNFLAQIIERGLRRSGRTMACQLLLPDQPGNLEKVIELIAQERANIINIEHSRYDLAVPLRSARVHMLLETQSFEHQKRIIQRLEGAGYPLTVN

SEQ ID NO: 105121 - DNA, 1248 bp, Desulfitobacterium hafniense Y51; identical to SEQ ID NO: 12545
  CDS (1)..(1248): transl_table=11

SEQ ID NO: 105122 - protein, 415 aa, Desulfitobacterium hafniense Y51; identical to SEQ ID NO: 12546

SEQ ID NO: 105123 - DNA, 1512 bp, Saccharophagus degradans 2-40; identical to SEQ ID NO: 12547
  CDS (1)..(1512): transl_table=11

SEQ ID NO: 105124 - protein, 503 aa, Saccharophagus degradans 2-40; identical to SEQ ID NO: 12548

SEQ ID NO: 105125 - DNA, 1512 bp, Methylobacillus flagellatus KT; identical to SEQ ID NO: 12549
  CDS (1)..(1512): transl_table=11

SEQ ID NO: 105126 - protein, 503 aa, Methylobacillus flagellatus KT; identical to SEQ ID NO: 12550

SEQ ID NO: 105127 - DNA, 966 bp, Burkholderia xenovorans LB400
  CDS (1)..(966): transl_table=11
atgcaagcgcttcccgctcccactttcgacgacgtactcgacgccgctgcgcgtcttgaaggcgtcgcccaccgcactcccgtgctgacctcgagcacgtttgacgaacgaacgggcgcgtcggtgttcttcaagtgcgagaattttcagcgcatgggcgccttcaagtttcgcggtgcctataacgcgatctcgcatttcgacgcggagcaacgcaaagccggcgtgctgacgtattcgtcgggtaaccacgcgcaggcaattgcattgtcggcgcggcttgccggcattcgcgcgacgatcatcatgccgcacgacgcaccggccgccaaagtcgcggcaaccaaaggctacggcggcgaagtgatcacctacgaccgctacaccgagaaccgcgaagagatcggccggcgtctcgccggagagcgtggcatgacgctgattccaccatacgatcatccacatgtgatcgccgggcagggcacggcggtgaaagaactgatcgaggaaaccggcccgctcgacatgctgttcgtgtgcctcggcggcggcgggctgatcagcggcagcgcgttgtccgccgcggcgttgagcccggcgtgcacggtgatcggcgtcgagccggaggcgggtaacgacggccagcagtcgctggcgcgcggcgagatcgtgcatatcgacacgccgcgcacgatcgccgacggcgccgcctccacgcatctgggcgactacacgtttgcgatcatccgcaagctggttgcgcggatcgaaacggtcagcgacgggcaactgatcgacacgatgcgctttttcgcgcagcgcatgaagatcgtggtcgagccgacgggttgtctcgccgcggcggcggtgctcaacggcatcgtgccggtgaagggcaagcgtgtcggcgtggtggtcagcggcggcaacgtcgatctggaaaagctcgcgcagtatctcgcctga

SEQ ID NO: 105128 - protein, 321 aa, Burkholderia xenovorans LB400
MQALPAPTFDDVLDAAARLEGVAHRTPVLTSSTFDERTGASVFFKCENFQRMGAFKFRGAYNAISHFDAEQRKAGVLTYSSGNHAQAIALSARLAGIRATIIMPHDAPAAKVAATKGYGGEVITYDRYTENREEIGRRLAGERGMTLIPPYDHPHVIAGQGTAVKELIEETGPLDMLFVCLGGGGLISGSALSAAALSPACTVIGVEPEAGNDGQQSLARGEIVHIDTPRTIADGAASTHLGDYTFAIIRKLVARIETVSDGQLIDTMRFFAQRMKIVVEPTGCLAAAAVLNGIVPVKGKRVGVVVSGGNVDLEKLAQYLA

SEQ ID NO: 105129 - DNA, 1242 bp, Acidobacteria bacterium Ellin345; identical to SEQ ID NO: 12557
  CDS (1)..(1242): transl_table=11

SEQ ID NO: 105130 - protein, 413 aa, Acidobacteria bacterium Ellin345; identical to SEQ ID NO: 12558

SEQ ID NO: 105131 - DNA, 999 bp, Acidobacteria bacterium Ellin345
  CDS (1)..(999): transl_table=11
atggtctcccttgaatctttccgccaagctcaagagcgtctccgcggcattgcggcgcgaaccccgttggtccaatacttccctcccggccacacccacaacgaccgcactctgcgcatcaagccagagtcgctgcagccgattggctcgttcaaactccgcggcgcttacaacaagatcgcaacgctttccgacgaggaacgtcaaagaggtgtaatcacctattcgagcggaaaccatgcgcagggcgtagcctatggtgcgcgcgccatgggtgtgaaggcgtgcatcgtaatgccgcgcaacgctcccaaggtcaaaatggacgcgaccaaggccctcggggccgaaatagtaactgtaggaccagccagctccgagcgccgtaagaaggcggaatcgttggctcaggagcatggctacgcgatcgtcccgccctatgacgacgaacagatcatctccggccaaggcaccgtcggcatggaaatctacgaagacctccctgaggccgacatcgtactcgtccccattggcggcggcggtttgatcagcggggtctccgcagcactgaagatgagcggcagtagggcgaagatcatcggcgtcgagcccgaactggccaacgacgcccagcagtcgctgcgaaccggtaagatcgtcaccctccctgctgagcgtgtttcgagtacccttgccgacggcctccgcactcagtccgttggagatttgaactacgaaatcatcaagcaatatgtagacgacatcgtcacggtagaagaggacgaaatccgcgaggccatgcgccgcatgatgagcgagtcgcgcctcgtggttgaaccaagtggcgccgtgacatttgctgcttatctcttccacgaaaaagagcttcctgccggccgcaacgtggttgtcgtaatgagcggcggcaatattgaaccatcgctgctcgcgcaagtaatgaccgagtccgacgcgcaatccgcgcagactgggcgctag

SEQ ID NO: 105132 - protein, 332 aa, Acidobacteria bacterium Ellin345
MVSLESFRQAQERLRGIAARTPLVQYFPPGHTHNDRTLRIKPESLQPIGSFKLRGAYNKIATLSDEERQRGVITYSSGNHAQGVAYGARAMGVKACIVMPRNAPKVKMDATKALGAEIVTVGPASSERRKKAESLAQEHGYAIVPPYDDEQIISGQGTVGMEIYEDLPEADIVLVPIGGGGLISGVSAALKMSGSRAKIIGVEPELANDAQQSLRTGKIVTLPAERVSSTLADGLRTQSVGDLNYEIIKQYVDDIVTVEEDEIREAMRRMMSESRLVVEPSGAVTFAAYLFHEKELPAGRNVVVVMSGGNIEPSLLAQVMTESDAQSAQTGR

SEQ ID NO: 105133 - DNA, 978 bp, Silicibacter sp. TM1040
  CDS (1)..(978): transl_table=11
atgacatcccttgccatgatcgaagccgccgccgcgcggctcaaaggacacgcccgctacacgccgcttctgtcttcgcccttcctggacgagatcgccggacgccgggtctttgtaaaggcggaatgcctgcagcacaccggttcgttcaaatttcgcggcggctgggccgcgctttcggccatggatcctgaactgcgcaaacggggtgtgatcgcctattcctctggcaatcatgctcaaggtgtcgccgccgccgccaaggcccatggcgccccggccgtgatcgtgatgcccgcggatgcaccacagctcaaaatcgacaacacccgcgcgctcggcgctgaggtggtattgtatgatcgggtcgcaggggaaagccgcgaagccgctgcagagcctctggtcgccgaacgtggcctgacactcatcaaaccctatgacgaaccggaagtgatcgcaggccagggcacaaccgggctcgagatcgcggaacaagctgccgcagaaggtgtcacaaaggccgacgtgctggtctgctgtggcggcgggggcctcacatccggcatcgctctcgcgcttgaggcccatgccccgaacatgcgggtccgccccgcagagccagagggctttgacgatgtcgcacgctcgcaatcgtcgggtcaaattgaaacgaaccctgcccccacggggtcgatttgcgacgcaatcctcacccccgccccgggcgacatcacctggcccctgctctcacgcctctgcggcccgggcctcaccgtcaccgatgatcaggcccttgaggccatggcgatcgcctttcaacgcctcaagatcgtactggaacccggcggtgccgtgtccctggccgcagcactgtttcacccggaccaaatcgacggcgatgccgtgatcgcggttgcaacaggcggcaatgtcgacccgggtcagttcaccgcagctcttactcgcttcctgtaa

SEQ ID NO: 105134 - protein, 325 aa, Silicibacter sp. TM1040
MTSLAMIEAAAARLKGHARYTPLLSSPFLDEIAGRRVFVKAECLQHTGSFKFRGGWAALSAMDPELRKRGVIAYSSGNHAQGVAAAAKAHGAPAVIVMPADAPQLKIDNTRALGAEVVLYDRVAGESREAAAEPLVAERGLTLIKPYDEPEVIAGQGTTGLEIAEQAAAEGVTKADVLVCCGGGGLTSGIALALEAHAPNMRVRPAEPEGFDDVARSQSSGQIETNPAPTGSICDAILTPAPGDITWPLLSRLCGPGLTVTDDQALEAMAIAFQRLKIVLEPGGAVSLAAALFHPDQIDGDAVIAVATGGNVDPGQFTAALTRFL

SEQ ID NO: 105135 - DNA, 1218 bp, Myxococcus xanthus DK 1622; identical to SEQ ID NO: 12561
  CDS (1)..(1218): transl_table=11

SEQ ID NO: 105136 - protein, 405 aa, Myxococcus xanthus DK 1622; identical to SEQ ID NO: 12562

SEQ ID NO: 105137 - DNA, 975 bp, Mesorhizobium sp. BNC1
  CDS (1)..(975): transl_table=11
atgaccgacattgccatgatcgaagccgcgcggagccgcattgcgggccatgtgcgccgcacaccgctccttttctcgccgtttttcgatgaaatcgcaggccggcgtgttcttgtgaagaccgagtccctccagcttaccggctctttcaagttccgcggtgcctggtcggcgatatcggcgctggacccggacgttcgggcgaaaggcgtgctcgccttttcctcgggcaatcatgcgcaggccgtggcgctcgccgcgcgaatgcacggcatttcttccaccatagtcatgccatccgacgcgccgaagctgaagatcgaaaacacgcgggcctatggcgccgaagtggtgctctatgatcgcgcgaaagaggaccgtgatgcgatcggtgtgaagctcgcggctgaaaggggacttacgctgatcaagcccttcgacgagccgctggtcattgccggccagggcactacgggccttgagctcgcggagcaggccaaggaaataggcgtggaaagggcggaagtgcttgtcccctgtggaggtggcggactcacctccggcatagcgctagcgcttgaagcgcgtgcaccccggctcaaggcgcgcccctgcgagcccgcgggcttcgacgatgtgacccgctccctcgcttccgggaagatcgagcgcaatgcggcgatgtcaggttcgatctgcgacgccattgtcacgccgtcgcccggcacgatcacctttccgatcctgaggcggctttgcggcgcgggaatcgtcgtaaccgacgaggaggcgctgcatgcaatggcgctggccttcacccggctcaagatcgtggtagagccgggcggcgcggtggcgctcgcggcagcactgttccatggcgaggagatggcggctgacacggttatcgcggttgcctccggcggcaatgtggatgccgccttgtttcggcaggctctggaacggtttgcttag

SEQ ID NO: 105138 - protein, 324 aa, Mesorhizobium sp. BNC1
MTDIAMIEAARSRIAGHVRRTPLLFSPFFDEIAGRRVLVKTESLQLTGSFKFRGAWSAISALDPDVRAKGVLAFSSGNHAQAVALAARMHGISSTIVMPSDAPKLKIENTRAYGAEVVLYDRAKEDRDAIGVKLAAERGLTLIKPFDEPLVIAGQGTTGLELAEQAKEIGVERAEVLVPCGGGGLTSGIALALEARAPRLKARPCEPAGFDDVTRSLASGKIERNAAMSGSICDAIVTPSPGTITFPILRRLCGAGIVVTDEEALHAMALAFTRLKIVVEPGGAVALAAALFHGEEMAADTVIAVASGGNVDAALFRQALERFA

SEQ ID NO: 105139 - DNA, 1254 bp, Cytophaga hutchinsonii ATCC 33406; identical to SEQ ID NO: 12563
  CDS (1)..(1254): transl_table=11

SEQ ID NO: 105140 - protein, 417 aa, Cytophaga hutchinsonii ATCC 33406; identical to SEQ ID NO: 12564

SEQ ID NO: 105141 - DNA, 1209 bp, Clostridium perfringens ATCC 13124
  CDS (1)..(1209): transl_table=11
gtgattattttgtatttagaaaaaattattaaagcaaaaaaaaatatagaagatgtagttataaaaacacctttaatatacagcgaggttttttcaaggaaatctggaaaccaagtgtatatgaaatgtgaaaatttacaattaacaggtgcttacaaaataagaggtgccttaaataaaataagatccttatcagatgaagacaaagcaaaaggggttgtttgctcttctgctggaaatcatgctcaaggcgtagcttttgcagcatcacaagctaatgttaaatcaactatagtaatgccaaagactactcctctactaaaaatccaatcaacaaaggatttaggaggaaatgttgttttatcaggttatgtttatgatgatgcttttaatgaggctaaaagaattgaacaggaacaaggagccttatttatacacccatttaatgatattgatgtaatttgtggacaaggcacagtagccttagaaatatttgaagatttaaaggatgtagatgttattctctgccctataggtggcggtggcttaataagtggagttaccttagctgctaaggccttaaaccctaatgttaaagtaattggagtacaagcagaaggggcaaatgcaatggttaaaagttttaaggcaggagaaataattgctttagactctgttgataccattgctgacggaattgcagtaaaaagacctggtgatttaacatttaaatttataaaagaatatgttgacgatataataactgtatcagaccatgaaattgttgaagcattctttactttaagtgaaaaacataaacttctagcagaagcttcaggagctgtatcattagcagcctcttctaaattaaattttaaaggtaaaaatgtagtatcaataataagtggtggtaatatagatatggttactataaccgcattaataaatagtgcattagtagctaagggaagactttttggttttagtctagaagttcctcataaaccaggccaaatattaaaaattgctaaagttcttgctgatactaatgctaatatagtaaaacttgaacatgatcattttaaagcaacagatgctcttaagaacatggttatagaagtaaccttagagaccaatggccactctcatatagatgaaattaaaaaagctttaacagatcaaaactatgtaataaaacaaatttactaa

SEQ ID NO: 105142 - protein, 402 aa, Clostridium perfringens ATCC 13124
MIILYLEKIIKAKKNIEDVVIKTPLIYSEVFSRKSGNQVYMKCENLQLTGAYKIRGALNKIRSLSDEDKAKGVVCSSAGNHAQGVAFAASQANVKSTIVMPKTTPLLKIQSTKDLGGNVVLSGYVYDDAFNEAKRIEQEQGALFIHPFNDIDVICGQGTVALEIFEDLKDVDVILCPIGGGGLISGVTLAAKALNPNVKVIGVQAEGANAMVKSFKAGEIIALDSVDTIADGIAVKRPGDLTFKFIKEYVDDIITVSDHEIVEAFFTLSEKHKLLAEASGAVSLAASSKLNFKGKNVVSIISGGNIDMVTITALINSALVAKGRLFGFSLEVPHKPGQILKIAKVLADTNANIVKLEHDHFKATDALKNMVIEVTLETNGHSHIDEIKKALTDQNYVIKQIY

SEQ ID NO: 105143 - DNA, 1233 bp, Rhodococcus sp. RHA1
  CDS (1)..(1233): transl_table=11
atgctggcccgcgtggagcctgtcacgctggatcagatcagagcagctcgtaagctgctggaccccgtcatgcgccggacgccggtgatcgcgtcccgggcgctgtcggaacgatgcgggcacgtcgtgtcgttgaagtgcgaaaacttacagcgcacagggtctttcaaaccgcgcggtgcgtacaatcggatcgcgaacctgtcggtcgccgaacgggcctgcggggtggtggcggccagcgcgggcaatcacgcgcagggcgtggcctgggcggccacggaactgggtatcccgtccaccgtgttcatgccaaccggcgcaccccttccgaaactcgtcgctaccaaggcgtacggcgccaccgtccacctcacgggcgacacggtggacgacgcgctcgtcgccgcgaaggagttcgcgaacgagaccggcgccgtcctcatccacccgttcgatcacgtcgacatcgtcgccggacaggggaccgtggggctcgagatcctcgagcaggaacccgacgtcggcacgctcgtcgtcccgaccggtggcggtggactgatcgcgggtatcgccgcggcggtgaaggccacccggcccgacgtgcggatcgtcggcgtccaggccgagcaggcggccgcctggccgcgttcgctggcggagggccgcccgataccgctggagaccatgtcgaccatggccgacggcattgcggtcggccggcccggcgacgttccgttcgcgcacgtcggctcgcaggtcgacgccatcgtcacggtcagcgaggacgccctgtcccgggcgctgctgctgtgcctcgaacgcgcgaagctcatcgtggagcctgcgggcgcggccgcggtggccgcgttgatcagctgctcgacggacgagctgggactcaccgggaaggtgtgcgcggtgctgtcgggtggcaacatcgacccgttgctgctcacccatgtcgtcaatcacggtctccgggctgccggacggtatctcggtgtgcacgtgaccattccggaccgaccgggtggtctggtcagtctcctcggcgtgatcagcggcaacggcgccagcgtcgtggacgtcgtccactcccgcaccggtggcgcgctcgcgctcgacgaggtggaggtgttcctcaccgtcgagacccgtggtcccggacaccggcaggatctccttgacgccctgcgcgacgcccagtacacgattcggctgcaggagtag

SEQ ID NO: 105144 - protein, 410 aa, Rhodococcus sp. RHA1
MLARVEPVTLDQIRAARKLLDPVMRRTPVIASRALSERCGHVVSLKCENLQRTGSFKPRGAYNRIANLSVAERACGVVAASAGNHAQGVAWAATELGIPSTVFMPTGAPLPKLVATKAYGATVHLTGDTVDDALVAAKEFANETGAVLIHPFDHVDIVAGQGTVGLEILEQEPDVGTLVVPTGGGGLIAGIAAAVKATRPDVRIVGVQAEQAAAWPRSLAEGRPIPLETMSTMADGIAVGRPGDVPFAHVGSQVDAIVTVSEDALSRALLLCLERAKLIVEPAGAAAVAALISCSTDELGLTGKVCAVLSGGNIDPLLLTHVVNHGLRAAGRYLGVHVTIPDRPGGLVSLLGVISGNGASVVDVVHSRTGGALALDEVEVFLTVETRGPGHRQDLLDALRDAQYTIRLQE

SEQ ID NO: 105145 - DNA, 1536 bp, Haemophilus somnus 129PT; identical to SEQ ID NO: 12565
  CDS (1)..(1536): transl_table=11

SEQ ID NO: 105146 - protein, 511 aa, Haemophilus somnus 129PT; identical to SEQ ID NO: 12566

SEQ ID NO: 105147 - DNA, 1527 bp, Synechococcus sp. CC9311; identical to SEQ ID NO: 12567
  CDS (1)..(1527): transl_table=11

SEQ ID NO: 105148 - protein, 508 aa, Synechococcus sp. CC9311; identical to SEQ ID NO: 12568

SEQ ID NO: 105149 - DNA, 1674 bp, Shewanella sp. MR-4
  CDS (1)..(1674): transl_table=11
atgttatctctcgcatcgtcgcaaacggagcaggctgaggcccagtcctctcaagttcaatcctctcaagttcagtccgataaggcgcaatcgggcacttctgccttagaaaagagtcagcttgcgcaaagctacctgcaaaaaatcctgctgtcgtcggtttatgacgttgcgaaagtgaccccactctcgagcctgaataaactctcggcgcgtttgggctgccaagtatttttaaagcgtgaggatatgcagcctgtgcattccttcaagctgcgtggcgcctataaccgtatcgcccagttaagccaagccgaatgtcaacgcggcgtagtgtgcgcctcggcgggtaaccatgctcaaggcgtggccatgtcagcggccagtcgtggtgtggatgctgtgattgtgatgcccgaaactacgccagatattaaagtcgatgcggtgcgccgcttgggtggcaacgtggtgttgcacggccaagccttcgatcaggccaatggctttgcgatggagatggccgagcaggaggggcgggtgtatatcgcccccttcgatgacgaagccgttatcgcaggccaaggcactatcgcccaagaaatgctgcaacagcagcgcgaccttgaagtggtatttgtacccgtgggcggcggtggcttaattgctgggattgctgcctattacaaagcggtgatgccacaggtcaaaattgttggggtggagcctgaagatgcggcctgcttaaaagcggcgatggaggcgggcgagcctgtcacactcccgcaggtcggcttgtttgccgatggagtcgcggttaaacgtatcggcaccgagccatttcgcctagctaagtggtttgtggatgaagtggtgacggtaacgtccgacgagatctgcgccgccgttaaagatatttttgaggatacccgcgccattgccgaacctgcaggtgctttatcccttgctgggcttaaaaaatatgtcagcaccaatgctacgggcgagagtggcaagggtgagaaagtcgcggcgattttaagtggcgcgaatgtgaacttccacagcctacgttatgtgtcggagcgttgcgagttgggtgagcaaaaagaagccgtgctggcggttaaagtgcccgagcgtcccggcagcttcctgcgtttttgtgagttgctcgaaaagcgggtgatgaccgaatttaactatcgttttagcagccgcgatatggcggtggtgtttgcgggtattcgtttgaccaaaggccatggcgaattagagcagatcatcaataccttagaagataatggcttcgaggtgcaggacttatccggtgacgaaaccgcgaaattacatgtgcgctatatggtcggtggtcatccgccagagccgttagaggagcgcctatttagcttcgagtttcccgagcatccgggggcgctgctgaagtttttaactaccctgcagagcaagtggaatatcagtttattccattaccgtaatcacggcgcggcctttgggcgagtgctggcggggtttgaagtccccgagggcgatgccttgccgtttcagcagtttttaactgagctgggatttgtctatcaagaagagacgcaaagccctgcttatcagctgtttttgaatgccggaaaagggaaaaagagcctgcctttgtag

SEQ ID NO: 105150 - protein, 557 aa, Shewanella sp. MR-4
MLSLASSQTEQAEAQSSQVQSSQVQSDKAQSGTSALEKSQLAQSYLQKILLSSVYDVAKVTPLSSLNKLSARLGCQVFLKREDMQPVHSFKLRGAYNRIAQLSQAECQRGVVCASAGNHAQGVAMSAASRGVDAVIVMPETTPDIKVDAVRRLGGNVVLHGQAFDQANGFAMEMAEQEGRVYIAPFDDEAVIAGQGTIAQEMLQQQRDLEVVFVPVGGGGLIAGIAAYYKAVMPQVKIVGVEPEDAACLKAAMEAGEPVTLPQVGLFADGVAVKRIGTEPFRLAKWFVDEVVTVTSDEICAAVKDIFEDTRAIAEPAGALSLAGLKKYVSTNATGESGKGEKVAAILSGANVNFHSLRYVSERCELGEQKEAVLAVKVPERPGSFLRFCELLEKRVMTEFNYRFSSRDMAVVFAGIRLTKGHGELEQIINTLEDNGFEVQDLSGDETAKLHVRYMVGGHPPEPLEERLFSFEFPEHPGALLKFLTTLQSKWNISLFHYRNHGAAFGRVLAGFEVPEGDALPFQQFLTELGFVYQEETQSPAYQLFLNAGKGKKSLPL

SEQ ID NO: 105151 - DNA, 1515 bp, Alkalilimnicola ehrlichei MLHE-1; identical to SEQ ID NO: 12571
  CDS (1)..(1515): transl_table=11

SEQ ID NO: 105152 - protein, 504 aa, Alkalilimnicola ehrlichei MLHE-1; identical to SEQ ID NO: 12572

SEQ ID NO: 105153 - DNA, 1227 bp, Hyphomonas neptunium ATCC 15444; identical to SEQ ID NO: 12573
  CDS (1)..(1227): transl_table=11

SEQ ID NO: 105154 - protein, 408 aa, Hyphomonas neptunium ATCC 15444; identical to SEQ ID NO: 12574

SEQ ID NO: 105155 - DNA, 996 bp, Hyphomonas neptunium ATCC 15444
  CDS (1)..(996): transl_table=11
atgacccagaccctgacactccccgcttttgaagatgttcttgccgccgagcagcgccagcgcggcgtcgtgcgcgagacgcctgtgctgagccatccggcactggatgaggccgccggagcggagctgctcatcaaggccgaatgcctgcaggtaacgggaagtttcaagatccgcggggcgatgaaccggctggcgcaggtgccgccggaaggcaaggcggcgggcgttgtggcgttctcctcgggcaaccatgcgcagggcgtggcgcgggccgcgcgcctgctggggatgccggcgctgatcgtgatgccgtcggacgccccgcaggtgaaggtggacggcgtgctggccgatggcggcgaggtttacctttacgaccgcaacaccgagaaccgcgaagagatctgcgcgcggctggcggccgaacgcggcgcggcgattgtgcccagctatgatgatttcgacatcatcgccgggcagggcacggcgggcctggagtttgcgcgccaggccgaggcgatgggcaagccgctggaccatctgatttcgccggccggcgggggcgggctgatcaacggcgtggcgctggccttcgggcagctttcgcccgccacgaaaatctgggcggcagagcccgaggcgcatgacgactgggcgcggtctctcgaagcgggggaaatcctcgccaatgcgccgggaacacgctcgatctgtgatgccatcctgacaccgcagccgggatacctgacctttgcgctgggccagcggcagctggcgggggccttccgggtgtcggatgaggatgtgcgcgaggcaatgcggatggcgtttcgctatctgcgcgtggtggccgagccgggcgggtctgcggcattggcggccgcgctgagcgggctgccggaggccctgaagggcaaacggatcggcatcatcgtttcgggcgggaatgtggacgcggcgcagtatgccgccattttgggcgcgggcgcgtag

SEQ ID NO: 105156 - protein, 331 aa, Hyphomonas neptunium ATCC 15444
MTQTLTLPAFEDVLAAEQRQRGVVRETPVLSHPALDEAAGAELLIKAECLQVTGSFKIRGAMNRLAQVPPEGKAAGVVAFSSGNHAQGVARAARLLGMPALIVMPSDAPQVKVDGVLADGGEVYLYDRNTENREEICARLAAERGAAIVPSYDDFDIIAGQGTAGLEFARQAEAMGKPLDHLISPAGGGGLINGVALAFGQLSPATKIWAAEPEAHDDWARSLEAGEILANAPGTRSICDAILTPQPGYLTFALGQRQLAGAFRVSDEDVREAMRMAFRYLRVVAEPGGSAALAAALSGLPEALKGKRIGIIVSGGNVDAAQYAAILGAGA

SEQ ID NO: 105157 - DNA, 1002 bp, Rhizobium leguminosarum bv. viciae 3841
  CDS (1)..(1002): transl_table=11
atggtgagcaccttgcccgtttcgctggaggatatccgcgctgcggcgcgccggattgccggccgcgtgatcggcacaccgatggtgcagtccttttcccttggcgaattggccggcgtacctgtccatctcaagctcgaacatcatcagacgaccggcagcttcaagctgcgcggcgcgaccaatgcggtgctctccttgtcgccggccgagcgctcgcgcggcgtcgtcgcggcctcgaccggaaatcacggccgtgcgcttgcctatgcggcaaaggcggaaggggcggttgcgaccatctgcatgtcgcggctggtgccggacaacaaggtttcggaaagccgccgcctcggtgccgatgtccgcatcgtcggcggatcgcaggacgaggcgcagcaggaagtcgagcggctggttcgcgaggaggggctggtgatggtcccgcccttcgaccatcctgatgtcgtggccgggcaggggacgctggggctcgaaatcatcgacatcttgccggaggcggcaatcgtgctggtgccgctctcgggcggcggccttgcggccggcgttgccgctgcggtcaaaggcatcagtccgacgaccaaagtgatcggcctgacgatggagaagggcgccgcgatgaaggcgagcctcgatgccggacggccggtgcaggtcgaggaggtatcgagccttgccgactcgctcggcggcggcatcggcctcgacaatcgcgtgacctttgccatgtgccgcgaacttctcgacgacgtcatcctgctgacggaggtggaaatcgccgtgggcatgcgccatgcctatgcctgcgaacgccagatcgtcgagggcgctggcgcggtcggcattgcagcgttgcttgccgggaagattgtggggaacggccccatcgtcgcgatcctgtccggggcgaatgtcgacatggagcagcatcggcgggtgatcaatggcaaggcggcactctgcggcgaggagagaccatga

SEQ ID NO: 105158 - protein, 333 aa, Rhizobium leguminosarum bv. viciae 3841
MVSTLPVSLEDIRAAARRIAGRVIGTPMVQSFSLGELAGVPVHLKLEHHQTTGSFKLRGATNAVLSLSPAERSRGVVAASTGNHGRALAYAAKAEGAVATICMSRLVPDNKVSESRRLGADVRIVGGSQDEAQQEVERLVREEGLVMVPPFDHPDVVAGQGTLGLEIIDILPEAAIVLVPLSGGGLAAGVAAAVKGISPTTKVIGLTMEKGAAMKASLDAGRPVQVEEVSSLADSLGGGIGLDNRVTFAMCRELLDDVILLTEVEIAVGMRHAYACERQIVEGAGAVGIAALLAGKIVGNGPIVAILSGANVDMEQHRRVINGKAALCGEERP

SEQ ID NO: 105159 - DNA, 963 bp, Pseudomonas aeruginosa UCBPP-PA14
  CDS (1)..(963): transl_table=11
atgcacgacctgcctacctacgacgatgtgatcgccgccgccgcgcggatcgccgggcatgccaaccgcacgccggtgatgtcctcgcgtaccctcgacgaagaactcggcgcggaagtcttcttcaaatgcgaaaacctgcagcgcatgggagcgttcaagttccgcggcgccttcaacgcgctgtcgcggttttccgccgagcagcgtgccgccggggtggtggcgttctcctccggcaaccacgcccaggccatcgccctctcggcgcgcttgctggggatcccggcgaccatcgtgatgccggccgacgcgccggcggtgaagatcgaggcgacccgtggctacggcgggcaggtagtgctctatgaccgctatacggaagatcgcgagcagatcggccgcgacctggcgcagcgccatggcctgaccctgatcccgccctacgatcaccccgacgtgctggccgggcagggcaccgcggccaaggaactgttcgaagaagtcggtccgctggacgccttcttcgcgcccctcggcggcggcggcttgctctccggctgcgccctggcgatccgcgcgctggcgccggcctgccggatctacggggtggagccggaggccggcaacgatggccagcgttcgctgcgcagcggcgccatcgtgcatatcgatacgccgcagaccctcgccgatggcgcccagacccagcatttgggcaatctcaccttcccgctgatccagcgcaacgtcgatgacatcctcaccgccagcgacgccgaactggtggatggcatgcgcttcctcgccgcgcggatgaagctgctggtcgagcccaccggttgcctcggcctggccgccgcccgccagcgcaaggacgaattgcgcggcaagcgggtcgggatcctgctcagcggcggtaacgtcgacctggcgcgtttctgcgccttgctcggcggctag

SEQ ID NO: 105160 - protein, 320 aa, Pseudomonas aeruginosa UCBPP-PA14
MHDLPTYDDVIAAAARIAGHANRTPVMSSRTLDEELGAEVFFKCENLQRMGAFKFRGAFNALSRFSAEQRAAGVVAFSSGNHAQAIALSARLLGIPATIVMPADAPAVKIEATRGYGGQVVLYDRYTEDREQIGRDLAQRHGLTLIPPYDHPDVLAGQGTAAKELFEEVGPLDAFFAPLGGGGLLSGCALAIRALAPACRIYGVEPEAGNDGQRSLRSGAIVHIDTPQTLADGAQTQHLGNLTFPLIQRNVDDILTASDAELVDGMRFLAARMKLLVEPTGCLGLAAARQRKDELRGKRVGILLSGGNVDLARFCALLGG

SEQ ID NO: 105161 - DNA, 1548 bp, Pseudomonas aeruginosa UCBPP-PA14; identical to SEQ ID NO: 12579
  CDS (1)..(1548): transl_table=11

SEQ ID NO: 105162 - protein, 515 aa, Pseudomonas aeruginosa UCBPP-PA14; identical to SEQ ID NO: 12580

SEQ ID NO: 105163 - DNA, 1056 bp, Pediococcus pentosaceus ATCC 25745
  CDS (1)..(1056): transl_table=11
atgttagtagagaaagaacccagaaaccaagttgtagcagcaaccgataatttattaaatctaaaccagattgaagaagcccgcgaggttattaaaaaatatgcgcgtcggacaccattagttaagtccatgtttttgagcaacaacgttgtccatggggatgtctatttaaaattagagaatatgcaattaaccggttcttttaaatttagaggggcgaataacaaaattaaccacttgaatgaagaagaaaaacaacgaggcgtaattacagcttcagctggaaatcatgcacaaggagtagctttgaccggtaagttgctgggaattaaaactacggtagtgatgccggatgaggcgccccaaatgaagcgcgatgcaacccgaggatatggagcggaagtagatattcatggcgcaacttttgatgacgctcacgaatggatgcgagaaagagctgaaaaagaaggaaaaaccattgtagatccgtttaatgatgctttaatttgtgctggacaaggaactatcggtttggaaattctagaagatttagtggatgtagaaaccgttgtagttccagtcgggggcggtggtctaatttcaggaatcgccacggctttaaaatcaatcaatccttcaattcatatcgtcggagttcaatcggaaaatgtgcatggcatgaaggcgtctgttgatgcaggcaaaattgttaaacatcaccaagattttacgctagcagacggaactgatgtagcaaccccaggtaatattacatttgggattgtttccaaactagtggatgagattgtcttggttagtgaagaagaaatttcaaaagcgatgaaagatttaatgcagagaaccaaggtggttgctgaaggagcaggagcattgccaacggccgctttagaagcaggtaagattgatccaaaatggactaaagataagaaggttgtagctttagtttccggtggaaatgtggatctacagcgagtttcacagattattgatcacttctttactcctgttgatacgcataaaggtgccattgggtaa

SEQ ID NO: 105164 - protein, 351 aa, Pediococcus pentosaceus ATCC 25745
MLVEKEPRNQVVAATDNLLNLNQIEEAREVIKKYARRTPLVKSMFLSNNVVHGDVYLKLENMQLTGSFKFRGANNKINHLNEEEKQRGVITASAGNHAQGVALTGKLLGIKTTVVMPDEAPQMKRDATRGYGAEVDIHGATFDDAHEWMRERAEKEGKTIVDPFNDALICAGQGTIGLEILEDLVDVETVVVPVGGGGLISGIATALKSINPSIHIVGVQSENVHGMKASVDAGKIVKHHQDFTLADGTDVATPGNITFGIVSKLVDEIVLVSEEEISKAMKDLMQRTKVVAEGAGALPTAALEAGKIDPKWTKDKKVVALVSGGNVDLQRVSQIIDHFFTPVDTHKGAIG

SEQ ID NO: 105165 - DNA, 1020 bp, Solibacter usitatus Ellin6076
  CDS (1)..(1020): transl_table=11
atggcacaactgcgcctcaacgagcccctgagtaacgccggacgcacccctccggttagactcataggaatggctctcgcaattcaggctgacgacgtacgcgccgctgcggaacggatccgccccctggcgcgcaaaaccccggtcttcacttcggccggattcgataccgaagccggcgcccgcgtctatttcaaatgcgagaacctgcagcgcggaggcgccttcaagattcgcggggcagccaatctcgtgctttcactgccacccgaatcgctagcacgcggcgttgtcgcgtactcctcgggcaatcacgctcaagccaccgcgatcgccgcccgccatgtaggcgtcgcttcgactatcgtcatgccggaggatgcgccgaaatccaaaatggaagcgacgcgtgcccacggcgcgcggatcgtcacctacaatcgcttcaccgacagccgcgaagctatcgcgcagagcatcctcaaggaaaccggcgccaccctgatcccgcccttcgaccacccgatgatcatggccggacaaggcaccgccgctctcgagttgctcgaagagaccggcccgctggacgccctgatcgcccccgtgggcggcggcggactgctctccggctgcgctactatcgccaaagcccttcaccccaccgttcgcgtcttcggcgcggaaccggctggcgccaacgacaccttcctctccatggtcgccggaacccgcatcgcggtgcatcccgacaccatcgccgacgggctccgttcgcccaagcccggcgagttgaccttccccgtcatccgcgaactggccgagcgcatcctgctggtcagcgaagacgagatccgcgctgccgtccgcttcctcctgctacgcctgaagatcctcgtggaaccaagcggcgcagtgcccgcggcggccctgttgtttcacaagctgcccgagggcatccgctcggtcggtgtgattctctccggcgggaatgtggatttcgaagaactcgcccgcatgtaa

SEQ ID NO: 105166 - protein, 339 aa, Solibacter usitatus Ellin6076
MAQLRLNEPLSNAGRTPPVRLIGMALAIQADDVRAAAERIRPLARKTPVFTSAGFDTEAGARVYFKCENLQRGGAFKIRGAANLVLSLPPESLARGVVAYSSGNHAQATAIAARHVGVASTIVMPEDAPKSKMEATRAHGARIVTYNRFTDSREAIAQSILKETGATLIPPFDHPMIMAGQGTAALELLEETGPLDALIAPVGGGGLLSGCATIAKALHPTVRVFGAEPAGANDTFLSMVAGTRIAVHPDTIADGLRSPKPGELTFPVIRELAERILLVSEDEIRAAVRFLLLRLKILVEPSGAVPAAALLFHKLPEGIRSVGVILSGGNVDFEELARM

SEQ ID NO: 105167 - DNA, 1644 bp, Shewanella sp. ANA-3
  CDS (1)..(1644): transl_table=11
atgttatctctcgcatcgtcgcaaacggagcaggctgaggcgcaggcctctcagtcgaagccgggcacttctgccttagaaaagagtcagcttgcgcaaagctacctgcaaaaaatcctgctgtcgtcggtttatgacgttgcgaaagtgacgccactctcgagcctgaataaactttcggcgcgtttgggctgccaagtatttttaaagcgtgaggatatgcagccagtgcattccttcaagttgcgcggcgcctataaccgtatcgcccagttaagccaagccgaatgtcaacgcggcgtagtgtgcgcctcggcgggtaaccatgctcaaggcgtggccatgtcggcggccagtcgtggtgtggatgctgtgattgtgatgcccgaaactacgccggatatcaaagtcgatgctgtgcgccgcttgggcggcaacgtagtgttgcacggccaagccttcgatcaggccaatggctttgcgatggagatggcaaagctggagggtcgggtgtatatcgcccccttcgatgacgaagccgttatcgcaggccaaggcactatcgcccaagaaatgctgcaacagcagcgcgaccttgaagtggtatttgtgcccgtgggcggcggtggcttaattgctgggattgcggcctattacaaggcggtgatgccacaggtcaaaattgttggggtggagcctgaagatgcggcttgcttaaaagcggcgatggaggcgggcgagcctgtcacacttgcgcaagttggcttgtttgccgatggggtcgcggttaaacgtatcggcacagagccatttcgcttagctaagtggtttgtggatgaagtggtgacggtaacgtccgacgaaatctgcgctgctgtaaaagatatttttgaggatacccgcgccattgccgaacctgctggcgccttatcccttgcggggcttaaaaaatacgtcagcaccaatgccgcaggcgagagtggcaagggggaaaaagtcgcggcgatattaagtggcgcgaatgtgaacttccatagcctacgttatgtatcggagcgctgcgagttgggtgagcaaaaagaagccgtgctggcggttaaagtgcccgagcgtcccggcagcttcctgcgtttttgtgagttgctcgaaaagcgggtgatgaccgaatttaactatcgctttagtagccgcgatatggcggtggtgtttgcgggtattcgtctgaccaaaggccatggcgaattagagcagatcatcaataccttagaagataatggcttcgaggtgcaggacttatccggtgacgaaaccgcgaaattgcatgtgcgttatatggtcggtggtcatccgccagagccgttagaggagcgcctatttagcttcgagtttcccgagcatccgggggcgctgctgaagtttttaactaccctgcagagcaagtggaatatcagtttattccattaccgtaatcacggcgcggcctttgggcgagtgctggcggggttcgaagttcccgagggcgatgccttgccgtttcagcagtttttaactgagctgggatttgtctatcaagaagagacgcaaagccctgcttatcaactatttttgaatgctggaaaaggaaaaaagagcctgcctttgtaa

SEQ ID NO: 105168 - protein, 547 aa, Shewanella sp. ANA-3
MLSLASSQTEQAEAQASQSKPGTSALEKSQLAQSYLQKILLSSVYDVAKVTPLSSLNKLSARLGCQVFLKREDMQPVHSFKLRGAYNRIAQLSQAECQRGVVCASAGNHAQGVAMSAASRGVDAVIVMPETTPDIKVDAVRRLGGNVVLHGQAFDQANGFAMEMAKLEGRVYIAPFDDEAVIAGQGTIAQEMLQQQRDLEVVFVPVGGGGLIAGIAAYYKAVMPQVKIVGVEPEDAACLKAAMEAGEPVTLAQVGLFADGVAVKRIGTEPFRLAKWFVDEVVTVTSDEICAAVKDIFEDTRAIAEPAGALSLAGLKKYVSTNAAGESGKGEKVAAILSGANVNFHSLRYVSERCELGEQKEAVLAVKVPERPGSFLRFCELLEKRVMTEFNYRFSSRDMAVVFAGIRLTKGHGELEQIINTLEDNGFEVQDLSGDETAKLHVRYMVGGHPPEPLEERLFSFEFPEHPGALLKFLTTLQSKWNISLFHYRNHGAAFGRVLAGFEVPEGDALPFQQFLTELGFVYQEETQSPAYQLFLNAGKGKKSLPL

SEQ ID NO: 105169 - DNA, 951 bp, Mycobacterium smegmatis str. MC2 155
  CDS (1)..(951): transl_table=11
gtggacctggtgaccctcgacgacatctccggcgcagccgcgcgcatcgcggccgacatcgtgcgcaccccactgctggccgccgattggggtgacccccgctgcccgctgtggctcaaggcggagaccctgcagcccatcggcgcgttcaagatccgcggcgcgttcaacgcgctgggccgtctcgacacgcataccagagcccggggtgtggtggcctattcgagcggcaaccatgcccaggccgtggcatatgccgccgcagcctacggcgtgcccgcccatatcgtgatgccggaagagacgcccgcggtcaaggtggaggccacccgtcggcgcggcgcccacgtggtgctgtgcggggcgggggagcgtgaacgcaccgccgccgaactggtcgagaagacgggtgcggtgctgatcccgcccttcgaccaccccgacatcatcgcgggccagggcacgatcggcatcgagatcgccgaggatctccccgaactcgcgaccgtgctgatacccgtcagcggtggtgggctcgcctccggtatcggcaccgcgatccgcgcgttgcgcccgaaggcgaagatcttcgcggtggaacccgaactcgcggccgacaccgccgagtctctcgcactggggagcatcgtcgaatggcctgtggcgaaacggaaccggaccatcgccgacgggctgcggtcgacgccttcggagttgacgttcgcgcacctgcgccaggtcatcgacgacgtgatcaccgtgagtgaggacgagatccgctcggcggtaagggaactggcgttgcgggcacgcctggtcgccgaacccagcggcgcggtgtcgctcgccggttatcgcaaggccgcgctcccggacgggtccgcggtggccatcgtgtccggcggcaacatcgaaccggcacagctggccgccattctcgcgggcggttag

SEQ ID NO: 105170 - protein, 316 aa, Mycobacterium smegmatis str. MC2 155
MDLVTLDDISGAAARIAADIVRTPLLAADWGDPRCPLWLKAETLQPIGAFKIRGAFNALGRLDTHTRARGVVAYSSGNHAQAVAYAAAAYGVPAHIVMPEETPAVKVEATRRRGAHVVLCGAGERERTAAELVEKTGAVLIPPFDHPDIIAGQGTIGIEIAEDLPELATVLIPVSGGGLASGIGTAIRALRPKAKIFAVEPELAADTAESLALGSIVEWPVAKRNRTIADGLRSTPSELTFAHLRQVIDDVITVSEDEIRSAVRELALRARLVAEPSGAVSLAGYRKAALPDGSAVAIVSGGNIEPAQLAAILAGG

SEQ ID NO: 105171 - DNA, 1215 bp, Nocardioides sp. JS614; identical to SEQ ID NO: 12585
  CDS (1)..(1215): transl_table=11

SEQ ID NO: 105172 - protein, 404 aa, Nocardioides sp. JS614; identical to SEQ ID NO: 12586

SEQ ID NO: 105173 - DNA, 1200 bp, Acidovorax sp. JS42
  CDS (1)..(1200): transl_table=11
atgctgaccttccaagacatccagcacgccgctgagcgcctgcgcggccaggtactcgaaaccccctgcgtcgaatcgcgcacgctctcgcagatcgtgggcgcacaggtgttcctcaagttcgagaacctgcagttcaccgcctcgttcaaggaacgcggcgcctgcaacaagctgagccagctcactccccaagaacgcgagcgcggcgtggtggccatgagcgcgggcaaccatgcccagggggtggcctaccacgcgcagcgcctgggcctgcgcgccgtgatcgtcatgccgcgcttcacccccggtgtgaaagtggagcgcacgcgcggctttggtgccgaggtggtgctgcacggcgacacgctggaggaggcccgccagcatgcctaccagctggcggagcagcagggcctgaccttcgtgcacccctacgacgacgaggccgtggccgccggccagggcacgctggtgctggagatgctggccgcccagcccgacctggatgcgctggtggtttcggtgggcggcggcgggctgctggccggcatggcaacggcggcgcgggccatcaagccgaacctggagatcatcggcgtgcagacggcgcgcttcccggccatggtgaatgccatcaagggcacgcaccacgcgcagggcgcgtcaaccatcgccgagggcatcgccgtgggccagcccgggaagatgacgcaggaggtcattggccggctggtggatgacctgctgctggtggacgaaggcgacatcgagcaggcggtgctgatgctgctggagatcgagaagacgctggtggaaggcgcgggggccgccgggctggccgcgctggtgcgccaccccgagcgctttcgcggcaagaaggtggggctggtgctcagcggcggcaacatcgacccgctgctgctggcggccatcatcgagcgcggcatggtgcgctccggccggttggcgcgcatcatggtcagcgcacgcgacgtgcccggcgtgctcgcccgcatcaccgccctcgtggccgaagcgggcgctaacatcgaagaggtgcaccaccagcgcgccttcaccgtgctggccgcgcagaacgtggagatcgaactggtgctgcaaacgcgcggcaaggcccacatccagcaggtgctggacctgctgcgcgccgcgcagatggaggccgagctgcgctga

SEQ ID NO: 105174 - protein, 399 aa, Acidovorax sp. JS42
MLTFQDIQHAAERLRGQVLETPCVESRTLSQIVGAQVFLKFENLQFTASFKERGACNKLSQLTPQERERGVVAMSAGNHAQGVAYHAQRLGLRAVIVMPRFTPGVKVERTRGFGAEVVLHGDTLEEARQHAYQLAEQQGLTFVHPYDDEAVAAGQGTLVLEMLAAQPDLDALVVSVGGGGLLAGMATAARAIKPNLEIIGVQTARFPAMVNAIKGTHHAQGASTIAEGIAVGQPGKMTQEVIGRLVDDLLLVDEGDIEQAVLMLLEIEKTLVEGAGAAGLAALVRHPERFRGKKVGLVLSGGNIDPLLLAAIIERGMVRSGRLARIMVSARDVPGVLARITALVAEAGANIEEVHHQRAFTVLAAQNVEIELVLQTRGKAHIQQVLDLLRAAQMEAELR

SEQ ID NO: 105175 - DNA, 975 bp, Nostoc punctiforme PCC 73102
  CDS (1)..(975): transl_table=11
atgtcacaaactaattccgttactataactgatgtgcaagcagcacaagagcgaattttgggaattgcccatcgcacgccggtgctaacttctagaatggttaacgatcgcaccaatagccaagtattctttaaatgcgagaactttcaacgcaccggggcatttaaatttagaggggcgtataatgccttagcgcaactatcggtagcccaaaaacaaacaggcgttatcacctattcatcaggaaatcatgctcaagcgatcgctctagctggtaaactcctcaatatccctaccactattgtcatgcctgatgatgcacccactgtcaaacaaactgcgactcgtggttatggtgcagagataattttatacaatcgccaggaggcaaaccgagaagaattagcccaaagtttagcaagcgatcgctctttgacactcatccctccttacgatcatccccatgtagtcgccggacagggaacaactgctttagaactgattcaagaagttggtgaattggacttgctattagtttgttgtggcggtggcggattactttcaggatgtgcgatcgcagctaaagcacttttacccaattgtaaagtaatcggggtagaaccagcacttgccgacgatgctacccgctcttttcacaccaaaaccctgcaaactgtcaagaatcctgataccatcgccgatggtgcgcggactcctagccttggtaaaattactttccccttagtgctgcattacgtcgatgatatggtgacggtatctgaagaagcaattcttcgcaccatgtttttcttgtgggaacgtctgaaaattgtagttgaacccaccggagtacttgcagccgcagccttactcgaaggtgtggtgacagcaccagagtcgaggattggtgtgatcatcagtggtggaaatgtcgatttggcgcaagttggtaaattgttttctggtggattttga

SEQ ID NO: 105176 - protein, 324 aa, Nostoc punctiforme PCC 73102
MSQTNSVTITDVQAAQERILGIAHRTPVLTSRMVNDRTNSQVFFKCENFQRTGAFKFRGAYNALAQLSVAQKQTGVITYSSGNHAQAIALAGKLLNIPTTIVMPDDAPTVKQTATRGYGAEIILYNRQEANREELAQSLASDRSLTLIPPYDHPHVVAGQGTTALELIQEVGELDLLLVCCGGGGLLSGCAIAAKALLPNCKVIGVEPALADDATRSFHTKTLQTVKNPDTIADGARTPSLGKITFPLVLHYVDDMVTVSEEAILRTMFFLWERLKIVVEPTGVLAAAALLEGVVTAPESRIGVIISGGNVDLAQVGKLFSGGF

SEQ ID NO: 105177 - DNA, 1266 bp, Bifidobacterium longum DJO10A; identical to SEQ ID NO: 12589
  CDS (1)..(1266): transl_table=11

SEQ ID NO: 105178 - protein, 421 aa, Bifidobacterium longum DJO10A; identical to SEQ ID NO: 12590

SEQ ID NO: 105179 - DNA, 1002 bp, Bacillus cereus G9241
  CDS (1)..(1002): transl_table=11
atgataactaaaaaactaccattgcatatagacgatattaaaaaagctcaaactattttggacagaaatgttcgtaaaactccattagtaaaatcattttatttgactagtaaaacaggtggagaaattcacttgaaattagaaaatatgcaattaacaggttcgtttaaattccgtggtgcgtttaataaaatgtcacagcttacagatcaagaaaaagaaagaggagtaattgcttgttctgctggtaatcatgcgcaaggaattgctttatctgctcatttacttggtattaagagtaaaattgttatgccgatttctgcaccgcaggcgaaagttgatgcgactaaaggatatggatctgaagtagttttacatggtgaaacctttgatgatgcgaaggcaaaatgtgaggagattattagggaaacaggtgaaacatatttacatccatatgacgatgtagaagtaatggcaggtcaaggtacaataggattagatattcttgacgatatgtgggatgttgatactatcattgtaccaattggtggaggtggaattatttctggtattgctgttgcattaaaatcttttaatccatcgattcatataattggtgtccaagcagataatgttcatgggatgaaggcatcttatgacaaaggtacaattgtagaacattataaggcacctactatagcagatggttgcgcggttaaaataccaggcaatttaacttttgaagttgtaaaagaattagtagatgatattgtaacagtatcagaaggcgaattagaagtagcgatgaaagacttattacaacgtgggaaagctgttgtagaaggggcgggggcattagctactgctgctctacttgcagggaaagtggatacatatattaaggggaaaaaagtagtagcggttatatctggtgggaacgtagacttgcagcgcatttcaagtgtttgtgagcaattttttgtagctaatgaagtgaaatag

SEQ ID NO: 105180 - protein, 333 aa, Bacillus cereus G9241
MITKKLPLHIDDIKKAQTILDRNVRKTPLVKSFYLTSKTGGEIHLKLENMQLTGSFKFRGAFNKMSQLTDQEKERGVIACSAGNHAQGIALSAHLLGIKSKIVMPISAPQAKVDATKGYGSEVVLHGETFDDAKAKCEEIIRETGETYLHPYDDVEVMAGQGTIGLDILDDMWDVDTIIVPIGGGGIISGIAVALKSFNPSIHIIGVQADNVHGMKASYDKGTIVEHYKAPTIADGCAVKIPGNLTFEVVKELVDDIVTVSEGELEVAMKDLLQRGKAVVEGAGALATAALLAGKVDTYIKGKKVVAVISGGNVDLQRISSVCEQFFVANEVK

SEQ ID NO: 105181 - DNA, 1569 bp, Kineococcus radiotolerans SRS30216
  CDS (1)..(1569): transl_table=11
atgccgacgatcagggaggcctcgaggccctcgcgcagtccgacgacgaacgtggcgagcacgggcagctcctcgggtcgggcggggacccaccggagtgaggtgagcctcgccgatgctagggcagcctcacctttcttctaccccgtggcgctcggatgtgcgccacatcacacgacggtccggaacctcccgcacccacccgcgttgagaggctcggccccacccacccctggtggtggtggtcgggcggggacgggcaggatcgaccccatgtcgctcgatgccgtgcccgctcccgccccgcccgacgcaccgccccgggcggcggacgtcgaagcggcggccgagcggctgtcccgggtcgtgacccgcacccccctcgccaccagcgcccgctggtcggccgccctgggggcgcacgtgcgcgtcaagcgggaggacctccaggtcgtgcgctcctacaagctgcgcggggcctacaacctggtctcccagctcaccgacgagcagcgcgggcgcggggtggtcaccgcgagcgccggcaaccacgcccagggcctggcctacgcctgcgcggccctgcgggtgcgcggacgcatctacgtgccgcgcacgaccccgcgccagaagcgggaccgcatcgccgccctgggccaggagttcgtggagaccatcgtcctgggcgacacctacgacgactccgccgccgcggcgctcgaggacgccgagcgcaccggcgcgacgatggtgcccgccttcgacgacgcccggacggtcgcggggcagggcacggtcgcggtcgaggtcttcgagcagctcgagcagctcggcgagggcccgccggacgtggtcgtcgtccccgtcggcgggggcgggctgctggccggggtgctggcctgggtccgcgagcggcacccgcaggtgcgggtcgtgggggtggagcccgcgggggcgccctcgatggcggcggcgctggccgccggtcgtccggtgcggctggagcacctggacaccttcgtcgacggcgcctcggtccgccgcgtcggcgacgtcccgcacgccgtggtggccggtcacgaggtggagctcgtcgcggtgcccgagggggcgatctgcgtggagatgctggcgatgtaccagaccgacgggatcatcgccgagcccgcgggggcgctggccacggcggcgctggcggaggcggtccgcgtcgaaccgggccagagcgtggtctgcgtggtctccggcggcaacaacgacatcagccgctacgcggagatcatcgagcgggccctcgtccacgagggccgcaagcactacttcctcgtggagttcccgcaggagcccggtgcgctgcgccgcttcctcgacgaggtgctcggcccggacgacgacgtcacgctcttcgagtacgtcaagcggaacaaccgcgagttcgggccggccctggtgggcatcgagatccccggcaaggacgacctgccggggctgctggcccggatggaggccgctcccccgtcgttcgagcggatctcggcgacggacccgctgtaccgctacctgttgtag

SEQ ID NO: 105182 - protein, 522 aa, Kineococcus radiotolerans SRS30216
MPTIREASRPSRSPTTNVASTGSSSGRAGTHRSEVSLADARAASPFFYPVALGCAPHHTTVRNLPHPPALRGSAPPTPGGGGRAGTGRIDPMSLDAVPAPAPPDAPPRAADVEAAAERLSRVVTRTPLATSARWSAALGAHVRVKREDLQVVRSYKLRGAYNLVSQLTDEQRGRGVVTASAGNHAQGLAYACAALRVRGRIYVPRTTPRQKRDRIAALGQEFVETIVLGDTYDDSAAAALEDAERTGATMVPAFDDARTVAGQGTVAVEVFEQLEQLGEGPPDVVVVPVGGGGLLAGVLAWVRERHPQVRVVGVEPAGAPSMAAALAAGRPVRLEHLDTFVDGASVRRVGDVPHAVVAGHEVELVAVPEGAICVEMLAMYQTDGIIAEPAGALATAALAEAVRVEPGQSVVCVVSGGNNDISRYAEIIERALVHEGRKHYFLVEFPQEPGALRRFLDEVLGPDDDVTLFEYVKRNNREFGPALVGIEIPGKDDLPGLLARMEAAPPSFERISATDPLYRYLL

SEQ ID NO: 105183 - DNA, 1053 bp, Xylella fastidiosa Dixon
  CDS (1)..(1053): transl_table=11
atggatatacctgatgtaggtcacaccgttgtcaagcaatccaatgcaagtaacgtcaataccgtgagtgtggccgatgtgttggctgcacaagcccgcttacgtcgttatctaatgcctaccccaattcactatgccgagcgtttcggagtgatgctgaagttagaaaatctgcaacgcaccggatcctataaagtgcgcggcgcactgaacgcaatgttagttgcgctggaacgcggcgataaccgcccagtcatttgcgcatcagccggtaaccacgcccaaggcgtagcttggtcagcttaccggctgggtatacaagcaatcactgtcatgcctcacggtgctccggccacaaaggttgcaggtgtttcacattggggggcaacggtacgccaacacggccaaagctatgacgaggcctatacgttcgcatgtgagttggctgagcaaaacgattaccgctttctatcagcattcgatgatccggatgtgattgccggtcagggaactgttggcatagagatcaccgcgcatgaaccggatgtagtcattgtgccgatcggcggcggcggccttgcttcaggcattgctttggtgctgcgctcacagggagtacgtgtcattggcgctcaggtcgagggcgtggatgcgatggcgcgtgcaatccgtggcgacacacgcgagatcgctccagtttcgaccttagctgacggggtgaaagtcaagattcctggtttcattacccgccatctgtgtgccaacttgttagacgatgtagtaatcgtgcgtgaggctgaactgcgcgaaacattggtgcgtttactattggaagaacacctgatcgccgaaggggcaggcgcactggcattggccgctggccgccgcgtttcaggtaagcgcaagtgtgcagtggtctccggaggtaatattgacgctgcagtactggccaaactgttgtcagaagtaagaccacggccaccacgcaaaccacgcagacgtagtgcagatcgccccaacaattccggcaatttaccgctcccttttaactga

SEQ ID NO: 105184 - protein, 350 aa, Xylella fastidiosa Dixon
MDIPDVGHTVVKQSNASNVNTVSVADVLAAQARLRRYLMPTPIHYAERFGVMLKLENLQRTGSYKVRGALNAMLVALERGDNRPVICASAGNHAQGVAWSAYRLGIQAITVMPHGAPATKVAGVSHWGATVRQHGQSYDEAYTFACELAEQNDYRFLSAFDDPDVIAGQGTVGIEITAHEPDVVIVPIGGGGLASGIALVLRSQGVRVIGAQVEGVDAMARAIRGDTREIAPVSTLADGVKVKIPGFITRHLCANLLDDVVIVREAELRETLVRLLLEEHLIAEGAGALALAAGRRVSGKRKCAVVSGGNIDAAVLAKLLSEVRPRPPRKPRRRSADRPNNSGNLPLPFN

SEQ ID NO: 105185 - DNA, 972 bp, Sulfitobacter sp. EE-36
  CDS (1)..(972): transl_table=11
atgaatatcgacatgatccgcgcggcagcgcggcggctggaggggcacgtgcggcgcacgcctttgctgaactctccgtttctggatgacatcgcggggcggcgcgtttgggtcaagcccgagtgcctgcaacacaccggcagcttcaagtttcgcggcggctggtcggcggtgtcggctctggagccctccgtacgcgccaagggggtcatcgccttttccagtggcaaccacgcccaaggtgttgcctatgcggccaagctgcacggggtgcctgcggtgatcatcatgcccgccgacgccccccgtctgaagatcgccaacacccgcgcgcttggggccgaggtcgtactttatgaccgcatgaccgaggaccgcgacgccataggcgcagctatggcggaggaacgcgaattgacgctgatcaaaccgttcgacgacccgctggtgattgccggtcaggggacaacggggctcgagatcgcgcagcaggccgccgaagcggggattgcccgtgccgatgtgattgcctgctgtggtggcggggggctgacctctggcatcgcgctggcgcttgaagccgaggcaccggggctgcgcgcgcgtaccgccgagcccgaaggctttgacgataccgcgcggtcgctcgccgcaggagagatcacgcgcaacgccgcccttggcgggtcgatctgcgatgccatcgtcacgccgcaaccgggcgatctgacctttccgatcctcaagcggctttgcggccccggccttgtggtcagcgacaacgaagcgctgcaggcgattggccatgcgttcaaccgtctcaaacttgtggccgaacccggcggggctgtggccctcgccgccgcattgttccggcaagacgagatcgacggcgacgatgtgatcgtcaccatctcgggcgggaatgtagaccgtgatattttctcgcgggcgcttgccacgcttgactga

SEQ ID NO: 105186 - protein, 323 aa, Sulfitobacter sp. EE-36
MNIDMIRAAARRLEGHVRRTPLLNSPFLDDIAGRRVWVKPECLQHTGSFKFRGGWSAVSALEPSVRAKGVIAFSSGNHAQGVAYAAKLHGVPAVIIMPADAPRLKIANTRALGAEVVLYDRMTEDRDAIGAAMAEERELTLIKPFDDPLVIAGQGTTGLEIAQQAAEAGIARADVIACCGGGGLTSGIALALEAEAPGLRARTAEPEGFDDTARSLAAGEITRNAALGGSICDAIVTPQPGDLTFPILKRLCGPGLVVSDNEALQAIGHAFNRLKLVAEPGGAVALAAALFRQDEIDGDDVIVTISGGNVDRDIFSRALATLD

SEQ ID NO: 105187 - DNA, 981 bp, Roseovarius nubinhibens ISM; identical to SEQ ID NO: 12607
  CDS (1)..(981): transl_table=11

SEQ ID NO: 105188 - protein, 326 aa, Roseovarius nubinhibens ISM; identical to SEQ ID NO: 12608

SEQ ID NO: 105189 - DNA, 981 bp, Oceanicola batsensis HTCC2597
  CDS (1)..(981): transl_table=11
ttgaatatcgacatgatccgcgatgcggcccgacgggcggccgggcatatccggcggacaccgctgctgacatcgcccttcctggacgagatcgcggggcggcgcgtctacgtgaaacccgagtgcctccagcacaccggcagtttcaaggcgcgcggggcgtggtcggcgctgtcggcgatggaccccgatctgcgcagcgcgggcgtgatggcctattcctcggggaaccatgcccagggtgtggcctgggcggccgcatgtcacggcgcgcccgccgtgatcctgatgccctcggacgcgccggcgctgaaacgcgcgaacacggcggcgctcggggccgaggtggtgctctacgaccgcgcgaccgagagccgcgaggagatcggagagcgcatcgcgaccgagcgcgggctgacgctggtccgcccctacgacgagccgcaggtgatcgcgggccagggcaccgtggggctggaaatcgccgcgcaggcggcagaggcggggatcgacgccgccgaggtgctggtctgctgcgggggcggcggcctgacctcgggaatcgcgctggcctgcgaggccgaggcaccgggcctgcgcgtgcgccctgtcgagccggagggattcgacgacgtgcgccggtctctgctggcgggcgggatcgagcgcaacgacagcctgtcggggtcgatctgcgatgcgatcgtcacgccgcagccgggcgacctgacgttcccgatcatccggcggctctgcgggccggggctggccgtctcggacgacgaggcgctgcatggcatggcgcaggcgtttctgcggctcaaggtcgtggcggagcccggcggcgccgtcgcgctggccgcggcgctgctgcgcccgaccgaaatcacgggcgacgcggtggtggtcgtgatctccggcgggaatgtcgatcccgaggtgcattccggggccctcgcccgccacgggaggacctcgtga

SEQ ID NO: 105190 - protein, 326 aa, Oceanicola batsensis HTCC2597
MNIDMIRDAARRAAGHIRRTPLLTSPFLDEIAGRRVYVKPECLQHTGSFKARGAWSALSAMDPDLRSAGVMAYSSGNHAQGVAWAAACHGAPAVILMPSDAPALKRANTAALGAEVVLYDRATESREEIGERIATERGLTLVRPYDEPQVIAGQGTVGLEIAAQAAEAGIDAAEVLVCCGGGGLTSGIALACEAEAPGLRVRPVEPEGFDDVRRSLLAGGIERNDSLSGSICDAIVTPQPGDLTFPIIRRLCGPGLAVSDDEALHGMAQAFLRLKVVAEPGGAVALAAALLRPTEITGDAVVVVISGGNVDPEVHSGALARHGRTS

SEQ ID NO: 105191 - DNA, 1254 bp, Erythrobacter sp. NAP1
  CDS (1)..(1254): transl_table=11
atgaacgcgccagacaaaagcatcaaagccacggccacaccggccgatctcacgctcgaagacgtgaaagccgctgccgcacgtatcgaaggttcggtggtgaaaacgccgatgatgcattcgattacgctctcggaaattaccggcgcggatatctggctgaagtttgaaaacctccagtttacggctgcctataaagagcgcggcgctctcaatgcgttgctgcagctgaccgatgaacagcgtgagcgcggcgtgatcgcagcctcggcgggcaaccattcgcaagggctttcctatcacggcacccgtctgggtgtaccggtcacgattgtgatgcccaagacgacgccgacggtgaaggtgatgcagaccgagagcgtgggcggcaacgtcgtgcttcacggtgagactttcgatgaagcgaacgcccatgcccgcgagctggagatcgaacgagggctgacattcgtgcacccgttcgacgatccgcatattgctgctgggcagggcacggtcgcgctcgagatgctcgaattgaaggacgacttcgattgcctcgtcacgccaatcggaggcggcggtctgatctcaggcatggcgacggtcgccaagacgcttaatcccgacattgagatggtcggtgtgcaggcgggcctcttcccaagcatgttcgaccgcttcaagggcgagagccacgattgcggcggcgacaccttggccgaaggtatcgcggtaaagaaccccggcgagttcacctcgcaggtcatcaaggaacgggtcgacgacatcctgctggtcgatgagccaagccttgaaaaggcagtctcgctcctgctccagatcgagaagacggtggtcgaaggtgcaggcgcagcaggcttggctgccgtgctggaaaacccggagcgttttgcaggaaagacggtcggcctcgttctgtgcggcggcaatatcgatacgcgcctgctcgccaacgtactgctgcgcgaccttgcgcgtcagggccgtctcgcgcgtcttcgcgttaccttgcaggatcgtccgggcgcgcttttcaaggtcatgcgcctgttcgacgagcacaacgtcaatatcattgagatctaccaccagcgcatcttcaccacccttccggcgaagggtctgatcaccgatatcgaatgcgaagcgcgcgatgcggggcaggtcgaacgtctggttgaggcgctgcgcggcgctaagtaccaggtgcaggtggtcgagctaaattag

SEQ ID NO: 105192 - protein, 417 aa, Erythrobacter sp. NAP1
MNAPDKSIKATATPADLTLEDVKAAAARIEGSVVKTPMMHSITLSEITGADIWLKFENLQFTAAYKERGALNALLQLTDEQRERGVIAASAGNHSQGLSYHGTRLGVPVTIVMPKTTPTVKVMQTESVGGNVVLHGETFDEANAHARELEIERGLTFVHPFDDPHIAAGQGTVALEMLELKDDFDCLVTPIGGGGLISGMATVAKTLNPDIEMVGVQAGLFPSMFDRFKGESHDCGGDTLAEGIAVKNPGEFTSQVIKERVDDILLVDEPSLEKAVSLLLQIEKTVVEGAGAAGLAAVLENPERFAGKTVGLVLCGGNIDTRLLANVLLRDLARQGRLARLRVTLQDRPGALFKVMRLFDEHNVNIIEIYHQRIFTTLPAKGLITDIECEARDAGQVERLVEALRGAKYQVQVVELN

SEQ ID NO: 105193 - DNA, 1554 bp, Photobacterium sp. SKA34; identical to SEQ ID NO: 12623
  CDS (1)..(1554): transl_table=11

SEQ ID NO: 105194 - protein, 517 aa, Photobacterium sp. SKA34; identical to SEQ ID NO: 12624

SEQ ID NO: 105195 - DNA, 1278 bp, Xanthobacter autotrophicus Py2
  CDS (1)..(1278): transl_table=11
atgacagcccccgccgtcgcctccagcgaccgccccctcgacctcaacgtcgacctgcccgtcaccctcgcggacgtggaggcggcgcgggcgctggtgagcggcgcggtattgcacacgcccaccctgcacgccccgcgcctgtccgccctcaccggtgcggatgtgtacgtgaagtatgagaatctccaggtcaccgcctcgttcaaggagcgcggcgcgctggtgaagctggcgcgcctcacccccgaggaggcgcggcggggcgtggtggccatgtcggcgggcaaccatgcccaggcggtggcctatcacggtacgcggctgaagatttccaccctcatcgtcatgccggagaccaccccccaggtgaaggtggccgccactgaagccttcggcgccgaggtggtgctgttcggcgatacggtcgccgacgccttcgaggaggcaacgcgcatctccaaggcgcaagggcgcatcttcgtccacccctatgacgacgtggacgtgatcgccggccagggctcgctggcgctggagatgatggaggacgggccggccttcgacgccgtggtggtgcccatcggcggaggcgggctgatcgccggcatggcgctggccttcgccgggcgctcgccggcgacgcaggtggtgggggtcgagacccagctctatcccgccatgtggtccgccatgaccggagaggcgcgcccctgcggcgggccgacgctggcggagggcatcgcggtgcgcgacgtgggtgtcatcacctcgcagatcgtgcggcgcctggtaccccacgtggtgctggtggacgagaccgcgctggagcgggcggtgaacgccttcctcatgcaccagaagaccttggccgaaggcgccggcgccgccggccttgccgcgctcctcgccgaacccgagcgcttccgcggcaagacggtggggctggtggtctccggcggcaacatcgatccgcgcatgattgccggcatcctgctgcgcgagctggagcgggaggagcgcatcgtctccttccgcctcaccatcctcgaccggcctggcatgctggggcgcatcgccacgctgctcggcaagctcggggccaacatcctggaggtgcaccaccggcgcaccttcctcgacgtgccggccaagggcacgcggctcgacctcaccgtggagacccgggaccaggcccatgccgagctgatccagaaggcgctggagggcgagggcctgccggtccagcgcctgggcgccggaggcgccgattggtga

SEQ ID NO: 105196 - protein, 425 aa, Xanthobacter autotrophicus Py2
MTAPAVASSDRPLDLNVDLPVTLADVEAARALVSGAVLHTPTLHAPRLSALTGADVYVKYENLQVTASFKERGALVKLARLTPEEARRGVVAMSAGNHAQAVAYHGTRLKISTLIVMPETTPQVKVAATEAFGAEVVLFGDTVADAFEEATRISKAQGRIFVHPYDDVDVIAGQGSLALEMMEDGPAFDAVVVPIGGGGLIAGMALAFAGRSPATQVVGVETQLYPAMWSAMTGEARPCGGPTLAEGIAVRDVGVITSQIVRRLVPHVVLVDETALERAVNAFLMHQKTLAEGAGAAGLAALLAEPERFRGKTVGLVVSGGNIDPRMIAGILLRELEREERIVSFRLTILDRPGMLGRIATLLGKLGANILEVHHRRTFLDVPAKGTRLDLTVETRDQAHAELIQKALEGEGLPVQRLGAGGADW

SEQ ID NO: 105197 - DNA, 1515 bp, gamma proteobacterium HTCC2207; identical to SEQ ID NO: 12627
  CDS (1)..(1515): transl_table=11

SEQ ID NO: 105198 - protein, 504 aa, gamma proteobacterium HTCC2207; identical to SEQ ID NO: 12628

SEQ ID NO: 105199 - DNA, 1215 bp, Desulfitobacterium hafniense DCB-2
  CDS (1)..(1215): transl_table=11
atgcctacactactgactttagaacagatccaagaagcacaacaagctattcagccctatattcaccggacacttctggatcattcaagcaatttgagcgccctggctgggacggagatctacctcaagctggaaaatctgcagaagaccggttcctttaaagttcggggggctatgaataaagccttgaagctttctgaagaggagaagaaaaaaggaatcctggccgcttccgccggcaatcatgcccaaggggtagccatggcggctgcccgtatcggtattcccgccacgattgtcatgccggaaaatgcccccctagccaaagtgtccgctacggaagggtacggagcccaggtcattctgtccggagcggtttttgatgatgcttatcagaaggcagtagagatccaaaaggaaacaggagccacgtttatccatgcttttgatgatctggaagttatggccgggcagggaaccatcggcttggaagtttttgaggagctgcctgaagtggatacggttcttgtccctatcgggggaggagggctgatcgcagggattgctgtggctttgaaatccctgaagccttccgtgcgcgtgatcggtgtccaagcggccggagcggcaagcatggctcacgcgctgagcataggcaggcccgagccattagggcaggccagtactttggcagatggcattgcggtgaaaagggcaggtgatctaaccttcgcagcagtccgccattatgtggatgagatggtgacggttgaagaagaagagattagtcaagctattctcctgttgatggagcgcaccaaaacccttgctgaaggagccggggcggttgccgtagcggcggcgcttcagggtaagctggatcttaaggagcagaaaacggttctcatcctgagcgggggaaatattgacgtgaatttcctggcccagattatcgaacggggactgaggcgttccgggcgtaccatggcctgccagcttcttttgccggatcaacccggcaacttagaaaaggtgatcgagcttatagcccaggaacgggccaatatcatcaacgtcgaacactcccgctatgatttagccgttcctctgcgttcagcccgtgttcatatgctgctggaaacccaaagttttgaacatcaaaagcgcattattcagcgtttagaaggtgccggatatcccctgaccgttaactga

SEQ ID NO: 105200 - protein, 404 aa, Desulfitobacterium hafniense DCB-2
MPTLLTLEQIQEAQQAIQPYIHRTLLDHSSNLSALAGTEIYLKLENLQKTGSFKVRGAMNKALKLSEEEKKKGILAASAGNHAQGVAMAAARIGIPATIVMPENAPLAKVSATEGYGAQVILSGAVFDDAYQKAVEIQKETGATFIHAFDDLEVMAGQGTIGLEVFEELPEVDTVLVPIGGGGLIAGIAVALKSLKPSVRVIGVQAAGAASMAHALSIGRPEPLGQASTLADGIAVKRAGDLTFAAVRHYVDEMVTVEEEEISQAILLLMERTKTLAEGAGAVAVAAALQGKLDLKEQKTVLILSGGNIDVNFLAQIIERGLRRSGRTMACQLLLPDQPGNLEKVIELIAQERANIINVEHSRYDLAVPLRSARVHMLLETQSFEHQKRIIQRLEGAGYPLTVN

SEQ ID NO: 105201 - DNA, 1554 bp, Alteromonadales bacterium TW-7; identical to SEQ ID NO: 12635
  CDS (1)..(1554): transl_table=11

SEQ ID NO: 105202 - protein, 517 aa, Alteromonadales bacterium TW-7; identical to SEQ ID NO: 12636

SEQ ID NO: 105203 - DNA, 1635 bp, marine gamma proteobacterium HTCC2080; identical to SEQ ID NO: 12639
  CDS (1)..(1635): transl_table=11

SEQ ID NO: 105204 - protein, 544 aa, marine gamma proteobacterium HTCC2080; identical to SEQ ID NO: 12640

SEQ ID NO: 105205 - DNA, 1545 bp, Escherichia coli B
  CDS (1)..(1545): transl_table=11
atggctgactcgcaacccctgtccggcaccccggaaggtgccgaatatttaagagcggtgctacgcgcgccggtctatgaagcggcgcaggttacgccgctacagaaaatggaaaaactgtcgtcgcgtcttgataacgtgattctggtgaagcgcgaagatcgccagccggtgcacagctttaagctgcgcggtgcatacgccatgatggcgggcctgacggaagaacaaaaagcgcacggcgtgatcaccgcttctgcgggtaaccacgcgcagggcgtcgcgttttcttccgcacggttaggcgtgaaggcactgatcgtcatgccaaccgccaccgccgatatcaaagttgatgcggtgcgcggcttcggcggcgaagtgctgctccacggtgcgaactttgatgaagcgaaagccaaagcgatcgaactgtcacagcagcaggggttcacctgggtgccgccgttcgaccatccgatggtgattgccgggcaaggcacgctggcgctggaactgctccagcaggacgcccatctcgaccgcgtatttgtgccagtcggcggcggcggtctggctgctggcgtggcggtgctgatcaaacaactgatgccgcaaatcaaagtgatcgccgtagaagcggaagactccgcctgcctgaaagcagcgctggatgcgggtcatccggttgatctgccgcgcgtagggctatttgctgaaggcgtagcggtaaaacgcatcggtgacgaaaccttccgtttatgccaggagtatctcgacgacatcatcaccgtcgatagcgatgcgatctgtgcggcgatgaaggatttattcgaagatgtgcgcgcggtggcggaaccctctggcgcgctggcgctggcgggaatgaaaaaatatatcgccctgcacaacattcgcggcgaacggctggcgcatattctttccggtgccaacgtgaacttccacggcctgcgctacgtctcagaacgctgcgaactgggcgaacagcgtgaagcgttgttggcggtgaccattccggaagaaaaaggcagcttcctcaaattctgccaactgcttggcgggcgttcggtcaccgagttcaactaccgttttgccgatgccaaaaacgcctgcatctttgtcggtgtgcgcctgagccgcggcctcgaagagcgcaaagaaattttgcagatgctcaacgacggcggctacagcgtggttgatctctccgacgacgaaatggcgaagctacacgtgcgctatatggtcggcggacgtccatcgcatccgttgcaggaacgcctctacagcttcgaattcccggaatcaccgggcgcgctgctgcgcttcctcaacacgctgggtacgtactggaacatttctttgttccactatcgcagccatggcaccgactacgggcgcgtactggcggcgttcgaacttggcgaccatgaaccggatttcgaaacccggctgaatgagctgggctacgattgccacgacgaaaccaataacccggcgttcaggttctttttggcgggttag

SEQ ID NO: 105206 - protein, 514 aa, Escherichia coli B
MADSQPLSGTPEGAEYLRAVLRAPVYEAAQVTPLQKMEKLSSRLDNVILVKREDRQPVHSFKLRGAYAMMAGLTEEQKAHGVITASAGNHAQGVAFSSARLGVKALIVMPTATADIKVDAVRGFGGEVLLHGANFDEAKAKAIELSQQQGFTWVPPFDHPMVIAGQGTLALELLQQDAHLDRVFVPVGGGGLAAGVAVLIKQLMPQIKVIAVEAEDSACLKAALDAGHPVDLPRVGLFAEGVAVKRIGDETFRLCQEYLDDIITVDSDAICAAMKDLFEDVRAVAEPSGALALAGMKKYIALHNIRGERLAHILSGANVNFHGLRYVSERCELGEQREALLAVTIPEEKGSFLKFCQLLGGRSVTEFNYRFADAKNACIFVGVRLSRGLEERKEILQMLNDGGYSVVDLSDDEMAKLHVRYMVGGRPSHPLQERLYSFEFPESPGALLRFLNTLGTYWNISLFHYRSHGTDYGRVLAAFELGDHEPDFETRLNELGYDCHDETNNPAFRFFLAG

SEQ ID NO: 105207 - DNA, 1560 bp, Pseudomonas putida GB-1
  CDS (1)..(1560): transl_table=11
atgaccagcttcagtgtccttcgtaccaccgtcaccccccagcaactgctgtcggagcaggtgcggcgcattcttgccgcgccggtgtacgacctggccatcgaaacgcccctgcaggccgcgcctgccttgtccgccagcctgggtaaccaagtactgctcaagcgcgaagacctgcagcctacgttctcgttcaagattcgtggggcctacactcgcctgtcgcgtcttacccccacgcagcgcgagtgcggggtgatcaccgcttcggcgggcaaccacgcccagggtgtggccctggcggcatcgcacctgggcatgaaggccaccatcgtcatgccgaccaccaccccgtcgttgaaagtggaaggggtgcggtcgcgcggcgggcatgtggtgctgcacggcgagagcttcccccatgccctggcccacgcattgaaactggccgacagcgaaggcgccaccttcgtaccaccgttcgatgacccggacgtgattgccgggcagggcaccgtggccatggaaatcctccgtcagcgcccaggtgccctggacgccatctttgtaccggtgggcggaggcggcttgatcgctggtatcgccgcgtatgtgaagtacctgcgcccagaggtgaaggtgatcggcgtggagccggaagactccaactgtctgcaggccgccatggcagctggcgagcgggtgatcttgccgcaggttggcaccttcgccgatggcgtggcggtggcgcagatcggtgcccattgcttcgaactgtgccggcacttcgtcgatgaggtggtaacggtaagcagcgacgaactgtgcgcggcaatcaaggacatctacgatgacacccgctcgatcaccgagccttccggggccctggccgtggccgggatcaagaagtacgtggcgcgcgaaggcgtgcaggggcagaccctggtagcaatcgactccggggccaatgtcaacttcgatcgtttgcgccatgtggccgagcgggctgaactgggtgagcagcgcgaggcgatcatcgccgtcaccatcccggagcaaccgggcagcttccgcgccttctgccaggcgctgggcaagcggcaaatcaccgaattcaactaccgctactaccccggcaaggaagcgcgcctgttcgtgggtatgcaaacccaccccgtgcacgacccacgcgagcagttgctggccaacttgcgcgagcagggttacaacgtgctggatttgaccgacaacgagctggccaagctgcatgtgcgccataccgtgggcgggcatgcagcaccgggcgcggatgagcgggtactgcgtttcgagttccccgagcggcctggggcgttgttgggctttttggagcggttgggcaagcgctggaatatcagcctgttccattaccgtaaccatggggcagcggaggcgcgggtgtttgcggctttggaagtgccggcggatgagctggcggggttgccattggccctggatgagatggggtatcggtattgggatgagacggataacccggcgtacacgctgtttttgggctga

SEQ ID NO: 105208 - protein, 519 aa, Pseudomonas putida GB-1
MTSFSVLRTTVTPQQLLSEQVRRILAAPVYDLAIETPLQAAPALSASLGNQVLLKREDLQPTFSFKIRGAYTRLSRLTPTQRECGVITASAGNHAQGVALAASHLGMKATIVMPTTTPSLKVEGVRSRGGHVVLHGESFPHALAHALKLADSEGATFVPPFDDPDVIAGQGTVAMEILRQRPGALDAIFVPVGGGGLIAGIAAYVKYLRPEVKVIGVEPEDSNCLQAAMAAGERVILPQVGTFADGVAVAQIGAHCFELCRHFVDEVVTVSSDELCAAIKDIYDDTRSITEPSGALAVAGIKKYVAREGVQGQTLVAIDSGANVNFDRLRHVAERAELGEQREAIIAVTIPEQPGSFRAFCQALGKRQITEFNYRYYPGKEARLFVGMQTHPVHDPREQLLANLREQGYNVLDLTDNELAKLHVRHTVGGHAAPGADERVLRFEFPERPGALLGFLERLGKRWNISLFHYRNHGAAEARVFAALEVPADELAGLPLALDEMGYRYWDETDNPAYTLFLG

SEQ ID NO: 105209 - DNA, 1515 bp, Pseudomonas putida GB-1
  CDS (1)..(1515): transl_table=11
atgctcgaacagtacgtcaagaagatcctcacctcgcgcgtctatgacgttgccgtcgaaaccccgttgcagagcgccgggcaactgagcaagcggctgggcaaccagattttgctcaagcgcgaagacctgcagccggtgttctcgttcaagatccgcggggcgtacaacaagctggcccagctgagcccagaggaactggcccgtggcgtggtcaccgcctcggccggcaaccacgcccagggcctggccctggctgcgcgcgaaatgggcatcaaggccaccatcgtgatgcccaagaccaccccggaaatcaaggtcgagggcgtgcgctcacggggcggcaaggtggtgttgcatggcgactcgttccccgaggcgctggcctattcgctgaaactggtcgacgaaaagggctttgtctatgttcacccttacgacgacccgcacaccatcgccggtcagggcaccgtggccatggaaatcctgcgccagcaccctggccagctggacgcgatcttcgtgccggtgggtggcggtggcctgatcgccggtattgccgcctacgtgaagtacctgcgcccggaaatcaaggtaatcggcgtcgagccggatgactccaactgcctacaggcggccatggccgccggtgagcgcgtggtgctgccgcaggtcgggctgttcgccgacggtgtggcggtggcccagattggccagcacaccttcgatatctgccgccaccatgtggacgaagtcgtcaccgtcagcacagacgagatttgcgcagcaatcaaggatatctacgacgatacccgctcgatcaccgaacctgccggcgccttgggcgttgcgggcatcaagaagtacgtcgagctgtatggcgtgaccgggcagacgctggtggctatcgactctggtgccaacgtcaacttcgaccgcctgcgccatgtggccgagcgtgccgagttgggtgaaaagcgtgaggcgatcatcgccgtgaccattcccgagcgaccgggcagcttcaaggccttctgcgaggccattggcaagcgccagatcaccgagttcaactaccgcaagcacacctcggacgaagcgcatatcttcgtgggcgtgcagacccacccggaaaacgacccgcgtgcagcgctggtgcagcaactgaccgagcagggcttcccagttaccgacctgaccgacaacgagcttgccaagttgcatatccgccatatggtgggtggccattcggccggtgccagtgacgaaatggtactgcgcttcgagtttcccgagcggccaggggcgctgttcaacttcctcaacaagttgggcgggcgctggaacatctcgatgttccactaccgcaaccatggcgcagctgacgggcgtgtggtggcaggcctgcaggtgccggaggatgagcgccacctggtaccggcggcgctggccaagatcggctacccgtactgggacgagaccgaaaaccccgcttacaagctgttcctgggctga

SEQ ID NO: 105210 - protein, 504 aa, Pseudomonas putida GB-1
MLEQYVKKILTSRVYDVAVETPLQSAGQLSKRLGNQILLKREDLQPVFSFKIRGAYNKLAQLSPEELARGVVTASAGNHAQGLALAAREMGIKATIVMPKTTPEIKVEGVRSRGGKVVLHGDSFPEALAYSLKLVDEKGFVYVHPYDDPHTIAGQGTVAMEILRQHPGQLDAIFVPVGGGGLIAGIAAYVKYLRPEIKVIGVEPDDSNCLQAAMAAGERVVLPQVGLFADGVAVAQIGQHTFDICRHHVDEVVTVSTDEICAAIKDIYDDTRSITEPAGALGVAGIKKYVELYGVTGQTLVAIDSGANVNFDRLRHVAERAELGEKREAIIAVTIPERPGSFKAFCEAIGKRQITEFNYRKHTSDEAHIFVGVQTHPENDPRAALVQQLTEQGFPVTDLTDNELAKLHIRHMVGGHSAGASDEMVLRFEFPERPGALFNFLNKLGGRWNISMFHYRNHGAADGRVVAGLQVPEDERHLVPAALAKIGYPYWDETENPAYKLFLG

SEQ ID NO: 105211 - DNA, 1542 bp, Marinobacter sp. ELB17
  CDS (1)..(1542): transl_table=11
atgccccaacgctatatcaagaaaatattgaatgcccgcgtttacgatgttgccaataaaacgccgctgaccgaagccgttagcctgtcgcggcgcttcggcaacaacatttttttgaagcgtgaagatttgcagccggtattctcgttcaagattcgcggggcctataacaagctggtgcagttgtcggaggagcagaaggccaagggtgtaatctgtgcgtctgccggtaatcacgcccagggggtggccttgtcggcaaaaaaactgggcatcaaggccgtcatcgtaatgccccagacgacgccggagattaaagtgaggtctgtgcgtgagcacggtgccaaggtagtgctccgaggcgacgcttttgacgaagccgcggcccacgcccacgagctgattgaaaagcacggttatacctacattcctccttatgatgatccagacgttatcgccggccagggcacggtcgccatggagttgttgtggcaatttagcaaacccatccacgcggtgtttgtctgtgtgggcggtggcgggctgattgccggtatggccgcctacataaaatatctgcgcccggagataaaagtaataggtgtagagccggaagactcaaactgcttgcaggcagcgatgaaagccggcaagcgggtaatactggacgaagttgggatatttgccgacggcgtggcagtcaaacagattggtgcctacccttgggaaatctgcaaagatcacgtagacgaagtgatcaccgtatccaccgatgaaatctgtgccgcgattaaagacatttttgaagacacccgctccattgccgagcccgctggggcgcttggtgtggccggtattaaaaaatatatagaacggggaaaaatcgaaaatgaaaatctgatcgctacgctcagcggcgccaatatgaactttgaccgtctgcgttatatttcggagcgcaccgaaatcggcgagaagcgtgaagccatcctggcggtgaccattcctgaaaaaccaggcgccttcaaaacctttatcaacgctctgcacaagcgcaatatcaccgagttcaattaccgttacgcggacagcaaacaagccacgatatttgtcggcattcagattcaggccggtggcctgggccgagacgaactggtgcgggaactgcgcgagaccggctatttggtgctggacctgacagacagcgacttggccaagcagcacattcgccacatggtgggggggcacgctccgggtatcagcaatgaaaaagtgttccagttcgagttccccgagcgtccgggggctttgttgaaatttttgatgtcgctgggcacgcgttggaatatttcgatgtttcattaccgcaatcacggtgcggcttacagccgcgtgttgttgggcgctgaagtggacgatgacgaagtgagggattttgaaaaaatgcttgagaaggtcggtttccgctatgaaaacatgaccgataacgaagcttaccagctgtttcttggggcaggaaacggcaacagccactctagctga

SEQ ID NO: 105212 - protein, 513 aa, Marinobacter sp. ELB17
MPQRYIKKILNARVYDVANKTPLTEAVSLSRRFGNNIFLKREDLQPVFSFKIRGAYNKLVQLSEEQKAKGVICASAGNHAQGVALSAKKLGIKAVIVMPQTTPEIKVRSVREHGAKVVLRGDAFDEAAAHAHELIEKHGYTYIPPYDDPDVIAGQGTVAMELLWQFSKPIHAVFVCVGGGGLIAGMAAYIKYLRPEIKVIGVEPEDSNCLQAAMKAGKRVILDEVGIFADGVAVKQIGAYPWEICKDHVDEVITVSTDEICAAIKDIFEDTRSIAEPAGALGVAGIKKYIERGKIENENLIATLSGANMNFDRLRYISERTEIGEKREAILAVTIPEKPGAFKTFINALHKRNITEFNYRYADSKQATIFVGIQIQAGGLGRDELVRELRETGYLVLDLTDSDLAKQHIRHMVGGHAPGISNEKVFQFEFPERPGALLKFLMSLGTRWNISMFHYRNHGAAYSRVLLGAEVDDDEVRDFEKMLEKVGFRYENMTDNEAYQLFLGAGNGNSHSS

SEQ ID NO: 105213 - DNA, 963 bp, Marinobacter sp. ELB17
  CDS (1)..(963): transl_table=11
atgagtgatcacaggaaccagatacccacatttgacgatgttttgtccgcccacgaacggatcaaaccctacatccacaaaacgccaattctgacatcccgttatctgaacgagctgaccggggccgaactcttctttaagtgtgagaactttcaaaaggccggggctttcaaagtgcgcggcgcctgcaacgccgtctttgggttgagtgaagagaaggcggcccttggcgtcgccacccactcttccggcaatcatgctctgtcgctgtcttatgcggctggccggcgaggtatcccggtaacagtcgtcatgcctcataccgcaccccaggccaaaaaagatgcggtacgcggctacggcggcaaaatcatcgagtgcgagccctccaccagctcccgtgaagccgtctttgccgatttaatggccgcgtctggtgctgattttgtccacccttataacgaccccagggtcatcgcagggcaggcaacctgctcactggaattgctggatcaggtccccgacctggacatggtgatcgcgccgatcggtggcggcggcatggtttccggtacttgcctgaccctttcgaacctggcaccggaggtgacaatttatgcggctgagccactcaatgccgacgacgccgcccgctccctcaaggccggttacatcattgccgatgatgcgcccaatactgtagcagacggtttgaaagtgccactgaaggagctgacctggcattttgtgagccacttcgtctcagacatttttacggcgaccgaggaggagatcatcgacgccatgaagctgacctggaaacgaatgaagattgttattgagcccagctgtgcagtacccctggcggtcatcctgaaaaaccccgagatcttccggggtaaacgggtgggcgtgatcatcaccggcggcaatgtggatatggatacacttccctggacctga

SEQ ID NO: 105214 - protein, 320 aa, Marinobacter sp. ELB17
MSDHRNQIPTFDDVLSAHERIKPYIHKTPILTSRYLNELTGAELFFKCENFQKAGAFKVRGACNAVFGLSEEKAALGVATHSSGNHALSLSYAAGRRGIPVTVVMPHTAPQAKKDAVRGYGGKIIECEPSTSSREAVFADLMAASGADFVHPYNDPRVIAGQATCSLELLDQVPDLDMVIAPIGGGGMVSGTCLTLSNLAPEVTIYAAEPLNADDAARSLKAGYIIADDAPNTVADGLKVPLKELTWHFVSHFVSDIFTATEEEIIDAMKLTWKRMKIVIEPSCAVPLAVILKNPEIFRGKRVGVIITGGNVDMDTLPWT

SEQ ID NO: 105215 - DNA, 2147 bp, Solanum lycopersicum; identical to SEQ ID NO: 12641
  CDS (92)..(1912)

SEQ ID NO: 105216 - protein, 606 aa, Solanum lycopersicum; identical to SEQ ID NO: 12642

SEQ ID NO: 105217 - DNA, 1167 bp, Cenarchaeum symbiosum
  CDS (1)..(1167): transl_table=11
atgcgcggggccgaagtgcgcaagactccccttgtgtactcccctacatttagcaggatgaccggctccgaggtgtacctaaaattagagcaccgccaaaagaccggctccttcaagataaggggggcgcactacaagataatgacgctgccagataacgaaaagaagaaaggcgtggtggcggcatccgcgggaaaccacgcgcagggggtcgcatttgcagcctctgccgaggggataccctgtactatagtcatgccaaagaccgcctcgccagcaaaggtggcggcaacccgggggtacggcgctaatgtgatactggagggctcaagttatgaggaatcatggaacaaggcaagggagattgccgccgagactggcgcgtgcataatacatgcatttgatgacccgcaggtgatagcggcccagggcgtgataggcctggagattctagaggagctgcccgatgtggacgaggtttacattccggtgggtggcgggggccttgccgccggcgtactagtggccataaaggaaaagcacccgggtgtaagggtggtaggcgtgcagtcgagcaggtttcccgccatgaaggaatcgctggataggggcagcacggccccgtccggaggggggacgaccatagcggatggcatatcggtgaggagtccaggcgagctgacatttgctataatccgggagctcatagacgagatagtcctcgtcgatgattccgagataataggggcgatgttcctgctaatggagaggtcaaagtcggtggtggagccttccggggcggccacccttgcgcacatactgtcaaatccgcgccccggaaaaaaggtggtggcggtcctggcgggcggcaatgtcgatatgtacctgctagggcagatagtggataagggcttggcccagacgggcaggctgctcaaggtgttcatactgttgccggacaagccgggggccctcaaggaggtggtagacgagataacctcggccaatgccaacatagtcgaggtggtccacgacaggtttagctccgagataaacgcgggatccgcgggtgtcaccctcagccttgagacgcagggcgcgggggcggcagacggccttgtgcgccatctccgggacaggggcataatcttcaggctggtcacatag

SEQ ID NO: 105218 - protein, 388 aa, Cenarchaeum symbiosum
MRGAEVRKTPLVYSPTFSRMTGSEVYLKLEHRQKTGSFKIRGAHYKIMTLPDNEKKKGVVAASAGNHAQGVAFAASAEGIPCTIVMPKTASPAKVAATRGYGANVILEGSSYEESWNKAREIAAETGACIIHAFDDPQVIAAQGVIGLEILEELPDVDEVYIPVGGGGLAAGVLVAIKEKHPGVRVVGVQSSRFPAMKESLDRGSTAPSGGGTTIADGISVRSPGELTFAIIRELIDEIVLVDDSEIIGAMFLLMERSKSVVEPSGAATLAHILSNPRPGKKVVAVLAGGNVDMYLLGQIVDKGLAQTGRLLKVFILLPDKPGALKEVVDEITSANANIVEVVHDRFSSEINAGSAGVTLSLETQGAGAADGLVRHLRDRGIIFRLVT

SEQ ID NO: 105219 - DNA, 1656 bp, Oryza sativa subsp
  CDS (1)..(1656)
atggcgggtggagatcgtatttatggtgtctttgaccaccaattaccagcagcactgaaaaagcttccatttgataagcatctttcattgcaaaatgttcggaaagtcatttcagaggctgatggttatcaaccccacttgattgcccctgagcaagggtacagaaggcttatagatagttcgctccactacttcaggggtccagcggaagcttcagttgatgcggtattctcattcaagttgagaggagcatacaatatgatggcaaagctctcgcgtgaacagttggagaggggtgtcatctgctcctctgctgggaaccatgcccagggagtggccctttccgctcaaagactcggttgcgatgctgttattgtcatgcctgtgacaacgcctgaaatcaagtggcgatcggtggagagattgggtgcaacagttgtactcaaaggggactcatatgatgaagctcaatcatatgcaaaacaaagatgcgagcaggaaggccgcacattcatacctccttttgaccatcctgatgttataagtggacaaggaacgattggcatggaaattgttcggcagttgcaaggcccacttcatgccatatttgtacctgtaggaggaggtggattaattgctgggatcgctgcctatgtaaaaagggttcgcccagaggttgggatggaatgttctgtatattttacagcagctcttctacaggtgaaaataattggagtggagccatcagatgcaaatgcaatggcattgtccttgtgtcatggtcaaagggtcatgctggagcaagttggtgggtttgctgatggtgtggctgtcaaagttgtaggggaggaaacatttcgcttgtgccgggaacttgtagatggtattgttcttgtcagtcgagatgctatttgtgcttcaataaaggatatgtttgaggagaaaagaagcatacttgaacctgctggtgcccttgcgctggcaggagctgaagcttactgcaaatactatggcttgaaaggggaaaatgttgttgcaataactagtggagcaaatatgaactttgatcggctcagattagtaactgagctggctgatgttggtcgaaaacgagaagcagttcttgccacatttttgccagaggagcagggaagcttcaaaaagtttgcagagctggttggccggatgaatattactgaattcaaatacagatacgattgcaatgcaaaagatgcccttgtcctttacagtgttggcatctacactgacgatgaacttaaagcaatggtggaacgtatggaatcttcaaaattgagaactgttgatcttactgacaatgatttggcaaaggatcatctaagatactttattggtggcaggtcagaagtaacagatgaacttgtttaccggttcattttcccagaaaggcctggtgcacttatgaaatttttggatgcattcagcccccgctggaatatcagccttttccattaccgtgcacagggtgaaaccggagcgaatgttttggttggcatacaagtgccgccggaggagtttgacgaattcaagagccgtgctgacaatcttgggtacgagtacatgtcggagcagaacaacgagatataccggctcctcttgcgcgatccgaagatctaa

SEQ ID NO: 105220 - protein, 551 aa, Oryza sativa subsp
MAGGDRIYGVFDHQLPAALKKLPFDKHLSLQNVRKVISEADGYQPHLIAPEQGYRRLIDSSLHYFRGPAEASVDAVFSFKLRGAYNMMAKLSREQLERGVICSSAGNHAQGVALSAQRLGCDAVIVMPVTTPEIKWRSVERLGATVVLKGDSYDEAQSYAKQRCEQEGRTFIPPFDHPDVISGQGTIGMEIVRQLQGPLHAIFVPVGGGGLIAGIAAYVKRVRPEVGMECSVYFTAALLQVKIIGVEPSDANAMALSLCHGQRVMLEQVGGFADGVAVKVVGEETFRLCRELVDGIVLVSRDAICASIKDMFEEKRSILEPAGALALAGAEAYCKYYGLKGENVVAITSGANMNFDRLRLVTELADVGRKREAVLATFLPEEQGSFKKFAELVGRMNITEFKYRYDCNAKDALVLYSVGIYTDDELKAMVERMESSKLRTVDLTDNDLAKDHLRYFIGGRSEVTDELVYRFIFPERPGALMKFLDAFSPRWNISLFHYRAQGETGANVLVGIQVPPEEFDEFKSRADNLGYEYMSEQNNEIYRLLLRDPKI

SEQ ID NO: 105221 - DNA, 969 bp, Actinoplanes friuliensis
  CDS (1)..(969): transl_table=11
atgagcgtcacgctcgacgacgtgcacgacgccgccgcccggctcaagggtgtcgcccatcgcacgccggtgctgcggtcccgcacgctcgacgctcttgtcggcgccgaggtgcacctcaaggccgaaaatctgcagcgggtgggcgccttcaagttccggggcgcgtacaacgcggtagcgcggctctcaccggagcagcgcgaccgcggtgtcgcctcgttctcgtccggcaaccacgcgcaggccctcgccctggcggcccgcgagttcggcacgaccgcggtgatcctcatgccggaggacaccccggcgtcgaagcgggccgcggccgagggttacggcgccgagatcatcacgtacgaccgttacaccggcgaccgcgtcgccctgggtgccgcgctggcggccgagcggggcctcgcgctcatccccccgtacgagcatccggacgtgatcgccgggcaggggaccgccgcgctcgagttgctcgaggagaccggcgagctggacgtcctgttcgtaccggtcggtggtggcgggctgctcgccggcagtgcgacggcggccaagggtctcttcccggcgatccgggtcgtcggtgtcgagcccgaggagggtgacgacaccagacgttccctcgcggcgggggagcgggtggcggtgcccgtgccgcgcaccatcgccgacggtcaggccgcggacatccccggtgagctgaccttctcgatcaaccggcgcctcgtcgacgacgtcgtgctggtcagcgacgacgagatccgggacgccatgcgcttcgccttcgagcggatgcgggtcgtcatggagcccagcggcgcgaccccgctggcggcgctgctcgccggccgggccggaccgctgcctcgccgcgtcggtctgatcatttcgggcggtaacatcgacgccgcgcgcttcgctcagctcgtcggcggctcttctgtcgggtag

SEQ ID NO: 105222 - protein, 322 aa, Actinoplanes friuliensis
MSVTLDDVHDAAARLKGVAHRTPVLRSRTLDALVGAEVHLKAENLQRVGAFKFRGAYNAVARLSPEQRDRGVASFSSGNHAQALALAAREFGTTAVILMPEDTPASKRAAAEGYGAEIITYDRYTGDRVALGAALAAERGLALIPPYEHPDVIAGQGTAALELLEETGELDVLFVPVGGGGLLAGSATAAKGLFPAIRVVGVEPEEGDDTRRSLAAGERVAVPVPRTIADGQAADIPGELTFSINRRLVDDVVLVSDDEIRDAMRFAFERMRVVMEPSGATPLAALLAGRAGPLPRRVGLIISGGNIDAARFAQLVGGSSVG

SEQ ID NO: 105223 - DNA, 1227 bp, Magnetospirillum gryphiswaldense
  CDS (1)..(1227): transl_table=11
ttgaccgtaaccatcgatcaggtcagaagcgccgccgccgcccttgacggcagcgtcgccctgaccccggtggtggaggcgcccaagctggcccagttgagcggagcggcgcaggtttggctgaaactggaaaacctgcagcattccggctcgttcaaggcccgaggcgcgctcaaccgcatcctggcgctgaatacggcagaacgacaagtcggcgtcatcgccatgtcggcgggcaaccacgctcagggtgtcgccctgcattgcgcccggctggggattccggccacggtggtgatgccacgcttcaccccactgaccaaggtgcaacgcacccaagcctatggtgccaccgtggtgctggtcggcgaaaccctggccgaggcgcaacagcacgcccacatcctggcgaccgaacagggactgatcttcatccatccctatgatgacccgctgatcatcgccggccagggcaccgtcgggctggaactggcccgacaggtcatcgatgccgacgatgtcatcattcccatcggcggcggcggtctggccgccggcatggccatcgccttgcacgacgcccccaccccgccccgcctgaccggagtacaaagcgccagcttccccaccctcgttcgtcaacctgtggctgacgccccgctttcaccccaaaccttggccgaaggcattgccgtcaaatatcccggcagcttgaccaagccgatcatcgaccagcatttcgacgacgtttttgccgtggacgacaccgccatcgaacaggccatcgtttggctgatggaagaacagaagatcgtcgccgaaggcgccggggcagcacccttggccctgctaatgacccaatcggcgcgttttgccgggagaaagggggttctggtcatttccggcggcaatatcgacaaccgggtcatggcctcgatcctgatgcggggacttgtgcgggccggtcgtctggcccgcctgcgcatcgagatcagcgacgctccgggcatgctggcccgcgccaccagtctgatcgccgaacatggcggcaatatcctggaagtctatcaccagcgcctgtttcaggacgtgccggtgaaaagtgccgaattggacgtggtggtcgaagccaccgattccagccacgtggaagccatgcttggcgccctgcgccaagccggttttccggcacgcaggttggggtccatggccagcctgccggaatga

SEQ ID NO: 105224 - protein, 408 aa, Magnetospirillum gryphiswaldense
MTVTIDQVRSAAAALDGSVALTPVVEAPKLAQLSGAAQVWLKLENLQHSGSFKARGALNRILALNTAERQVGVIAMSAGNHAQGVALHCARLGIPATVVMPRFTPLTKVQRTQAYGATVVLVGETLAEAQQHAHILATEQGLIFIHPYDDPLIIAGQGTVGLELARQVIDADDVIIPIGGGGLAAGMAIALHDAPTPPRLTGVQSASFPTLVRQPVADAPLSPQTLAEGIAVKYPGSLTKPIIDQHFDDVFAVDDTAIEQAIVWLMEEQKIVAEGAGAAPLALLMTQSARFAGRKGVLVISGGNIDNRVMASILMRGLVRAGRLARLRIEISDAPGMLARATSLIAEHGGNILEVYHQRLFQDVPVKSAELDVVVEATDSSHVEAMLGALRQAGFPARRLGSMASLPE

SEQ ID NO: 105225 - DNA, 1038 bp, Leuconostoc mesenteroides subsp
  CDS (1)..(1038): transl_table=11
atgacgactgagggaaagctaacggctgaagaaatagatgaggcgcatcgagtcttgtcaaaggtagtaacgcatacgccattggcatatgatgactatctatcaaaaaaatacagagctaatgtgtatcttaaacgagaagatatgcaacgggttcgttcgttcaaaattcgtggtgcctactacaatatcattaaggcagagaaagaaaaactcaataatggggttgttgctgcttcagctggaaaccacgcgcaaggcgtagccgatacatgtcataatttaaagatacaagcaactatttttatgccagtcactacaccaaatcaaaaagtagaagcggttaaacgttttggtagtcaatatgttacggtaatcctagtcggtgatacctttgacgaagcacaaagtgcagcgtttgaatacactgaaaaacataatatgttctttgtagcaccatttgatgatcggcgtaccatggctgggcaaggcacggtggcggttgaggtatttgaagatgctgtagagcaaaatattaatgttgattatttgattgcttctgttggtggtggcggtttaatcggtggtctgtcgacctattctaaaaaggtatcaccacaaaccacagtagtaggtgtcgaaccagaaacggcacagtcaatgaaagcggattttcaagctcaaaaacctaccaccgtcgagaatattgatcactttgttgatggtgctgccgttgcgcgtgtcagtcagtttacctataatcaagcacagcagtatgttgacaaactgctggctatccctgaaggaaaggttgctcaagcagtattagacttgtacacttatgaggcgatagttgccgaaccagctggagcgatgcctatcgctagtttggattttatggccagtgatatcgtagggaaaaacgtcgttctagttgtttctggtggaaacaatgatatcggccgtatgcaagaaatggaacaaaaggcattaatgtataagggtcgccaacagttttacttagttgagtttccgtaa

SEQ ID NO: 105226 - protein, 345 aa, Leuconostoc mesenteroides subsp
MTTEGKLTAEEIDEAHRVLSKVVTHTPLAYDDYLSKKYRANVYLKREDMQRVRSFKIRGAYYNIIKAEKEKLNNGVVAASAGNHAQGVADTCHNLKIQATIFMPVTTPNQKVEAVKRFGSQYVTVILVGDTFDEAQSAAFEYTEKHNMFFVAPFDDRRTMAGQGTVAVEVFEDAVEQNINVDYLIASVGGGGLIGGLSTYSKKVSPQTTVVGVEPETAQSMKADFQAQKPTTVENIDHFVDGAAVARVSQFTYNQAQQYVDKLLAIPEGKVAQAVLDLYTYEAIVAEPAGAMPIASLDFMASDIVGKNVVLVVSGGNNDIGRMQEMEQKALMYKGRQQFYLVEFP

SEQ ID NO: 105227 - DNA, 1611 bp, Ostreococcus tauri
  CDS (1)..(1611)
atgacaccgcacgaagaacccgagctcgtggacccggaggagttgctcttggtggatggcgaaatcggaccggtgacgcgaccggcgacgaaggagttggacgtcgcgagagaggcgtggtacgtccgggcgatcttaacggcggatgtttatgacgtggcgatcgagtcgccgtgtgagatcgcgccgaggttgagcgagcgcatcggggcgtcgatttatctcaagcgcgaggacctgcagccggtgttttcattcaagattcgaggagcgtataacaagatgaagcagctctcagaggaggagcgagcgagaggggtgatcacgtcctcggcgggtaatcacgcgcagggagtggcgatgtcgggcaaagctcgggtgcaaggcgatcatcgccatgccggtgacgacgcccgggatcaaggtggagcggtgcgacgactcggcggggaggtggtcttgtcgggaaactacgacgccacgcaggcgtacgcgaagcagcggtcgaaggaagagggtttaacgtatattccgccgtttgacgatccgttcgtgatcgcgggtcagggcacggtcggtgttgagcttttgcgtcagctcccgagcgttgacatcgtcttcgtgcccatcggcggcggcggtctcgcggcgggtatggcggcgtatatcaaggcgattcgtccggagattcgcgtcatcggtgtcgaacctgcgggagcgaacgcgatgaccatatcgctcgctcgcgggaagattgttaaactgaacaaggtggacggcttcgccgacggcgtcgccgtgcgcgagccaggtcgcgactgcttcgagatcattcattccatgcttgacggtatcatcaccgtaagaaccgatcagatcgcgtccgcgatcaaggacgtcttcggtgacacgcgctccatcctcgagcccgcgggtgcggtcgcggttgctggcgccaaggcttactgcacggcgaacaatttcaagggtaaagttgtcgccgtcacgtctggcgccaacatgaactttgatcgtcttcgcgtgatctcggagattgccgatcagggtggaaaggaagaagcaaccttgttgagcgtcattccggagaagaacggcgagttcaagcgattcgtcgagactgtgggcgacaggaatatttcggagttcaaatatcgcgtgcaaggggataacgcacgcgtactgtactccatcgaagttagcgatattaaggaggttcaggagacgatggcgcgcatggatgcgttaggatttaagacggttgatctgtccaacgacaccgcgacccagttccacctgcgtcacatgacgggtggcaaggcgagagtcaaagatgagcgcttgtacagcgtcgagattcctgagcgagccggcgcgctgggtaacttcctcgattttatcagtccgaaatggtcgatttcgatgacacactatcgcgccgacggtggccaggtgggcaaggttttgtttggcgtgcaagtgacggagaacgaccgcgaagagttcgaaaagtgcttggagctgtgcggctacaagtatgtcgacatgacttcgaacgtcgcgttcaggacgctcttcggagacgacaattag

SEQ ID NO: 105228 - protein, 536 aa, Ostreococcus tauri
MTPHEEPELVDPEELLLVDGEIGPVTRPATKELDVAREAWYVRAILTADVYDVAIESPCEIAPRLSERIGASIYLKREDLQPVFSFKIRGAYNKMKQLSEEERARGVITSSAGNHAQGVAMSGKARVQGDHRHAGDDARDQGGAVRRLGGEVVLSGNYDATQAYAKQRSKEEGLTYIPPFDDPFVIAGQGTVGVELLRQLPSVDIVFVPIGGGGLAAGMAAYIKAIRPEIRVIGVEPAGANAMTISLARGKIVKLNKVDGFADGVAVREPGRDCFEIIHSMLDGIITVRTDQIASAIKDVFGDTRSILEPAGAVAVAGAKAYCTANNFKGKVVAVTSGANMNFDRLRVISEIADQGGKEEATLLSVIPEKNGEFKRFVETVGDRNISEFKYRVQGDNARVLYSIEVSDIKEVQETMARMDALGFKTVDLSNDTATQFHLRHMTGGKARVKDERLYSVEIPERAGALGNFLDFISPKWSISMTHYRADGGQVGKVLFGVQVTENDREEFEKCLELCGYKYVDMTSNVAFRTLFGDDN

SEQ ID NO: 105229 - DNA, 1539 bp, Ostreococcus tauri
  CDS (1)..(1539)
atgcacgccgccgccgcgcgcgccgtccgggcgaacgtctcgacgcatgcgccgattaccacgcgaaacgacacgcgcgaaacatcgcgttcgggcgcacgcgctcgacgcgtcgtccgagcgcgcgggcgcgaatgcgcgacgcgggcgatcatcccgcgtcctggggcgagcatcgccgccgggttggagattccgtcgtacgaacacgtcagagaggcgtacgaaaaggtcacgggaggggtggtgcgcacgcgcttgacgcactcgaagactctgagcgcgctgtgtgggaccgatctgtatctgaagcacgagtgggagcaagccacgggttcgtttaaggagcgaggcgcgagaaacgcgttgatggcgctggacgaggaccagaagaagcgaggcgtgatcgcggcgagcgcgggaaatcacgcgctcgcgctggcgtatcacggacgcgagcttggaattccggtcacggtcatcatgccctccatcgcgccgctgacgaagatcacgaaatgccaaaagttggacgcgcgcgtcatcctggagggagacacgatcgccgacgccgcgcagtacgctcgagagaactatgtggaaacgggcgaaaagctcaagtacatcaacggcttcgatgactttgaaatcatcgccggtgccggtactgtcggtatcgagatgctcgaggacgttcgtgacgctgatgctgtggtcattcccgtcggcggtggcggtctgattgccggtattgccctcgccgtgaagcagctcaagcctggtatcaaggtgattggcgtcgaaccggatcgctgcgcctcgatgacgctcgcgctcgcggctggcgagccagtcaaggccccgacgaccgcgacgctcgcggacggtctcgccgtcccgactgtcggtcctcgctcgttccaaactgtcaggaacttgatcgacgaaattgtttgcgtgagcgaatctgacatcgctctcaccatgttacggctcatcgagaacgaaaagctcgttcaagaaggcgctggtatcgcgggtttggctgcggtcatgaccggtaagctcccagggctcaagggcaagaaggtcgtcgtctgcatgtgcggtggtaacatcgacacgagcactctaggcaaggtgctcgagagaggcttggtgggtgacggtcgccttgtgcgcttctcatgcgttgtcccagatcgtcccggcggcattgcgagcgtctgcaacaagattgccggagttggtgcttccattaagcacattctccacgaacgtgcgtggttggagcaagactcccactccgtgctcgttgacgtcgagtgtgaagtgacagacgccaagatgggtgaagaactgtacgacatcatcagcgagagctacactctccgcaccgcgaacttcgggccggctaagcgacctcaaatcaagcctggtagggtagtcatcactgatgactcgtccgacacctctaacccggtagtcgcgtgcgcattggacgaagagtgcatctctgtttatccagaagacaagtaa

SEQ ID NO: 105230 - protein, 512 aa, Ostreococcus tauri
MHAAAARAVRANVSTHAPITTRNDTRETSRSGARARRVVRARGRECATRAIIPRPGASIAAGLEIPSYEHVREAYEKVTGGVVRTRLTHSKTLSALCGTDLYLKHEWEQATGSFKERGARNALMALDEDQKKRGVIAASAGNHALALAYHGRELGIPVTVIMPSIAPLTKITKCQKLDARVILEGDTIADAAQYARENYVETGEKLKYINGFDDFEIIAGAGTVGIEMLEDVRDADAVVIPVGGGGLIAGIALAVKQLKPGIKVIGVEPDRCASMTLALAAGEPVKAPTTATLADGLAVPTVGPRSFQTVRNLIDEIVCVSESDIALTMLRLIENEKLVQEGAGIAGLAAVMTGKLPGLKGKKVVVCMCGGNIDTSTLGKVLERGLVGDGRLVRFSCVVPDRPGGIASVCNKIAGVGASIKHILHERAWLEQDSHSVLVDVECEVTDAKMGEELYDIISESYTLRTANFGPAKRPQIKPGRVVITDDSSDTSNPVVACALDEECISVYPEDK

SEQ ID NO: 105231 - DNA, 1653 bp, Phaeosphaeria nodorum
  CDS (1)..(1653)
atggcaagcgtaccagattactcgcggccgacgacgcctgaaaatggcaccaacggcgtcatgacaccccgcacacccaagaactcggggtttgcgctcacagaatacaccgccaatccgagcccgccgcccgagtcaccacggccaagaaccaacgatgtcgtgcccgacgcgttcctgctacccaatggctatcccgactacctccgcctcatcctcacatcgcgcgtctacgaagtcgtgaaggagacacccctcacccacgcaataaatctgagtaatcggctggagtgcaatgtcctgctcaagcgagaagacctgcagcccgtcttcagcttcaagctgcgcggcgcatacaacaaaatggcacatctcgatcccaaggaccggtggaagggcgtgatcgcgtgcagtgctggaaaccacgcccaaggagtcgcatactcggcgcgccatctcaagatccccgcaaccatcgtcatgccctcgggcactcccgatataaagcacaagaacgtctcgcgcctcggcggatcggtcatactgcacggtgcggattttgatgcagccaaggcggaagctgcgcgactagagaagctacatggactggtctccatacctccgttcgacgatccgtatgtcattgctgggcaaggaacggtcggcatggagctgttgcggcagactgacctgtcgaagctcacggccgtcttttgctgcgtgggaggcggaggcctgatcgccggagtgggcgtctacatcaagcgcatagcgccacacgtcaagatcataggcgtggagcaatacgacgccaacgccatggtggagtctctcaaggcaggaaagcgggtgctgctcaaggatgtcgggctgttcgccgacggtgcggcagtgaagacagtcggagaagagacgttcagaatatgtcaagaggtggttgacgaagtagttcaagtaacaaccgacgagacatgtgccgccatcaaagacatgttcgaagacacacgctccatcgtcgaacccgctggcgccctcgcactcgccggtcttaagaaatgggtgtctcgcaatccatcccccgaccgtgaccgcggcctcatcgcgaccgccagcggtgcgaacatgaatttcgaccgcctgagattcgtcgcggagcgcgctgcactcggagagaacaaagaagccctcctctccgtcaccatccccgagatgcccggcgcctttgccaaactcgtcgcagtcatccaccccatggccgtcacggaattcagctaccgctactccggccccagcgaagccaacatcctcgtcggtgtcgagctcaaagccgcgacacgcgcacgcgacctgcccgacctcatcacccggctcgcagccgaagggcatgatcgccaccgatctctcgcaagacgagctcgccaattcccggagcggggcggcgcattgtacaagttcctcaacacgctgcagccgggcatgaacatcagtcttttccactacaggaattacggaggcgatgtcgcgaagattttgtcgggcattcagtgcaagaaggaggacagtgagaagttggagggcttcttaagggatattgggtatccttacaaggaggttacagggagtgagagttataagacgttcttgagacattag

SEQ ID NO: 105232 - protein, 550 aa, Phaeosphaeria nodorum
MASVPDYSRPTTPENGTNGVMTPRTPKNSGFALTEYTANPSPPPESPRPRTNDVVPDAFLLPNGYPDYLRLILTSRVYEVVKETPLTHAINLSNRLECNVLLKREDLQPVFSFKLRGAYNKMAHLDPKDRWKGVIACSAGNHAQGVAYSARHLKIPATIVMPSGTPDIKHKNVSRLGGSVILHGADFDAAKAEAARLEKLHGLVSIPPFDDPYVIAGQGTVGMELLRQTDLSKLTAVFCCVGGGGLIAGVGVYIKRIAPHVKIIGVEQYDANAMVESLKAGKRVLLKDVGLFADGAAVKTVGEETFRICQEVVDEVVQVTTDETCAAIKDMFEDTRSIVEPAGALALAGLKKWVSRNPSPDRDRGLIATASGANMNFDRLRFVAERAALGENKEALLSVTIPEMPGAFAKLVAVIHPMAVTEFSYRYSGPSEANILVGVELKAATRARDLPDLITRLAAEGHDRHRSLARRARQFPERGGALYKFLNTLQPGMNISLFHYRNYGGDVAKILSGIQCKKEDSEKLEGFLRDIGYPYKEVTGSESYKTFLRH

SEQ ID NO: 105233 - DNA, 1854 bp, Oryza sativa subsp
  CDS (1)..(1854)
atggcggccgccgccaccgccgcggccgcggccacctccaccttcaccgccgccgtgccgcgcgcgcgcgggcgcaggcatccaacgcgcgtggcggcggcggcggcggcgacggcgtcgtcaccggaggcggcgatggcggcggcggcgccgccgttgccgatgatgcgggtggcgcccgagacgctgcagcggcagagcgggtacctcgtgcggggccgcggggaggaggggattggggagggggaggcggaggcggtgggaggggacgcggcgggagggctcggcgcgatggagtacctgaccagcgtgctctcgtccaaggtgtacgacgtcgccatcgagtcgccgctccagctcgccaccaagctctccgagcgcctcggcgtcaacttgtggatcaagcgcgaggacctgcagcccgtattctcattcaagttgagaggagcatacaatatgatggcaaagctctcgcgtgaacagttggagaggggtgtcatctgctcctctgctgggaaccatgcccagggagtggccctttccgctcaaagactcggttgcgatgctgttattgtcatgcctgtgacaacgcctgaaatcaagtggcgatcggtggagagattgggtgcaacagttgtactcaaaggggactcatatgatgaagctcaatcatatgcaaaacaaagatgcgagcaggaaggccgcacattcatacctccttttgaccatcctgatgttataagtggacaaggaacgattggcatggaaattgttcggcagttgcaaggcccacttcatgccatatttgtacctgtaggaggaggtggattaattgctgggatcgctgcctatgtaaaaagggttcgcccagaggttgggatggaatgttctgtatattttacagcagctcttctacaggtgaaaataattggagtggagccatcagatgcaaatgcaatggcattgtccttgtgtcatggtcaaagggtcatgctggagcaagttggtgggtttgctgatggtgtggctgtcaaagttgtaggggaggaaacatttcgcttgtgccgggaacttgtagatggtattgttcttgtcagtcgagatgctatttgtgcttcaataaaggatatgtttgaggagaaaagaagcatacttgaacctgctggtgcccttgcgctggcaggagctgaagcttactgcaaatactatggcttgaaaggggaaaatgttgttgcaataactagtggagcaaatatgaactttgatcggctcagattagtaactgagctggctgatgttggtcgaaaacgagaagcagttcttgccacatttttgccagaggagcagggaagcttcaaaaagtttgcagagctggttggccggatgaatattactgaattcaaatacagatacgattgcaatgcaaaagatgcccttgtcctttacagtgttggcatctacactgacgatgaacttaaagcaatggtggaacgtatggaatcttcaaaattgagaactgttgatcttactgacaatgatttggcaaaggatcatctaagatactttattggtggcaggtcagaagtaacagatgaacttgtttaccggttcattttcccagaaaggcctggtgcacttatgaaatttttggatgcattcagcccccgctggaatatcagccttttccattaccgtgcacagggtgaaaccggagcgaatgttttggttggcatacaagtgccgccggaggagtttgacgaattcaagagccgtgctgacaatcttgggtacgagtacatgtcggagcagaacaacgagatataccggctcctcttgcgcgatccgaagatctaa

SEQ ID NO: 105234 - protein, 617 aa, Oryza sativa subsp
MAAAATAAAAATSTFTAAVPRARGRRHPTRVAAAAAATASSPEAAMAAAAPPLPMMRVAPETLQRQSGYLVRGRGEEGIGEGEAEAVGGDAAGGLGAMEYLTSVLSSKVYDVAIESPLQLATKLSERLGVNLWIKREDLQPVFSFKLRGAYNMMAKLSREQLERGVICSSAGNHAQGVALSAQRLGCDAVIVMPVTTPEIKWRSVERLGATVVLKGDSYDEAQSYAKQRCEQEGRTFIPPFDHPDVISGQGTIGMEIVRQLQGPLHAIFVPVGGGGLIAGIAAYVKRVRPEVGMECSVYFTAALLQVKIIGVEPSDANAMALSLCHGQRVMLEQVGGFADGVAVKVVGEETFRLCRELVDGIVLVSRDAICASIKDMFEEKRSILEPAGALALAGAEAYCKYYGLKGENVVAITSGANMNFDRLRLVTELADVGRKREAVLATFLPEEQGSFKKFAELVGRMNITEFKYRYDCNAKDALVLYSVGIYTDDELKAMVERMESSKLRTVDLTDNDLAKDHLRYFIGGRSEVTDELVYRFIFPERPGALMKFLDAFSPRWNISLFHYRAQGETGANVLVGIQVPPEEFDEFKSRADNLGYEYMSEQNNEIYRLLLRDPKI

SEQ ID NO: 105235 - DNA, 1392 bp, Aedes aegypti
  CDS (1)..(1392)
atgaaccggatggaccaggtggcagggcaatcatccgccaccgcgatattagatgataatcccaacttttccaccggagataaaaaagttgttcctggaggcgaaataaaaacaactgatgaacaacaggacgactttacagatccgttttgcaatgctgataatccacagataattaccttccaggacgtaacctcagctgcctttagaataaagaacggaatcgagtacacgccttgtccgaaatcccatttgtccgaaatggtcgatatggacatatatctgaagaaagagtttctacaattcaccggaagcttcaaagaacgaggggcgcgctatgcactagtcatgcttcccacggaacagcgcaagaaaggagtaatttcagcttccttgggaaatcacgcacaaggtctttgctatcacggttggaagctgggaatcccagtcacagtagtaatgccatcaaaagcctctctgatgaagatacagaagtgccgtgactatcatgctaacgtaatcgtgcagggctccgacatgtgtgaggcaaaaaagattgcgttgaaaatggcacacgaaacgggtctaacgtatatcaatggttacgatcatccgcacatcatggccggccagggcactatcggtctggaaatcgtcgagcaagtgagcaacattgatgccgttgtggtccctgttggaggtggcggactgattgcaggagtggcaactgccatcaagaatttaagccctcaaaccaaaatcattggagtggagtcggaaaagtgtccgagtttcacaaaggcactggaaaacgaggccccggtttacaccccaaacaaggaaacactagccgacggcctggctgtgccgcaagtgggctacaatgcattcgctactaccgtaccactgttggacaagatgattgttgtcaaagaagaatggattgcattggctattttgagactggtcgagcaggaaaaatgcgttgtagagggggccggtgcttcgggtttagcagcgatacttgccggtcatttggatgagttcaaagcaaagagggtagtgcttctgatatgcggcggaaacatcgacaccacaattttcggacggtgccttgaacgtggtcttgcggcagacggtcggttgcaaagatttacagtaacagttagcgatggtccgggcggtgtatcgaagctctgtaacttattggccaaacttggtgtttccattaaggatataatgcacgaacgtgcgttcatacgagatatccacagcgtagaggttaaagttgtctgtgaaacacgtgactggatccattcgcaagagatgcggaacgcattgcaggaaacatatgacaatgtttgcttctacgacctacccatggctatttga

SEQ ID NO: 105236 - protein, 463 aa, Aedes aegypti
MNRMDQVAGQSSATAILDDNPNFSTGDKKVVPGGEIKTTDEQQDDFTDPFCNADNPQIITFQDVTSAAFRIKNGIEYTPCPKSHLSEMVDMDIYLKKEFLQFTGSFKERGARYALVMLPTEQRKKGVISASLGNHAQGLCYHGWKLGIPVTVVMPSKASLMKIQKCRDYHANVIVQGSDMCEAKKIALKMAHETGLTYINGYDHPHIMAGQGTIGLEIVEQVSNIDAVVVPVGGGGLIAGVATAIKNLSPQTKIIGVESEKCPSFTKALENEAPVYTPNKETLADGLAVPQVGYNAFATTVPLLDKMIVVKEEWIALAILRLVEQEKCVVEGAGASGLAAILAGHLDEFKAKRVVLLICGGNIDTTIFGRCLERGLAADGRLQRFTVTVSDGPGGVSKLCNLLAKLGVSIKDIMHERAFIRDIHSVEVKVVCETRDWIHSQEMRNALQETYDNVCFYDLPMAI

SEQ ID NO: 105237 - DNA, 1404 bp, Aedes aegypti
  CDS (1)..(1404)
atgagtcaaacggctgccatcacgagccaactggctgccacaaagatagcagatgccacccttaaggactcggaaaacaagccagaggcggtgaaaaactccaccgaaatgatgactaacggtgccacctctgaacaagagcaggaattcgccgatcctttttgcaatgccgataatcctcagataattacctttcaagatgttacttcggcagccttcaaaataaagaagggaatcgagtacacgccttgtccgaaatcgcacctgtccgagatggtcgatatggacatttatctgaagaaggagttcctgcagttcaccggtagctttaaagaacgtggagctcgatacgctctaataatgctgtccgaagagcagaagaagaggggagttatttctgcttcgttgggaaatcatgctcagggtctaagctatcatggttggaagttgggtattcctgtgaccgtcgtgatgccttccaaggcttccctaatgaaaattcaaaagtgtcgcaactatcaggccacagtcattgtgaagggtgttgatatgggcgaggcaaaaaagattgcactccggatggcgcacgaaacgggtctgacgtacatcaacgggtatgaccacccgcatatcatggccggccagggcactatcggactggaaattgcggaacaagtaagcaacgtcgatgccgtggtggttccagtcggaggaggaggactcatcgccgggattgccactgccattaagaacttaagcccgcaaaccaaaatcattggtgtggagtcggaaaagtgtcccagtttcacaaaggcactggaaaacaaagctccaatatatactcccaacgaggcaacgctggctgacggtttggcagtaccgcaagtcggttataatgcattcgccacgaccgttccgttgttggacaaaatgatagtggtgaaggaagagtggattgctttggccattttgcgattagtcgagctggaaaaatgtgtagtggagggagccggagcttcaggattagcagcaattctcgccggccatttggacgagttcaagggaaagagagttgtcctgttggtttgcggtggaaacattgacactaccatattcggtcgatgcttggaacgaggtatggctgccgagggtcgattgcaaagattcaccgtacgggtcagcgatgcacctggaggggtttcaaagttgtgcaacctgttggctaatctgggtgtttctattaaagatataatgcacgaacgtgccttcattcgcgatgtgaactctgtcgaggtcaaagtgatttgcgagactcgtgactggcagcattcacaggagatgcggaaaatgctgcaggagacataccaggaagtttacttctacgagatgccaatggctatttga

SEQ ID NO: 105238 - protein, 467 aa, Aedes aegypti
MSQTAAITSQLAATKIADATLKDSENKPEAVKNSTEMMTNGATSEQEQEFADPFCNADNPQIITFQDVTSAAFKIKKGIEYTPCPKSHLSEMVDMDIYLKKEFLQFTGSFKERGARYALIMLSEEQKKRGVISASLGNHAQGLSYHGWKLGIPVTVVMPSKASLMKIQKCRNYQATVIVKGVDMGEAKKIALRMAHETGLTYINGYDHPHIMAGQGTIGLEIAEQVSNVDAVVVPVGGGGLIAGIATAIKNLSPQTKIIGVESEKCPSFTKALENKAPIYTPNEATLADGLAVPQVGYNAFATTVPLLDKMIVVKEEWIALAILRLVELEKCVVEGAGASGLAAILAGHLDEFKGKRVVLLVCGGNIDTTIFGRCLERGMAAEGRLQRFTVRVSDAPGGVSKLCNLLANLGVSIKDIMHERAFIRDVNSVEVKVICETRDWQHSQEMRKMLQETYQEVYFYEMPMAI

SEQ ID NO: 105239 - DNA, 1002 bp, Medicago truncatula
  CDS (1)..(1002)
atggaagaggagagtcaaataccaaagggaagatatgctgctgatatttcatccataaatgaagcacatgccagaataaaatcattgattcttaagaccccagttctctcctccacctctctgaatgccatatcaggaaggcagctttactttaagtgtgaaagcttccaaaagggtggagcttttaaatttagaggtgcatgcaatgctgttttctctctcaatgatgaagatgcgtctaaaggggttataacacacagcagtggaaaccatgctgctgcattggctctggcagcaaaactacgggggatccctgcatacattgttattcctaaaaatgcgccaacatgtaaaattgagaatgtgaagcggtatggtggtcaggttatctggtctgaggccaatatgcgatcaagagaggaaactgcgaataaagtgtggcaagaaactggtgctatttttatacatccttataatgatgggcgcatactgagtggccagggtaccatatccttggagcttctggaacaagcccctcaactagatacacttgtggtaccaataagtggaggtggtttgatatcaggagtagcattggctgccaagtctatcaacccggccattcgtattttggctgctgaacctaaaggggccgatgacgcagcacaatctaaagcagctggaaggataataacattgcccgagaccaatactatagctgacgggctacgagcatttcttggagatttcacatggcctgtcgtacgagatcttgttgacgacataataactgtggaagacagtgaaattgttaaagccatgcaactgtgttatgaaattcttaagattgttgtagaaccaagtggagcaattggccttgcagctgttctatccgaatcttttcagaaaaatcctgcttggaaagattgcaagcatataggaatagtagtgtcaggtggaaatgttgatatggccgtgctttgggattctctgaacaaatga

SEQ ID NO: 105240 - protein, 333 aa, Medicago truncatula
MEEESQIPKGRYAADISSINEAHARIKSLILKTPVLSSTSLNAISGRQLYFKCESFQKGGAFKFRGACNAVFSLNDEDASKGVITHSSGNHAAALALAAKLRGIPAYIVIPKNAPTCKIENVKRYGGQVIWSEANMRSREETANKVWQETGAIFIHPYNDGRILSGQGTISLELLEQAPQLDTLVVPISGGGLISGVALAAKSINPAIRILAAEPKGADDAAQSKAAGRIITLPETNTIADGLRAFLGDFTWPVVRDLVDDIITVEDSEIVKAMQLCYEILKIVVEPSGAIGLAAVLSESFQKNPAWKDCKHIGIVVSGGNVDMAVLWDSLNK

SEQ ID NO: 105241 - DNA, 966 bp, Aspergillus oryzae
  CDS (1)..(966)
atgcagaactcagtctacgaaactgcagcaagcgcagtgcaggcacggaatcgcatccgcagccacatctaccaaacgcccctcattccatccagagtgcaaggaaaatccaacaacgcaagggtgctattcaaagcagaaaacttccaattaacgggatctttcaagatccgaggtgcaatgtccaagatgtccggtcaacctgccaacggacgattaataaccgcctcatcgggcaatcatggaataggcgccgcatgtgccgcgcaggcactctctaaagatctcactgttgtcctcccggactcggtggtacctgcgaaattggagaaaatcaagtcctacggggtgaatgttattctgcatggagctgagacgggccttgctgaacaatatgctcagcggctagctgcttcgcaatcgtatacttatatttcgccatacaatgatcctgatattgtcgccgggcaggggactattggtttagaaattctggagcagtgtgaagaggtggataatatcttcgtcgccatgggtggtggtggattgattagcggtatcggggcggtggcgaaggcgttcagtccccggacgaaggtctatggtgtttctgcgattaactcgaaagctctcgccgagtccatggctgctggccatgtagttgaaacggaacatcgagataccctagctgatgccgttgctggcggtattgatacggatacaatcacgctcccgttggctatgtctgtggtagatcacgtcgttgaatgtgacgaggacgagatcaaagcggctatgaagactatggccttcgatgaaaatatgaatgtcgaaggctctgccgctcttgctttggctggtttcagtaaagttgcaggacagctcgccaaccaaactagcgtcattgtcttgtgcggtgcgaactttgaccaaaatgtctttaggaatgccgttttagacatttaa

SEQ ID NO: 105242 - protein, 321 aa, Aspergillus oryzae
MQNSVYETAASAVQARNRIRSHIYQTPLIPSRVQGKSNNARVLFKAENFQLTGSFKIRGAMSKMSGQPANGRLITASSGNHGIGAACAAQALSKDLTVVLPDSVVPAKLEKIKSYGVNVILHGAETGLAEQYAQRLAASQSYTYISPYNDPDIVAGQGTIGLEILEQCEEVDNIFVAMGGGGLISGIGAVAKAFSPRTKVYGVSAINSKALAESMAAGHVVETEHRDTLADAVAGGIDTDTITLPLAMSVVDHVVECDEDEIKAAMKTMAFDENMNVEGSAALALAGFSKVAGQLANQTSVIVLCGANFDQNVFRNAVLDI

SEQ ID NO: 105243 - DNA, 1704 bp, Aspergillus oryzae; identical to SEQ ID NO: 12645
  CDS (1)..(1704)

SEQ ID NO: 105244 - protein, 567 aa, Aspergillus oryzae; identical to SEQ ID NO: 12646

SEQ ID NO: 105245 - DNA, 990 bp, Edwardsiella tarda
  CDS (1)..(990): transl_table=11
atgcatattacatatgatcttcccgttagtattgatgatattcaagcagcaaaaaaaagactctccggaaaaatatataaaacagggatgccgcgctctaattatcttagcgaacgctgtaagggcgaaatatttttgaagtttgaaaatatgcagcgtaccggttcgtttaaaattcgcggtgcgttcaataagctgagctccctgacggagagcgaacgccgcaagggggtggtggcctgctccgccggtaaccatgcccagggagtttcactctcctgcgccatgctggggatcgacggtaaagtcgtcatgccgacctgtgcgcccaaatccaaggtcgcggccacctgcgactattcggcggaggtcgtgctgtatggcaataacttcaacgacaccattagcaaggtgagtgagatcgtcgagatggaagggcggatatttattccaccttacgatgatccgatggtgattgctggtcagggaaccatcggtctggagattttagaagatctctatgatgtcgataatgttattgtaccggtcggcggcggtgggctgattgccggtattgcgattgcgattaaatcgattaacccgaccatccgtatcatcggcgtgcagtcggaaaacgtacacggtatggcggcatcctattacgccggggagatcgcgacccatcgtacgagcggtacgctggccgacggctgcgatgtttcgcgtccaggaaacctgacctttgagattgcccgcgagctggttgacgacatggttctggtcagcgaagaggagatccgggccagcatggtggcgctgatccagcgtaataaggtgattaccgaaggggccggtgccttagcctctgccgcactgctgagtggaaagctcgatcagtatattaaagggcgtaaaagcgtcagcatcatctccggtgggaatattgacctctcccgtgtttcgcaaattaccgggctggtagacgcctga

SEQ ID NO: 105246 - protein, 329 aa, Edwardsiella tarda
MHITYDLPVSIDDIQAAKKRLSGKIYKTGMPRSNYLSERCKGEIFLKFENMQRTGSFKIRGAFNKLSSLTESERRKGVVACSAGNHAQGVSLSCAMLGIDGKVVMPTCAPKSKVAATCDYSAEVVLYGNNFNDTISKVSEIVEMEGRIFIPPYDDPMVIAGQGTIGLEILEDLYDVDNVIVPVGGGGLIAGIAIAIKSINPTIRIIGVQSENVHGMAASYYAGEIATHRTSGTLADGCDVSRPGNLTFEIARELVDDMVLVSEEEIRASMVALIQRNKVITEGAGALASAALLSGKLDQYIKGRKSVSIISGGNIDLSRVSQITGLVDA

SEQ ID NO: 105247 - DNA, 1137 bp, Sorghum bicolor
  CDS (1)..(1137)
atgcatgtgattgattgcttcctcgtcctacctagatttgggagttccaccgccaccgtcgtcgtcctcgttctcctttctcctagtccttggcgcgttgtggcgaactggagaggcctgatgggaagcagagatggcaccggtgacagcacgggacgccagggctatgctgccgacattgattccatcagggaggcgcaggcacgcattgcgccgtacgttcacaggacgcccgttctgtcgtcggcgtccatcgatgccatggtggggaagcagctcttcttcaagtgcgagtgcttccagaaagcaggggcattcaagatccgaggtgcttcgaattcgatattcgcacttgacgatgagcaggcatcaaagggcgttgtgacacatagcagtgggaaccatgccgccgccgtggctttggctgcaaagctgcgtggcatacctgcacacattgtcataccaagaaatgcaccagcgtgtaaggttgaaaatgttaagcggtatggtggtcatattatccggagcgatgtcagcattgaatcgagagaatctgtttgtaaaagagtccaggaggagactggtgctgttcttatccatcccttcaatgataaatacactatcagtggtcagggtacagtatctcttgaacttttggagcaagtccctgaaattgacacaataattgttcctattagtggcggtggtttaatttctggtgtgacccttgctgcaaaggccataaacccttcgatacgcattctggcagcagaaccaaaaggtgctgatgattctgcccagtctaaggctgctggaaagatcatcacattgccttccacaaacaccattgctgatggtctacgagcttttcttggtgacttgacatggcctgtggtgcgtgacttggtggacgatgttatcgttgtggatgacacagcgattgtggacgccatgaaaatgtgctacgagatcctgaaggtggctgttgagcctagtggcgcaattggcctggccgcagcactgtccgacgagtttaagcaaagctctgcttggcacgagagcagcaagataggaataattgtttccggaggcaatgttgacctcggcactctttgggagtctctgtacaaacaatga

SEQ ID NO: 105248 - protein, 378 aa, Sorghum bicolor
MHVIDCFLVLPRFGSSTATVVVLVLLSPSPWRVVANWRGLMGSRDGTGDSTGRQGYAADIDSIREAQARIAPYVHRTPVLSSASIDAMVGKQLFFKCECFQKAGAFKIRGASNSIFALDDEQASKGVVTHSSGNHAAAVALAAKLRGIPAHIVIPRNAPACKVENVKRYGGHIIRSDVSIESRESVCKRVQEETGAVLIHPFNDKYTISGQGTVSLELLEQVPEIDTIIVPISGGGLISGVTLAAKAINPSIRILAAEPKGADDSAQSKAAGKIITLPSTNTIADGLRAFLGDLTWPVVRDLVDDVIVVDDTAIVDAMKMCYEILKVAVEPSGAIGLAAALSDEFKQSSAWHESSKIGIIVSGGNVDLGTLWESLYKQ

SEQ ID NO: 105249 - DNA, 969 bp, Acinetobacter baumannii
  CDS (1)..(969): transl_table=11
atgaaaaatttaacccttccaaattatgaagatgtcgcagccgctgctgaacgtataaaaggttttgtaaataaaactcctgttttaacttcacgtacggtgaacaatgaatttgaagcagaagtgttctttaaatgtgagaattttcagcgtgtaggcgctttcaaatttcgtggtgccatgaatgcacttttgcaatttaatgagactcaaaagaaagcaggtgtagttgctttttcttcgggaaatcatgcacaagctattgcgctttcatcaaaaattcttggtattccagcaaccattatcatgcctaaagatgcacctgctgcaaaaatggcagcaacgcgagaatacggcggtaatattgttgaatttgaccgttatacggaagatcgggaaaaaattggaaaagagattgccgaacaaaatggtctaacattaattccgtcttatgaccatccgcatgtgattgcaggtcaaggtacagctgctaaagagttatttgaagaagtcggtgatttagattacctgtttgtatgtttaggtggcggcggtttgttggcaggttctgccctgtcggctcgccagctttctccgaactgtaaaatatatggcgttgaaggtgcgctaggaaatgatgggcaaatgtcttttagaaaaggcgaaattgttcatattgataccccattaaccattgccgatggcgcgcagactcaatatttgggcaaattgacctttcctattattcaacagaaagttgatgatattttgacggtcacagacgaagaactcattaacgctatgaagttctttgctgaaagaatgaagatggtggttgaaccgacaggatgtctcggatttgcggctgcccgtaatttaaaacatgagttaaaaggcaaacgtatcggcattattattagtggtggcaatgtcgatatttctaaatacgcggagtttttatctgcctaa

SEQ ID NO: 105250 - protein, 322 aa, Acinetobacter baumannii
MKNLTLPNYEDVAAAAERIKGFVNKTPVLTSRTVNNEFEAEVFFKCENFQRVGAFKFRGAMNALLQFNETQKKAGVVAFSSGNHAQAIALSSKILGIPATIIMPKDAPAAKMAATREYGGNIVEFDRYTEDREKIGKEIAEQNGLTLIPSYDHPHVIAGQGTAAKELFEEVGDLDYLFVCLGGGGLLAGSALSARQLSPNCKIYGVEGALGNDGQMSFRKGEIVHIDTPLTIADGAQTQYLGKLTFPIIQQKVDDILTVTDEELINAMKFFAERMKMVVEPTGCLGFAAARNLKHELKGKRIGIIISGGNVDISKYAEFLSA

SEQ ID NO: 105251 - DNA, 1848 bp, Podospora anserina; identical to SEQ ID NO: 12649
  CDS (1)..(1848)

SEQ ID NO: 105252 - protein, 615 aa, Podospora anserina; identical to SEQ ID NO: 12650

SEQ ID NO: 105253 - DNA, 2223 bp, Arabidopsis thaliana; identical to SEQ ID NO: 12651
  CDS (21)..(1799)

SEQ ID NO: 105254 - protein, 592 aa, Arabidopsis thaliana; identical to SEQ ID NO: 12652

SEQ ID NO: 105255 - DNA, 1809 bp, Oryza sativa; identical to SEQ ID NO: 12653
  CDS (1)..(1809)

SEQ ID NO: 105256 - protein, 602 aa, Oryza sativa; identical to SEQ ID NO: 12654

SEQ ID NO: 105257 - DNA, 2082 bp, Nicotiana attenuata; identical to SEQ ID NO: 12655
  CDS (47)..(1852)

SEQ ID NO: 105258 - protein, 601 aa, Nicotiana attenuata; identical to SEQ ID NO: 12656

SEQ ID NO: 105259 - DNA, 1263 bp, Bacillus cereus; identical to SEQ ID NO: 12657
  CDS (1)..(1263): transl_table=11

SEQ ID NO: 105260 - protein, 420 aa, Bacillus cereus; identical to SEQ ID NO: 12658

SEQ ID NO: 105261 - DNA, 981 bp, Saccharomyces cerevisiae
  CDS (1)..(981)
atgattgttcccacttatggagacgttttggatgccagcaacagaattaaagaatatgtaaataaaacaccggttctcacttcacgaatgcttaatgatcgacttggagcacaaatatactttaaaggtgagaatttccaacgagtgggagcgttcaagtttcgtggagcaatgaatgctgtttcaaaattaagtgatgaaaaaagaagtaagggagtaattgccttctcatcaggaaaccatgcacaggctattgctcttagtgcaaaactattaaatgtacctgcaacaattgttatgcccgaggatgcgcccgcccttaaagttgctgctacagccggttacggagcacatatcataaggtataacaggtatactgaagatcgcgagcagattgggcgtcaactagcagccgaacatggttttgcattgattccgccctacgatcatcctgatgttattgcagggcaaggtacgtcggcaaaagagctattagaagaggttggacaacttgatgcattatttgttcctttgggcggtggtgggctcctttcaggatctgcacttgccgctagaagcctttctccaggctgcaaaatttttggggttgaacctgaagctggtaacgatggacaacaatccttcagatcgggttccattgttcatatcaatacgccaaaaactatcgcagatggcgctcaaacacaacacctcggtgagtacacatttgccattattcgcgaaaatgtcgatgatattttaacggttagcgaccaagagctagtaaaatgcatgcactttcttgcggaacgcatgaaggtggttgttgagcccacagcttgtttgggatttgcaggtgcacttctaaaaaaggaagagctagttgggaagaaagtaggcataatactaagtggaggtaatgtagacatgaagagatatgctactttaatctctgggaaggaagatggcccaacgatttag

SEQ ID NO: 105262 - protein, 326 aa, Saccharomyces cerevisiae
MIVPTYGDVLDASNRIKEYVNKTPVLTSRMLNDRLGAQIYFKGENFQRVGAFKFRGAMNAVSKLSDEKRSKGVIAFSSGNHAQAIALSAKLLNVPATIVMPEDAPALKVAATAGYGAHIIRYNRYTEDREQIGRQLAAEHGFALIPPYDHPDVIAGQGTSAKELLEEVGQLDALFVPLGGGGLLSGSALAARSLSPGCKIFGVEPEAGNDGQQSFRSGSIVHINTPKTIADGAQTQHLGEYTFAIIRENVDDILTVSDQELVKCMHFLAERMKVVVEPTACLGFAGALLKKEELVGKKVGIILSGGNVDMKRYATLISGKEDGPTI

SEQ ID NO: 105263 - DNA, 1779 bp, Arabidopsis thaliana; identical to SEQ ID NO: 12659
  CDS (1)..(1779)

SEQ ID NO: 105264 - protein, 592 aa, Arabidopsis thaliana; identical to SEQ ID NO: 12660

SEQ ID NO: 105265 - DNA, 1248 bp, Bacillus halodurans
  CDS (1)..(1248): transl_table=11
atgggaaagattcaaattgaagatatcattattgctaaccagacgttaaaagatgtcgttgtccatacccctttgcaaaaaaaccaagtactctctgagcgctatgagtgcaacgtttatttaaaacgggaggacatgcaagtggttcgctcgttcaaaatccgcggcgcgttccatcaaatttccagcattccgaaagaggaattaaacaacggggtcgtctgtgccagtgcaggaaatcacgcacaaggtgttgcgtattcctgtcacacgttgcaaattccggggaaaatttttatgccgacgacgacgccacggcaaaaagtagaccaagtcaaattcttcggtaaggaatatgtggaggtcatattaacaggggatacgttcgatgactcttttaacgaagcgaaagagtacggaataaagcataaaatgacctttatccatccattcgatcaagaaaagattgttgcaggtcaaggaaccgttgggatggaaatcatgaacgatattgacgacaacattgattacttgttctgttcgattggtggaggcggccttattagtggtgttggaacatacattaaaagcattagcccgcggacgaaagtgatcggatgtgaaccggctggagcgccagccatgaaggaatcacttaagcaagggaaggttatcgagcttgaaaaaatcgacaaatttgtcgacggcgcagccgtaaaaaaggtcggagaaattccttttgaaatttgccaaaaaattctggaagatattgttctagtacctgagggaaaaatatgtacaaccatccttaacctctacaatcaagatgcgatcgtagcggagcctgcaggggcgatgccgattgctgcactcgacttttttaaagacgagatcaaaggaaagacagtcgtctgtgtgttaagtggtggaaacaacgatattggccggatgcaggaaatgagggaacgctcattgatctatgaaggattacagcattactttatcatccaatttccgcaacgagctggggcattgaaagaattcattcttgatgttctcggtccagatgatgacatcactcggtttgaatatacaaagaaaaacaataaatcaaatggccccgtattaatagggattgagctgaaatgtgatgaggactatcatcgtttaatggatcgtctcaacaaaaaaggttttgaatatcgtgaaattaataaaaatgagagtttgtttaacctgttaatttga

SEQ ID NO: 105266 - protein, 415 aa, Bacillus halodurans
MGKIQIEDIIIANQTLKDVVVHTPLQKNQVLSERYECNVYLKREDMQVVRSFKIRGAFHQISSIPKEELNNGVVCASAGNHAQGVAYSCHTLQIPGKIFMPTTTPRQKVDQVKFFGKEYVEVILTGDTFDDSFNEAKEYGIKHKMTFIHPFDQEKIVAGQGTVGMEIMNDIDDNIDYLFCSIGGGGLISGVGTYIKSISPRTKVIGCEPAGAPAMKESLKQGKVIELEKIDKFVDGAAVKKVGEIPFEICQKILEDIVLVPEGKICTTILNLYNQDAIVAEPAGAMPIAALDFFKDEIKGKTVVCVLSGGNNDIGRMQEMRERSLIYEGLQHYFIIQFPQRAGALKEFILDVLGPDDDITRFEYTKKNNKSNGPVLIGIELKCDEDYHRLMDRLNKKGFEYREINKNESLFNLLI

SEQ ID NO: 105267 - DNA, 1269 bp, Bacillus subtilis; identical to SEQ ID NO: 12661
  CDS (1)..(1269): transl_table=11

SEQ ID NO: 105268 - protein, 422 aa, Bacillus subtilis; identical to SEQ ID NO: 12662

SEQ ID NO: 105269 - DNA, 1524 bp, Burkholderia cepacia
  CDS (1)..(1524): transl_table=11
atggcctcccacgattacctgaagaaaatcctgaccgcgcgcgtctacgacgtcgcgttcgagaccgaactcgaaccggcccgcaacctgtccgcgcgactgcgcaaccccgtgtacctgaagcgcgaggacaaccagccggtgttctcgttcaagctgcgcggcgcatacaacaagatggcgcacattcccgccgatgcgctcgcgcgcggcgtgattaccgcatcggccggcaatcacgcgcagggcgtcgcgttctcggcggcccggatgggcgtgaaggccgtgatcgtcgtgcccgtcacgacgccgcaggtgaaggtcgacgcggtgcgcgcgcacggcggcccgggtgtcgaggtgattcaggccggcgaatcgtacagcgatgcgtacgcgcacgcgctcaaggtacaggaggagcgcggtctcacgttcgtgcacccgttcgacgatccgtacgtgatcgccggccagggcacgatcgcgatggagatcctgcgccagcaccagggcccgatccacgcgatcttcgtgccgatcggcggcggcgggctcgcggcgggcgtcgccgcgtacgtgaaggccgtgcgtccggagatcaaggtgatcggcgtgcaggccgaggattcgtgcgcgatggcgcagtcgctgcaggccggcaagcgcgtcgagctcgccgaggtcggcctgttcgcggacggcacagcggtgaagctcgtcggcgaggaaactttccggctctgcaaggaatatctcgacggcgtcgtgaccgtcgataccgacgcgctctgtgcggcgatcaaggacgtgttccaggacacgcgcagcgtgctcgagccgtcgggcgcgctcgcggtggccggcgcgaagctctatgcggaacgcgaaggcatcgagaaccagacgctcgtcgccgtcacgtcgggcgccaacatgaacttcgaccggatgcgcttcgtcgccgaacgcgcggaggtcggcgaggcgcgcgaggccgtgttcgccgtcacgattcccgaggagcgcggcagcttcaagcgcttctgctcgctcgtcggcgaccgcaacgtgaccgagttcaactaccggatcgccgatgcgcaatccgcgcacatcttcgtcggcgtgcagatccgtcgccgcggcgaatcggccgacatcgccgcgaacttcgagtcgcacggcttcaagacggccgacctcacgcacgacgagctgtcgaaggagcatatccgctacatggtcggcggccgctcgccgctcgcgctcgacgagcgcctgttccgcttcgaatttcccgaacggccgggcgcgctgatgaagttcctgtcgtcgatggcgccggactggaacatcagcctgttccactaccgcaaccagggcgcggactacagctcgatcctcgtcgggctgcaggtgccgcaggccgatcatgccgaattcgaacgcttcctcgcggcgctcggctatccgtatgtcgaagagagcgccaatccggcgtatcgcctcttcctgtcgtaa

SEQ ID NO: 105270 - protein, 507 aa, Burkholderia cepacia; identical to SEQ ID NO: 12664

SEQ ID NO: 105271 - DNA, 1872 bp, Cicer arietinum; identical to SEQ ID NO: 12665
  CDS (19)..(1791)

SEQ ID NO: 105272 - protein, 590 aa, Cicer arietinum; identical to SEQ ID NO: 12666

SEQ ID NO: 105273 - DNA, 1545 bp, Escherichia coli; identical to SEQ ID NO: 12667
  CDS (1)..(1545): transl_table=11

SEQ ID NO: 105274 - protein, 514 aa, Escherichia coli [sequence omitted]

SEQ ID NO: 105275 - DNA, 1542 bp, Haemophilus influenzae
  CDS (1)..(1542): transl_table=11
atgaaaaatctactcaccaatcctcaaccctctcaatcagattatatcaatgccattgttaaacttggttcgcgcgtatatgaagctgcacaagtgacccctttacaaaaaatgggaaaactttctgaacgactgcacaataatatctggattaaacgagaagaccgtcagccagtaaatagctttaaactacgcggcgcttacgcaatgatttctagcctttcagcagaacaaaaagcagctggcgtaatagcagcctctgcgggtaaccatgcgcaaggcgtggcattatcggcgaaacaattaggcttaaaagcattaattgttatgccacaaaacaccccaagcattaaagtggatgcagtgcgtggttttggtggtgaggtgttgttgcacggtgctaatttcgatgaagccaaagcaaaagccatcgagctttcaaaagaaaaaaacatgacatttattccaccattcgatcatccattagtgatcgcaggacaaggcacgttagcgatggaaatgctacaacaagtggcggatttggattatgtgtttgtacaagttggtggtggtggcttagctgcgggtgtggcaattttgcttaagcaatttatgccggaaattaaaatcatcggtgtagaatcaaaggattctgcgtgcttaaaagcggctctcgataaaggcgaaccaacagatttaacccatattggattatttgccgatggcgttgctgtaaaacgcattggcgacgaaacattccgtctatgtcagcaatatcttgatgatatggtattggtcgatagtgacgaagtatgcgcagcaatgaaagatttgtttgagaacgttcgtgctgttgcagaaccatcaggtgcattaggtttggctggtttgaaaaaatatgtaaaacaaaaccatattgaaggcaaaaatatggcggcaattttgtctggcgcgaacttgaatttccacacattacgttatgtatctgaacgttgtgaaattggtgaaaatcgagaggctttattagccgtgaccatgcctgaacaaccaggtagtttcttaaaatttgcttatgtattaggtaaccgagctgtaaccgaattcagttatcgttatgcagatgataaacgcgcttgcgtgtttgttggggtaagaacgacaaatgagcaagaaaaagcagatattattgcagacctcacgaaaaatggttttgatgttgaggatatgtctgatgatgatattgcgaaaacgcatgttcgctatttaatgggtggtcgtgcagccaatgataacgaacgcttatataccttcgaattcccagagcaaaaaggtgccttattaaaattcttggaaaccttgcaaaatcgttggaatatttcattattccactatcgtgcccatggtgcggactatggaaatatccttgcaggtttccaaattgaacaacgcgaacaagcagaatttgaacagggacttgcccaactcaattatgtttttgaagatgtaacaaaaagcaaatcttatcgttatttcttacgttaa

SEQ ID NO: 105276 - protein, 513 aa, Haemophilus influenzae
MKNLLTNPQPSQSDYINAIVKLGSRVYEAAQVTPLQKMGKLSERLHNNIWIKREDRQPVNSFKLRGAYAMISSLSAEQKAAGVIAASAGNHAQGVALSAKQLGLKALIVMPQNTPSIKVDAVRGFGGEVLLHGANFDEAKAKAIELSKEKNMTFIPPFDHPLVIAGQGTLAMEMLQQVADLDYVFVQVGGGGLAAGVAILLKQFMPEIKIIGVESKDSACLKAALDKGEPTDLTHIGLFADGVAVKRIGDETFRLCQQYLDDMVLVDSDEVCAAMKDLFENVRAVAEPSGALGLAGLKKYVKQNHIEGKNMAAILSGANLNFHTLRYVSERCEIGENREALLAVTMPEQPGSFLKFAYVLGNRAVTEFSYRYADDKRACVFVGVRTTNEQEKADIIADLTKNGFDVEDMSDDDIAKTHVRYLMGGRAANDNERLYTFEFPEQKGALLKFLETLQNRWNISLFHYRAHGADYGNILAGFQIEQREQAEFEQGLAQLNYVFEDVTKSKSYRYFLR

SEQ ID NO: 105277 - DNA, 1284 bp, Mycobacterium leprae; identical to SEQ ID NO: 12671
  CDS (1)..(1284): transl_table=11

SEQ ID NO: 105278 - protein, 427 aa, Mycobacterium leprae; identical to SEQ ID NO: 12672

SEQ ID NO: 105279 - DNA, 1542 bp, Pasteurella multocida; identical to SEQ ID NO: 12673
  CDS (1)..(1542): transl_table=11

SEQ ID NO: 105280 - protein, 513 aa, Pasteurella multocida; identical to SEQ ID NO: 12674

SEQ ID NO: 105281 - DNA, 1269 bp, Staphylococcus aureus
  CDS (1)..(1269): transl_table=11
atgacagtcaaaacaacagtttctacgaaagatatcgatgaagcatttttaagacttaaagatattgtcaaagaaacacctttacaattagaccattacttatctcaaaagtatgattgtaaagtttatttaaaacgagaagatttacaatgggtacgttcttttaaattaagaggtgcttacaatgctatttctgttttatcagatgaagctaaaagtaaaggtattacatgtgcgagtgcaggtaatcatgctcaaggtgttgcctatacagctaaaaaacttaatttaaacgctgttatctttatgccagtcactacacctttacaaaaggtaaatcaagtaaaattctttggaaatagtaacgttgaagttgtactaactggtgatacatttgatcactgtttagctgaagctttaacttatacaagtgaacatcaaatgaactttatagatccattcaataatgttcatacaatttctggacaaggtacgcttgctaaagaaatgctagaacaagcaaagtctgacaatgttaactttgattatctatttgccgcaattggtggtggtggtttaatttcaggtattagtacctattttaaatcctattctcccaacacaaaaattatcggagttgaaccttcaggtgctagtagtatgtacgaatctgttgtcgtaaataatcaagttatcacattacctaatatcgataaatttgtcgatggagcttctgtagccagagttggcgatattacttttgaaattgccaaaaaaaatgtagataactacgtacaagtagatgaaggtgctgtatgttcaacaattttggatatgtattcaaaacaagcaatagtagcagaacccgctggcgctttaagtgtaagtgcgcttgaaaactataaagatcatattaaaggtaaaacagtggtttgtgtcattagtggtggtaataatgatattaatcgaatgaaagaaattgaagaacgttcattactatatgaagaaatgaagcattactttatcttaaatttccctcaacgtccaggtgcattgagagaatttgtaaatgacgtattaggacctcaagacgatattactaaatttgaatacttaaaaaaatcttctcaaaatacaggtactgtcattattggtattcaacttaaagatcatgatgatttaatacaactcaaacaacgtgtaaatcatttcgatccttccaatatttatattaatgaaaataagatgttatattcattgttaatttaa

SEQ ID NO: 105282 - protein, 422 aa, Staphylococcus aureus
MTVKTTVSTKDIDEAFLRLKDIVKETPLQLDHYLSQKYDCKVYLKREDLQWVRSFKLRGAYNAISVLSDEAKSKGITCASAGNHAQGVAYTAKKLNLNAVIFMPVTTPLQKVNQVKFFGNSNVEVVLTGDTFDHCLAEALTYTSEHQMNFIDPFNNVHTISGQGTLAKEMLEQAKSDNVNFDYLFAAIGGGGLISGISTYFKSYSPNTKIIGVEPSGASSMYESVVVNNQVITLPNIDKFVDGASVARVGDITFEIAKKNVDNYVQVDEGAVCSTILDMYSKQAIVAEPAGALSVSALENYKDHIKGKTVVCVISGGNNDINRMKEIEERSLLYEEMKHYFILNFPQRPGALREFVNDVLGPQDDITKFEYLKKSSQNTGTVIIGIQLKDHDDLIQLKQRVNHFDPSNIYINENKMLYSLLI

SEQ ID NO: 105283 - DNA, 990 bp, Salmonella typhimurium
  CDS (1)..(990): transl_table=11
atgcacattacatacgatctcccggttgcaattgaagatatcctcgaagcgaaaaaaagactggcggggaagatatataaaacgggaatgcctcgctctaactattttagtgaacgttgcaaaggcgaaatatttctcaagtttgaaaatatgcagcgtacgggttcatttaaaattcgtggcgcttttaacaaacttagctcgttaacggaggcggaaaaacgtaaaggcgtcgtggcctgttccgcaggtaatcatgcacagggcgtttctctttcttgcgcaatgctgggtattgacggcaaagtcgtgatgccgaagggcgcgccaaagtcaaaagtggcggccacctgtgattattcggcggaagtggtgctccacggtgacaacttcaatgacaccatcgctaaggtgagtgaaattgtcgaaaccgaaggccgcatttttattccgccttacgacgatccaaaagtcattgccggacagggcactattggtctggaaattatggaagatctgtacgatgtcgataatgtcatcgtgcctattggcggcggcggtttaattgcaggtattgccattgcgattaaatcgattaacccgaccattaaagttatcggcgtacaggccgaaaatgttcacggtatggcggcgtcttattacactggcgaaataaccacgcaccgaacgaccggcaccctggcggatggttgtgatgtctcccgcccgggtaatttaacctatgaaatcgttcgtgaattagtcgatgacattgtcctggttagcgaagatgaaattcgtaacagcatgatcgctttaattcagcgcaataaggttattactgaaggcgctggcgctctggcttgcgccgcactattaagtgggaaattagatagccatattcagaacagaaaaacggtcagtattatttctggcggcaatatcgatctttctcgggtatcacaaattacgggtttagttgacgcttaa

SEQ ID NO: 105284 - protein, 329 aa, Salmonella typhimurium
MHITYDLPVAIEDILEAKKRLAGKIYKTGMPRSNYFSERCKGEIFLKFENMQRTGSFKIRGAFNKLSSLTEAEKRKGVVACSAGNHAQGVSLSCAMLGIDGKVVMPKGAPKSKVAATCDYSAEVVLHGDNFNDTIAKVSEIVETEGRIFIPPYDDPKVIAGQGTIGLEIMEDLYDVDNVIVPIGGGGLIAGIAIAIKSINPTIKVIGVQAENVHGMAASYYTGEITTHRTTGTLADGCDVSRPGNLTYEIVRELVDDIVLVSEDEIRNSMIALIQRNKVITEGAGALACAALLSGKLDSHIQNRKTVSIISGGNIDLSRVSQITGLVDA

SEQ ID NO: 105285 - DNA, 1041 bp, Staphylococcus aureus
  CDS (1)..(1041): transl_table=11
atgacaaccaacacagttacattacaaacagcacatattgtaagtttaggagatatcgaagaagctaaagcaagcattaaaccatttattcgtcgaacaccactaattaaatctatgtatttaagtcaaaatatcactaaaggtaacgtatatttaaaacttgaaaatatgcagtttacaggttcatttaaatttagaggtgctagcaataaaattaatcatttgtcagatgaacaaaaagctaaaggtattattggcgcatcagccggaaatcatgcacaaggtgtagctttgacagcaaaactattaggtattgatgcaacgattgtgatgccagaaacagcaccaattgctaaacagaatgctaccaaaggatatggtgcaaaagtcattttaaaaggtaaaaactttaatgaaactagactttatatggaagaattagcgaaagaaaatggtatgacaattgttcatccatatgatgataagtttgtcatggctggtcaaggaacaataggattagaaattttagatgatatatggaatgttaatacggtcattgttccagttggtggaggtggcctaattgcaggtattgccaccgctttaaaatcattcaacccatcaattcatataatcggcgttcaagctgaaaatgtgcatggcatggcagagtcattctataagagagctttaactgaacatcgtgaagatagcacaattgcagatggttgtgatgtaaaagtaccaggtgaaaaaacatacgaagtagtaaaacatttagtagatgaatttattcttgtatcagaagaggaaatagaacatgcaatgcaagatttaatgcaacgtgccaaaatcattacagaaggtgcaggagctttacctacagcagctattttaagtgggaaaattgataaaaaatggctagagggtaaaaatgtcgttgcattagtttcaggaggaaacgttgacttaactagagtttctggtgtcattgaacatggcttaaatatcgcggatacaagtaagggtgtggtaggttaa

SEQ ID NO: 105286 - protein, 346 aa, Staphylococcus aureus
MTTNTVTLQTAHIVSLGDIEEAKASIKPFIRRTPLIKSMYLSQNITKGNVYLKLENMQFTGSFKFRGASNKINHLSDEQKAKGIIGASAGNHAQGVALTAKLLGIDATIVMPETAPIAKQNATKGYGAKVILKGKNFNETRLYMEELAKENGMTIVHPYDDKFVMAGQGTIGLEILDDIWNVNTVIVPVGGGGLIAGIATALKSFNPSIHIIGVQAENVHGMAESFYKRALTEHREDSTIADGCDVKVPGEKTYEVVKHLVDEFILVSEEEIEHAMQDLMQRAKIITEGAGALPTAAILSGKIDKKWLEGKNVVALVSGGNVDLTRVSGVIEHGLNIADTSKGVVG

SEQ ID NO: 105287 - DNA, 2746 bp, Arxula adeninivorans; identical to SEQ ID NO: 12677
  CDS (908)..(2560)

SEQ ID NO: 105288 - protein, 550 aa, Arxula adeninivorans; identical to SEQ ID NO: 12678

SEQ ID NO: 105289 - DNA, 1731 bp, Saccharomyces cerevisiae; identical to SEQ ID NO: 12679
  CDS (1)..(1731)

SEQ ID NO: 105290 - protein, 576 aa, Saccharomyces cerevisiae; identical to SEQ ID NO: 12680

SEQ ID NO: 105291 - DNA, 972 bp, Schizosaccharomyces pombe
  CDS (1)..(972)
atgagcgataacctggtgcttcctacctatgatgatgttgcttcagctagtgagcgaattaagaaattcgccaacaaaaccccagtactcacgtcgagcacagtaaataaagagtttgtggcagaagtgttttttaaatgtgaaaatttccaaaaaatgggtgctttcaaatttcgcggtgcccttaatgctctttctcaactcaatgaagctcaacgtaaagctggtgttttgacgttttcttctggtaatcatgctcaggccattgcactgtcggcaaagatcttgggaattccagcaaaaatcattatgccactcgatgcacccgaagccaaggtcgctgccacgaaaggctatggtggtcaagtaatcatgtatgatagatacaaagatgatagagaaaagatggccaaagaaatttctgaaagagaaggtcttaccattatccctccttacgatcacccccatgtacttgctggtcaaggaaccgcagctaaggaactgtttgaagaggttggccctcttgatgcactttttgtttgtctcggaggcggtggcttgctttctggatcagcacttgctgctcgccattttgctccaaactgcgaagtttatggagttgaacctgaagctggaaacgatgggcaacagtcctttaggaaaggatctatcgtacatattgatacaccaaaaactatagccgatggtgctcaaactcaacatttgggtaactacacgttttccattataaaagaaaaggtcgatgatatattgactgtgtccgacgaggaactaattgactgtcttaagttttatgccgcacgtatgaaaattgtagtcgaacccactggatgtcttagctttgcggcagcgcgcgctatgaaggaaaagctaaagaataaacgaattggtatcattataagtggaggaaacgtagacattgagcgttatgcccatttcttatcacagtaa

SEQ ID NO: 105292 - protein, 323 aa, Schizosaccharomyces pombe
MSDNLVLPTYDDVASASERIKKFANKTPVLTSSTVNKEFVAEVFFKCENFQKMGAFKFRGALNALSQLNEAQRKAGVLTFSSGNHAQAIALSAKILGIPAKIIMPLDAPEAKVAATKGYGGQVIMYDRYKDDREKMAKEISEREGLTIIPPYDHPHVLAGQGTAAKELFEEVGPLDALFVCLGGGGLLSGSALAARHFAPNCEVYGVEPEAGNDGQQSFRKGSIVHIDTPKTIADGAQTQHLGNYTFSIIKEKVDDILTVSDEELIDCLKFYAARMKIVVEPTGCLSFAAARAMKEKLKNKRIGIIISGGNVDIERYAHFLSQ

SEQ ID NO: 105293 - DNA, 999 bp, Brassica napus; identical to SEQ ID NO: 89467
  CDS (1)..(999)

SEQ ID NO: 105294 - protein, 332 aa, Brassica napus; identical to SEQ ID NO: 89468

SEQ ID NO: 105295 - DNA, 1290 bp, Brassica napus; identical to SEQ ID NO: 40228
  CDS (1)..(1290)

SEQ ID NO: 105296 - protein, 429 aa, Brassica napus; identical to SEQ ID NO: 40229

SEQ ID NO: 105297 - DNA, 1824 bp, Brassica napus; identical to SEQ ID NO: 12681
  CDS (1)..(1824)

SEQ ID NO: 105298 - protein, 607 aa, Brassica napus; identical to SEQ ID NO: 12682

SEQ ID NO: 105299 - DNA, 1290 bp, Brassica napus; identical to SEQ ID NO: 40248
  CDS (1)..(1290)

SEQ ID NO: 105300 - protein, 429 aa, Brassica napus; identical to SEQ ID NO: 40249

SEQ ID NO: 105301 - DNA, 1293 bp, Brassica napus; identical to SEQ ID NO: 40256
  CDS (1)..(1293)

SEQ ID NO: 105302 - protein, 430 aa, Brassica napus; identical to SEQ ID NO: 40257

SEQ ID NO: 105303 - DNA, 1017 bp, Zea mays
  CDS (1)..(1017)
atgggaagtaaagacggcaccggtgacatatcggaagcccaaggctatgctgccgacattgattccatcagggaggcgcaggcccgcattgcgccgtacgttcacaggacgcccgttatgtcgtcgacgtccatcgatgccatggtggggaagaagctcttcttcaagtgcgagtgcttccagaaagcgggcgcattcaagatccgaggtgcttcgaattcgatattcgcacttgacgatgagcaggtatcaaagggcgttgtgacacatagcagtgggaaccatgccgctgctgtggctttggctgcaaagctgcgtggcatacctgcgcacattgtcattccaagaaatgcaccagcgtgtaaggttgaaaatgttaagcgctacggtggtcatattatttggagcgatgccagcattgaatcgagagaatatgtttgtaaaagagtccaggaggagaccggcgctgttcttattcatcccttcaatagtaaatacactatcagtggtcagggtacagtatcccttgaacttttggagcaagtccctgaaattgacacaataattgttcccattagtggtggtggtttaatttctggtgtggcccttgctgcaaaggccataaacccttcgatacgcattctagcagcagaaccaaaaggtgctgatgattctgctcagtctaaggctgctggaaagatcatcacattgccttccacaaacaccattgctgatggactacgagcttttcttggagacctgacatggcctgtggtgcgtgacttggtggacgatgttatcgttgtggatgacactgccattgtggacgccatgaaaatgtgctatgagatcctgaaggtggctgttgagcccagtggcgcaattggcctggccgcagcactgtccgacgagtttaagcaaagctctgcttggcacgagagcagcaagatagggataattgtttctggagggaatgttgaccttggcactctctgggagtctatgtacaaacactga

SEQ ID NO: 105304 - protein, 338 aa, Zea mays
MGSKDGTGDISEAQGYAADIDSIREAQARIAPYVHRTPVMSSTSIDAMVGKKLFFKCECFQKAGAFKIRGASNSIFALDDEQVSKGVVTHSSGNHAAAVALAAKLRGIPAHIVIPRNAPACKVENVKRYGGHIIWSDASIESREYVCKRVQEETGAVLIHPFNSKYTISGQGTVSLELLEQVPEIDTIIVPISGGGLISGVALAAKAINPSIRILAAEPKGADDSAQSKAAGKIITLPSTNTIADGLRAFLGDLTWPVVRDLVDDVIVVDDTAIVDAMKMCYEILKVAVEPSGAIGLAAALSDEFKQSSAWHESSKIGIIVSGGNVDLGTLWESMYKH

SEQ ID NO: 105305 - DNA, 1812 bp, Zea mays; identical to SEQ ID NO: 12683
  CDS (1)..(1812)

SEQ ID NO: 105306 - protein, 603 aa, Zea mays; identical to SEQ ID NO: 12684

SEQ ID NO: 105307 - DNA, 1119 bp, Glycine max; identical to SEQ ID NO: 40258
  CDS (1)..(1119)

SEQ ID NO: 105308 - protein, 372 aa, Glycine max; identical to SEQ ID NO: 40259

SEQ ID NO: 105309 - DNA, 1170 bp, Glycine max; identical to SEQ ID NO: 40260
  CDS (1)..(1170)

SEQ ID NO: 105310 - protein, 389 aa, Glycine max; identical to SEQ ID NO: 40261

SEQ ID NO: 105311 - DNA, 1122 bp, Hordeum vulgare; identical to SEQ ID NO: 40266
  CDS (1)..(1122)

SEQ ID NO: 105312 - protein, 373 aa, Hordeum vulgare; identical to SEQ ID NO: 40267

SEQ ID NO: 105313 - DNA, 1137 bp, Triticum aestivum; identical to SEQ ID NO: 40272
  CDS (1)..(1137)

SEQ ID NO: 105314 - protein, 378 aa, Triticum aestivum; identical to SEQ ID NO: 40273

SEQ ID NO: 105315 - DNA, 1809 bp, Glycine max; identical to SEQ ID NO: 12685
  CDS (1)..(1809)

SEQ ID NO: 105316 - protein, 602 aa, Glycine max; identical to SEQ ID NO: 12686

SEQ ID NO: 105317 - DNA, 1323 bp, Zea mays; identical to SEQ ID NO: 40282
  CDS (1)..(1323)

SEQ ID NO: 105318 - protein, 440 aa, Zea mays; identical to SEQ ID NO: 40283

SEQ ID NO: 105319 - DNA, 1815 bp, Zea mays; identical to SEQ ID NO: 12687
  CDS (1)..(1815)

SEQ ID NO: 105320 - protein, 604 aa, Zea mays; identical to SEQ ID NO: 12688

SEQ ID NO: 105321 - DNA, 1017 bp, Zea mays
  CDS (1)..(1017)
atgggaagtaaagacggcaccggtgacatatcggaagcccaaggctatgctgccgacattgattccatcagggaggcgcaggcccgcattgcgccgtacgttcacaggacgcccgttatgtcgtcgacgtccatcgatgccatggtggggaagaagctcttcttcaagtgcgagtgcttccagaaagcgggcgcattcaagatccgaggtgcttcgaattcgatattcgcacttgacgatgagcaggtatcaaagggcgttgtgacacatagcagtgggaaccatgccgctgctgtggctttggctgcaaagctgcgtggcatacctgcgcacattgtcattccaagaaatgcaccagcgtgtaaggttgaaaatgttaagcgctacggtggtcatattatttggagcgatgccagcattgaatcgagagaatatgtttgtaaaagagtccaggaggagaccggcgctgttcttattcatcccttcaatagtaaatacactatcagtggtcagggtacagtatcccttgaacttttggagcaagtccctgaaattgacacaataattgttcccattagtggtggtggtttaatttctggtgtggcccttgctgcaaaggccataaacccttcgatacgcattctagcagcagaaccaaaaggtgctgatgattctgctcagtctaaggctgctggaaagatcatcacattgccttccacaaacaccattgctgatggactacgagcttttcttggagacctgacatggcctgtggtgcgtgacttggtggacgatgttatcgttgtggatgacactgccattgtggacgccatgaaaatgtgctatgagatcctgaaggtggctgttgagcccagtggcgcaattggcctggccgcagcactgtccgacgagtttaagcaaagctctgcttggcacgagagcagcaagatagggataattgtttctggagggaatgttgaccttggcactctctggcagtctatgtacaaacactga

SEQ ID NO: 105322 - protein, 338 aa, Zea mays
MGSKDGTGDISEAQGYAADIDSIREAQARIAPYVHRTPVMSSTSIDAMVGKKLFFKCECFQKAGAFKIRGASNSIFALDDEQVSKGVVTHSSGNHAAAVALAAKLRGIPAHIVIPRNAPACKVENVKRYGGHIIWSDASIESREYVCKRVQEETGAVLIHPFNSKYTISGQGTVSLELLEQVPEIDTIIVPISGGGLISGVALAAKAINPSIRILAAEPKGADDSAQSKAAGKIITLPSTNTIADGLRAFLGDLTWPVVRDLVDDVIVVDDTAIVDAMKMCYEILKVAVEPSGAIGLAAALSDEFKQSSAWHESSKIGIIVSGGNVDLGTLWQSMYKH

SEQ ID NO: 105323 - DNA, 1017 bp, Zea mays
  CDS (1)..(1017)
atgggaagtaaagacggcaccggtgacatatcggaagcccaaggctatgctgccgacattgattccatcagggaggcgcaggcccgcattgcgccgtacgttcacaggacgcccgttatgtcgtcgacgtccatcgatgccatggtggggaagaagctcttcttcaagtgcgagtgcttccagaaagcgggcgcattcaagatccgaggtgcttcgaattcgatattcgcacttgacgatgagcaggtatcaaagggcgttgtgacacatagcagtgggaaccatgccgctgctgtggctttggctgcaaagctgcgtggcatacctgcgcacattgtcattccaagaaatgcaccagcgtgtaaggttgaaaatgttaagcgctatggtggtcatattatttggagcgatgctagcattgaatcgagagaatctgtttgtaaaagagtccaggaggagaccggcgctgttcttattcatcccttcaatagtaaatacactatcagtggtcagggtacagtatctcttgaacttttggagcaagtccctgaaattgacacaataattgttcccattagtggtggtggtttaatttctggtgtggcccttgctgcaaaggccataaacccttcgatacgcattctagcagcagaaccaaaaggtgctgatgattctgctcagtctaaggctgctggaaagatcatcacattgccttccacaaacaccattgctgatggactacgagctttccttggagacctgacatggcctgtggtgcgtgacttggtggacgatgttatcgttgtggatgacactgccattgtggacgccatgaaaatgtgctatgagatcctgaaggtggctgtcgagcccagtggcgcaattggcctggccgcagcactgtccgacgagtttaagcaaagctctgcttggcacgagagcagcaagatagggataattgtttcgggaggcaatgttgaccttggcactctctggcagtctatgtacaaacactga

SEQ ID NO: 105324 - protein, 338 aa, Zea mays
MGSKDGTGDISEAQGYAADIDSIREAQARIAPYVHRTPVMSSTSIDAMVGKKLFFKCECFQKAGAFKIRGASNSIFALDDEQVSKGVVTHSSGNHAAAVALAAKLRGIPAHIVIPRNAPACKVENVKRYGGHIIWSDASIESRESVCKRVQEETGAVLIHPFNSKYTISGQGTVSLELLEQVPEIDTIIVPISGGGLISGVALAAKAINPSIRILAAEPKGADDSAQSKAAGKIITLPSTNTIADGLRAFLGDLTWPVVRDLVDDVIVVDDTAIVDAMKMCYEILKVAVEPSGAIGLAAALSDEFKQSSAWHESSKIGIIVSGGNVDLGTLWQSMYKH

SEQ ID NO: 105325 - DNA, 24 bp, Artificial sequence
  primer
atgcatattacatacgatctgccg

SEQ ID NO: 105326 - DNA, 23 bp, Artificial sequence
  primer
ttaagcgtcaacgaaaccggtga

SEQ ID NO: 105327 - protein, 355 aa, Artificial sequence
  consensus sequence
  Variant (3)..(13): Xaa in position 3 to 13 is any amino acid
  Variant (14)..(20): Xaa in position 14 to 20 is any or no amino acid
  Variant (22)..(22): Xaa in position 22 is any amino acid
  Variant (24)..(24): Xaa in position 24 is any amino acid
  Variant (25)..(25): Xaa in position 25 is any or no amino acid
  Variant (27)..(30): Xaa in position 27 to 30 is any amino acid
  Variant (33)..(33): Xaa in position 33 is any amino acid
  Variant (37)..(42): Xaa in position 37 to 42 is any amino acid
  Variant (44)..(47): Xaa in position 44 to 47 is any amino acid
  Variant (48)..(54): Xaa in position 48 to 54 is any or no amino acid
  Variant (57)..(59): Xaa in position 57 to 59 is any amino acid
  Variant (61)..(61): Xaa in position 61 is any amino acid
  Variant (68)..(68): Xaa in position 68 is any amino acid
  Variant (70)..(81): Xaa in position 70 to 81 is any amino acid
  Variant (82)..(84): Xaa in position 82 to 84 is any or no amino acid
  Variant (87)..(89): Xaa in position 87 to 89 is any amino acid
  Variant (91)..(92): Xaa in position 91 to 92 is any amino acid
  Variant (94)..(103): Xaa in position 94 to 103 is any amino acid
  Variant (104)..(106): Xaa in position 104 to 106 is any or no amino acid
  Variant (108)..(132): Xaa in position 108 to 132 is any amino acid
  Variant (133)..(136): Xaa in position 133 to 136 is any or no amino acid
  Variant (138)..(144): Xaa in position 138 to 144 is any amino acid
  Variant (145)..(145): Xaa in position 145 is any or no amino acid
  Variant (151)..(153): Xaa in position 151 to 153 is any amino acid
  Variant (155)..(167): Xaa in position 155 to 167 is any amino acid
  Variant (168)..(174): Xaa in position 168 to 174 is any or no amino acid
  Variant (180)..(181): Xaa in position 180 to 181 is any amino acid
  Variant (183)..(187): Xaa in position 183 to 187 is any amino acid
  Variant (189)..(189): Xaa in position 189 is any amino acid
  Variant (190)..(191): Xaa in position 190 to 191 is any or no amino acid
  Variant (193)..(197): Xaa in position 193 to 197 is any amino acid
  Variant (198)..(212): Xaa in position 198 to 212 is any or no amino acid
  Variant (215)..(238): Xaa in position 215 to 238 is any amino acid
  Variant (239)..(245): Xaa in position 239 to 245 is any or no amino acid
  Variant (248)..(252): Xaa in position 248 to 252 is any amino acid
  Variant (253)..(253): Xaa in position 253 is any or no amino acid
  Variant (255)..(262): Xaa in position 255 to 262 is any amino acid
  Variant (263)..(279): Xaa in position 263 to 279 is any or no amino acid
  Variant (281)..(299): Xaa in position 281 to 299 is any amino acid
  Variant (300)..(300): Xaa in position 300 is any or no amino acid
  Variant (302)..(303): Xaa in position 302 to 303 is any amino acid
  Variant (306)..(308): Xaa in position 306 to 308 is any amino acid
  Variant (310)..(324): Xaa in position 310 to 324 is any amino acid
  Variant (325)..(352): Xaa in position 325 to 352 is any or no amino acid
  Variant (354)..(354): Xaa in position 354 is any amino acid
TPXXXXXXXXXXXXXXXXXXKXEXXQXXXXFKXRGAXXXXXXLXXXXXXXXXXXGVXXXSXGNHAQGXAXXXXXXXXXXXXXXXMPXXXPXXKXXXXXXXXXXXXXVXXXXXXXXXXXXXXXXXXXXXXXXXXXXXPXXXXXXXXAGQGTXXXEXXXXXXXXXXXXXXXXXXXXGGGGLXXGXXXXXKXXXPXXXXXXXXXXXXXXXXXXXXGVXXXXXXXXXXXXXXXXXXXXXXXXXXXXXXXDGXXXXXXGXXXXXXXXXXXXXXXXXXXXXXXXXVXXXXXXXXXXXXXXXXXXXXEXXGAXXXAXXXXXXXXXXXXXXXXXXXXXXXXXXXXXXXXXXXXXXXXXXXGXN

SEQ ID NO: 105328 - protein, 16 aa, Artificial sequence
  protein pattern
  Variant (2)..(2): Xaa in position 2 is any amino acid
  Variant (4)..(5): Xaa in position 4 to 5 is any amino acid
  Variant (7)..(9): Xaa in position 7 to 9 is any amino acid
  Variant (10)..(10): Xaa in position 10 is Ala or Ser
  Variant (13)..(13): Xaa in position 13 is any amino acid
KXEXXQXXXXFKXRGA

SEQ ID NO: 105329 - protein, 16 aa, Artificial sequence
  protein pattern
  Variant (2)..(2): Xaa in position 2 is any or no amino acid
  Variant (4)..(5): Xaa in position 4 to 5 is any amino acid
  Variant (6)..(6): Xaa in position 6 is any or no amino acid
  Variant (8)..(8): Xaa in position 8 is Ala or Ser
  Variant (13)..(13): Xaa in position 13 is any amino acid
  Variant (14)..(14): Xaa in position 14 is Ala, Gly or Ser
  Variant (15)..(15): Xaa in position 15 is Phe, Ile, Leu, Met or Val
  Variant (16)..(16): Xaa in position 16 is Ala, Pro or Ser
GXVXXXSXGNHAXXXX

SEQ ID NO: 105330 - protein, 18 aa, Artificial sequence
  protein pattern
  Variant (2)..(2): Xaa in position 2 is Phe or Tyr
  Variant (3)..(3): Xaa in position 3 is Ala, Asp, Glu, Gly, Asn, Gln or Ser
  Variant (4)..(9): Xaa in position 4 to 9 is any amino acid
  Variant (13)..(13): Xaa in position 13 is Ser or Thr
  Variant (14)..(16): Xaa in position 14 to 16 is any amino acid
  Variant (17)..(17): Xaa in position 17 is Asp or Glu
  Variant (18)..(18): Xaa in position 18 is Phe, Ile, Leu, Met or Val
PXXXXXXXXGQGXXXXXX

SEQ ID NO: 105331 - protein, 8 aa, Artificial sequence
  protein pattern
  Variant (6)..(6): Xaa in position 6 is any amino acid
  Variant (7)..(7): Xaa in position 7 is Ala or Ser
GGGGLXXG

SEQ ID NO: 105332 - DNA, 1239 bp, Escherichia coli
  CDS (1)..(1239): transl_table=11
atgaaagcaattgacaatcagattagaaacatctcttcaagccatcaagataagcattcagataaagttaacagtcatcaacaccatggcaaggttgataaaacacatcgtgcaaagatagttgaatttgataaactggataatgattcgcaaatagataacgattttggcctgcatatcatctatttcctgcaacatggtcactggaaggtaaatgatcgtagtcaccagatggagaaagtatggttttataatagtgaaccttctatagatattcaagaatataatagattcgccgacaatactactgatacgtttatctttacaattataccagacaataaccatgtgttaaaattatcgtctcccattaccgttactgttgagtgtaagggcggttattattttattaattcctctggagataaatcagatataatttataaagttgatgggctttctatcatagcgagaaatttctttactcttcttagtggtaatttcaaacctgactggcgttgggatgtctctaaagagacgtttactaaggaaaagtttgatagctatgttaaatctgtgttttcaaaaatagacttctataaacagtgtggtgtgattaacccacaaaatgccaacacggcttattttggcgatacagatggaagagtaggcgctgtactttatgcattgctcgtttcagggcatataggcatcagggaaaagggttggagtttattatgtgaattattaaaacacgaagagatggcttcatctgcatacaaacataaaaataataaagtgctctacgatttattaaatacgagagacatgatcttgaatgagttgcatcaacatgtttttttaaaggacgatgcgataaccccttgtatcttccttggggatcatacaggcgatagatttagtactatttttggtgataaatatatccttactttgctaaattctatgcgaaatatggagggtaataaagatagccgtattaataaaaatgtcgtcgttctggctggaaatcatgaaatcaattttaatggtaactatactgcacgactagcaaatcataaactctctgccggtgatacgtataacttaattaaaacgctcgatgtttgtaattatgactcagaaaggcaagttttaaccagtcatcacggaataataagagatgaagaaaaaaatgttattgtctcggtgctttgcaggttccatttaatcagataa

SEQ ID NO: 105333 - protein, 412 aa, Escherichia coli
MKAIDNQIRNISSSHQDKHSDKVNSHQHHGKVDKTHRAKIVEFDKLDNDSQIDNDFGLHIIYFLQHGHWKVNDRSHQMEKVWFYNSEPSIDIQEYNRFADNTTDTFIFTIIPDNNHVLKLSSPITVTVECKGGYYFINSSGDKSDIIYKVDGLSIIARNFFTLLSGNFKPDWRWDVSKETFTKEKFDSYVKSVFSKIDFYKQCGVINPQNANTAYFGDTDGRVGAVLYALLVSGHIGIREKGWSLLCELLKHEEMASSAYKHKNNKVLYDLLNTRDMILNELHQHVFLKDDAITPCIFLGDHTGDRFSTIFGDKYILTLLNSMRNMEGNKDSRINKNVVVLAGNHEINFNGNYTARLANHKLSAGDTYNLIKTLDVCNYDSERQVLTSHHGIIRDEEKNVIVSVLCRFHLIR

SEQ ID NO: 105334 - DNA, 1674 bp, Escherichia coli O157:H7 EDL933
  CDS (1)..(1674): transl_table=11
  misc_feature (384)..(384): m is a or c
atgtctttcagacatgtatcatttattttgttactaacaagtcaaaaatatcacgggttatttatgaaagtatttcacaatatatttaagtacatctcttcaaaccatcaagataagcattcagataaagttaataatcatcaacaccatggcaaggttgataaaaaacatcgttcagagatagttgaaattgataagctggataaacattcgcaaatagataacgattttggcctgcatatcatctatttcctgcaacatggctgctggaacgtaactgaacatagtcctcagatagagaaaatatggttttacaatagtgagccatctatagatattaaagaatataatagtttcgccgacaatactactgacacgtttatmtttacaattataccagacaataaccatgtgataaaattatcgtctcccattaccgttacgattgagcgtaaggacggttattattttattaatttctccggggataaatcagacataatttataaagttgatgggttttctatcaaagagagaaatttctttactcttcttagtggtaatttcaaacctgactggcgttgggctgtctctaaagagacgtttactaaggaaaagtttgatagctatgttgaatctgttttttcaaaaatagacttttataaacagtgtggtgtgattaacccacaaaatgccaacacggcttattttggcgatacagatggaagagtaggcgctgtactttatgcattgctcgtttcagggcatataggcatcagggaaaaggggtggagtttattatgtgatttattgaaacacgaagacatggcttcattcgcatatgaaaataaaaaattgaaaaaactcttcactttattagataagagagacatgatcttgaatgagttgcatcaacatgtttttttaaaaggcgatgcgattaccccttgtatcttccttggggatcatacaggcgatagattcagtactatttttggtgataaatatatccttactttgctaaattctatgcgaaatatggagggtaataaagatagtcgtataaataaaaatgtcgttgttctggctggaaatcatgaaatcaattttaatggtaactatagtgcacgactagcaaatcataaactctcttccggtgatacatataacttaattaaaacgctcgatgtttgtaattatgactcagaaaggcatgttttaaccagtcatcacggaataataagggatgaagaaaataaatgttattgtctcggtgctttgcaggttccatttaatcagatgaaaaatcctactgatcctgaggaattagcatatatatttaataaaaaacataaacaacatatggatgatcatcttttccatctaattagaagcaatactatggcacccacacctgtatatgctgattatttaaataacactactgatttcagaccagatcctgaagatatcttcaaatgtggacagacgctcgaatgtggcgacccccgcaaaaacattagacaaaaatatggccatcatgggttaggggtaaatcagaatcaacaatttgataatggtgttatggggctaaattccaggatggcagtgtttgatgaaaataaaaaaataataggttcttcctcaggactaagttgttttcaaccacattaa

SEQ ID NO: 105335 - protein, 557 aa, Escherichia coli O157:H7 EDL933
MSFRHVSFILLLTSQKYHGLFMKVFHNIFKYISSNHQDKHSDKVNNHQHHGKVDKKHRSEIVEIDKLDKHSQIDNDFGLHIIYFLQHGCWNVTEHSPQIEKIWFYNSEPSIDIKEYNSFADNTTDTFIFTIIPDNNHVIKLSSPITVTIERKDGYYFINFSGDKSDIIYKVDGFSIKERNFFTLLSGNFKPDWRWAVSKETFTKEKFDSYVESVFSKIDFYKQCGVINPQNANTAYFGDTDGRVGAVLYALLVSGHIGIREKGWSLLCDLLKHEDMASFAYENKKLKKLFTLLDKRDMILNELHQHVFLKGDAITPCIFLGDHTGDRFSTIFGDKYILTLLNSMRNMEGNKDSRINKNVVVLAGNHEINFNGNYSARLANHKLSSGDTYNLIKTLDVCNYDSERHVLTSHHGIIRDEENKCYCLGALQVPFNQMKNPTDPEELAYIFNKKHKQHMDDHLFHLIRSNTMAPTPVYADYLNNTTDFRPDPEDIFKCGQTLECGDPRKNIRQKYGHHGLGVNQNQQFDNGVMGLNSRMAVFDENKKIIGSSSGLSCFQPH

SEQ ID NO: 105336 - DNA, 1623 bp, Shigella flexneri 2a str. 301
  CDS (1)..(1623): transl_table=11
atgaaaattggaactgtggcaggcactaatggcagtacaacgacaatcgcaacaaatgatatggtgcaagagcatgttaccaacttcactaaagaactgtttgggtatattgcaaatggtataggtgatgatatatcaagtattgccaggacaatgctcggtgaagttgtggaaaaaattgatgattggcaaatagaacgtttccaacaatctattcaagatgacaaaatttcatttaccatacaaacgaatcattcagaaaaatatagtatgctatcgggcatgcgcgctcatattctacgtaggaataactgttatcagtttattgtgacaattaatagtaaaaattacggttgccctcttgataataccgatattaattggtgcagcattgtttatttacttaataatatgacagtaaatgataatgctaatgatgttgcagttactgagtcgtacaaacccatctggaactgggaaatatcgcaatacaatgtatttgatattaaattcgaaacaattataaaaccccagttcgctgacagaacctatttctccaattgttcacctgttgatcccacaagtaccaggccgacctattttggcgataccgatggctcagtcggtgcagttttgtacgcgctttttgcaacaggacatttgggaatcatggctgaaggagaaaatttccttagccagttgcttaatatagaagatgaagttctcaacgtattgctaagggagaactttaatgagcaacttgacactaatgttaatacaataatcagtatactgaacagaagagataatgttttagaaagtcttcagccttatttggttattaataaagacgcagtcacgccatgtacgtttcttggcgaccaaaccggcgatcgatttagtaatatctgtggcgatcaatttatcatcgatttgttaaaacgcataatgagtatcaatgaaaatgttcatgtattagctggaaatcatgaaacgaattgcaatggtaactatatgcaaaacttcacgcgcatgaaaccacttgatgaggatacctacgacgggataaaagattatcctgtatgtttctatgaccccaaatacaaaataatggcaaatcatcatgggataacttttgatgatcagcgaaaacgttacattataggaccgataactgtctctattgatgaaatgaccaatgctctcgatccggtcgaattagcggaaattattaataaaaagcatcatgctataattaatggcaaaaagtttaaaactagccgggctatctcttgtcgatcctttaatcgttatttttctgtttcgacagattacagacctaaacttgaagcactattagcatgttcacaaatgttaggtataaatcaagttgttgcacataacggaaatggtgggagagaacgcataggtgaaacggggacagttttaggtcttaacgcccgtgacagtaaacatgctggaagaatgttcagcatgcataattgccaaattaaccctggtgcagggccagagataaccactccctggaagtcttaccagcatgaaaaaaacagaaatggacttatgcctttgattagaaggcgcacaatgttacagctctga

SEQ ID NO: 105337 - protein, 540 aa, Shigella flexneri 2a str. 301
MKIGTVAGTNGSTTTIATNDMVQEHVTNFTKELFGYIANGIGDDISSIARTMLGEVVEKIDDWQIERFQQSIQDDKISFTIQTNHSEKYSMLSGMRAHILRRNNCYQFIVTINSKNYGCPLDNTDINWCSIVYLLNNMTVNDNANDVAVTESYKPIWNWEISQYNVFDIKFETIIKPQFADRTYFSNCSPVDPTSTRPTYFGDTDGSVGAVLYALFATGHLGIMAEGENFLSQLLNIEDEVLNVLLRENFNEQLDTNVNTIISILNRRDNVLESLQPYLVINKDAVTPCTFLGDQTGDRFSNICGDQFIIDLLKRIMSINENVHVLAGNHETNCNGNYMQNFTRMKPLDEDTYDGIKDYPVCFYDPKYKIMANHHGITFDDQRKRYIIGPITVSIDEMTNALDPVELAEIINKKHHAIINGKKFKTSRAISCRSFNRYFSVSTDYRPKLEALLACSQMLGINQVVAHNGNGGRERIGETGTVLGLNARDSKHAGRMFSMHNCQINPGAGPEITTPWKSYQHEKNRNGLMPLIRRRTMLQL

SEQ ID NO: 105338 - DNA, 1776 bp, Shigella flexneri 2a str. 301
  CDS (1)..(1776): transl_table=11
ttgtttttttttacaattgtcttccagggatggattgttttccattatttagtaaaagaccggatagtctcggtgcttaaaatcagcgaacatataagtattattgttttatatcgtcgtaaatatgtctttcagacatgtatcatttattttttactaacaggtcaaaaatatcgcgggttatttatgaaagcaattgacaatatatttaagtacatcccttcaaaccataaagataagcattcagataaagttaataatcatcaacaccatagcaaggttgataaaacacatcgttcaaagatagttgaaattgataagctggataatgattcgcaaatagataacgattttggcatgcatatcatctatttcctgcaacatggtcactggagggtaaatgaacatagtcttcagatggagaaaatatggttttacaatagtgagccatctatagatattcaagaatataatagttttgccgataatactactaacacgtttatctttacaattataccagacaataaccatgtgataaaattatcgtctcccattacagttaagattgagtgtaaggatggttattattttattaatttctccggagataaatcagacataatttataaagttaatgggctttctatcatacctgaaaatttctttactcttcttagcggtaattttaaagctgactggcgttgggatgtctctaaagagacgtttcctaaggataagtttgatagctatgttaaatctgtgttttctaaaatagacttttataaacaatgtggtgtgattaacccacaaaatgccaacacggcttattttggcgatacagatggaagagtaggcgctgtactttattcattgctcgtttcagggcatataggcatcagggaaaagggttggagtttattatgtgaattattaaaacacgaagacatggcttcatctgcatacatacataaaaataataaattgctctacaatttattaaatacgagagacatgatattgaatgagttgcatcaacatgtttttttaaaggacgatgcgataaccccttgtatcttccttggggatcatacaggcgatagatttagtactatttttggtgataaatatatccttactttgctaaattctatgcgaaatatggagggtaataaagatagccgtattaataaaaatgtcatcgttctggctggaaatcatgaaatcaattttaatggtaactatactgcacgactagaaaattataaactctctgccggtgatacgtataacttaattaaaacgctcgatgtttgtaattataactcagaaactaaagttttaaccagtcatcacggaataataagaaatgaagaaaatcaatgttattgtctcggtgctttgcaggttccatttaatcagatgaaagacccaattgatcctgaggaattagcaaatatatgtaataaaaaacataaacaacacatggatgatcatcttctccatctaattagaagcaatgctatagcacccacacctgtatatgaaaattattttaataacactactgctttcagaccaaaacctgaagatatcttcaaatgtggacagacgctcaaaaaaactaaacagaaatttggccattatggattaggggtagaccagcatcaaaaaattgataattataccatggggctaaattcttggaagatagcacctaacgaacgtggtgataaaaaaggtgtcccagggcttagttgttttcaacctcaataa

SEQ ID NO: 105339 - protein, 591 aa, Shigella flexneri 2a str. 301
MFFFTIVFQGWIVFHYLVKDRIVSVLKISEHISIIVLYRRKYVFQTCIIYFLLTGQKYRGLFMKAIDNIFKYIPSNHKDKHSDKVNNHQHHSKVDKTHRSKIVEIDKLDNDSQIDNDFGMHIIYFLQHGHWRVNEHSLQMEKIWFYNSEPSIDIQEYNSFADNTTNTFIFTIIPDNNHVIKLSSPITVKIECKDGYYFINFSGDKSDIIYKVNGLSIIPENFFTLLSGNFKADWRWDVSKETFPKDKFDSYVKSVFSKIDFYKQCGVINPQNANTAYFGDTDGRVGAVLYSLLVSGHIGIREKGWSLLCELLKHEDMASSAYIHKNNKLLYNLLNTRDMILNELHQHVFLKDDAITPCIFLGDHTGDRFSTIFGDKYILTLLNSMRNMEGNKDSRINKNVIVLAGNHEINFNGNYTARLENYKLSAGDTYNLIKTLDVCNYNSETKVLTSHHGIIRNEENQCYCLGALQVPFNQMKDPIDPEELANICNKKHKQHMDDHLLHLIRSNAIAPTPVYENYFNNTTAFRPKPEDIFKCGQTLKKTKQKFGHYGLGVDQHQKIDNYTMGLNSWKIAPNERGDKKGVPGLSCFQPQ

SEQ ID NO: 105340 - DNA, 1608 bp, Escherichia coli B
  CDS (1)..(1608): transl_table=11
atgaaagcaattgacaatcagattagaaacatctcttcaagccatcaagataagcattcagataaagttaacagtcatcaacaccatggcaaggttgataaaacacatcgtgcaaagatagttgaatttgataaactggataatgattcgcaaatagataacgattttggcctgcatatcatctatttcctgcaacatggtcactggaaggtaaatgatcgtagtcaccagatggagaaagtatggttttacaatagtgaaccttctatagatattcaagaatataatagattcgccgacaatactactgatacgtttatctttacaattataccagacaataaccatgtgttaaaattatcgtctcccattaccgttactgttgagtgtaagggcggttattattttattaattcctctggagataaatcagatataatttataaagttgatgggctttctatcatagcgagaaatttctttactcttcttagtggtaatttcaaacctgactggcgttgggatgtctctaaggagacgtttactaaggaaaagtttgatagctatgttagatctgtgttttcaaaaatagacttctataaacagtgtggtgtgattaacccacaaaatgccaacacggcttattttggcgatacagatggaagagtaggcgctgtactttatgcattgctcgtttcagggcatataggcatcagggaaaagggttggagtttattatgtgaattattaaaacacgaagagatggcttcatctgcatacaaacataaaaataataaagtgctctacgatttattaaatacgagagacatgatcttgaatgagttgcatcaacatgtttttttaaaggacgatgcgataaccccttgtatcttccttggggatcatacaggcgatagatttagtactatttttggtgataaatatatccttactttgctaaattctatgcgaaatatggagggtaataaagatagccgtattaataaaaatgtcgtcgttctggctggaaatcatgaaatcaattttaatggtaactatactgcacgactagcaaatcataaactctctgccggtgatacgtataacttaattaaaacgctcgatgtttgtaattatgactcagaaaggcaagttttaaccagtcatcacggaataataagagatgaagaaaaaaaatgttattgtctcggtgctttgcaggttccatttaatcagatgaaaaatcctactgatcctgaggaattagccaatatttttaataaaaaacataaagaacacatggatgatcctctattccatctaatccgaagcaatactttgaaacccacacctgtatatgctaattattttgataacactactgatttcagaccagcacgtaaacgtatcttcatatgtggggagacactcaaaggtgaagaccccagcaaatacattagacaaaaatatgggcatcatggggtcggggtagatcagaatcaacaatttgataatggtattatggggctaaattccctgaaggaagcacgtgataaaaataataaaataatttattcctcagggcttagttgttttcaatctcattaa

SEQ ID NO: 105341 - protein, 535 aa, Escherichia coli B
MKAIDNQIRNISSSHQDKHSDKVNSHQHHGKVDKTHRAKIVEFDKLDNDSQIDNDFGLHIIYFLQHGHWKVNDRSHQMEKVWFYNSEPSIDIQEYNRFADNTTDTFIFTIIPDNNHVLKLSSPITVTVECKGGYYFINSSGDKSDIIYKVDGLSIIARNFFTLLSGNFKPDWRWDVSKETFTKEKFDSYVRSVFSKIDFYKQCGVINPQNANTAYFGDTDGRVGAVLYALLVSGHIGIREKGWSLLCELLKHEEMASSAYKHKNNKVLYDLLNTRDMILNELHQHVFLKDDAITPCIFLGDHTGDRFSTIFGDKYILTLLNSMRNMEGNKDSRINKNVVVLAGNHEINFNGNYTARLANHKLSAGDTYNLIKTLDVCNYDSERQVLTSHHGIIRDEEKKCYCLGALQVPFNQMKNPTDPEELANIFNKKHKEHMDDPLFHLIRSNTLKPTPVYANYFDNTTDFRPARKRIFICGETLKGEDPSKYIRQKYGHHGVGVDQNQQFDNGIMGLNSLKEARDKNNKIIYSSGLSCFQSH

SEQ ID NO: 105342 - DNA, 26 bp, Artificial sequence
  primer
atgaaagcaattgacaatcagattag

SEQ ID NO: 105343 - DNA, 27 bp, Artificial sequence
  primer
ttatctgattaaatggaacctgcaaag

SEQ ID NO: 105344 - protein, 546 aa, Artificial sequence
  consensus sequence
  Variant (3)..(3): Xaa in position 3 is any amino acid
  Variant (5)..(5): Xaa in position 5 is any amino acid
  Variant (7)..(10): Xaa in position 7 to 10 is any amino acid
  Variant (12)..(12): Xaa in position 12 is any amino acid
  Variant (14)..(14): Xaa in position 14 is any amino acid
  Variant (16)..(16): Xaa in position 16 is any amino acid
  Variant (25)..(25): Xaa in position 25 is any amino acid
  Variant (30)..(30): Xaa in position 30 is any amino acid
  Variant (35)..(35): Xaa in position 35 is any amino acid
  Variant (38)..(39): Xaa in position 38 to 39 is any amino acid
  Variant (43)..(43): Xaa in position 43 is any amino acid
  Variant (49)..(49): Xaa in position 49 is any amino acid
  Variant (58)..(58): Xaa in position 58 is any amino acid
  Variant (68)..(68): Xaa in position 68 is any amino acid
  Variant (70)..(70): Xaa in position 70 is any amino acid
  Variant (72)..(74): Xaa in position 72 to 74 is any amino acid
  Variant (76)..(76): Xaa in position 76 is any amino acid
  Variant (78)..(78): Xaa in position 78 is any amino acid
  Variant (81)..(81): Xaa in position 81 is any amino acid
  Variant (97)..(97): Xaa in position 97 is any amino acid
  Variant (104)..(104): Xaa in position 104 is any amino acid
  Variant (118)..(118): Xaa in position 118 is any amino acid
  Variant (127)..(128): Xaa in position 127 to 128 is any amino acid
  Variant (132)..(132): Xaa in position 132 is any amino acid
  Variant (139)..(139): Xaa in position 139 is any amino acid
  Variant (151)..(151): Xaa in position 151 is any amino acid
  Variant (153)..(153): Xaa in position 153 is any amino acid
  Variant (156)..(158): Xaa in position 156 to 158 is any amino acid
  Variant (175)..(175): Xaa in position 175 is any amino acid
  Variant (182)..(182): Xaa in position 182 is any amino acid
  Variant (184)..(184): Xaa in position 184 is any amino acid
  Variant (191)..(191): Xaa in position 191 is any amino acid
  Variant (248)..(248): Xaa in position 248 is any amino acid
  Variant (254)..(254): Xaa in position 254 is any amino acid
  Variant (258)..(258): Xaa in position 258 is any amino acid
  Variant (261)..(262): Xaa in position 261 to 262 is any amino acid
  Variant (264)..(271): Xaa in position 264 to 271 is any amino acid
  Variant (273)..(273): Xaa in position 273 is any amino acid
  Variant (275)..(275): Xaa in position 275 is any amino acid
  Variant (277)..(278): Xaa in position 277 to 278 is any amino acid
  Variant (282)..(282): Xaa in position 282 is any amino acid
  Variant (298)..(298): Xaa in position 298 is any amino acid
  Variant (347)..(347): Xaa in position 347 is any amino acid
  Variant (362)..(362): Xaa in position 362 is any amino acid
  Variant (366)..(366): Xaa in position 366 is any amino acid
  Variant (368)..(368): Xaa in position 368 is any amino acid
  Variant (372)..(372): Xaa in position 372 is any amino acid
  Variant (391)..(392): Xaa in position 391 to 392 is any amino acid
  Variant (406)..(406): Xaa in position 406 is any amino acid
  Variant (407)..(408): Xaa in position 407 to 408 is any or no amino acid
  Variant (410)..(411): Xaa in position 410 to 411 is any amino acid
  Variant (413)..(415): Xaa in position 413 to 415 is any amino acid
  Variant (417)..(420): Xaa in position 417 to 420 is any amino acid
  Variant (422)..(425): Xaa in position 422 to 425 is any amino acid
  Variant (428)..(428): Xaa in position 428 is any amino acid
  Variant (432)..(432): Xaa in position 432 is any amino acid
  Variant (434)..(434): Xaa in position 434 is any amino acid
  Variant (439)..(446): Xaa in position 439 to 446 is any amino acid
  Variant (452)..(460): Xaa in position 452 to 460 is any amino acid
  Variant (461)..(463): Xaa in position 461 to 463 is any or no amino acid
  Variant (465)..(468): Xaa in position 465 to 468 is any amino acid
  Variant (470)..(471): Xaa in position 470 to 471 is any amino acid
  Variant (474)..(480): Xaa in position 474 to 480 is any amino acid
  Variant (482)..(484): Xaa in position 482 to 484 is any amino acid
  Variant (486)..(492): Xaa in position 486 to 492 is any amino acid
  Variant (493)..(502): Xaa in position 493 to 502 is any or no amino acid
  Variant (504)..(505): Xaa in position 504 to 505 is any amino acid
  Variant (507)..(523): Xaa in position 507 to 523 is any amino acid
  Variant (525)..(544): Xaa in position 525 to 544 is any amino acid
  Variant (545)..(545): Xaa in position 545 is any or no amino acid
MKXIXNXXXXIXSXHXDKHSDKVNXHQHHXKVDKXHRXXIVEXDKLDNXSQIDNDFGXHIIYFLQHGXWXVXXXSXQXEKXWFYNSEPSIDIQEYNXFADNTTXTFIFTIIPDNNHVXKLSSPITVXXECKXGYYFINXSGDKSDIIYKVXGXSIXXXNFFTLLSGNFKPDWRWXVSKETFXKXKFDSYVXSVFSKIDFYKQCGVINPQNANTAYFGDTDGRVGAVLYALLVSGHIGIREKGWSLLCXLLKHEXMASXAYXXKXXXXXXXXNXKXLXXLLNXRDMILNELHQHVFLKXDAITPCIFLGDHTGDRFSTIFGDKYILTLLNSMRNMEGNKDSRINKNVXVLAGNHEINFNGNYXARLXNXKLSXGDTYNLIKTLDVCNYDSEXXVLTSHHGIIRDEEXXXYXXGXXXVXXXXMXXXXDPXELAXIXNKKHXXXXXXXXFHLIRXXXXXXXXXXXXYXXXXTXXRPXXXXXXXCXXXLXXXXXXXXXXXXXXXXXGXXGXXXXXXXXXXXXXXXXXSXXXXXXXXXXXXXXXXXXXXXQ

SEQ ID NO: 105345 - protein, 60 aa, Artificial sequence
  protein pattern
  Variant (32)..(32): Xaa in position 32 is Ala or Ser
  Variant (51)..(51): Xaa in position 51 is Asp or Glu
  Variant (57)..(57): Xaa in position 57 is Asp or Glu
DFYKQCGVINPQNANTAYFGDTDGRVGAVLYXLLVSGHIGIREKGWSLLCXLLKHEXMAS

SEQ ID NO: 105346 - protein, 61 aa, Artificial sequence
  protein pattern
  Variant (16)..(16): Xaa in position 16 is any or no amino acid
  Variant (18)..(18): Xaa in position 18 is any or no amino acid
RDMILNELHQHVFLKXDXAITPCIFLGDHTGDRFSTIFGDKYILTLLNSMRNMEGNKDSRI

SEQ ID NO: 105347 - protein, 59 aa, Artificial sequence
  protein pattern
  Variant (11)..(11): Xaa in position 11 is Ser or Thr
  Variant (15)..(15): Xaa in position 15 is Ala or Glu
  Variant (17)..(17): Xaa in position 17 is His or Tyr
  Variant (21)..(21): Xaa in position 21 is Ala or Ser
  Variant (37)..(37): Xaa in position 37 is Asp or Asn
  Variant (40)..(41): Xaa in position 40 to 41 is any amino acid
  Variant (52)..(52): Xaa in position 52 is Asp or Asn
  Variant (55)..(56): Xaa in position 55 to 56 is any amino acid
  Variant (57)..(57): Xaa in position 57 is Cys or Val
  Variant (58)..(58): Xaa in position 58 is any amino acid
  Variant (59)..(59): Xaa in position 59 is Cys or Val
NHEINFNGNYXARLXNXKLSXGDTYNLIKTLDVCNYXSEXXVLTSHHGIIRXEEXXXXX

SEQ ID NO: 105348 - protein, 55 aa, Artificial sequence
  protein pattern
  Variant (2)..(2): Xaa in position 2 is any amino acid
  Variant (4)..(4): Xaa in position 4 is Ile or Met
  Variant (7)..(7): Xaa in position 7 is Ile or Val
  Variant (19)..(19): Xaa in position 19 is any amino acid
  Variant (23)..(23): Xaa in position 23 is Arg or Ser
  Variant (30)..(30): Xaa in position 30 is Asp or Asn
  Variant (44)..(44): Xaa in position 44 is Ile or Leu
  Variant (53)..(53): Xaa in position 53 is any amino acid
  Variant (54)..(54): Xaa in position 54 is Ile or Val
SXQXEKXWFYNSEPSIDIXEYNXFADNTTXTFIFTIIPDNNHVXKLSSPITVXXE

SEQ ID NO: 105349 - protein, 29 aa, Artificial sequence
  protein pattern
  Variant (3)..(3): Xaa in position 3 is Ala or Pro
  Variant (8)..(8): Xaa in position 8 is Ala or Asp
  Variant (15)..(15): Xaa in position 15 is Pro or Thr
  Variant (17)..(17): Xaa in position 17 is Asp or Glu
  Variant (24)..(24): Xaa in position 24 is Glu, Lys or Arg
FKXDWRWXVSKETFXKXKFDSYVXSVFSK

SEQ ID NO: 105350 - protein, 58 aa, Artificial sequence
  protein pattern
  Variant (2)..(2): Xaa in position 2 is any amino acid
  Variant (11)..(11): Xaa in position 11 is Asn or Ser
  Variant (16)..(16): Xaa in position 16 is Gly or Ser
  Variant (21)..(21): Xaa in position 21 is any amino acid
  Variant (24)..(24): Xaa in position 24 is Ala or Ser
  Variant (25)..(25): Xaa in position 25 is Glu or Lys
  Variant (29)..(29): Xaa in position 29 is Phe or Ile
  Variant (34)..(34): Xaa in position 34 is any amino acid
  Variant (35)..(35): Xaa in position 35 is Asp or His
  Variant (44)..(44): Xaa in position 44 is Leu or Met
  Variant (54)..(54): Xaa in position 54 is any amino acid
  Variant (56)..(56): Xaa in position 56 is any amino acid
  Variant (58)..(58): Xaa in position 58 is Asn or Thr
HXDKHSDKVNXHQHHXKVDKXHRXXIVEXDKLDXXSQIDNDFGXHIIYFLQHGXWXVX

SEQ ID NO: 105351 - protein, 20 aa, Artificial sequence
  protein pattern
  Variant (6)..(6): Xaa in position 6 is any amino acid
  Variant (18)..(18): Xaa in position 18 is Asp or Asn
  Variant (20)..(20): Xaa in position 20 is Phe or Leu
YYFINXSGDKSDIIYKVXGX

SEQ ID NO: 105352 - protein, 25 aa, Artificial sequence
  protein pattern
  Variant (2)..(3): Xaa in position 2 to 3 is any amino acid
  Variant (4)..(4): Xaa in position 4 is any or no amino acid
  Variant (6)..(8): Xaa in position 6 to 8 is any amino acid
  Variant (9)..(9): Xaa in position 9 is any or no amino acid
  Variant (11)..(11): Xaa in position 11 is Asp or Asn
  Variant (12)..(12): Xaa in position 12 is Gln or Ser
  Variant (13)..(13): Xaa in position 13 is any amino acid
  Variant (15)..(16): Xaa in position 15 to 16 is any amino acid
  Variant (17)..(17): Xaa in position 17 is Asp or Gly
  Variant (18)..(21): Xaa in position 18 to 21 is any amino acid
  Variant (22)..(22): Xaa in position 22 is Gly or Thr
  Variant (23)..(23): Xaa in position 23 is any amino acid
  Variant (24)..(24): Xaa in position 24 is Asn or Arg
  Variant (25)..(25): Xaa in position 25 is Ala or Ser
QXXXHXXXXVXXXQXXXXXXXXXXX

SEQ ID NO: 105353 - protein, 8 aa, Artificial sequence
  protein pattern
FFTLLSGN

SEQ ID NO: 105354 - DNA, 930 bp, Escherichia coli
  CDS (1)..(930): transl_table=11
atgaccacgaagaaagctgattacatttggttcaatggggagatggttcgctgggaagacgcgaaggtgcatgtgatgtcgcacgcgctgcactatggcacttcggtttttgaaggcatccgttgctacgactcgcacaaaggaccggttgtattccgccatcgtgagcatatgcagcgtctgcatgactccgccaaaatctatcgcttcccggtttcgcagagcattgatgagctgatggaagcttgtcgtgacgtgatccgcaaaaacaatctcaccagcgcctatatccgtccgctgatcttcgtcggtgatgttggcatgggagtaaacccgccagcgggatactcaaccgacgtgattatcgctgctttcccgtggggagcgtatctgggcgcagaagcgctggagcaggggatcgatgcgatggtttcctcctggaaccgcgcacgaccaaacaccatcccgacggcggcaaaagccggtggtaactacctctcttccctgctggtgggtagcgaagcgcgccgccacggttatcaggaaggtatcgcgctggatgtgaacggttatatctctgaaggcgcaggcgaaaacctgtttgaagtgaaagatggtgtgctgttcaccccaccgttcacctcctccgcgctgccgggtattacccgtgatgccatcatcaaactggcgaaagagctgggaattgaagtacgtgagcaggtgctgtcgcgcgaatccctgtacctggcggatgaagtgtttatgtccggtacggcggcagaaatcacgccagtgcgcagcgtagacggtattcaggttggcgaaggccgttgtggcccggttaccaaacgcattcagcaagccttcttcggcctcttcactggcgaaaccgaagataaatggggctggttagatcaagttaatcaataa

SEQ ID NO: 105355 - protein, 309 aa, Escherichia coli
MTTKKADYIWFNGEMVRWEDAKVHVMSHALHYGTSVFEGIRCYDSHKGPVVFRHREHMQRLHDSAKIYRFPVSQSIDELMEACRDVIRKNNLTSAYIRPLIFVGDVGMGVNPPAGYSTDVIIAAFPWGAYLGAEALEQGIDAMVSSWNRARPNTIPTAAKAGGNYLSSLLVGSEARRHGYQEGIALDVNGYISEGAGENLFEVKDGVLFTPPFTSSALPGITRDAIIKLAKELGIEVREQVLSRESLYLADEVFMSGTAAEITPVRSVDGIQVGEGRCGPVTKRIQQAFFGLFTGETEDKWGWLDQVNQ

SEQ ID NO: 105356 - DNA, 1545 bp, Arabidopsis thaliana
  CDS (99)..(1343)
aaaaacgaaaccacagagagaaagcctccgtctcccttatcaaagaagaagaagacgtgtataacaaaacactagacacattgtgaagatagaaaaaaatggagagagcagcaattctcccgagtgttaatcaaaattacctactttgtccttcacgcgccttctccacgcgcctccactcctctactcgtaacttatcgccgccgtcatttgcctccatcaagcagcttcagcattcttcttcctctgtttcttctaatggtggaatctctcttactcgatgcaacgctgtttcgtccaattcttccagtacgttggtaactgaattagccgacatagattgggataccgttggatttgggcttaagccagctgattatatgtatgtgatgaaatgtaacattgatggagagttctcaaaaggtgagttgcaacgttttgggaatattgaaattagcccatctgctggtgtactcaactatggacagggattgtttgaagggctaaaagcttacagaaagaaagatggtaataacatcctcctctttcgtcctgaggagaatgcaaagcgtatgagaaatggtgctgagaggatgtgtatgcctgctccaaccgttgagcagtttgtagaagctgtgacagaaactgtactagcaaacaaacgttgggttccaccaccaggtaaaggttccttatatgttagaccattgctaatgggaacaggagctgttcttggtcttgcgcctgcaccagaatatactttcattatctatgtttcgcctgttgggaactacttcaaggaaggtgtggcacctatcaatttgattgtggagaatgaatttcaccgtgcaactcctggtggtaccggaggtgttaaaaccataggcaattatgctgcagtactgaaggcacagtcaattgcgaaagctaaaggatattccgatgttttgtaccttgattgcatttacaaaagatatcttgaggaggtctcgtcttgcaatattttcatcgtgaaggacaatgtgatatctactcctgaaataaaaggaaccattttacccggtattactcgaaaaagtatgatagacgtggctcgaacacaagggtttcaggtggaggaacggaatgtgacagtggatgaattgttagaagcagacgaggttttctgcacaggaaccgccgtggttgtctctcctgttggaagcgtcacttacaaaggcaaaagagtgtcttacggagaaggtaccttcggaactgtgtcgaagcaactctacaccgttctgacaagcttgcagatgggtctgattgaagacaacatgaaatggactgtgaatcttagttaagccaggcgaatgcattgcatcaattcggctgcttggttttgctttcttttctttggtctgtggttctgattcgtgaaactatgagttggattgtttagaatctggttgatctagaacttagctggttcaagatcattagatgttgttgcatcataccaataatattatctttagatctctgtttctgattagatggttacat

SEQ ID NO: 105357 - protein, 414 aa, Arabidopsis thaliana
MERAAILPSVNQNYLLCPSRAFSTRLHSSTRNLSPPSFASIKQLQHSSSSVSSNGGISLTRCNAVSSNSSSTLVTELADIDWDTVGFGLKPADYMYVMKCNIDGEFSKGELQRFGNIEISPSAGVLNYGQGLFEGLKAYRKKDGNNILLFRPEENAKRMRNGAERMCMPAPTVEQFVEAVTETVLANKRWVPPPGKGSLYVRPLLMGTGAVLGLAPAPEYTFIIYVSPVGNYFKEGVAPINLIVENEFHRATPGGTGGVKTIGNYAAVLKAQSIAKAKGYSDVLYLDCIYKRYLEEVSSCNIFIVKDNVISTPEIKGTILPGITRKSMIDVARTQGFQVEERNVTVDELLEADEVFCTGTAVVVSPVGSVTYKGKRVSYGEGTFGTVSKQLYTVLTSLQMGLIEDNMKWTVNLS

SEQ ID NO: 105358 - DNA, 2016 bp, Oryza sativa
  CDS (533)..(1762)
ggcctccccaatccgtcccgtctcctcgcccgccgccctcgactcccgtctcctcgcctgccgctggcgccgatctccatcctgctagcagaggtggcgccggcgtcctcctcctgctcccgccgcattcgctcaccggtgagcatcctaatccatcccatccggcctcggcctcggcctcgaatttcgtctcctcacccgccgcttgcgccgatccccatcctgcgagcagaggtggcgcccggcgtcctccttctagcttccaccgcatcgtcgctcgccgccactgccatttgaggcccacacagcgttggccccaccagtcggtctcacatcggctacaatggctagaaggttctgtgagtaaagccgcttccccatttggcccccgtgccattcccgtccgatttggccatcgtcgtctccgtctccgctgcgtctccgctgcctctcccgcgccgccgccgtcgcagtagccgcagaaaccctagaccccggcgagagagcgggggagctcacgggagagcagcaaatggagtatggtgcagcaacgcgtggcgcgctcctcgcggccgccccgctctccggcgcccggcgtagctggttgcccctctcatcgccgccgtcgccgccctctattcagattcagaatcgactttattcgatatcgtcgcttccactaaaggctcgaggcgtgagaagatgcgaggcttctctagcaagtgactacacgaaggcatctgaggtagctgatttagattgggagaaccttggttttggaatcgtgcagaccgactacatgtatatcacaaaatgcggacaggacgggaatttttctgagggtgaaatgattccatttggacctatagcgctgaacccatcttctggagtccttaattacggacagggattatttgaaggtctaaaagcatatagaacaacagatgactctatcttattatttcgcccggaggaaaatgcactgagaatgagaacaggtgcagaaagaatgtgcatgcctgcgcctagtgttgagcagtttgtggatgcagtaaagcaaactgttttagcaaacaagagatgggtgcctcctaccggtaaaggttctttgtatattagaccgctactcatgggtagtggtgctgttcttggtcttgcacctgctcctgagtatacgttcattatatttgtctcgcctgtggggaactactttaaggaaggtttagctccaataaatttgatagttgaagataagtttcatcgtgcaacccctggtggaactggaagtgtgaagaccataggaaattatgcctcggtcttgatggcacagaagattgcaaaagaaaagggctattctgatgttctctacttggatgctgttcacaaaaagtatcttgaagaagtttcttcatgtaatatttttgttgtcaagggcaatgtcatttcaactccagcagtaaaaggaacaatattgccaggcatcacaaggaaaagtatcattgatgttgctctgagcaagggtttccaggtcgaggagcgacttgtgtcagtagatgagctgcttgaagctgctgaggttttctgcacaggaactgctgtcgtagtgtctcctgtgggtagtattacctatcaagggaaaagggtcgaatatgctggcaacaaaggagttggtgtcgtgtctcagcagctatatacttcattaacaagcctgcagatgggccaggcagaagattggctaggctggactgtgcaactgagttaggaagtaataaaatgttcatcaacatcaaaagatggacatgattatgatcatgtgtatccttcagttttgtagttttgttggtgtgacatcctgctgtatatgtatagacggcagtgcattagcgcgaagcagtttttgctaaggaacgacaccatgcatccagcttttatgccttttgcatgagaaatcaaacgtggaaggctttcctgactgaaatatcgacaattataaaactattttgctatgttgattac

SEQ ID NO: 105359 - protein, 409 aa, Oryza sativa
MEYGAATRGALLAAAPLSGARRSWLPLSSPPSPPSIQIQNRLYSISSLPLKARGVRRCEASLASDYTKASEVADLDWENLGFGIVQTDYMYITKCGQDGNFSEGEMIPFGPIALNPSSGVLNYGQGLFEGLKAYRTTDDSILLFRPEENALRMRTGAERMCMPAPSVEQFVDAVKQTVLANKRWVPPTGKGSLYIRPLLMGSGAVLGLAPAPEYTFIIFVSPVGNYFKEGLAPINLIVEDKFHRATPGGTGSVKTIGNYASVLMAQKIAKEKGYSDVLYLDAVHKKYLEEVSSCNIFVVKGNVISTPAVKGTILPGITRKSIIDVALSKGFQVEERLVSVDELLEAAEVFCTGTAVVVSPVGSITYQGKRVEYAGNKGVGVVSQQLYTSLTSLQMGQAEDWLGWTVQLS

SEQ ID NO: 105360 - DNA, 1579 bp, Zea mays subsp. mays
  CDS (242)..(1339)
aaaagacggcgactctgcctgcacagcattgaccgccgccttcgctcctccacctccccgctcgctctcctgcctccgcgcgggccgcggatcccttcactcgccacagcaagcgctagaagagggaatggagcccggcctcgcatcccgcgtcgcccgttcagccgctcagccgctttccggctgcctgtcgcggcactcgctctcgccgtggctcaagatccagaaccacatttatcctatgccaagtctctgtcacaaggttcctagcacgggaaaatgccacgcttctatgacaacaagttacatggaaacatcagatgtcactgatttggactgggaaaaccttggctttggcctcatcgagactgactttatgtatgttgcaaaatgtggaactgatggaatcttttccaaaggtgaagtcctaccatttggtcctatagcactgagtccttcagctggagtcttaaattatgggcagggattgtttgaaggcctaaaagcatataggaaaactgatgggtccatccttctatttcgtccagaggagaatgctataaggatgctaagcggtgcagagaggatgtgtatgcctgctccaactgttgagcaattcgttgatgctgttaaacaaactgttttggcaaataaaagatgggtgcctcctactggtaaaggttccctatatatcaggccactcctaataggaagcggtgcagttcttggtcttgcgcctgctcctgagtatagctttatcatttttgtatcccctgttgggaattatttcaaggaaggtttatctcctattaatttgatcgttgaggataaatttcaccgtgccagccctggtggaactggaggtgtgaaaaccattggaaactatgcctcggtactgaaagcacaaaagattgcaaaggggaaaggatattctgatgtcctttatttggatgctgttcatgacaaatatcttgaagaagtctcttcctgcaatatttttgttgtgaaagacaatgttatttctacgcctgccattaaaggaacaatacttcctggtataacgaggaaaagtatcattgaagttgctcagagcaaaggtttcaaggttgaggagcgtctggtgtgtgtagatgagttgattaacgctgatgaagttttctgcacggggactgctgttgtggtgtcacctgtggggagtgttacatatatggggaaaagggtggaatatggcaaccaaggagtcggtgtcgtgtctcagcaactatacaagtcacttacaagcctccagatgggcaatgtggaggactggatgggttggaccatgcaacttaatcagtagcggatcacagatattgccttggcagatcccggattattacagctactgggtgcgatagttttttttttggcagatccatcttgagcatatttgactgtaccggtttcccttgagactaagacgaaagtgatcttactgatcttttgtttcaaatctaaaacgataaaataaaatgtggtttgcaccttgccatgtactgtaagaatggacccataaaaaatttcatgctgctgttgcttg

SEQ ID NO: 105361 - protein, 365 aa, Zea mays subsp. mays
MPSLCHKVPSTGKCHASMTTSYMETSDVTDLDWENLGFGLIETDFMYVAKCGTDGIFSKGEVLPFGPIALSPSAGVLNYGQGLFEGLKAYRKTDGSILLFRPEENAIRMLSGAERMCMPAPTVEQFVDAVKQTVLANKRWVPPTGKGSLYIRPLLIGSGAVLGLAPAPEYSFIIFVSPVGNYFKEGLSPINLIVEDKFHRASPGGTGGVKTIGNYASVLKAQKIAKGKGYSDVLYLDAVHDKYLEEVSSCNIFVVKDNVISTPAIKGTILPGITRKSIIEVAQSKGFKVEERLVCVDELINADEVFCTGTAVVVSPVGSVTYMGKRVEYGNQGVGVVSQQLYKSLTSLQMGNVEDWMGWTMQLNQ

SEQ ID NO: 105362 - DNA, 1501 bp, Triticum aestivum
  CDS (149)..(1195)
gcacgagccgcgcggcacgtcggtctcccccagccccaggccgcatccgggcctaccctcgcaacccattcagaagcgattgtccggcagcgccgtctccgtctccaggcgaggcactgcggcaaggagcagcccgtgttccgccctgatgacggcatcatacaacacaggaactccggacctagtcgacttcgactgggagactcttggatttcaactggtcccgacggactttatgtatataatgaaatgttcgtcagatggggtgttcaccaagggtgaattggttccatatgggccaatcgagctgaaccctgctgctgcagttttaaattatggccagggattgctcgaaggtcttagagcacacagaaaggaggatggttcagtagttgtttttcgccccaaggaaaacgcgttgcggatgaggataggtgcagatcggctatgcatgcctgcaccaagcgttgagcagttcctatcagctgtcaagcacactatattggcaaacaagcgttgggtaccccccactggcaaaggttctttatatatcaggccgctgctgattggaagtggagctatgctaggtgtagcacctgccccggagtatacatttgttgtgtatgtttgcccagttggtcactatttcaaggatggcctgtcaccaattagcttattgactgaggaagaatatcaccgcgctgcacctggtggaactggtgatattaagacaattggaaattatgcttcggttgttagtgctcagagaagagccaaggagaaaggtcattctgatgttctttacttggatcccgtgcataagaagtttgtggaggaagtttcttcctgtaatatattgatggtgaaggataatgttatttctactccactattaacgggaacaattcttcctggaatcacaagaagaagtataattgaaattgcccaaaatcttggaatccaggtcgaagagcgccttattgcgatagatgagttgcttgacgctgatgaagtcttctgtacagggactgccgttgtactatcacccgttggttccattgtgtaccacggaagaagagtggagtatgggggcgggaaggtcggagcggtgtcccagcaactgtattcggcacttacagctatccagaaaggccttgtggaggacagtatgggatggagtgtgcagttgaattagcagcttcatcatctggacggtctctacgagcctcctcggcaagaaaacaatgcaaaatcacttgaccctctgtcaggaaattttgcagaatgtagaatagcataatttccctgtgaagatagcaagaggtacacacacaacatagcatcaagctggatcagaaagattaataataatgattaaatagctgttgtttcttctcattctgtttcccaagaggactgaatgcgctttgagtgtgaataactccataacatacttgcaattgcaaaccatgagacataaataattggtggcaaaaaaaaa

SEQ ID NO: 105363 - protein, 348 aa, Triticum aestivum
MTASYNTGTPDLVDFDWETLGFQLVPTDFMYIMKCSSDGVFTKGELVPYGPIELNPAAAVLNYGQGLLEGLRAHRKEDGSVVVFRPKENALRMRIGADRLCMPAPSVEQFLSAVKHTILANKRWVPPTGKGSLYIRPLLIGSGAMLGVAPAPEYTFVVYVCPVGHYFKDGLSPISLLTEEEYHRAAPGGTGDIKTIGNYASVVSAQRRAKEKGHSDVLYLDPVHKKFVEEVSSCNILMVKDNVISTPLLTGTILPGITRRSIIEIAQNLGIQVEERLIAIDELLDADEVFCTGTAVVLSPVGSIVYHGRRVEYGGGKVGAVSQQLYSALTAIQKGLVEDSMGWSVQLN

SEQ ID NO: 105364 - DNA, 1080 bp, Bradyrhizobium sp. ORS278
  CDS (1)..(1080): transl_table=11
atgactttgacattcgacatcaggccgacggcgaacccgacctccgaccaggagcgggcggccaagctcgccaatcccggcttcggccgcgtgttcaccgatcacatggccgtggtccagtacagccaggacaagggctggcacagcgcgcgggtcgaatcccgtgccaacttcccgctcgatccggccgcggccgtgctgcactacgcgcaggagatcttcgaggggctgaaggcctacaagcgcgacgatggcggcgtgaacctgttccgccccgacgccaacgccaagcgcttctggaattcggccgagcgcatggcgatggcgcagctgcccgaggcggtcttcatcgaggcggtcgagcagctcgtccgcatcgaccgcgcctggatcccgggcggcgagggcagcctgtatctgcgcccgttcatgatcgccaacgaggtgttcctcggcgtgaagccgtcggcggagtacattttcgcggtcatcgcctcgccggtcggctcctatttcaagggcggcccggccccggtctcgatctgggtgtcggagaactacacccgggccgcggtcggcggcaccggcggcgtcaaatgcggcggcaactatgccgcgagcctgaaggcgcaggccgaggcgatggcccagggctgcgatcaggtcgtgttcctggatgcgatcgagcggcgttacgtcgaggagctcggcggcatgaacgtgttcttcgtgttcgccgacggctcactgtcgacgccgccgctcggcaccatcctgccgggcatcacgcgagactccatcatcaagctggcgcgcgacgccggccgcgaggtgcgcgaggaggcctattcgatcgaccagtggcgcgcggatgccgcaagcggcaagctcaaggaagccttcgcctgcggcaccgccgccgtgatctcgccgatcggcaaggtccgctcggtgagcggcgacgtcgtcatcaatggcggcgaggccggcccggtggccatgggcctgcgcaagcagctggtcgacatccagtacggccgaactgcggatccgcataattggatcagggacgtgaagtag

SEQ ID NO: 105365 - protein, 359 aa, Bradyrhizobium sp. ORS278
MTLTFDIRPTANPTSDQERAAKLANPGFGRVFTDHMAVVQYSQDKGWHSARVESRANFPLDPAAAVLHYAQEIFEGLKAYKRDDGGVNLFRPDANAKRFWNSAERMAMAQLPEAVFIEAVEQLVRIDRAWIPGGEGSLYLRPFMIANEVFLGVKPSAEYIFAVIASPVGSYFKGGPAPVSIWVSENYTRAAVGGTGGVKCGGNYAASLKAQAEAMAQGCDQVVFLDAIERRYVEELGGMNVFFVFADGSLSTPPLGTILPGITRDSIIKLARDAGREVREEAYSIDQWRADAASGKLKEAFACGTAAVISPIGKVRSVSGDVVINGGEAGPVAMGLRKQLVDIQYGRTADPHNWIRDVK

SEQ ID NO: 105366 - DNA, 918 bp, Synechococcus sp. WH 7803
  CDS (1)..(918): transl_table=11
atgcatcagttccttccctatgcctggttccagggacgctgcgttccgtttgaggacgccaaagtttcggtggcgacccatgccttgcattacgggacgggtgcctttggcgggatgcgcgcgatcccagatccttcgaaacccggaggcatgcttctgttccgtgccgaacggcatgcacgacgcctgtctcaaagcgctcgcctgctgcttgcggagctgagtgaggccacggtgatggacgctctcgtcacgatgttgcgagcgaatcgaccgacaacaccgatttatctccgcccttttgtgtacacaagtgatcttgggatcgcacccaggcttcacaacatcgagaccgatttcctgatctacggattggaactcggcgactacctctcccctgagggtgtgagctgcaggatcagcagctggacccggcaggaagatcgctccctgcccctgaggggcaagatcagcggcgcctacatcaccagctcgctggccaagacggaagccgtgagcagtggtttcgacgaggcactgctcatgaacacccgtggcaaggtgagtgaagccagcggcatgaatctgttcatcgtccgcgatggtgatctcattacccctggagtggatcaagacatcctcgaggggatcacccgcgccagcgtgattgaactggcgaaatcgatgggcctgaacgtgatcgaacgaccggtcgacaagacggaactgttcatcgcagatgaggtgttcctgactggaacggctgccaagatcacgccgattcgccagcttgaatccacggttctctccaatcaacgtccagtgatggacgccctgcgacagcgactgatcgccatcaccgaaggtcgggatgagcagtttcgtcactgggtgacccgcgtcgagctggatcgctga

SEQ ID NO: 105367 - protein, 305 aa, Synechococcus sp. WH 7803
MHQFLPYAWFQGRCVPFEDAKVSVATHALHYGTGAFGGMRAIPDPSKPGGMLLFRAERHARRLSQSARLLLAELSEATVMDALVTMLRANRPTTPIYLRPFVYTSDLGIAPRLHNIETDFLIYGLELGDYLSPEGVSCRISSWTRQEDRSLPLRGKISGAYITSSLAKTEAVSSGFDEALLMNTRGKVSEASGMNLFIVRDGDLITPGVDQDILEGITRASVIELAKSMGLNVIERPVDKTELFIADEVFLTGTAAKITPIRQLESTVLSNQRPVMDALRQRLIAITEGRDEQFRHWVTRVELDR

SEQ ID NO: 105368 - DNA, 1218 bp, Oryza sativa (japonica cultivar-group); identical to SEQ ID NO: 90411
  CDS (1)..(1218)

SEQ ID NO: 105369 - protein, 405 aa, Oryza sativa (japonica cultivar-group); identical to SEQ ID NO: 90412

SEQ ID NO: 105370 - DNA, 1248 bp, Oryza sativa (japonica cultivar-group); identical to SEQ ID NO: 90413
  CDS (1)..(1248)

SEQ ID NO: 105371 - protein, 415 aa, Oryza sativa (japonica cultivar-group); identical to SEQ ID NO: 90414

SEQ ID NO: 105372 - DNA, 1230 bp, Oryza sativa (japonica cultivar-group); identical to SEQ ID NO: 90417
  CDS (1)..(1230)

SEQ ID NO: 105373 - protein, 409 aa, Oryza sativa (japonica cultivar-group); identical to SEQ ID NO: 90418

SEQ ID NO: 105374 - DNA, 993 bp, Methanothermobacter thermautotrophicus str. Delta H
  CDS (1)..(993): transl_table=11
ttgcggttatggagagcattatataggcctccaaccataacctatcctagtaaatcacctgaggttattatcatgtcatgcgaagccagtggaaagatatggttaaacggtgaaatggttgaatgggaagaagccaccgtccacgtactctcacatgttgtgcattatggatcatctgtctttgagggaataaggtgctacaggaacagtaaggggtcagccatcttccgtttgcgggagcatgttaaacgcctttttgattctgcaaagatataccggatggacataccctacacccaggagcagatatgtgatgccatagttgagaccgtcagggagaacggacttgaggagtgctatataagacccgtggtattcaggggatacggtgagatgggtgttcacccggtgaactgcccagtggacgtcgctgtggctgcctgggaatggggggcctatctgggtgcagaggcccttgaggttggtgtcgatgctggtgtttcaacctggcggaggatggcaccaaacacaatgcccaacatggcaaaggccggcggtaactacctcaactcacagcttgccaagatggaggctgtgagacacggctatgatgaggccataatgctggactaccatggctacataagtgagggtagcggggagaacatattcctcgtcagtgagggtgaaatttacaccccccctgtttcatcatcccttctgagggggataacaagggactccgtaataaagatagccaggaccgagggtgttaccgtgcatgaggaacccataaccagggagatgctctacatcgcagatgaggccttcttcacaggtacagccgcagagataacacccatcagatcagttgatggtatagagataggtgccgggcgaaggggtcccgttacaaagctgctgcaggatgagttcttcaggataatcagggcagagacagaggacagcttcggatggctcacctacatctga

SEQ ID NO: 105375 - protein, 330 aa, Methanothermobacter thermautotrophicus str. Delta H
MRLWRALYRPPTITYPSKSPEVIIMSCEASGKIWLNGEMVEWEEATVHVLSHVVHYGSSVFEGIRCYRNSKGSAIFRLREHVKRLFDSAKIYRMDIPYTQEQICDAIVETVRENGLEECYIRPVVFRGYGEMGVHPVNCPVDVAVAAWEWGAYLGAEALEVGVDAGVSTWRRMAPNTMPNMAKAGGNYLNSQLAKMEAVRHGYDEAIMLDYHGYISEGSGENIFLVSEGEIYTPPVSSSLLRGITRDSVIKIARTEGVTVHEEPITREMLYIADEAFFTGTAAEITPIRSVDGIEIGAGRRGPVTKLLQDEFFRIIRAETEDSFGWLTYI

SEQ ID NO: 105376 - DNA, 927 bp, Halobacterium sp. NRC-1
  CDS (1)..(927): transl_table=11
atgcccagtttcagtgagatggacgtcgacaccatctggatggacggcgagttcgtcgactgggaggacgcacaagtacacgtcctcacccacgcactccactacgggtccggcatcttcgagggggtccgtgtctacgacaccgacaacggccccgcgatcttccggtgggacgaccacctccagcggttctacgaatcggcgaaaccctacgacctcgacatcgagttcacgcccgacgaactcaccgacgccaccgtcgagctcatccagcgccaagacctcgggtcctgttacatccgcccgctggcgtactacggctacgaatcactcggcgtctcccccggcgactgcccgaccgacgtcgccatcgccgcctggccgtggggcgcgtacctcggcgacgacgccctcgaaaacggcgtcgacgtgatggtgtcgacgtggcgcaagcacgcctccagccagatcccgacgaacgccaaaaccaccggcctctacgtcaacagcatgctcgccggcgaggaagcccggcgcaacggcttcaccgaagccatcgtcctcaacaaagagggcaacgtcgcggaaggccccggcgagaacatcttcctcgtgcgcgacggcgaactcttcacgcccggcctctccgagagcatcctcgacggcatcacccgcgacaccgtcatcacgctcgccgaggagcgcggctacaccgtccacgacgacgtctcgatctcgcgtggcgaactccacaccgccgacgagctcttcttcaccggctccgccgccgaagtcacgccgatcaagcaagtcgacaacgtcgaaatcggctccggaacccgcggcccggtcaccgaagagctccagaccgcgttcttcgacctcgtggaggccggcgaccgcgaggagtggttccactacgtctga

SEQ ID NO: 105377 - protein, 308 aa, Halobacterium sp. NRC-1
MPSFSEMDVDTIWMDGEFVDWEDAQVHVLTHALHYGSGIFEGVRVYDTDNGPAIFRWDDHLQRFYESAKPYDLDIEFTPDELTDATVELIQRQDLGSCYIRPLAYYGYESLGVSPGDCPTDVAIAAWPWGAYLGDDALENGVDVMVSTWRKHASSQIPTNAKTTGLYVNSMLAGEEARRNGFTEAIVLNKEGNVAEGPGENIFLVRDGELFTPGLSESILDGITRDTVITLAEERGYTVHDDVSISRGELHTADELFFTGSAAEVTPIKQVDNVEIGSGTRGPVTEELQTAFFDLVEAGDREEWFHYV

SEQ ID NO: 105378 - DNA, 915 bp, Campylobacter jejuni subsp. jejuni NCTC 11168
  CDS (1)..(915): transl_table=11
atgatctcagcagataaaatttggatggatggaaaattagttgattttaaagatgcaactttgcactttttaacccattctttgcattatggcaatgctgtttttgaaggaactagagcctataaaacagataaaggcttagcaattttcagacttgaagatcacaccaaaagacttttagagtctgcaaaaattactcttttaaattgtcctttttctcaaaaagagcttgaaaatgcacaaattgaactcttaaaagcaaacaattttaaaagcaatgtctatatccgccctttgattttcttaggcgatggagttatgggactttatcatataaaagctcctgtaagagttgggattgcagcttgggaatggggtgcttaccttggagaagaaggtttagaaaaaggtataaaagtaaaaatttcgtcttttgcaagaaatagtgttaaatcatgcatgggaaaagctaaagcaagtgcgaattatcttaactctcaaattgcaaaatttgaagctattgaagcaggctatgaagaagctttgatgcttgatgaagaaggttttatcgcagaaggaacaggagaatgtttctttattgtaaaagatggggttttaatcacacctccaaatgatttttctttaaaaagcattactcaagatacagtgcttaaaatcgctcatgatcttggtattactgtgcttcgccaaagaatttcaagagatgaagtttatactgctgatgaagcattttttaccggaacagccgctgaaatcacacctattaataatattgatgcaagaataataggaaatggtttaagaggatctgtaactaaaaaacttcaagatgcttattttgatgtagtttatggacgcaatgaaaaatacgcatctatgctaacttatatttaa

SEQ ID NO: 105379 - protein, 304 aa, Campylobacter jejuni subsp. jejuni NCTC 11168
MISADKIWMDGKLVDFKDATLHFLTHSLHYGNAVFEGTRAYKTDKGLAIFRLEDHTKRLLESAKITLLNCPFSQKELENAQIELLKANNFKSNVYIRPLIFLGDGVMGLYHIKAPVRVGIAAWEWGAYLGEEGLEKGIKVKISSFARNSVKSCMGKAKASANYLNSQIAKFEAIEAGYEEALMLDEEGFIAEGTGECFFIVKDGVLITPPNDFSLKSITQDTVLKIAHDLGITVLRQRISRDEVYTADEAFFTGTAAEITPINNIDARIIGNGLRGSVTKKLQDAYFDVVYGRNEKYASMLTYI

SEQ ID NO: 105380 - DNA, 1029 bp, Agrobacterium tumefaciens str. C58
  CDS (1)..(1029): transl_table=11
ttgacctgtctgggcgagaggcattcactccggccgatttccagcacatgccggttaagaacgcgaaacgttttgcgtccggaaatgcatcaagacaaaagacggagcgttttcgccaggcggaaatgtttgacacaggagaccgttatgagcgtcgataccgcaccccgatcaaccacctggacctatgttgacggtcaatggctgcccggcaatccgccgctcatcggcccgacctcgcatgccatgtggctggcctccacggtatttgacggcgcacgctggtttgatggcgtggcacccgatctcgatctgcattgccagcgtgtcaatcgctcagccaccaacatgggcatgaagccgaccatgacggcggaagagatcgagacgcttgcgcttgagggtgtgaggaaattcgacggcaggatggcgatctacatcaagccgatgtattgggccgaacacggcatgcccggcagcgttgtcgcgccggatgccagctccacccgttttgcgctctgcctgttcgaagcgccgatggacgccggcaagccgctgacgctcaccgtctcgccgctgcgtcgtccgtcgccggaaaccgcgatgaccgacgccaaggctggcagtctttatcccaatagcggccgcgccattctggaagcccgcgcacgcggtttcgacaatgccctgatgcgcgacatgaacggcaatgtcgccgaatccgcctcggccaacatcttcatggtcaaggacggtgtcgtcttcacgccggtgcccaaccgcacctttcttgccggcatcacccgttcgcgtgtgatcggtcttctgcgtcaggccggtttcgacgttcgggaagccacgctgtcggtcgaggatttcaacgaggctgatgaaatcttctgctcgggcaactattccaaggtttcgcctgtcgtgaagctggatgaccgcgaattgcaggcgggcccggtcgcgcgcaaggcgcttgatctctatatggattgggcacgtctcggcgcagacgtctga

SEQ ID NO: 105381 - protein, 342 aa, Agrobacterium tumefaciens str. C58
MTCLGERHSLRPISSTCRLRTRNVLRPEMHQDKRRSVFARRKCLTQETVMSVDTAPRSTTWTYVDGQWLPGNPPLIGPTSHAMWLASTVFDGARWFDGVAPDLDLHCQRVNRSATNMGMKPTMTAEEIETLALEGVRKFDGRMAIYIKPMYWAEHGMPGSVVAPDASSTRFALCLFEAPMDAGKPLTLTVSPLRRPSPETAMTDAKAGSLYPNSGRAILEARARGFDNALMRDMNGNVAESASANIFMVKDGVVFTPVPNRTFLAGITRSRVIGLLRQAGFDVREATLSVEDFNEADEIFCSGNYSKVSPVVKLDDRELQAGPVARKALDLYMDWARLGADV

SEQ ID NO: 105382 - DNA, 927 bp, Yersinia pestis CO92
  CDS (1)..(927): transl_table=11
atgacgaagaaagcggattacatttggtttaacggcgaaatggttccatgggcagaagctaaagttcatgtgatgtctcacgcgttacactacggaacgtcagtcttcgaaggtgtccgttgctacgaatcccataaagggccggtagttttccgtcaccgtgagcatatgcagcgtttgcatgattccgccaaaatttatcgtatgcccgtctcccagtcagtggatgaactgatggaagcttgccgtgccacgctgcgcaaaaataatctgaccagtgcttatattcgcccgttagtctttattggtgatgtcggcatgggcgtgaatccaccggagggttataacactgacgtgatcattgccgctttcccatggggtgcttatctgggtgcagaagccttggagcaaggcattgatgctatggtgtcatcatggaaccgtgttgcacccaataccatcccaacggcggcgaaagcaggcggtaactacctttcatccttgctggtgggcagtgaagcacgtcgccacggctatcaggaagggattgcgctggatgttcatggttacctgtctgaaggtgccggtgagaacctgttcgaagtgaaagatggcatcctgttcacaccaccatttacctcgtctgccctgccgggtatcacccgtgatgccattatcaagctggcgaaagatatggggctggaagtgcgtgagcaagtgttgtcacgtgagtctctgtatctggccgatgaagtgtttatgtccggtactgcagcggaaattaccccagtacgcagcgtggatggtattcaggttggtattggcaagcgcggcccggtcacagccaaaattcaacaagcgttcttcggcttgtttaccggtgaaaccgaggacaaatggggctggctggatcaggttaatccataa

SEQ ID NO: 105383 - protein, 308 aa, Yersinia pestis CO92
MTKKADYIWFNGEMVPWAEAKVHVMSHALHYGTSVFEGVRCYESHKGPVVFRHREHMQRLHDSAKIYRMPVSQSVDELMEACRATLRKNNLTSAYIRPLVFIGDVGMGVNPPEGYNTDVIIAAFPWGAYLGAEALEQGIDAMVSSWNRVAPNTIPTAAKAGGNYLSSLLVGSEARRHGYQEGIALDVHGYLSEGAGENLFEVKDGILFTPPFTSSALPGITRDAIIKLAKDMGLEVREQVLSRESLYLADEVFMSGTAAEITPVRSVDGIQVGIGKRGPVTAKIQQAFFGLFTGETEDKWGWLDQVNP

SEQ ID NO: 105384 - DNA, 882 bp, Agrobacterium tumefaciens str. C58
  CDS (1)..(882): transl_table=11
atgagcgtcgataccgcaccccgatcaaccacctggacctatgttgacggtcaatggctgcccggcaatccgccgctcatcggcccgacctcgcatgccatgtggctggcctccacggtatttgacggcgcacgctggtttgatggcgtggcacccgatctcgatctgcattgccagcgtgtcaatcgctcagccaccaacatgggcatgaagccgaccatgacggcggaagagatcgagacgcttgcgcttgagggtgtgaggaaattcgacggcaggatggcgatctacatcaagccgatgtattgggccgaacacggcatgcccggcagcgttgtcgcgccggatgccagctccacccgttttgcgctctgcctgttcgaagcgccgatggacgccggcaagccgctgacgctcaccgtctcgccgctgcgtcgtccgtcgccggaaaccgcgatgaccgacgccaaggctggcagtctttatcccaatagcggccgcgccattctggaagcccgcgcacgcggtttcgacaatgccctgatgcgcgacatgaacggcaatgtcgccgaatccgcctcggccaacatcttcatggtcaaggacggtgtcgtcttcacgccggtgcccaaccgcacctttcttgccggcatcacccgttcgcgtgtgatcggtcttctgcgtcaggccggtttcgacgttcgggaagccacgctgtcggtcgaggatttcaacgaggctgatgaaatcttctgctcgggcaactattccaaggtttcgcctgtcgtgaagctggatgaccgcgaattgcaggcgggcccggtcgcgcgcaaggcgcttgatctctatatggattgggcacgtctcggcgcagacgtctga

SEQ ID NO: 105385 - protein, 293 aa, Agrobacterium tumefaciens str. C58
MSVDTAPRSTTWTYVDGQWLPGNPPLIGPTSHAMWLASTVFDGARWFDGVAPDLDLHCQRVNRSATNMGMKPTMTAEEIETLALEGVRKFDGRMAIYIKPMYWAEHGMPGSVVAPDASSTRFALCLFEAPMDAGKPLTLTVSPLRRPSPETAMTDAKAGSLYPNSGRAILEARARGFDNALMRDMNGNVAESASANIFMVKDGVVFTPVPNRTFLAGITRSRVIGLLRQAGFDVREATLSVEDFNEADEIFCSGNYSKVSPVVKLDDRELQAGPVARKALDLYMDWARLGADV

SEQ ID NO: 105386 - DNA, 912 bp, Pyrobaculum aerophilum str. IM2
  CDS (1)..(912): transl_table=11
atgaagccgtacgctaaatatatctggcttgacggcagaatacttaagtgggaagacgcgaaaatacacgtgttgactcacgcgcttcactacggaacctctatattcgagggaataagagggtattggaacggcgataatttgctcgtctttaggttagaagaacacatcgaccgcatgtacagatcggctaagatactaggcataaatattccgtatacaagagaggaagtccgccaagctgtactagagaccataaaggctaataacttccgagaggatgtctacataagacctgtggcgtttgtcgcctcgcagacggtgacgcttgacataagaaatttggaagtctccctcgcggttattgtattcccatttggcaaatacctctcgcccaacggcattaaggcaacgattgtgagctggcgtagagtacataatacaatgctccctgtgatggcaaaaatcggcggtatatatgtaaactctgtacttgcgcttgtagaggctagaagcaggggatttgacgaggctttattaatggacgttaacggttatgttgttgagggttctggagagaatattttcattgtcagaggtggaaggcttttcacgccgccagtacacgaatctatcctcgagggaattacgagggatacggtaataaagctcagcggggatgtgggacttcgggtggaggaaaagcctattacgagggaggaggtgtatacagccgacgaggtgtttttagtaggaaccgccgcagagataacgccagtggtggaggttgacggcagaacaatcggcacaggcaagccgggccccattacgacaaaaatagctgagctgtactcaaacgtcgtgagaggcaaagtagagaaatacttaaattggatcactcctgtgtattag

SEQ ID NO: 105387 - protein, 303 aa, Pyrobaculum aerophilum str. IM2
MKPYAKYIWLDGRILKWEDAKIHVLTHALHYGTSIFEGIRGYWNGDNLLVFRLEEHIDRMYRSAKILGINIPYTREEVRQAVLETIKANNFREDVYIRPVAFVASQTVTLDIRNLEVSLAVIVFPFGKYLSPNGIKATIVSWRRVHNTMLPVMAKIGGIYVNSVLALVEARSRGFDEALLMDVNGYVVEGSGENIFIVRGGRLFTPPVHESILEGITRDTVIKLSGDVGLRVEEKPITREEVYTADEVFLVGTAAEITPVVEVDGRTIGTGKPGPITTKIAELYSNVVRGKVEKYLNWITPVY

SEQ ID NO: 105388 - DNA, 1104 bp, Corynebacterium glutamicum ATCC 13032
  CDS (1)..(1104): transl_table=11
atgacgtcattagagttcacagtaacccgtaccgaaaatccgacgtcacccgatcgtctgaaggaaattcttgccgcaccgaagttcggtaagttcttcaccgaccacatggtgaccattgactggaacgagtcggaaggctggcacaacgcccaattagtgccatacgcgccgattcctatggatcctgccaccaccgtattccactacggacaggcaatttttgagggaattaaggcctaccgccattcggacgaaaccatcaagactttccgtcctgatgaaaacgccgagcgtatgcagcgttcagcagctcgaatggcaatgccacagttgccaaccgaggactttattaaagcacttgaactgctggtagacgcggatcaggattgggttcctgagtacggcggagaagcttccctctacctgcgcccattcatgatctccaccgaaattggcttgggtgtcagcccagctgatgcctacaagttcctggtcatcgcatccccagtcggcgcttacttcaccggtggaatcaagcctgtttccgtctggctgagcgaagattacgtccgcgctgcacccggcggaactggtgacgccaaatttgctggcaactacgcggcttctttgcttgcccagtcccaggctgcggaaaagggctgtgaccaggtcgtatggttggatgccatcgagcacaagtacatcgaagaaatgggtggcatgaaccttgggttcatctaccgcaacggcgaccaagtcaagctagtcacccctgaactttccggctcactacttccaggcatcacccgcaagtcacttctacaagtagcacgcgacttgggatacgaagtagaagagcgaaagatcaccaccaccgagtgggaagaagacgcaaagtctggcgccatgaccgaggcatttgcttgcggtactgcagctgttatcacccctgttggcaccgtgaaatcagctcacggcaccttcgaagtgaacaacaatgaagtcggagaaatcacgatgaagcttcgtgaaaccctcaccggaattcagcaaggaaacgttgaagaccaaaacggatggctttacccactggttggctaa

SEQ ID NO: 105389 - protein, 367 aa, Corynebacterium glutamicum ATCC 13032
MTSLEFTVTRTENPTSPDRLKEILAAPKFGKFFTDHMVTIDWNESEGWHNAQLVPYAPIPMDPATTVFHYGQAIFEGIKAYRHSDETIKTFRPDENAERMQRSAARMAMPQLPTEDFIKALELLVDADQDWVPEYGGEASLYLRPFMISTEIGLGVSPADAYKFLVIASPVGAYFTGGIKPVSVWLSEDYVRAAPGGTGDAKFAGNYAASLLAQSQAAEKGCDQVVWLDAIEHKYIEEMGGMNLGFIYRNGDQVKLVTPELSGSLLPGITRKSLLQVARDLGYEVEERKITTTEWEEDAKSGAMTEAFACGTAAVITPVGTVKSAHGTFEVNNNEVGEITMKLRETLTGIQQGNVEDQNGWLYPLVG

SEQ ID NO: 105390 - DNA, 912 bp, Chlorobium tepidum TLS
  CDS (1)..(912): transl_table=11
atggataactcgcttaaaatatggatgaacggcgaactggtcggctggagtgacgccaaaatccacgtcatgtcccacgtcgtccactatggttcgtcaaccttcgagggcatccgctgttacgataccgtcaaaggctcggcgctgctcttcctcgacgaacatgtccgccgcctctgggaatcttcgaaaatctaccgcatagagattccctattcggaaaccgagatcaaggacgccattatctcgaccatcaaggccaacaaccacaaggcctgctacgtccgtccgctggttttccgtggtcagggcgcgcttggcgtcaatccgcaccgcgcctccatcgaggtcgccatcgcgacctgggagtggggcacctacctcggcgaggatgtgcttgaaaatggcgtggatgtcaaggtctcctcatggcaccgcctcgccccgaacaccctgccctcatgggccaaagcaggcggcaactacatgaactcgcagctcatcaaaatggaggcgctgtcggacggttacgccgaaggactggcgctcgaccacaacggctacgttgccgagggcagcggcgaaaacatctttgtcgtcaggaacaacatcatttacaccccgctggccgcgcagtcgatcctgccgggctttacccgtcacgctgtgatgcacatcgccagggagcttggctacgaggttcgcgaaacgcccattccgcgcgaggcgctttacatcgccgacgaaatcttcctgaccggcacggctgccgagatcaccccagtcagaagcgttgacagaatcccgattggcaacgaacaccgcggcccggtcaccgaagccttgcagcacgagtacctcaaaatcgtccattccggagaagacccatacaactggctgacctttatttga

SEQ ID NO: 105391 - protein, 303 aa, Chlorobium tepidum TLS
MDNSLKIWMNGELVGWSDAKIHVMSHVVHYGSSTFEGIRCYDTVKGSALLFLDEHVRRLWESSKIYRIEIPYSETEIKDAIISTIKANNHKACYVRPLVFRGQGALGVNPHRASIEVAIATWEWGTYLGEDVLENGVDVKVSSWHRLAPNTLPSWAKAGGNYMNSQLIKMEALSDGYAEGLALDHNGYVAEGSGENIFVVRNNIIYTPLAAQSILPGFTRHAVMHIARELGYEVRETPIPREALYIADEIFLTGTAAEITPVRSVDRIPIGNEHRGPVTEALQHEYLKIVHSGEDPYNWLTFI

SEQ ID NO: 105392 - DNA, 1002 bp, Yersinia pestis KIM
  CDS (1)..(1002): transl_table=11
atgtcgcctgtgtcgagatcctacaacctaatacattacagatacgcgcctgatgcgccagaaggaaagaaaagaatgacgaagaaagcggattacatttggtttaacggcgaaatggttccatgggcagaagctaaagttcatgtgatgtctcacgcgttacactacggaacgtcagtcttcgaaggtgtccgttgctacgaatcccataaagggccggtagttttccgtcaccgtgagcatatgcagcgtttgcatgattccgccaaaatttatcgtatgcccgtctcccagtcagtggatgaactgatggaagcttgccgtgccacgctgcgcaaaaataatctgaccagtgcttatattcgcccgttagtctttattggtgatgtcggcatgggcgtgaatccaccggagggttataacactgacgtgatcattgccgctttcccatggggtgcttatctgggtgcagaagccttggagcaaggcattgatgctatggtgtcatcatggaaccgtgttgcacccaataccatcccaacggcggcgaaagcaggcggtaactacctttcatccttgctggtgggcagtgaagcacgtcgccacggctatcaggaagggattgcgctggatgttcatggttacctgtctgaaggtgccggtgagaacctgttcgaagtgaaagatggcatcctgttcacaccaccatttacctcgtctgccctgccgggtatcacccgtgatgccattatcaagctggcgaaagatatggggctggaagtgcgtgagcaagtgttgtcacgtgagtctctgtatctggccgatgaagtgtttatgtccggtactgcagcggaaattaccccagtacgcagcgtggatggtattcaggttggtattggcaagcgcggcccggtcacagccaaaattcaacaagcgttcttcggcttgtttaccggtgaaaccgaggacaaatggggctggctggatcaggttaatccataa

SEQ ID NO: 105393 - protein, 333 aa, Yersinia pestis KIM
MSPVSRSYNLIHYRYAPDAPEGKKRMTKKADYIWFNGEMVPWAEAKVHVMSHALHYGTSVFEGVRCYESHKGPVVFRHREHMQRLHDSAKIYRMPVSQSVDELMEACRATLRKNNLTSAYIRPLVFIGDVGMGVNPPEGYNTDVIIAAFPWGAYLGAEALEQGIDAMVSSWNRVAPNTIPTAAKAGGNYLSSLLVGSEARRHGYQEGIALDVHGYLSEGAGENLFEVKDGILFTPPFTSSALPGITRDAIIKLAKDMGLEVREQVLSRESLYLADEVFMSGTAAEITPVRSVDGIQVGIGKRGPVTAKIQQAFFGLFTGETEDKWGWLDQVNP

SEQ ID NO: 105394 - DNA, 930 bp, Shigella flexneri 2a str. 301
  CDS (1)..(930): transl_table=11
atgaccacgaagaaagctgattacatttggttcaatggggagatggttcgctgggaagacgcgaaggtgcatgtgatgtcgcacgcgctgcactatggcacctcggtttttgaaggcatccgttgctacgactcacacaaaggaccggttgtattccgccatcgtgagcatatgcagcgtctgcatgactccgccaaaatctatcgcttcccggtttcacagagcattgatgagctgatggaagcttgtcgtgacgtgatccgcaaaaacaatctcaccagcgcctatatccgtccgctgatcttcgtcggtgatgttggcatgggagtaaacccgccagcgggatactcaaccgatgtgattatcgccgctttcccgtggggagcgtatctgggcgcagaagcgctggagcaggggatcgatgcgatggtttcctcctggaaccgcgcagcaccaaacaccatcccaactgcggcaaaagccggtggtaactatctctcttccctgctggtgggtagcgaagcgcgccgccacggttatcaggaaggtatcgcgctggatgtgaacggttatatctctgaaggcgcaggcgaaaacctgtttgaagtgaaagatggtgtgctgttcaccccaccgttcacctcctccgcgctgccgggtattacccgtgatgccatcatcaaactggcgaaagagctgggaattgaagtgcgtgagcaggtgctgtcgcgcgaatccctgtacttggcggatgaagtctttatgtccggtacggcggcagaaatcacgccagtgcgcagcgtagacggtattcagattggcgaaggccgttgtggcccggttaccaaacgcattcagcaagccttcttcggcctcttcactggcgaaaccgaagataaatggggctggttagatcaagttaatcaataa

SEQ ID NO: 105395 - protein, 309 aa, Shigella flexneri 2a str. 301
MTTKKADYIWFNGEMVRWEDAKVHVMSHALHYGTSVFEGIRCYDSHKGPVVFRHREHMQRLHDSAKIYRFPVSQSIDELMEACRDVIRKNNLTSAYIRPLIFVGDVGMGVNPPAGYSTDVIIAAFPWGAYLGAEALEQGIDAMVSSWNRAAPNTIPTAAKAGGNYLSSLLVGSEARRHGYQEGIALDVNGYISEGAGENLFEVKDGVLFTPPFTSSALPGITRDAIIKLAKELGIEVREQVLSRESLYLADEVFMSGTAAEITPVRSVDGIQIGEGRCGPVTKRIQQAFFGLFTGETEDKWGWLDQVNQ

SEQ ID NO: 105396 - DNA, 1020 bp, Pseudomonas putida KT2440
  CDS (1)..(1020): transl_table=11
atgagcaacgaaagcattaattgggacaagctgggtttcgactacatcaagaccgacaaacgctacctgtccgtatggcgcaatggcgagtgggacaagggcaccctgaccgaagacaacgtactgcacatcagtgaaggctccacggccctgcactacggccagcagtgcttcgaaggcctgaaggcctaccgttgcaaggacggctcgatcaacctgttccgcccggaccagaacgcggcccgcatgcagcgcagctgcgcacgcctgctgatgccgcacgtgccgaccgatgtgttcatcgaagcgtgcaagcaagtggtcaaggccaacgaaaagttcgtgccaccgcacggcaaaggcgccctgtacctgcgcccgttcgtgatcggcaccggcgacaacattggcgtgcgcaccgcccccgagttcatcttctcggtgttcgccatcccggttggttcgtatttcaagggcggcatgaagccgcacaatttccagatttccagcttcgaccgtgctgccccgcagggcaccggagcggccaaggtcggtggcaactacgctgccagcctgcagccgggcgctgaagcgaagaaggccaacttcgccgacgccatctacctcgacccgctgacccacaccaagatcgaggaagtcggttcggccaacttcttcggcatcaccgccaacaacgagttcgtcaccccgaaatcggcctcggtactgccaggcatcacccgcctctcgctgatggaactggcgcaatcgcgcctgggcatgaccgtgatcgaaggcgatgtcgagatcagcaagctggaccgcttcgtcgaagccggtgcctgcggcaccgcggccgttatcaccccgatcggcggcatcgagtacaacggcaagctgcacgtgttccacgacctggaaaaggtcggcccggttacccagaagctctacaacgagctgaccggtatccagagcggcgatgtagaggcaccggcaggctggatcgtcaaggtcgcctga

SEQ ID NO: 105397 - protein, 339 aa, Pseudomonas putida KT2440
MSNESINWDKLGFDYIKTDKRYLSVWRNGEWDKGTLTEDNVLHISEGSTALHYGQQCFEGLKAYRCKDGSINLFRPDQNAARMQRSCARLLMPHVPTDVFIEACKQVVKANEKFVPPHGKGALYLRPFVIGTGDNIGVRTAPEFIFSVFAIPVGSYFKGGMKPHNFQISSFDRAAPQGTGAAKVGGNYAASLQPGAEAKKANFADAIYLDPLTHTKIEEVGSANFFGITANNEFVTPKSASVLPGITRLSLMELAQSRLGMTVIEGDVEISKLDRFVEAGACGTAAVITPIGGIEYNGKLHVFHDLEKVGPVTQKLYNELTGIQSGDVEAPAGWIVKVA

SEQ ID NO: 105398 - DNA, 939 bp, Vibrio parahaemolyticus RIMD 2210633
  CDS (1)..(939): transl_table=11
atggcaacgaaaactgcagatttcatttggtttaatggtgagatggttccatgggcagaggcgaacgtgcatgttctcactcacgccatgcattacggcacctcggtatttgaaggggtacgctgctacaacacaccaaaaggcccaattgtcttccgtcaccgtgaacatgcacagcgtttaaaagattccgccaaaatttaccgcttccctattccatactctgttgaagaaatcatggaagcaacgcgtgaaactctgcgtcaaaacaaactcgacagcgcttacattcgtccattgggatttgtgggcaatgtcggtttaggtgtgtgtcctccagtaggcgccgaaatggagctgatcatcgcggcgttcccatggggctcgtaccttggtgaagaagcactagaaaaaggcgtggatgcgatgatttcaagctggaatcgcgcggcacctaacaccatccctaccgcagcaaaagcgggtggtaactacctttcttcactactcgttggtggtgaagcacgtcgtcatggttacgacgaaggtattgcactgagtgttgacggttacttgtcagaaggcgcgggcgaaaacatctttgtcatcaaagatcgcgtgatcaccacaccaccagccaccagcgctatcctaccgggtatcactcgtgactcgatcatgaccattgctcgcgataaaggttacgaagtccgtgaagctaacattgctcgcgaagcgctataccttgcggatgaagtattcatgaccggtaccgcagcagaagttgtgcctgtagctaccatcgacaaaattgaagtgggcagcggtaaacgcggtccaattaccaaagaattgcaagaagcctactttggcctatttaacggcaccacagaagataagtggggctggttagactatgtgtacccagagcagcagtaa

SEQ ID NO: 105399 - protein, 312 aa, Vibrio parahaemolyticus RIMD 2210633
MATKTADFIWFNGEMVPWAEANVHVLTHAMHYGTSVFEGVRCYNTPKGPIVFRHREHAQRLKDSAKIYRFPIPYSVEEIMEATRETLRQNKLDSAYIRPLGFVGNVGLGVCPPVGAEMELIIAAFPWGSYLGEEALEKGVDAMISSWNRAAPNTIPTAAKAGGNYLSSLLVGGEARRHGYDEGIALSVDGYLSEGAGENIFVIKDRVITTPPATSAILPGITRDSIMTIARDKGYEVREANIAREALYLADEVFMTGTAAEVVPVATIDKIEVGSGKRGPITKELQEAYFGLFNGTTEDKWGWLDYVYPEQQ

SEQ ID NO: 105400 - DNA, 897 bp, Bacillus cereus ATCC 14579
  CDS (1)..(897): transl_table=11
gtgaatgagcaatggattttcttaaatggagaatttgttccaaaagatgaggcaaaagtttcagtatatgatcatggctatttatatggcgatggagtgtttgaaggaattagagtttatagcggtaatgttttccgtttgagagagcatcttgtccggttgtatgaatcagcaaaatcaatccttttagaaattccatattcattagatgaagtaacaaatattgttgttgagacgattcgacaaaataaattatctaatggatacattcgccttgttgtatcaagaggagcaggaaatcttggattggatcccgattcatgtaagaagccgaatgtagtagtaattgcagaacaattatctttattcccacaagaatattatgagaaagggattccagttgtaacagttgcaacgcgccgaaatcgtcccgatgttttatcccctcaagtaaaatctttaaattacttaaacaatattttagttcgtattgaagcgaaattagctggagtacaagaagcgcttatgttaaatgatcaaggatatgtagctgaaggatcaggagataacgtgtttattgttaaaggaaataaattaattacaccaccaagttctgctggagcgttagaaggtattacacgaaacgccattttagaaatcggcgaaaaacttgggtatgacgtaagagaagagttatttacaagacatgatgtatatgtagctgatgaagtgtttttaacaggaacagctgctgaagtgattgctgttacgacagtagatggtagaacgattggcttagggcaaacaggtccacatacgaaccgtttattagaagagtttcgtaagttagttgtagaagatggagagaaaatttacgaagaaaataaagttggataa

SEQ ID NO: 105401 - protein, 298 aa, Bacillus cereus ATCC 14579
MNEQWIFLNGEFVPKDEAKVSVYDHGYLYGDGVFEGIRVYSGNVFRLREHLVRLYESAKSILLEIPYSLDEVTNIVVETIRQNKLSNGYIRLVVSRGAGNLGLDPDSCKKPNVVVIAEQLSLFPQEYYEKGIPVVTVATRRNRPDVLSPQVKSLNYLNNILVRIEAKLAGVQEALMLNDQGYVAEGSGDNVFIVKGNKLITPPSSAGALEGITRNAILEIGEKLGYDVREELFTRHDVYVADEVFLTGTAAEVIAVTTVDGRTIGLGQTGPHTNRLLEEFRKLVVEDGEKIYEENKVG

SEQ ID NO: 105402 - DNA, 924 bp, Nitrosomonas europaea ATCC 19718
  CDS (1)..(924): transl_table=11
atgtcgatggcggaccgtgacggggttatctggtatgacggagagatggttccgtggcgcaatgccacgacccacgtacttacccataccctgcattatggaatgggtgtattcgaagggttgcgcgcctatcagacacccggggggccggccattttccgtctgcccgagcatacggaacgtctgttctactcggcacatgtcttcagaatgaaaatcccttttgatcagcccacgctgatacaggcacagctggatgtcgtccggcagaacaggttaacctccggctatattcgtccaatcgtcttctacgggtcggaagccatgggattatccgccaagaacctgtccgtccacgtcgccatcgctgcctggtcatggggaacctacctgggcgcagatgcgctggaaaacgggattcgcgtcaaaacctcctcgttcacccgccaccacgtcaatatcaacatgtgccgtgccaagtcggtcgccacttataccaactcgatcctggcgcatcaggaagttgcacaggacggctatgaggaagccttgctgctggacgtggatggttatgtcgcggaaggttccggtgaaaacattttcatcatcaaaaaaggcaagatttacacacctgatctgacagcctgtctggaaggcatcacgcgtgcatcggtcattcaactggcgcaagaagccggtatcgaggtcattcagaaacggattacccgtgatgaagtctactgcgcggatgaagccttttttaccggtacggcagcagaaatcacgccgatccgtgaactggattgtcgtatgattggtaacggtaaacgcggtcctgtcaccgaacaactgcaaaccgcattttttgactgcgtcaacggcaaatcagacaaacatgcagattggctgcattacgccgattag

SEQ ID NO: 105403 - protein, 307 aa, Nitrosomonas europaea ATCC 19718
MSMADRDGVIWYDGEMVPWRNATTHVLTHTLHYGMGVFEGLRAYQTPGGPAIFRLPEHTERLFYSAHVFRMKIPFDQPTLIQAQLDVVRQNRLTSGYIRPIVFYGSEAMGLSAKNLSVHVAIAAWSWGTYLGADALENGIRVKTSSFTRHHVNINMCRAKSVATYTNSILAHQEVAQDGYEEALLLDVDGYVAEGSGENIFIIKKGKIYTPDLTACLEGITRASVIQLAQEAGIEVIQKRITRDEVYCADEAFFTGTAAEITPIRELDCRMIGNGKRGPVTEQLQTAFFDCVNGKSDKHADWLHYAD

SEQ ID NO: 105404 - DNA, 933 bp, Helicobacter hepaticus ATCC 51449
  CDS (1)..(933): transl_table=11
atgaaagaagcgcaatttatttggaaagatggtgttcttgtgccgtgggctgaagctacgacacacgttttaagccatacattacattatggtaatgccttatttgaaggcacaagagcatatatgacaaaacaaggactagccatttttcgcttaaaggaccataccaaacgacttttagattctgctaaaattgtatgtattaagtctccttatacacaagaagaattagaaaaagcccaaatagagcttttgagggcaaataaaagtgattataatggcaatgtttatattcgtcctctcatatatttagggtatggtgtaatgggtgttagtcatattaatgcacctgtaaatgtagcgattgctgcgtgggaatggggtgcatatcttggcgaagagggcattaataatggcattaaagtgaaaacaagttcttttgtccgcaatcctgcaaaagcttttatgggtaaggcaaaggtagctgctaattatctcaactctcaaatggcaaagcacgaggcgctttcttgcggttgcgatgaggcgttgctccttgatgataatggttttgtagcggaagggagtggtgagtgcttttttatcgtgcgaaatggtaagcttattacaccaccacacgcaaatactttagaatctattactcaagcaacaaccatagaaattgctaaggatatgggaataccatttgaggagcgaaatattacacgcgatgaggtatatatcgctgatgaagctttttttacaggcacagcagcagagattacgcctgtgcgtgagcttgatgcgcgtgtcattggaaatggcacagcaggagagattacaaaatcacttcaaaaagcatattttgctattgtaaatggagagaatcctcgttatcaacactatttgacttatattgacaaggagaaataa

SEQ ID NO: 105405 - protein, 310 aa, Helicobacter hepaticus ATCC 51449
MKEAQFIWKDGVLVPWAEATTHVLSHTLHYGNALFEGTRAYMTKQGLAIFRLKDHTKRLLDSAKIVCIKSPYTQEELEKAQIELLRANKSDYNGNVYIRPLIYLGYGVMGVSHINAPVNVAIAAWEWGAYLGEEGINNGIKVKTSSFVRNPAKAFMGKAKVAANYLNSQMAKHEALSCGCDEALLLDDNGFVAEGSGECFFIVRNGKLITPPHANTLESITQATTIEIAKDMGIPFEERNITRDEVYIADEAFFTGTAAEITPVRELDARVIGNGTAGEITKSLQKAYFAIVNGENPRYQHYLTYIDKEK

SEQ ID NO: 105406 - DNA, 858 bp, Rhodopirellula baltica SH 1
  CDS (1)..(858): transl_table=11
atgacccaagccatctacatcaacggtgaatacttctcacgcgaagacgccaagatcagtgtctacgatcacggactgctgtacggcgacggcgtgttcgaagggatgcggatctactcgggcaaagtgttcgcactcgaagaccacatgacacggctctacgaaagcgctcgtgcgatcatgctggacattcccatcgcaatcgatgctttgacgactgcagtgaacgaaaccgttgcaaaaaatggtttgacagaaggctacattcgcttggtcgtcacccgtggtggcaaccaattggggctcaacccgttctcgtgtgaagatccccaagtgatcatcatcgcggatacgatctcgttgtaccctgagaagttctacaccgaaggtttggaactgatcaccgcgtcgacgatccgcaaccatcccgccgcgctcagcccccgcgtgaagtcgttgaactacctcaacaacatcatggcgaagatcgaagccattcgcgccgggtgcattgaagcggtgatgctgaacaccaaaggcgaagttgccgagtgcaccggcgacaacattttcatcgtccgtggcggccggttgatcaccccaccaatcgatgcaggaatccttgaagggatcacgcgtaacaccgtgattgatctcgctcgcgaaaatgggatcgaagtggccgaggaagccatgacccgtcacgacatctttgtcgccgatgaatgcttcctaaccggcagtgccgccgaagtcatccccgcggtcaaactcgatgggcgagtcattggcgatggcaaacccggcccaatgactcaaaagctcaacgcggccttccgtgcatttgtggctcgttag

SEQ ID NO: 105407 - protein, 285 aa, Rhodopirellula baltica SH 1
MTQAIYINGEYFSREDAKISVYDHGLLYGDGVFEGMRIYSGKVFALEDHMTRLYESARAIMLDIPIAIDALTTAVNETVAKNGLTEGYIRLVVTRGGNQLGLNPFSCEDPQVIIIADTISLYPEKFYTEGLELITASTIRNHPAALSPRVKSLNYLNNIMAKIEAIRAGCIEAVMLNTKGEVAECTGDNIFIVRGGRLITPPIDAGILEGITRNTVIDLARENGIEVAEEAMTRHDIFVADECFLTGSAAEVIPAVKLDGRVIGDGKPGPMTQKLNAAFRAFVAR

SEQ ID NO: 105408 - DNA, 924 bp, Candidatus Blochmannia floridanus
  CDS (1)..(924): transl_table=11
atgaaaaaatctgattttatttggtttaatggaaatatggtaccttgggataaagcaaaggtacatgttatgtctcatgcattgcattatggatcgtcagtttttgaaggaatgcgttgttatgattcttataaagggccagtgatatttagaggtcaagatcatattcaaagattgatgaattctgcaaagatttatcgtatacctgtttctagaagtaaattggagttaatgcaagcgtgtagaatgctaattcaaaaaaataatttggttaatgcatatattcgtcctttgatttttattggaaatgttggtggaatggagattaatcctattattgaatatactgctgacgttgttatagctgcttttttttggaaagcgtatttaggggaagattctttaaattctggagttgatgttgtagtatcttcttggcgtagagttccaacggatactattcctaatttagctaaggcaggtggtaattatttatcatctatgttaattagcaatgaagccaataggtatggttatcatgaaggtattgctttagatatatatggttatgtttcggaaggtgctggagagaatttatttgtgattaaagataatattgtattaactccacctattagcgcttctattttgtcaggtattactcgtgattctgttataaatttattgaaggatgttggattcgagataaaagaagaattattatctcgtgaatttttatatatagcagatgaaatatttatgtgtggaactgccgctgaaattactccaatacgtagtgtggatggtattaaaattgggtcaggatcaagaggtcctattactaaaaaattgcaagaattattttttaatttgtttacgggaaaaactgaagataaatggggttggttagatgcaatgatttga

SEQ ID NO: 105409 - protein, 307 aa, Candidatus Blochmannia floridanus
MKKSDFIWFNGNMVPWDKAKVHVMSHALHYGSSVFEGMRCYDSYKGPVIFRGQDHIQRLMNSAKIYRIPVSRSKLELMQACRMLIQKNNLVNAYIRPLIFIGNVGGMEINPIIEYTADVVIAAFFWKAYLGEDSLNSGVDVVVSSWRRVPTDTIPNLAKAGGNYLSSMLISNEANRYGYHEGIALDIYGYVSEGAGENLFVIKDNIVLTPPISASILSGITRDSVINLLKDVGFEIKEELLSREFLYIADEIFMCGTAAEITPIRSVDGIKIGSGSRGPITKKLQELFFNLFTGKTEDKWGWLDAMI

SEQ ID NO: 105410 - DNA, 921 bp, Bordetella pertussis Tohama I
  CDS (1)..(921): transl_table=11
atgtcgatgtcggaccgcgacggcttcatctggtatgacggcaagctggtgccttggcgcgaggccaccacgcacgtgctgacccactccctccactacggactgtccgtcttcgaaggcgtgcgcgcctacgaaaccgcggccggcaccgccatcttccggctgcaggaccacaccaaccgcctgttcaattcggcccacatctaccagatcccgctgccgtacgaccgcgacaccctcaacgaggcccagcgcgaagtggtgcgcgccaacggcctggcatcgtgttacctgcgcccgctggccttctatggctcggaaaaaatgggggtctcgcccaagggcgcccaggtgcacgtggccatcgccgcctggccctggggcgcctatctgggcgagaccgccctggcgcagggcatccgcgtcaaggtgtcctcgttcgcgcgccagcacgtcaacgtcaccatgccgcgcgccaaggtggccaccacgtacgccaattccatcatcgccaatgccgaagcgctgcaggatggctacaacgaggccctgctgctcgataccgagggtttcgtggccgaaggcgccggcgagaacattttcatcgtcaaggacggcgtgctgtgcgagcccgagatcgcctcggcgctgacgggcatcacccgctccaccatccatgcgctggccgccgacctcggcctgcgcgtcgtcaccaagcgcctcacacgcgatgacgtctacattgccgacgaagccttcttcactggcaccgcggccgaggtcacgccgatccgcgaggtcgacaaccggcagatcggcgccggccgccgcggcccggtcaccgagaagctgcagcaggccttcttcgacctggtcaacggccgcaaccccaaataccagcattggctgaccccggtatga

SEQ ID NO: 105411 - protein, 306 aa, Bordetella pertussis Tohama I
MSMSDRDGFIWYDGKLVPWREATTHVLTHSLHYGLSVFEGVRAYETAAGTAIFRLQDHTNRLFNSAHIYQIPLPYDRDTLNEAQREVVRANGLASCYLRPLAFYGSEKMGVSPKGAQVHVAIAAWPWGAYLGETALAQGIRVKVSSFARQHVNVTMPRAKVATTYANSIIANAEALQDGYNEALLLDTEGFVAEGAGENIFIVKDGVLCEPEIASALTGITRSTIHALAADLGLRVVTKRLTRDDVYIADEAFFTGTAAEVTPIREVDNRQIGAGRRGPVTEKLQQAFFDLVNGRNPKYQHWLTPV

SEQ ID NO: 105412 - DNA, 918 bp, Wolinella succinogenes DSM 1740
  CDS (1)..(918): transl_table=11
atgaaagaatcgcaatttatttggatggatgggaagcttatcccttggcatgaggccaaaatccatgtcctttcccacacccttcactacggaaacggcgtttttgagggcactcgagcctacaagacagacaaaggattggcgatttttcgcctccaagatcacaccaagcgacttctcaattccgctaaaattgtcgctatcgactgcccctacactcaagaggagctagagaaagcccaagtggagcttctgcgccacaatacctttgagggaaatgtctatcttcgccccatcatcttcctcggatatggcgtgatgggggtctaccataaaaaagctcccgtaaacgtggctattgccgcttgggagtggggcgcctatttaggcgatgagggattagagaagggaattagagtcaaaacctcctcgtttgtgcgaaactctatcaaatcaagctttggaaaggccaaggcgagtgccaactatctcaactcccagatggccaaatatgaggcgatctcttgtggatttgaagaggctttgctcgtggatgacaacggctttgtggccgagggaagcggggagtgcttcttcatcgtgcgcgatggcgtgatcatcactccgccccatgataactctctagagagcatcacccaagccacggtgatcgaacttgctcgaagccttggctacgaggtgattgagagaagaatcacacgagatgaggtctatatcgccgatgaagccttcttcactggcacggccgccgaggtcactcccgtgcgggaacttgacttccgaatcatcggagaaggaagacgagggcccctcacgaccctcttgcaaaaaacctattttgatgtggtgaacggacgagatccaaagttcgccaaatatctcgcctatatccaataa

SEQ ID NO: 105413 - protein, 305 aa, Wolinella succinogenes DSM 1740
MKESQFIWMDGKLIPWHEAKIHVLSHTLHYGNGVFEGTRAYKTDKGLAIFRLQDHTKRLLNSAKIVAIDCPYTQEELEKAQVELLRHNTFEGNVYLRPIIFLGYGVMGVYHKKAPVNVAIAAWEWGAYLGDEGLEKGIRVKTSSFVRNSIKSSFGKAKASANYLNSQMAKYEAISCGFEEALLVDDNGFVAEGSGECFFIVRDGVIITPPHDNSLESITQATVIELARSLGYEVIERRITRDEVYIADEAFFTGTAAEVTPVRELDFRIIGEGRRGPLTTLLQKTYFDVVNGRDPKFAKYLAYIQ

SEQ ID NO: 105414 - DNA, 927 bp, Photorhabdus luminescens subsp. laumondii TTO1
  CDS (1)..(927): transl_table=11
atgacgaagcaatccgattacatttggttcaatggtgagatggttccttgggcagatgctaaagttcacgtaatgtcccatgctttacattacggcacatctgtttttgagggaattcgctgctatgactctcataaagggccagtggtttttcgccatcgtgagcatatgcagcgtttacatgactctgcaaagatttatcgtatgccgttgaaccagagtgtcgatgaattaatggaggcgtgtcgggcaactcttcgtaaaaataatttagtcagtgcttatatacgtccattggtctttatcggtgatgttggcatgggggttaatccacctgctggttataaaactgatgtcattattgccgcctttccgtggggagcttatttgggagaaggcgcattggatcaaggaattgatgcgatggtttcttcatggaatcgtgcggcaccaaacacaatgccaactgcggctaaagccggtggtaactacctgtcttcgcttttagtcggtagtgaagctcgtcgtcgtgggtatcaggaaggtattgcactggatgtttctggttatatctctgagggtgcgggtgaaaatctatttgaagtaaaagatggcatattatttaccccaccatttacctctgctgcattaccaggaattactcgtgatgccattattaaactggcgaaagatttagggctggaagtgcgtgagcaggtattgtcgcgcgaatcattgtacctggctgatgaagtttttatgtctggcacagcggctgaaatcacacccgttcgtagtgttgatgatattcaggttggtatcggtagatgtggacctattaccaaaaaaattcaacaagctttctttggcttgtttgatggcacgacagatgataaatggggctggttagatccagtcaatccttaa

SEQ ID NO: 105415 - protein, 308 aa, Photorhabdus luminescens subsp. laumondii TTO1
MTKQSDYIWFNGEMVPWADAKVHVMSHALHYGTSVFEGIRCYDSHKGPVVFRHREHMQRLHDSAKIYRMPLNQSVDELMEACRATLRKNNLVSAYIRPLVFIGDVGMGVNPPAGYKTDVIIAAFPWGAYLGEGALDQGIDAMVSSWNRAAPNTMPTAAKAGGNYLSSLLVGSEARRRGYQEGIALDVSGYISEGAGENLFEVKDGILFTPPFTSAALPGITRDAIIKLAKDLGLEVREQVLSRESLYLADEVFMSGTAAEITPVRSVDDIQVGIGRCGPITKKIQQAFFGLFDGTTDDKWGWLDPVNP

SEQ ID NO: 105416 - DNA, 939 bp, Vibrio vulnificus YJ016
  CDS (1)..(939): transl_table=11
atggcaacgaaaacagcagattatatctggtttaatggcaagatggttccctgggcagaagcgaatgtacacgttctgactcacgccatgcactacggcacctcggtatttgaaggggttcgctgttacaacacgccaaaagggccgattgtcttccgtcaccaagaacatgcgcagcgtctgaaagattctgccaaaatttaccgcttcccaatcccctattcagtagaagagatcatggaagcgactcgcgaaactctgcgtcaaaacaagctggataacgcctacattcgcccactggcgtttgttggcaacgtaggcttgggcgtttgtcctcccacagataccgaaatggatctgatcattgccgccttcccttggggctcttacttaggggaagaagcgttggaaaatggcgttgatgccatggtatccagctggaaccgcgctgcgccaaacacgattccaaccgcagcgaaagcaggcggtaactacctctcttctctattggttggtggtgaagcacgtcgacatggctatgccgaagggattgcattaagtgttgatggttacctttcagaaggtgccggtgaaaacatttttgtgatcaaaaatggcgtcatcacaaccccaccagcgacggctgcaattctccctggcatcactcgtgactcaatcatgacgctggcgcgagagatgggttatgaagtccgtgaagccaacatcgcacgtgaagccctctacttggcagacgaagtgtttatgacgggtactgccgcagaagtggttccggtacgtagtgtcgatcaaattcaagtgggcgcaggcaaacgcggcccaatcaccaaagcggtgcaagaagcgtactttggtttattcaatggcaccaccgaagataagtggggctggttagattacgtgtacccagagaagaagtag

SEQ ID NO: 105417 - protein, 312 aa, Vibrio vulnificus YJ016
MATKTADYIWFNGKMVPWAEANVHVLTHAMHYGTSVFEGVRCYNTPKGPIVFRHQEHAQRLKDSAKIYRFPIPYSVEEIMEATRETLRQNKLDNAYIRPLAFVGNVGLGVCPPTDTEMDLIIAAFPWGSYLGEEALENGVDAMVSSWNRAAPNTIPTAAKAGGNYLSSLLVGGEARRHGYAEGIALSVDGYLSEGAGENIFVIKNGVITTPPATAAILPGITRDSIMTLAREMGYEVREANIAREALYLADEVFMTGTAAEVVPVRSVDQIQVGAGKRGPITKAVQEAYFGLFNGTTEDKWGWLDYVYPEKK

SEQ ID NO: 105418 - DNA, 897 bp, Nanoarchaeum equitans Kin4-M
  CDS (1)..(897): transl_table=11
atgctattgctctataatatgaaggtatggttcaatggccaaatcttagattacgaagatgtaagaataccaatagatacacatgctttacattatggctcttcagtattcgaaggaattaggtcctataaagcaaaaaagggagtagcagtatttagaaatgaagaccacgtaaaaaggtttttctattcgatgcaaactcttagaatgaaaataaaatttgacgaaaacactattagagaggctataaaagaagttgttagggtaaacaatttagaagattcatatataaggccaattgccttttattctaaaggaggaataggattagacccaagaaaaaatgaagtggatatagctatatttgctataccatggggcaaatatctaaaagaagaagcaagggtaacaattgtttcttatgctaggcctaatactttaataacaaatcccaaagccaaaattggcggtatgtatgttaattctattttagctactttagaagcaaaagaaagaggttttgacgaagctattatgttggatttaaatgggtttgtcgctgaaggccctggagaaaacatatttttaatatacaaagatagcaaaactgcggtaactccaatagaaggttctatattacctgggataactagagatacagtaaaacatttattgagagacctaggttataatgtaatagaaagaaatgttttagtcgatgaactatttatcgcagatgagttattttttgttggcactgcagcggaggttacaccaataaaagaattagatggacaaaccttcgatacaagttttggtaaaaaagtttatgaagaatatatgaaagttgttagaggagaaaacaaaaaatatgaatattggttagattatatataa

SEQ ID NO: 105419 - protein, 298 aa, Nanoarchaeum equitans Kin4-M
MLLLYNMKVWFNGQILDYEDVRIPIDTHALHYGSSVFEGIRSYKAKKGVAVFRNEDHVKRFFYSMQTLRMKIKFDENTIREAIKEVVRVNNLEDSYIRPIAFYSKGGIGLDPRKNEVDIAIFAIPWGKYLKEEARVTIVSYARPNTLITNPKAKIGGMYVNSILATLEAKERGFDEAIMLDLNGFVAEGPGENIFLIYKDSKTAVTPIEGSILPGITRDTVKHLLRDLGYNVIERNVLVDELFIADELFFVGTAAEVTPIKELDGQTFDTSFGKKVYEEYMKVVRGENKKYEYWLDYI

SEQ ID NO: 105420 - DNA, 1329 bp, Apis mellifera; identical to SEQ ID NO: 90443
  CDS (1)..(1329)

SEQ ID NO: 105421 - protein, 442 aa, Apis mellifera; identical to SEQ ID NO: 90444

SEQ ID NO: 105422 - DNA, 1224 bp, Kluyveromyces lactis NRRL Y-1140; identical to SEQ ID NO: 90449
  CDS (1)..(1224)

SEQ ID NO: 105423 - protein, 407 aa, Kluyveromyces lactis NRRL Y-1140; identical to SEQ ID NO: 90450

SEQ ID NO: 105424 - DNA, 1254 bp, Tribolium castaneum; identical to SEQ ID NO: 90469
  CDS (1)..(1254)

SEQ ID NO: 105425 - protein, 417 aa, Tribolium castaneum; identical to SEQ ID NO: 90470

SEQ ID NO: 105426 - DNA, 921 bp, Herminiimonas arsenicoxydans
  CDS (1)..(921): transl_table=11
atgtcgatggctgatcgcgatgggaaaatctggaaggatggtcgattaatcgactggcgcgatgcaactgtgcacgtcctgacccattcgctgcactacggcatggcggtatttgaaggcgtgcgcgcctatagaactccgcaaggcacggcgatcttccgcctgcgcgaacataccgaacgcctgttcaattcggcaaaaatattccagatgaccatccccttcgatcaggaaaccgtgatgcaggcgcaactgcaggtggtccgcgaaaacaggctggaaagctgctatctgcgccctctggtctggatcggcgatgaaaagcttggcgtctccgcgcagggaaataccatacatatcgccatcgccgcatggccgtggggtgcgtatctaggcgaagacggcatcaacaaaggcatacgcgtcaaaacctcttccttcagccgccatcacgtcaatgtctcgctggtgcgtgccaaggcttccggctattacatcaactccatcctggccaatcaggaagcgctggccgacggttacgacgaagcgctgctgctggataccgacggctacgtgtcggaaggttcgggcgaaaacgttttcatcgtcaagaaaggcaagatttatacgcccgacctggcatcctgcctcgacggcatcacgcgcgactcggtattgacgatggcgcgcgatctcgggattgacgtcgtggaaaaacgcattacccgcgacgaagtgtattgcgccgacgaagcattctttaccggtaccgcagccgaaatcacgcccatacgcgaactcgacaatcgcaccatcggcgatggcagacgcggcccgattaccgagaaactgcaagcactgtttttcgatgtcgtcgccggcaaggcgccacaatacagccattggctgacgatcgtctga

SEQ ID NO: 105427 - protein, 306 aa, Herminiimonas arsenicoxydans
MSMADRDGKIWKDGRLIDWRDATVHVLTHSLHYGMAVFEGVRAYRTPQGTAIFRLREHTERLFNSAKIFQMTIPFDQETVMQAQLQVVRENRLESCYLRPLVWIGDEKLGVSAQGNTIHIAIAAWPWGAYLGEDGINKGIRVKTSSFSRHHVNVSLVRAKASGYYINSILANQEALADGYDEALLLDTDGYVSEGSGENVFIVKKGKIYTPDLASCLDGITRDSVLTMARDLGIDVVEKRITRDEVYCADEAFFTGTAAEITPIRELDNRTIGDGRRGPITEKLQALFFDVVAGKAPQYSHWLTIV

SEQ ID NO: 105428 - DNA, 957 bp, Thermus thermophilus HB27
  CDS (1)..(957): transl_table=11
atgaccaaggctgaggccaagggcggcgacgtgcagatcaaggccgggctcatctggatgaacggggcctttgtcccccaggaggaggccaagaccagcgtcctaagccacgccctccactacggcaccagcgtctttgaggggataagggcctacgagacccccaaaggccccgccgtcttccggctcaaggagcacgtgcggcgcttctacaactcggccaaggtgctccgcatggagatccccttcgccccggaggagctggaggaggccatcaaggaggtggtgcggagaaacggctacaggagctgctacatccgccctctggcctggatgggggcgaaggccctaggggtcaatcccctgcccaacaaccccgccgaggtgatggtggccgcctgggaatggggggcctacctgggggaggaggcggtgcgcaagggggccaggctcatcaccagctcctgggcccgcttccccgcgaacgtgatgcccggcaaggccaaggtgggcggcaactacgtgaactcggccctcgccaagatggaggcggtggccgccggggccgacgaggccctcctcctggacgaggaggggtacgtggccgaggggagcggggagaacctcttcttcgtgcgggacggggtgatctacgccctggagcactcggtgaacctcgagggcatcacccgcgactcggtgatccgcatcgccaaggacctcggctacgaggtccaggtggtgcgggccacccgcgaccagctctacatggcggacgaggtcttcatgaccgggaccgccgccgaggtgaccccggtgtccatgattgactggaggcccatcgggaagggcacggccgggcccgtggccttgaggctccgggaggtctacctcgaggccgtcaccgggcggcggccggagtacgagggctggctcacgtacgtgaatgggcaatag

SEQ ID NO: 105429 - protein, 318 aa, Thermus thermophilus HB27
MTKAEAKGGDVQIKAGLIWMNGAFVPQEEAKTSVLSHALHYGTSVFEGIRAYETPKGPAVFRLKEHVRRFYNSAKVLRMEIPFAPEELEEAIKEVVRRNGYRSCYIRPLAWMGAKALGVNPLPNNPAEVMVAAWEWGAYLGEEAVRKGARLITSSWARFPANVMPGKAKVGGNYVNSALAKMEAVAAGADEALLLDEEGYVAEGSGENLFFVRDGVIYALEHSVNLEGITRDSVIRIAKDLGYEVQVVRATRDQLYMADEVFMTGTAAEVTPVSMIDWRPIGKGTAGPVALRLREVYLEAVTGRRPEYEGWLTYVNGQ

SEQ ID NO: 105430 - DNA, 936 bp, Acinetobacter sp. ADP1
  CDS (1)..(936): transl_table=11
gtgtgtgccatgaatttggctgatcgtgatggttttatttggcaagatggacaattggttgactggcgtgatgcaaaaattcacgttttaactcatacgctacactacagtatgggtgtctttgaaggtgtccgtgcctatgaaactcctaaaggcactgcaatttttcgtctccaagatcacactaagcgtttgttaaactctgcaaaaatttatcaaatgaaagttccatttgatcaagcgacacttgagcaagctcaaattgatgtggttcgtgaaaataaattagcatcttgttacttgcgtccattgatctggatcggttctgaaaaattaggtattgctgccactgaaaatagtattcatgctgccgttgcggcatggggctggggtgcttaccttggtgaagaggcaatggcacgtggtattcgtgtaaaaacatcttcgtttacgcatcatcatccaaacgtgacgatgtgtaaggcaaaagcatgtggcaactatactgtgtcgatcttggcacatcaggaagtagcgcgttcaggttatgatgaagcgatgttgctagatccacaaggctttgtgtgtcaaggtgcaggcgagaacgtgttcttgattaaagatggcgtgttgcatacccctgatttggctggtggtgcattagaagggattacccgtcaaacagttattaccattgcaaaagatttaggatacgaagtggttgagcgtcgtattacccgtgatgaattctacattgcagatgaagcattctttactggtactgccgcagaagtgacgccaattcgtgaatacgatgaccgtgaaattggtgaaggatgccgtggcccaattaccacagaaatccagaaaacctttttcgatgcggttcagggcaaaaatgcaaaatatgaacactggttaacttacgtgaagtaa

SEQ ID NO: 105431 - protein, 311 aa, Acinetobacter sp. ADP1
MCAMNLADRDGFIWQDGQLVDWRDAKIHVLTHTLHYSMGVFEGVRAYETPKGTAIFRLQDHTKRLLNSAKIYQMKVPFDQATLEQAQIDVVRENKLASCYLRPLIWIGSEKLGIAATENSIHAAVAAWGWGAYLGEEAMARGIRVKTSSFTHHHPNVTMCKAKACGNYTVSILAHQEVARSGYDEAMLLDPQGFVCQGAGENVFLIKDGVLHTPDLAGGALEGITRQTVITIAKDLGYEVVERRITRDEFYIADEAFFTGTAAEVTPIREYDDREIGEGCRGPITTEIQKTFFDAVQGKNAKYEHWLTYVK

SEQ ID NO: 105432 - DNA, 927 bp, Erwinia carotovora subsp. atroseptica SCRI1043
  CDS (1)..(927): transl_table=11
atgacaaaaaaagcggattatatttggttcaatggcgagatggttccttgggctgaagccaaagtacacgtcatgtcacatgccctgcactatggcacctccgtctttgaaggcgttcgttgctacaattcacataagggtccggtggttttccgtcaccgtgagcatatgcagcgcctgcgtgattcggcaaaaatttaccgtatgccggtcgcgcaaagtgtggatgagctgatggaagcctgccgtgaaacgctgcgcaaaaataacctgactagtgcctatattcgtccattggtgttcattggtgatgtgggtatgggcgttaacccgccagacggttatcaaaccgacgttattattgcggctttcccgtggggcgcatatttgggtgaggaggcgctggaagcaggcattgatgcgatggtgtcatcctggaatcgtgtcgcagcgaatactattccaaccgccgctaaagcgggtggcaactatctgtcctccctgctggtgggtagcgaagcacgccgccacggctatcaggaagggatcgcgttggatgtccacggctatgtttctgaaggggcgggcgagaatttgttcgaagtgaaggacgggattatcttcacgccgccgtttacctcttcggcgctgccgggcattacgcgtgacgctatcatcaagctggcgaaggatgcagggtatgaagtgcgcgagcaggtgctgtcccgcgagtcactgtatctggcggatgaagttttcatgtccggtaccgcagcagaaattaccccagtgcgtagcgtagacggcattcaggtcggcattggcaaacgcggtccggtcacccaagccttgcagcaggcgttctttggcctctttacgggtgaaaccgaagataaatggggctggttggatccggtaaatcagtaa

SEQ ID NO: 105433 - protein, 308 aa, Erwinia carotovora subsp. atroseptica SCRI1043
MTKKADYIWFNGEMVPWAEAKVHVMSHALHYGTSVFEGVRCYNSHKGPVVFRHREHMQRLRDSAKIYRMPVAQSVDELMEACRETLRKNNLTSAYIRPLVFIGDVGMGVNPPDGYQTDVIIAAFPWGAYLGEEALEAGIDAMVSSWNRVAANTIPTAAKAGGNYLSSLLVGSEARRHGYQEGIALDVHGYVSEGAGENLFEVKDGIIFTPPFTSSALPGITRDAIIKLAKDAGYEVREQVLSRESLYLADEVFMSGTAAEITPVRSVDGIQVGIGKRGPVTQALQQAFFGLFTGETEDKWGWLDPVNQ

SEQ ID NO: 105434 - DNA, 915 bp, Bacillus licheniformis ATCC 14580
  CDS (1)..(915): transl_table=11
atgggggaccagaaagaccagtggatcttcctaaacgacaaactcgttaaaaaagaagacgctaaaatatcagtctatgatcacggatttttatacggggacggcgtgtttgaagggatcagggtatacgacggcaacatcttcagaatgcaagagcacatggaccgcctctacgattctgcgagatcgatcatgctggagattccatatccacaggaagaactgacacagcacgtactcaaaacagtcgaaaaaaacgggctgaaagacgcttacatccgcttggtcgtttcaagaggagcaggtgacctcggactcgatccaaacaattgttcaaacccgagtgtcatcataattgtcgaaccattggcaatattcccgaaacatttatatgaaacggggattgacattgttacggttccgacaagaaggaacagacccgatgtgctgagccctaaagtaaaatcgctgaactacttaaacaatattcttgtccggatcgaggcgcatatggcgggtgtgacggaagcgctcatgctcaatgatcaaggctatgtcgccgaagggtctgcggataacgtatttatttataaaaacggaaagctcttgacgcctccgggctatatcggagcgcttgaaggaatcacccggaatgccatcatcgaaatagcgcgagagctcggctatgaagtgaaagaagagccgtttacccgccatgacgtatacacagccgaggaagtgtttttaaccggaacggctgcagaagtcatcgcggtcgtaaaagttgacggccgcaagatcggggacggcaaaccgggagtccacacaaaccggatgcttgaaaagttccgcgagcgcgtcgtccgtgaagggttaaaagtcagcctcaaagatcaaagcttaagtgtcagctga

SEQ ID NO: 105435 - protein, 304 aa, Bacillus licheniformis ATCC 14580
MGDQKDQWIFLNDKLVKKEDAKISVYDHGFLYGDGVFEGIRVYDGNIFRMQEHMDRLYDSARSIMLEIPYPQEELTQHVLKTVEKNGLKDAYIRLVVSRGAGDLGLDPNNCSNPSVIIIVEPLAIFPKHLYETGIDIVTVPTRRNRPDVLSPKVKSLNYLNNILVRIEAHMAGVTEALMLNDQGYVAEGSADNVFIYKNGKLLTPPGYIGALEGITRNAIIEIARELGYEVKEEPFTRHDVYTAEEVFLTGTAAEVIAVVKVDGRKIGDGKPGVHTNRMLEKFRERVVREGLKVSLKDQSLSVS

SEQ ID NO: 105436 - DNA, 921 bp, Dehalococcoides ethenogenes 195
  CDS (1)..(921): transl_table=11
atgggaacgtcatatgcttactttaaaaaacagataataccgctggaggatgccaagataggggtaatgacccacgccctgcactacggcaccggggtatttgaaggtatccgcggcaactggaataatgaaaagaagcagatgtacattttccgcctgaaggagcactatacccggttgctgaccggtgctaaagtgctcaagatgaacctgccctacactgtggacgagctttgcaagataactattgaccttataaaaaagtgcggcttcaaagaagatatttatatccgccctttagcttataaaagttccgaaaccttcggggtcaggctgcacaatctggattgtgatttgctgattgtggccataccctggggcagatatatagacaaagacacctgccactgctgtgtctccacctggcaccgccctgacgataacgtcatgcctccccagctgaaatcaaccggcatttacctgaataatgcctttaccaagaccgaagccgtggaaaacggctttgacgaaggtattatgctgacccctgatgggcatgtctccgaaggcagcggcgaaaacctgtttatagtccgcaagggcaaacttattaccccgcccatctgtgacagcatactggacggcattacccgtaactctgttatggagctggccgaaaaagagctggggctggaggtgcttgaaagaagcattgaccgggtggaactttatatagcggaggaatgtttccttaccggcacagccgcccacctgaccccagtttccgaggttgaccaccgcaaagtgggcaacggcgaaatcgggccggtaaccgccaaactgaaagatttgtattttgaagctataaagggcaatatagccaaatattcaagctggtgtaccccggtttataatctgtaa

SEQ ID NO: 105437 - protein, 306 aa, Dehalococcoides ethenogenes 195
MGTSYAYFKKQIIPLEDAKIGVMTHALHYGTGVFEGIRGNWNNEKKQMYIFRLKEHYTRLLTGAKVLKMNLPYTVDELCKITIDLIKKCGFKEDIYIRPLAYKSSETFGVRLHNLDCDLLIVAIPWGRYIDKDTCHCCVSTWHRPDDNVMPPQLKSTGIYLNNAFTKTEAVENGFDEGIMLTPDGHVSEGSGENLFIVRKGKLITPPICDSILDGITRNSVMELAEKELGLEVLERSIDRVELYIAEECFLTGTAAHLTPVSEVDHRKVGNGEIGPVTAKLKDLYFEAIKGNIAKYSSWCTPVYNL

SEQ ID NO: 105438 - DNA, 1140 bp, Corynebacterium glutamicum ATCC 13032; identical to SEQ ID NO: 90479
  CDS (1)..(1140): transl_table=11

SEQ ID NO: 105439 - protein, 379 aa, Corynebacterium glutamicum ATCC 13032; identical to SEQ ID NO: 90480

SEQ ID NO: 105440 - DNA, 930 bp, Psychrobacter arcticus 273-4
  CDS (1)..(930): transl_table=11
atgaatatggcaacgcaggaaggcaagctttggatgaatggcacgatgattgaacagccagatgccaaggttcatgtgcttacgcatagcatgcattacggtatcgcagtctttgaaggcgtccgtgcttatcaaaccgctgataaccgtaccgcgatttttcgcctaaaagaacataccgagcgtctgctaggttccgcgaagatttttcagatggatgtaccttttgatgctgccactttagagcaagcacacaaggatgtggtcaagcaaaacaacttggcagaagcttatattcgtccgctcatttggttcggtgccgaaaagctaggtctgtcctcacgcgataatagcgtcaatgccatggtagccgcttggcattggggcgcatatcttggtgaagaaggtattaaaaaaggcattcgtgtaaaaacgtcatcatatacccatcacttgccaaacgtgaccatgtgtaaggcaaaagcctccagcaattatccagtatctatcatggcgaaccaagaagtgacccgtaacggttatgacgaagccatcttgatggatccacagggctatgtctgccagggcgccggtgaaaacttgttcttggtcaaagatggcgtactacataccccagatttagcaggcggcgcacttgacggtatcacgcgtcgaactattgttcaattcgctgaagatttgggcatcaaggttattgagcgccgtatcactcgtgatgagttctacttggcagatgaaatctttatgaccggtactgctgcggaagtgacgcctattcgtgaatacgatgatcgtactatcggtaatggtggtcgtggtccgttgactgaaaagctgcaaaccctttactttgatgtggtccatggtcgtaatgagaaatatatggactggttaagctttattgattga

SEQ ID NO: 105441 - protein, 309 aa, Psychrobacter arcticus 273-4
MNMATQEGKLWMNGTMIEQPDAKVHVLTHSMHYGIAVFEGVRAYQTADNRTAIFRLKEHTERLLGSAKIFQMDVPFDAATLEQAHKDVVKQNNLAEAYIRPLIWFGAEKLGLSSRDNSVNAMVAAWHWGAYLGEEGIKKGIRVKTSSYTHHLPNVTMCKAKASSNYPVSIMANQEVTRNGYDEAILMDPQGYVCQGAGENLFLVKDGVLHTPDLAGGALDGITRRTIVQFAEDLGIKVIERRITRDEFYLADEIFMTGTAAEVTPIREYDDRTIGNGGRGPLTEKLQTLYFDVVHGRNEKYMDWLSFID

SEQ ID NO: 105442 - DNA, 927 bp, Colwellia psychrerythraea 34H
  CDS (1)..(927): transl_table=11
atggctaaagtaaatgcagactatatttggttcaatggtgaaatcatgccgtggcaaaatgctactgttcatgtaatgagtcatgcacttcattacggttcatcagtttttgaaggcattcgtgcctatgaaacacataaaggcacgtgtatcttccgtttagaagagcatatcaagcgtttatttgattcagcaaaaatttaccgaatgaatattccatacacgcaagaagaagttgtacaagcctgtaaagatgctgttgtaaaaaacgatttaaaatcagcatatcttcgtccattagcctttttaggtgatatcggtatgggtcttcgtccacctatcgatgctaaagctgaccttatgattgccgcatttagctgggaagcatacttaggtgctgatgctgttgagaatggtgttgatgtgggcgtttctagttggaaccgtttagcgccaaatacaatgcctactgcagcaaaagcaggtggtaactatttgtcttcacagcttatatctactgaagctgctcgccatggttatgccgaaggtgtagcacttgatgtgaataacatggtaagtgaaggcgcaggtcaaaacttatttttagtacgtaacggtgttatttatactccaccgggcacagcctctattttgcaaggtttaacacgagatgctgttttctacttggctaagcagttaggttatgaagtacgtgaagaatctattgcacgtgaagcactatatcttgctgatgaattctttatgtgtggtacagctactgaagtagtaccggttaaatcggtagatggtttacctgtaggtactggttctcgtggaccaatcactaaagcacttcaagaagccttttttggtatttttgatggcactaccagcgtaccagaaagctggttagatcctgtaaaataa

SEQ ID NO: 105443 - protein, 308 aa, Colwellia psychrerythraea 34H
MAKVNADYIWFNGEIMPWQNATVHVMSHALHYGSSVFEGIRAYETHKGTCIFRLEEHIKRLFDSAKIYRMNIPYTQEEVVQACKDAVVKNDLKSAYLRPLAFLGDIGMGLRPPIDAKADLMIAAFSWEAYLGADAVENGVDVGVSSWNRLAPNTMPTAAKAGGNYLSSQLISTEAARHGYAEGVALDVNNMVSEGAGQNLFLVRNGVIYTPPGTASILQGLTRDAVFYLAKQLGYEVREESIAREALYLADEFFMCGTATEVVPVKSVDGLPVGTGSRGPITKALQEAFFGIFDGTTSVPESWLDPVK

SEQ ID NO: 105444 - DNA, 915 bp, Dechloromonas aromatica RCB
  CDS (1)..(915): transl_table=11
atgcaagaccgcgacggctttatctggctcgacggccagtggctgccctggcgcgatgccaaggtgcacgtgctgacccataccctgcattacggctacggctgtttcgagggcatccgtgcttatgaaacaccgcgcgggccggccatcttccggctcgccgagcatctgcgccggctggaggattcggctcacatcctggccattgacctgccttttgaccgcgaaacactggccgccgcctgccgtgaggcggtgacgcgcaacaatttcagcagcgcctacatccggccgctggtctttctcggtgctgaaaaactgggcgtcgatccggccggtgcggcagcgcacgtcatggtcgccgcctggccgtggggcgcctacctcggcggcaaggcgatcgaggagggcatccgcgtccgcgtgtcgtcctatgcccggcaccatcccaacgtgcagatgtgccgcgccaaggcgatttcgacctattcgaactccatcctcgccgtgcgcgaggcgcgccgcgacggttacgacgaagcgctgcttctcgataccgatggctatgtttccgaaggctccagcgaaaacctgttcatcgtccgcgatggtgaattgctgcagccggacagtgcttcggcgctcgacggcatcacccgtcgtacggtctgcacgctggccgcggaggccggcctggtggtgcgcagcaagcgcctgacccgcgacgaggtggtttgcgccgatgaggtcttcctgaccggcacggcggccgagatcacgcccgtgatcgaagtcgatgcccggcgcatcggtacgggtcgccccgggctgctgacccggcgtctgcagaaggcctatttcgcctgcgtccgtggcgaagacgccgcccatggcgattggctgacaatggcatga

SEQ ID NO: 105445 - protein, 304 aa, Dechloromonas aromatica RCB
MQDRDGFIWLDGQWLPWRDAKVHVLTHTLHYGYGCFEGIRAYETPRGPAIFRLAEHLRRLEDSAHILAIDLPFDRETLAAACREAVTRNNFSSAYIRPLVFLGAEKLGVDPAGAAAHVMVAAWPWGAYLGGKAIEEGIRVRVSSYARHHPNVQMCRAKAISTYSNSILAVREARRDGYDEALLLDTDGYVSEGSSENLFIVRDGELLQPDSASALDGITRRTVCTLAAEAGLVVRSKRLTRDEVVCADEVFLTGTAAEITPVIEVDARRIGTGRPGLLTRRLQKAYFACVRGEDAAHGDWLTMA

SEQ ID NO: 105446 - DNA, 924 bp, Thiobacillus denitrificans ATCC 25259
  CDS (1)..(924): transl_table=11
atgtccatggccgaccgcgacggcgtcatatggtacgacggcaaactcgtaccatggcgcgacgctaccacccacgtcctcacccataccctgcactacggcatgggtgtcttcgagggcgtgcgcgcctacaaggccgaacagggcacggcgatcttccgcctggacgagcacaccaagcgcctcttcaactcggcgcatatcctcggcatgaaactgcctttcgacgcggcgacgctttcggaagcgcagcgcatggtcgtgcgcgagaacaagctcgagtcgggctacctgcggccgatggcgttcttcggctcggaggcgatgggcatttcggcgaagaatctttcggtgcacgtgatcgtcgccgcctggccctggggcacctacctcggcaaggaggctctcgaaaacggaatccgcgtgaagacgagctcgttcacgcgtcaccactccaacgtgacgatgtgcaaggccaaggccaacggcaactacatgaactcgatcctcgcgcacaaggaagccgagatggacggctacgacgaggcgctgctgctcgacgtcgacggcttcgtctccgaaggctccggcgagaacatcttcatcgtgcgcgacggcaagctctatacgcccgacccgagctccgcgctcgtcggcctcacgcgtgacacgatcatccagctcgccgaggaaatcggcctcacggtgatcgaaaagcgcatcacgcgcgacgaggtctatatcgcggacgaggcgttcttcaccggcacggctgccgaagtcacgccgatccgcgagctggacaaccgcacgatcggttccggtagccggggcccggtcacggaacgcctgcaatcgatgtacttcgattgcgtgcacggccgcgcagccaatcacctcgactggctcacgccggtagcgtag

SEQ ID NO: 105447 - protein, 307 aa, Thiobacillus denitrificans ATCC 25259
MSMADRDGVIWYDGKLVPWRDATTHVLTHTLHYGMGVFEGVRAYKAEQGTAIFRLDEHTKRLFNSAHILGMKLPFDAATLSEAQRMVVRENKLESGYLRPMAFFGSEAMGISAKNLSVHVIVAAWPWGTYLGKEALENGIRVKTSSFTRHHSNVTMCKAKANGNYMNSILAHKEAEMDGYDEALLLDVDGFVSEGSGENIFIVRDGKLYTPDPSSALVGLTRDTIIQLAEEIGLTVIEKRITRDEVYIADEAFFTGTAAEVTPIRELDNRTIGSGSRGPVTERLQSMYFDCVHGRAANHLDWLTPVA

SEQ ID NO: 105448 - DNA, 924 bp, Desulfovibrio desulfuricans G20
  CDS (1)..(924): transl_table=11
atggtccagaaatcggaaacgatctggtttgacggcaagcaggttgcatgggacgatgccaatgtgcacgttttgacccacaccctgcattacggtctgggcgtgttcgagggaatccgcgcctataagtgtgttgacggcacttccgccgtgttccgcctgcgcgaacatgtcgaacgcctgtttgcttcggcccgcattctgcgcatggaaattccctataccgtcgaccagcttgtggatgccgtggtggaaacgctgcagcgcaacaaactggacgaaggctatatccgccccttgagctttgtgggcgcgggtgccatgggtgtgaaccccggcagcaaccccatacagaccatcattgccacgtggccctggggcgcgtatctgggtgaagaggcgctggaagcgggcatccgcgtaaaaaccagttccttccagcgtcatcatgtaaacgccatgatgaccaaggcaaaggccgtgggcaactatgtaaactccattctggccaaaacagaagctcttgcagacggttacgacgaagggctgatgctggataccgcgggatttgtttctgaagccaccggcgaaaacattttcatcgtgcgcggcggcgtcattaaaacaacgccccttacgtccatactggacggtatcacccgcaacagcctgatgacgctggccggtgatctgggctacaccgtggtggaacagcagttcacccgcgatgagctgtatgtggccgatgaagcctttttctgcggcactgcggcggaggtcactcccatacgtgaagtggaccgccgcgttatcggcgccggcaaggccggaccggtcaccaagcatctgcagaccgagtacttcaagcttgtaaagggtgaaaatcccaagtacgcacactggctgcatcagtattcactgtag

SEQ ID NO: 105449 - protein, 307 aa, Desulfovibrio desulfuricans G20
MVQKSETIWFDGKQVAWDDANVHVLTHTLHYGLGVFEGIRAYKCVDGTSAVFRLREHVERLFASARILRMEIPYTVDQLVDAVVETLQRNKLDEGYIRPLSFVGAGAMGVNPGSNPIQTIIATWPWGAYLGEEALEAGIRVKTSSFQRHHVNAMMTKAKAVGNYVNSILAKTEALADGYDEGLMLDTAGFVSEATGENIFIVRGGVIKTTPLTSILDGITRNSLMTLAGDLGYTVVEQQFTRDELYVADEAFFCGTAAEVTPIREVDRRVIGAGKAGPVTKHLQTEYFKLVKGENPKYAHWLHQYSL

SEQ ID NO: 105450 - DNA, 912 bp, Rhodospirillum rubrum ATCC 11170
  CDS (1)..(912): transl_table=11
atggctctcgttccgttcgatgaccgtgacggtttcatctggttcaacggtcaaatggtgccctggcgcgaggccaaggttcatgtgctgacgcatggcctgcattatgcgagctgcgtgtttgaaggcgagcgcgtctataacggcaaggtgttcaagctgaccgagcattcgcgccgactgaccgaatcggcgtcgattctggggttttccctgccctattcggtggccgaaatcgatgcggcgacccgccgggtgcttgacgccaacggcatcgtcgacggctatgtccgcccgctggcctggcgtggcagcgagatgatgggggtggcggcccagaagaaccgcatcaatgtcgccatcgccgcctggcagtggcccagctatttttcgcccgaagcccggctggccggcatccgcctgaagatctcgccgtggcggcgtccggcccccgacacggcgccgacccattccaaggccgccggtctttatatgatctgcaccctgtccaagcatcaggccgagaacgatggcttcgacgacgccctgatgctcgattaccggggccgcatcgccgaggcgacgggagccaatgtctttctggtgatcgacggcaagctgcatacgcccattcccgactgcttcctgaacggcatcacccgccagaccgtgatcgatctggcccgacgccgcggctatgacgtgagcgagcgggcgatcatgcccgaggaactggccgacgcccaggaagtgttcctgaccgggaccgcggccgaggtgacgccggtccgccagatcggagaatacacctatactccgggcgaaatcacccaccggttggtcgaggattacgataaggaagtcgggcggacccacgacaaggcggcctccgcctccgcttcggcggcctga

SEQ ID NO: 105451 - protein, 303 aa, Rhodospirillum rubrum ATCC 11170
MALVPFDDRDGFIWFNGQMVPWREAKVHVLTHGLHYASCVFEGERVYNGKVFKLTEHSRRLTESASILGFSLPYSVAEIDAATRRVLDANGIVDGYVRPLAWRGSEMMGVAAQKNRINVAIAAWQWPSYFSPEARLAGIRLKISPWRRPAPDTAPTHSKAAGLYMICTLSKHQAENDGFDDALMLDYRGRIAEATGANVFLVIDGKLHTPIPDCFLNGITRQTVIDLARRRGYDVSERAIMPEELADAQEVFLTGTAAEVTPVRQIGEYTYTPGEITHRLVEDYDKEVGRTHDKAASASASAA

SEQ ID NO: 105452 - DNA, 879 bp, Moorella thermoacetica ATCC 39073
  CDS (1)..(879): transl_table=11
gtggggctgattatctatcttgacggagagtatgtagatgaagaagaggcaaagttatcagtatttgatcatggcgtactatatggcgacggcgtctttgaagggatccgcgcctacgatggccgggtttttcgtttaaaggaacatattgaccgcctgtatgattccgcccggcatatcaatctggatcccggactgagcaaagaggaaatgacccgggtggtactggagacctgccggcgtaataatttacgggatgcctatatacgcctggtagttacccggggtaagggcgacctgggcctggatccccgcaaatgcccccggccgtccatcttttgtatcgcggcggccattgaactctacccggcggaattatatgaaaaaggtctggaactggtcaccctgggtacgcgccgtaattcccctgatgccctggacccgcggattaagtctctgaactacttgaataacatcatcgccaaaatggaggctacccgggccggagctccggaagggcttttcctgaataaagaaggttatgtggccgaagccaccggcgataacatcttcatcgtaaagaacgggcagttaatcaccccaccgccctttgtgggccttctggaaggcattacccgtaacgctgttatggagctggcggccaaagccggcataccggtttacgagaaggtctttacccgccatgatgtctatgtggctgacgagtgtttcctcacgggcacggccgcggaagctattccggtagtcaaggtggacggtcggcccatcggtaacggccagccgggccccataaccagggatctcattgcccggtaccgtgagttaactaaaaccgacggtccgaaaatctttgcctga

SEQ ID NO: 105453 - protein, 292 aa, Moorella thermoacetica ATCC 39073
MGLIIYLDGEYVDEEEAKLSVFDHGVLYGDGVFEGIRAYDGRVFRLKEHIDRLYDSARHINLDPGLSKEEMTRVVLETCRRNNLRDAYIRLVVTRGKGDLGLDPRKCPRPSIFCIAAAIELYPAELYEKGLELVTLGTRRNSPDALDPRIKSLNYLNNIIAKMEATRAGAPEGLFLNKEGYVAEATGDNIFIVKNGQLITPPPFVGLLEGITRNAVMELAAKAGIPVYEKVFTRHDVYVADECFLTGTAAEAIPVVKVDGRPIGNGQPGPITRDLIARYRELTKTDGPKIFA

SEQ ID NO: 105454 - DNA, 945 bp, Burkholderia thailandensis E264
  CDS (1)..(945): transl_table=11
atgaaagcgagctacgtgtggaagaacggcgaactggtgccgtgggagcgcgcacaggtgcatgtgatgagccatgcgctgcattacgggacgagcgtgttcgagggcgtgcgtgcgtacgagatcggcgagaaggcggcgatcctgtgcggccgcgagcacttcgagcgcctgctgttcagctgcaaggtcgcgcggattccgtcgccgatgagcgtcgggcagtggatggaagcgacggtcgagacgctgcgcgcgaacggccagcgcagcgcgtacatccggccgctcgtctatcgcggcgcgggcgaatcgctcgggctcgacgcgcgccaatgcccggccgaggcgctgctcatcaccacgccatggggcgcgtatctcggcgacgaggcgctgcagcagggcgtcgacgtgcaggtcagcagctggcgccgcaacggcggcggggcggcgagcacgctcgcgaagatcggcggccagtacgtgaacggccaggcgatcgtgatggaggcgcatgagaacgggatgagcgaaggcatcgcgctcgatgcgaacggtttcgtcagcgaaggcagcggcgaaaacgtgtttctcgtctacaagaacgagatcttcacgccgtcgatcggcagcagcatcctgagcggcatcacgcgcaactgcgtgattcggatcgcgcgcgacctcggctacaccgtcaccgaaacgagcattccgcgcgaaatgctctatctcgccgacgaaatcttcttcacgggcacggcggtcgagatctgcccggtgcgctcggtcgatcggatgccggtcggcagcggcaagcgcggcgccgtgacgaaggcgatccaggatcagtacttcggcatcgtgcgcggcacgcacgcggacaaatggaactggctcacgcccgtgccggtgccgtcgcgcgacggagcacgggcatga

SEQ ID NO: 105455 - protein, 314 aa, Burkholderia thailandensis E264
MKASYVWKNGELVPWERAQVHVMSHALHYGTSVFEGVRAYEIGEKAAILCGREHFERLLFSCKVARIPSPMSVGQWMEATVETLRANGQRSAYIRPLVYRGAGESLGLDARQCPAEALLITTPWGAYLGDEALQQGVDVQVSSWRRNGGGAASTLAKIGGQYVNGQAIVMEAHENGMSEGIALDANGFVSEGSGENVFLVYKNEIFTPSIGSSILSGITRNCVIRIARDLGYTVTETSIPREMLYLADEIFFTGTAVEICPVRSVDRMPVGSGKRGAVTKAIQDQYFGIVRGTHADKWNWLTPVPVPSRDGARA

SEQ ID NO: 105456 - DNA, 927 bp, Frankia sp. CcI3
  CDS (1)..(927): transl_table=11
gtgcctatcaccccaacctcgaagatctggatgagtggagagttcgtcgactgggacgacgcccgcatccacgtgctcaacccgaccctgcactacgggtggggtgtgttcgaaggcatccgctgctacgagacggcccaggggcccgccgtgttccggctgacggaccacatcgcccgtctctaccgcagtgccaagatttatgtgatggagccgtccttcacgccggagcaggtcgtcgcggcgacgaaggagaccatcgcggtgaacgacatcgcctcctgctacatccggccgctgatccacctcggttacggtgagatggggctcaatccgttgccctctcctgtcgaggtcatgatcgcggtgtggccgtggggtgcctaccttggcgaggaggcggaggagaacggcgtccgcgcgatgatctcctcctggaagcggaacgacccgaacatcacgccgccggcggccaaggcgtccgggcagtacctcaactcgtccctggcgaaggtcgcggcggtcaaggccggttacgacgaggcaattctgaccagccccaacggccacatcgccgacggcaccggggaaaacgtcttcatcgtctccggacgcaaggtcatcactccgctcctcacggacggtccgctcggtggcatcacccgcgcctcgatcatgaggatcgccgccgaccaggggtacgaggtgatcgagcagcacatcgtgcgcaccgacctctatctggctgacgaggcgttcttcaccggcacggcggccgagatcgtgccgatcgtcgaggtggacgaccggcaggtcgggagcgggaagccgggccccgtcacccgggagctgctggagatcttccaccgcgcgacccgaggggaactggaccgataccaggagtggaacgagttcgtccagcaataa

SEQ ID NO: 105457 - protein, 308 aa, Frankia sp. CcI3
MPITPTSKIWMSGEFVDWDDARIHVLNPTLHYGWGVFEGIRCYETAQGPAVFRLTDHIARLYRSAKIYVMEPSFTPEQVVAATKETIAVNDIASCYIRPLIHLGYGEMGLNPLPSPVEVMIAVWPWGAYLGEEAEENGVRAMISSWKRNDPNITPPAAKASGQYLNSSLAKVAAVKAGYDEAILTSPNGHIADGTGENVFIVSGRKVITPLLTDGPLGGITRASIMRIAADQGYEVIEQHIVRTDLYLADEAFFTGTAAEIVPIVEVDDRQVGSGKPGPVTRELLEIFHRATRGELDRYQEWNEFVQQ

SEQ ID NO: 105458 - DNA, 930 bp, Saccharophagus degradans 2-40
  CDS (1)..(930): transl_table=11
atgtctttcgcagatcgcgatggagttatttggtttgacggtgaattagtaccttggcgcgatgctaaagtgcatgtacttacccacacattgcattacggcatgggcgtattcgaaggcgtacgcgcatacgaaacgcaaaatgacggcacctgcatttttaaactacaagagcacaccaatcgcctattccgctccgcgcatattatgaatatgcccgtaagctggaccaaagagcaattaaacgaagcccacaagcttgttgtgcgcgaaaacaaccttcacgaagcttacttgcgcccaatgattttttacggatctgaagggatgggtttgcgtgccgacaacttaaaaacacacgttattgttgccgcgtggaactggccatcgtacatgtcgccagaagccaaagaagtaggcattaaagtgcgcacctcaagctacacccgccaccatgtaaacatctccatgtgtaaagccaaagccaatggtcactacatcaactctatgcttgccctaaaagaagcattagattgcggttgtgaagaagctttgctactcgatacagaaggctacgtagcggaaggcagcggcgagaatatttttatcgtgcgcgacggcgtaatctacacgccagagctaaccagctgcttagatggtattacccgtgccaccatctttcaactagcagccgattgcggctacaccattaaagaaaaacgcatcacccgcgacgaagtgtacgtagccgatgaagccttctttaccggtaccgccgcagaagtattacctattcgcatgctagatggccgcaacattggcgaaggcaagcgcggccctattaccgagcgtttacaatctttgtatttcgatgcggtaaaaggtcgactagacaaccaccacgattggcttgcgcccatcgcgaagtaa

SEQ ID NO: 105459 - protein, 309 aa, Saccharophagus degradans 2-40
MSFADRDGVIWFDGELVPWRDAKVHVLTHTLHYGMGVFEGVRAYETQNDGTCIFKLQEHTNRLFRSAHIMNMPVSWTKEQLNEAHKLVVRENNLHEAYLRPMIFYGSEGMGLRADNLKTHVIVAAWNWPSYMSPEAKEVGIKVRTSSYTRHHVNISMCKAKANGHYINSMLALKEALDCGCEEALLLDTEGYVAEGSGENIFIVRDGVIYTPELTSCLDGITRATIFQLAADCGYTIKEKRITRDEVYVADEAFFTGTAAEVLPIRMLDGRNIGEGKRGPITERLQSLYFDAVKGRLDNHHDWLAPIAK

SEQ ID NO: 105460 - DNA, 921 bp, Methylobacillus flagellatus KT
  CDS (1)..(921): transl_table=11
atgtcgatggccgaccgcgatggtctgatttggtatgacggaaaaatggtgccgtggcgtgatgccactacacatgtattgacccatacactgcactacggcatgggtgttttcgaaggtgttcgcgcctataaaacggacaagggcactgcgattttccgcctgcaggatcacaccgaccgtctattccgatcagctcatatcctgggcatgaaactgccatatgacaaagccactctactggaagcgcagaaagctgccatccgcgagaacaatctcgagtcgggctatatgcgccccatggcgttctatggcgccgaagccatgggcatttccgccaagacgctttccacccatgtgatcgtggcggcatggaaatggggtgcctatatgggagatgatgcgatcaagcatggtatccgtgtcaagacctcctcctttgcccggcaccatgtcaatatccatatgtgcaaggcaaaagccaacggcaactacatgaactctatcctggcccaccaggaagccgttcaggatggctatgacgaagccctgctgctggatgtcgatggtttcgtcgccgaaggctcgggtgaaaacatcttcatcatccgcaacaacaagatctacacgccagaccttaccagtgcgctcgaaggcattacccgcgacaccgtcgtccagcttgctacggaattcggctaccagatcatcgaaaaacgcattacccgtgatgaggtctattccgcagacgaggcattcttcacaggcaccgccgccgaagtcaccccgatccgcgaactggacaatcgcgccattggcaccgggacacgcggccccatcacggaaaagctgcaatccaagtatttcgacgtggtgcatggccgctctcccgagcatatcgactggctgacactggtataa

SEQ ID NO: 105461 - protein, 306 aa, Methylobacillus flagellatus KT
MSMADRDGLIWYDGKMVPWRDATTHVLTHTLHYGMGVFEGVRAYKTDKGTAIFRLQDHTDRLFRSAHILGMKLPYDKATLLEAQKAAIRENNLESGYMRPMAFYGAEAMGISAKTLSTHVIVAAWKWGAYMGDDAIKHGIRVKTSSFARHHVNIHMCKAKANGNYMNSILAHQEAVQDGYDEALLLDVDGFVAEGSGENIFIIRNNKIYTPDLTSALEGITRDTVVQLATEFGYQIIEKRITRDEVYSADEAFFTGTAAEVTPIRELDNRAIGTGTRGPITEKLQSKYFDVVHGRSPEHIDWLTLV

SEQ ID NO: 105462 - DNA, 921 bp, Ralstonia metallidurans CH34
  CDS (1)..(921): transl_table=11
atgtcgatggcagatcgcgacggcaagatctggatggatggcaagctgattgagtggcgtgacgcaaagattcacgtactcacgcacacgctgcattacggcatgggtgtatttgaaggcgtgcgcgcctacaagacgccggaaggcaccgcgattttccgcctcaaggagcacacgcgccgcctgttcaactctgccaagatcttccagatggccatgccgttcgacgaggccacgctcgaagccgcccagcgcgaagttgtgcgcgccaacaaccttgagtcgtgctatatccgtccgctggtgtggatcggctccgaaaagctcggtgtgtcggccaagggcaacacgattcacgtggcgatcgccgcctggccctggggcgcgtatctgggcgaggaaggcctggaacgtggcatccgcgtgaagacctcgtcgttcacgcgccatcacgtgaatgtgtcgctggtgcgcgccaaggcatcgggctactacatcaactcgatcctggccaaccaggaagccaccggcctgggctacgacgaagccctgctgctggataccgaaggctacgtgagcgaaggctctggcgagaatgtgttcatcgtgcgcaacggcgtgatctacacgccggacctggcctcgtgcctggacggcatcacgcgcgacgccacgctgacaatcgcccgtgacctcggcatcgaggtgcgcgagaaacgcatcacgcgtgacgagatgtactgcgctgacgaagcgttcttcaccggcaccgccgccgaagtgacgccgatccgcgagctggacgaccgtgtcatcggcgaaggccgccgcggccccgttaccaagcgcatccaggacgcgttcttcgcggccgtgggtggcaccgacgaaaagtacaagaagtggctgacgctggtctga

SEQ ID NO: 105463 - protein, 306 aa, Ralstonia metallidurans CH34
MSMADRDGKIWMDGKLIEWRDAKIHVLTHTLHYGMGVFEGVRAYKTPEGTAIFRLKEHTRRLFNSAKIFQMAMPFDEATLEAAQREVVRANNLESCYIRPLVWIGSEKLGVSAKGNTIHVAIAAWPWGAYLGEEGLERGIRVKTSSFTRHHVNVSLVRAKASGYYINSILANQEATGLGYDEALLLDTEGYVSEGSGENVFIVRNGVIYTPDLASCLDGITRDATLTIARDLGIEVREKRITRDEMYCADEAFFTGTAAEVTPIRELDDRVIGEGRRGPVTKRIQDAFFAAVGGTDEKYKKWLTLV

SEQ ID NO: 105464 - DNA, 939 bp, Acidobacteria bacterium Ellin345
  CDS (1)..(939): transl_table=11
atggccatccctgttaccgagctcatctggcacaacggcaaaatgatcaagtgggacgacgccaagatccacgtgctctcccacgtcgtgaactacgggtcctcgctgtttgagggcatccgctgctacgagaccaagagtggtccggcgatcttccgcctcaaagagcacatgcagcggctgttgaactcgtcgaagatctatcgtattgatgtgccgttctccgtggacgagctctgtaacgccgccgtcgaactggtcggcgcgaacaaggtgtcgccgtgctacatccgccccatcgtgctgcgcggatacggcgagttgggcgtgaacccgatcggctgcccgaccgaggtctacatggcgaattacgcctggggcaagtacctcgggcacggcgggccggacgatggcgtagatgtttgcgtatcgtcgtggacgcgctttgcgccgaacacgcttccggcattggccaaagccggtgcgaactacatgaactcgcagctgatcaagatggaagccatcctgaacggctacagcgagggcatcgcgctcgacgcgaacggttatgtgagcgaaggttccggcgagaacctgttcatcgttcgcgatggaaagatcatcacgccgccactcggcaactcggtgctgccgggcatcacgcgcgactcggtgatccagattgccgacagcctcggcatcgaagtgaaagagcagatcattccccgcgaaatgctgtacgtggccgacgaagtgtttttcaccggcaccgcggcggaagtcacgccgattgcgtcggtggacaagatccaagtcggtacgggcaaagcgggagcaatcacgaagaccatccgcaaggagttcttcgccctcatccacggcgaggtagaagaccgcttcggctggttgaccccggtgaagcagccagtcggcgcgtag

SEQ ID NO: 105465 - protein, 312 aa, Acidobacteria bacterium Ellin345
MAIPVTELIWHNGKMIKWDDAKIHVLSHVVNYGSSLFEGIRCYETKSGPAIFRLKEHMQRLLNSSKIYRIDVPFSVDELCNAAVELVGANKVSPCYIRPIVLRGYGELGVNPIGCPTEVYMANYAWGKYLGHGGPDDGVDVCVSSWTRFAPNTLPALAKAGANYMNSQLIKMEAILNGYSEGIALDANGYVSEGSGENLFIVRDGKIITPPLGNSVLPGITRDSVIQIADSLGIEVKEQIIPREMLYVADEVFFTGTAAEVTPIASVDKIQVGTGKAGAITKTIRKEFFALIHGEVEDRFGWLTPVKQPVGA

SEQ ID NO: 105466 - DNA, 948 bp, Myxococcus xanthus DK 1622
  CDS (1)..(948): transl_table=11
atgagctcgacctcgagtagtggagtgcgcgccgagcaaatctggctcgacggccgactgatgaaatgggacgagggccacgtgcatctgatgacgcacgcgcttcactacggcctgggtgtcttcgagggcatccgcgcatacaaaacgcatgacggacggctggccgtcttccggctgcgtgagcacgtccgccggctgctcgactcggcccacatcatcatgctgaagattccgtacaccgaggacgagctcttcgacgcgtgcgtgaatctgctccgcgcgcagaaggacctgttcgccaacggcgcgtacctgcggccggtggccttcatgggcgacggcgccatgggcctgggcgcggtgaaccccacccgcacggccgtgacggcctgggactggggcgcgtacctgggcgacaagggcatcaaggaaggtatccgcgccaaggtcagctcgtacacgcgcatgcacgtcaacgtgaacatggtgcgcgggaagattaccggccagtacgtcaactccatcctcgccaagcgcgaggcggtgctggcgggctacgacgaggccatcctcctggacatcagcggcttcgtggccgaggcctccggcgagaacatcttccaggtgaacaagaagggcatcatcaagacgcccccgctgtccggccccatcctggacggcatcacccgcgacacggtgctgcacatcctgcgcgacagcggccgcacggtggaggaggtcaccttcacccgcgacgcgctctacatcaccaacgagatcttcctctgcggcacggcggcggagatcacccccgtgcgcgaggtggacaaccgccaggtggctgacggcaagcccggccccatcacccggtacgtgcaggacatgtacttccgcatcgtgcgcggccaggagccgcgctacgcggattggctcacgtacatctga

SEQ ID NO: 105467 - protein, 315 aa, Myxococcus xanthus DK 1622
MSSTSSSGVRAEQIWLDGRLMKWDEGHVHLMTHALHYGLGVFEGIRAYKTHDGRLAVFRLREHVRRLLDSAHIIMLKIPYTEDELFDACVNLLRAQKDLFANGAYLRPVAFMGDGAMGLGAVNPTRTAVTAWDWGAYLGDKGIKEGIRAKVSSYTRMHVNVNMVRGKITGQYVNSILAKREAVLAGYDEAILLDISGFVAEASGENIFQVNKKGIIKTPPLSGPILDGITRDTVLHILRDSGRTVEEVTFTRDALYITNEIFLCGTAAEITPVREVDNRQVADGKPGPITRYVQDMYFRIVRGQEPRYADWLTYI

SEQ ID NO: 105468 - DNA, 921 bp, Rhodococcus sp. RHA1
  CDS (1)..(921): transl_table=11
atggaactgatcccgaccagcaccgtctggatggacggtgaattcgttgcctgggaccaggcccaggtccatgtgctgacaccgagtctgcactacggatggggtgtttacgagggcatccgggcctacgcgaccgaccgcggtccggccgtgttccggctgcgcgaccacctgcgacggctgcacgactcggcacgggtgtacctgatggaccccgggtggtcggtggacgagctcaccgagatctcgctcgaactgctgcgccggacgggcctggactccggctacctgcgaccgatcgtctacctcggctacggctcgatgggtgtcgcgcccgcgctggacactgcccgggtggccatcgcggcgtggccgtggggttcgtacctcggcgaaaccgcggaccaggaaggctgccgactcgtcgtcagcagctggcaacgcaacggtgtccactcggtcccgccgctcgccaaagcgacgggagcctatgtcaattcggctctggccaaggtcggggcgctgcgcgccggttacgacgacgcgctgatgctcacctctaccgggcacgtggccgaagcgtccgccgcgaacatcttcgccgtccgcgacggtgagctggtcaccccgccggtcggcgacaacatcctgcccggtctcacccgtgacaccgtgatcacgctcgcccgcgacctggggatcacggtgagggaacagagcgtgacccgcagcgagctctacgtcgccgacgaggcgtttctcaccggcacggccgccgaggtggtcccggtggcgtcggtcgacgaccgaccggtggcggcaggcgggtgcggcccgatcaccaagcaactgcgcgacgtcttccacgacgtggtccgcgggcgtgagcccacctaccggcactggctggagttcgcatga

SEQ ID NO: 105469 - protein, 306 aa, Rhodococcus sp. RHA1
MELIPTSTVWMDGEFVAWDQAQVHVLTPSLHYGWGVYEGIRAYATDRGPAVFRLRDHLRRLHDSARVYLMDPGWSVDELTEISLELLRRTGLDSGYLRPIVYLGYGSMGVAPALDTARVAIAAWPWGSYLGETADQEGCRLVVSSWQRNGVHSVPPLAKATGAYVNSALAKVGALRAGYDDALMLTSTGHVAEASAANIFAVRDGELVTPPVGDNILPGLTRDTVITLARDLGITVREQSVTRSELYVADEAFLTGTAAEVVPVASVDDRPVAAGGCGPITKQLRDVFHDVVRGREPTYRHWLEFA

SEQ ID NO: 105470 - DNA, 921 bp, Alkalilimnicola ehrlichei MLHE-1
  CDS (1)..(921): transl_table=11
atgagtatggacgaccgcgacggcgtcatctggctggacggccaactcgtcccctggcgcgatgcgcgcatccacgtgctcacccacaccctgcattacggcatgggggtcttcgagggcatccgcgcttacaacaccgagcgcggcaccgccatcttccgcctgccggagcacacccggcgctttttcggctccgcgcgcatcctgcagatggacatcggctacgaccaggacaccatcaaccaggcgatcgtccagtgcgtgcgcgaaaacaacctgcagagtgcctacatccggccgatgagcttctacggctccgagggcatgggcctgcacgccgacaacctcaaggtacacaccatgatcgccgcctgggagtggggggcctacctgggggcggagaacatggaacggggcatccgtatcaagaccagctccttcacccgccaccacgtcaacgtgaccatgtgccgggccaaggccaacggcaactacatgaactcgatgatggcgctgcaggaggccacccgcgacggctacgacgaggccctgctgctggacgtggacggctttgtctgcgagggctcgggtgagaacttcttcatggtgcgcgacggcgtgctctacacccccgagctgacctcctgcctggagggcatcacccgcgacaccgtgatcaccctggccggggagatgggcatcccggtgaaggaaaagcgcatcacccgcgacgaggcctatctggcggacgaggccttcttcaccggcacggctgcggaggtcacgccgatccgcgagctggacaaccgcaccatcggcgagggctgccgcggccccatcaccggaaagctccagcaggcctacttcgatgccgtggaggggcgcagccccggtcacgagggttggctgaccttcgtctaa

SEQ ID NO: 105471 - protein, 306 aa, Alkalilimnicola ehrlichei MLHE-1
MSMDDRDGVIWLDGQLVPWRDARIHVLTHTLHYGMGVFEGIRAYNTERGTAIFRLPEHTRRFFGSARILQMDIGYDQDTINQAIVQCVRENNLQSAYIRPMSFYGSEGMGLHADNLKVHTMIAAWEWGAYLGAENMERGIRIKTSSFTRHHVNVTMCRAKANGNYMNSMMALQEATRDGYDEALLLDVDGFVCEGSGENFFMVRDGVLYTPELTSCLEGITRDTVITLAGEMGIPVKEKRITRDEAYLADEAFFTGTAAEVTPIRELDNRTIGEGCRGPITGKLQQAYFDAVEGRSPGHEGWLTFV

SEQ ID NO: 105472 - DNA, 939 bp, Solibacter usitatus Ellin6076
  CDS (1)..(939): transl_table=11
atgttgacgcccactgaaaagatctggcataacggccgcctcattgcatggcaggaggcgaccattcacgtactgtcgcatgtagtgagttacggcagcagcgtattcgagggcattcggtgttattcgacgccgagcggaccggcggtattccggctgcgcgagcatgtgcgccggatgacggattcggccaagatttaccggatggacaacctcggtttcagcgccgcggaactcgcggacgcgatgctggaagtggtgcgggtgaacaaaatggatgcctgttacatccggccgatcgtgatgcgcggatatggcgatatcggggtgaacggcatgaagaacccgatcgatgtgtacatcgcatgctggagctggggcaagtatctgggcgaggaagcgctggcggaaggcgtggatgtttgcgtttccagctggaaccggatggcgccgaacacgctgcctgcgctggccaaggcgggcgcgaattacatgaattcgcagctcatgaagatggaggcgatcaccaacgggtatgcggaagggatcgcgctggatgtgacgggctacgtgagcgaaggctcgggcgagaacatcttcctggtacgcgatggcaagatccacactccgccgctgggggcgagcgtgttgccgggaatcacgcgcgacgccatcctgacgctggcgcgggacgcgggaatcccggttgtagagacgatcattccgcgggaactgctgtacatcgccgacgaagtattcttcagcgggacggcggctgagatcacgccgatccggtcgatcgaccggatcacgatcggcaacggacggcgcggacccatcgcggagcagttgcagaaggaattcttcggagtgatcaacggcactaagaaggatacgtacggctggctctcgcacgtacacgccgctgctaacgcgtaa

SEQ ID NO: 105473 - protein, 312 aa, Solibacter usitatus Ellin6076
MLTPTEKIWHNGRLIAWQEATIHVLSHVVSYGSSVFEGIRCYSTPSGPAVFRLREHVRRMTDSAKIYRMDNLGFSAAELADAMLEVVRVNKMDACYIRPIVMRGYGDIGVNGMKNPIDVYIACWSWGKYLGEEALAEGVDVCVSSWNRMAPNTLPALAKAGANYMNSQLMKMEAITNGYAEGIALDVTGYVSEGSGENIFLVRDGKIHTPPLGASVLPGITRDAILTLARDAGIPVVETIIPRELLYIADEVFFSGTAAEITPIRSIDRITIGNGRRGPIAEQLQKEFFGVINGTKKDTYGWLSHVHAAANA

SEQ ID NO: 105474 - DNA, 918 bp, Magnetococcus sp. MC-1
  CDS (1)..(918): transl_table=11
atgtgggacaaagacggaaaaatttggatggatggtcaatttgtggattggcgggatgccaagatccacgtcttgacccacaccctgcactacggcatgggtgtctttgaagggatccgctgctatgaggccgatcaaggccctgctatcttccgtcttggcgaacatgtagagcgtctctttaaatctgccctgatcctgggcatggagatgccctatagccgtgatgtcatcagccaagtgtgccaggatgtcatcaagctcaatggtcttaaatctggctatatccgccccttgatgtactatggtgcggagtccatgggcatcaatcctgcccctctaaaaacccacggcatggttgccgcttgggcttggggtgcctacctgggtgaagagggcatggagaaggggattcgcatcaaaacctcctcctacacccgtcaccaccccaacgtggtgatgacccgcgctaaagcggtggggaactatcccaattctatcttggctaaatccgaggcgctgcgctgcggctatgacgaagcgttgttgctggacaccgaagggtacgtggccgaaggctctggggagaacctattcttggtgcagggccagacgttaaagacccctcccctggattctgccctcaacggtattacccgtaacacggtgatgaccattgccgcagaaatgggcttaaaagtggttgagcagcgctttccacgggatgaggtgttggtctctgacgaagcctttttcaccggtacagcggctgaagtgacccccattcgcgagttggatgatcgtcaaattggccctggccacgcaggccctgtcaccaaagaggtacaaaagcgtttctttgacatcgtacatgggcgtgatcctaaacatatgggttggttgactccggttatctaa

SEQ ID NO: 105475 - protein, 305 aa, Magnetococcus sp. MC-1
MWDKDGKIWMDGQFVDWRDAKIHVLTHTLHYGMGVFEGIRCYEADQGPAIFRLGEHVERLFKSALILGMEMPYSRDVISQVCQDVIKLNGLKSGYIRPLMYYGAESMGINPAPLKTHGMVAAWAWGAYLGEEGMEKGIRIKTSSYTRHHPNVVMTRAKAVGNYPNSILAKSEALRCGYDEALLLDTEGYVAEGSGENLFLVQGQTLKTPPLDSALNGITRNTVMTIAAEMGLKVVEQRFPRDEVLVSDEAFFTGTAAEVTPIRELDDRQIGPGHAGPVTKEVQKRFFDIVHGRDPKHMGWLTPVI

SEQ ID NO: 105476 - DNA, 921 bp, Azoarcus sp. BH72
  CDS (1)..(921): transl_table=11
atgagcatggaagaccgcgacggctggatctggatggacgggcaatggctaccctggcgcgatgccaaagtgcacgcgctgacccacacgctgcactacgggctgggctgtttcgaaggcatccgcgcctaccccaccgcccacggcccggccgtgttccggctggacgatcacatcgagcgcctgttcgattcggcgcacatcctcgggctggccatgccttgcacgccggcggaagtccgcgcggcctgtctcgaggcggtgcggcgcaacgggctggacggcggctatatccgcccgctggtgtttctgggcgcggaaaaagtgggcgtcgaccccgccggggcggccacccatgtgatggtggcggcgtggcagtggggcgcctacctcggcgcgcaagcgctcgagcgcggtatccgcgtcaaggtcgcgagcttcgcccgccatcatgtgaacgtgcagatgtgccgcgccaagtcggtgtcgacctacaccaactccatcctcgcctgccgcgaggcgcgcgccgaaggctatgacgaggcgctgctgctcgacaccgacggcttcgttgccgaggggccgggcgagaacgtgttcgtggtcaagcgcggcgtgatctacgagccggagatcacctccgcgctggacggcatcacccggcgcacgctgcagaccctggccagcgaggccggctacgagatccgcgcccgccgcatcacccgcgacgagctgtacatcgccgacgaggtgttcttcaccggcaccgcggcggagatcaccccggtggtggaggtggataggcgccgcgtcggcagcggcaggccggggccggtgacgcaggcgctgcagcgccgcttcttcgcctgcgtgcgcggtgaggacccggcccacgccgactggctggcccccgcctag

SEQ ID NO: 105477 - protein, 306 aa, Azoarcus sp. BH72
MSMEDRDGWIWMDGQWLPWRDAKVHALTHTLHYGLGCFEGIRAYPTAHGPAVFRLDDHIERLFDSAHILGLAMPCTPAEVRAACLEAVRRNGLDGGYIRPLVFLGAEKVGVDPAGAATHVMVAAWQWGAYLGAQALERGIRVKVASFARHHVNVQMCRAKSVSTYTNSILACREARAEGYDEALLLDTDGFVAEGPGENVFVVKRGVIYEPEITSALDGITRRTLQTLASEAGYEIRARRITRDELYIADEVFFTGTAAEITPVVEVDRRRVGSGRPGPVTQALQRRFFACVRGEDPAHADWLAPA

SEQ ID NO: 105478 - DNA, 939 bp, Acidovorax sp. JS42
  CDS (1)..(939): transl_table=11
atgagccccgttgttccctccatggccgaccgtgacggcaagatctggatggatggccagatggtggattggcgcgacgccaagatccacgtgctgacccattcgctgcactacggctgcggcgccttcgaaggcgtgcgcgcctacaagacggagcagggcacggccatcttccgcctggaagagcacaccaaccgcctgttcaacagcgccaagatcctgcgcatgacgatccccttcaccaaggacgaggtgaatgaggcacagaaggccgtggtgcgcgaaaaccagctcgaatcctgctacctgcgtcccctgacgtggatcggctcggaaaaactgggcgtctcgcccaagggcaacaagattcacctgatcgtcgccgcctgggcctggggcgcgtacctgggcgaggaaggcatgcaacgcggcatccgcgtcaagaccagcagcttcacgcgccaccacgtcaacatcaccatgacgcaggccaaggcgtcgagcaactacaccaactccatcctggccaacatggaagccaccgacgatggctacgacgaagccctgctgctggacagcgccggcttcgtgtccgaaggctcgggcaagaacgttttcatcatcaaggacggcgtggtgtacacccccgacctgtcggccggcgcgctcaacggcatcacgcgcaacaccgtgttccacatctgcaaggacctggggctggagctggtgcaaaagcgcatcacgcgcgacgaggtgtacattgccgacgaggccttcttcagcggcacggccgccgagatcaccccgatccgcgaactggaccgcgtgcagatcggcagcggcagccgcggcccgctgaccgagaagatccaatcggccttcttcgacatcgtgaacggccgcaatcccaagtacgcccactggctcaccaaggtctga

SEQ ID NO: 105479 - protein, 312 aa, Acidovorax sp. JS42
MSPVVPSMADRDGKIWMDGQMVDWRDAKIHVLTHSLHYGCGAFEGVRAYKTEQGTAIFRLEEHTNRLFNSAKILRMTIPFTKDEVNEAQKAVVRENQLESCYLRPLTWIGSEKLGVSPKGNKIHLIVAAWAWGAYLGEEGMQRGIRVKTSSFTRHHVNITMTQAKASSNYTNSILANMEATDDGYDEALLLDSAGFVSEGSGKNVFIIKDGVVYTPDLSAGALNGITRNTVFHICKDLGLELVQKRITRDEVYIADEAFFSGTAAEITPIRELDRVQIGSGSRGPLTEKIQSAFFDIVNGRNPKYAHWLTKV

SEQ ID NO: 105480 - DNA, 912 bp, Prosthecochloris aestuarii DSM 271
  CDS (1)..(912): transl_table=11
atgaacaagtccgaaaaaatctggatgaacggggaactggttaactggcacgacgccaaaattcatattctttcccacgtcattcattatggttcttccacgtttgaagggatccgatgctatgacaccgacaaaggctctgcaatactgttttttgacgaacatatcaagcgcctctatcagtcatccaagatataccgtatggaaattccatactcggaacaggagctgaaagacgccattatcgccaccatcaaagcaaacggtcataaagcatgctatatcagaccgctggtcaaacgcggtcagggcgcgctcggcgtcaatccggcccttgcatcgattgaagttgccattgcaacctgggaatggggctcctacctcggcgaagaggtcctcgagaacggtgttgatgtctgcgtgtcatcctgggcaagattagcgccgaatacgcttcccacctgggctaaagcggggggcaactacctcaactcccagcttatcaagatggaagccctgatggataattatgccgagggaatcggtctcgacgtccacggctacgtcgccgagggtagcggtgaaaacatttttgtcattcgtgacggcattatctacacgccgatgtcgggtcagtctatcctgccgggcatcactcgcaatgccgttattcatatcgccagagagcttggctacgaggttcaggaaaccctgatcccacgagaagcgctctatattgccgatgaggtttttctgactggaacggctgctgaaatcacaccggtcagaagtatcgacaaatacgctgtaggagatgaaaaacgcggcccaattaccgagctgctgcaatcaaaatatctcgacatcgtcaaaaaagggaccgatccctacaactggctcaccttcatataa

SEQ ID NO: 105481 - protein, 303 aa, Prosthecochloris aestuarii DSM 271
MNKSEKIWMNGELVNWHDAKIHILSHVIHYGSSTFEGIRCYDTDKGSAILFFDEHIKRLYQSSKIYRMEIPYSEQELKDAIIATIKANGHKACYIRPLVKRGQGALGVNPALASIEVAIATWEWGSYLGEEVLENGVDVCVSSWARLAPNTLPTWAKAGGNYLNSQLIKMEALMDNYAEGIGLDVHGYVAEGSGENIFVIRDGIIYTPMSGQSILPGITRNAVIHIARELGYEVQETLIPREALYIADEVFLTGTAAEITPVRSIDKYAVGDEKRGPITELLQSKYLDIVKKGTDPYNWLTFI

SEQ ID NO: 105482 - DNA, 924 bp, Pseudoalteromonas tunicata D2
  CDS (1)..(924): transl_table=11
atgtcacagcagtcagaatttatttggttcaacggcaaaatggttccatatgcgcaagcaaccactcacgtacttagccatgccattcattatggtagctcagtatttgaaggcgttcgtgcttatgatacacctaatggtccggctatttttcgtttgactgaccatatcaagcgtatgttcgattcagcaaaaatttatcggatggaaattccatatacgttagaagagttagttcaagcctgtaaagacactgtggcgcaaaatggttttaaagacgcatatttacgtccctttgcttatttaggtcatgttgggcttggtttaaatccaaaatctcatgtagcagaggtctctgtagcagctatgcaatggggcgcttatttaggtgaagatagccttgctgaaggtgtcgatgtctgtatttcttcttggaatcgtttagctcctaatacgatgccaacggcagccaaagcgggtggcaattatttatcttcacaacttatctctggcgaagcaaaacgtaatgggtatgttgaaggcattgcacttgataccaacggcatgttgagcgagggggcaggtgaaaacttatttgtgataaaaaaaggggtgctttataccccgccgaccacggcatgtattttaccgggtttaacccgagataccattatgacgctggccaacgagtttggttacgaagtgcgtgaggaagcgattgctcgtgaagctttgtatttagctgatgaattttttatgactggcaccgcagccgaaattgtaccggtgcgcagtgttgatcgcattacagttggttctggcaagcgcggtccaatcactgagcacttacaaaaagcctattttgatttggttaaaggccaaagcgccgatccacatggctggcttgaatacgtaagcgcataa

SEQ ID NO: 105483 - protein, 307 aa, Pseudoalteromonas tunicata D2
MSQQSEFIWFNGKMVPYAQATTHVLSHAIHYGSSVFEGVRAYDTPNGPAIFRLTDHIKRMFDSAKIYRMEIPYTLEELVQACKDTVAQNGFKDAYLRPFAYLGHVGLGLNPKSHVAEVSVAAMQWGAYLGEDSLAEGVDVCISSWNRLAPNTMPTAAKAGGNYLSSQLISGEAKRNGYVEGIALDTNGMLSEGAGENLFVIKKGVLYTPPTTACILPGLTRDTIMTLANEFGYEVREEAIAREALYLADEFFMTGTAAEIVPVRSVDRITVGSGKRGPITEHLQKAYFDLVKGQSADPHGWLEYVSA

SEQ ID NO: 105484 - DNA, 933 bp, Photobacterium sp. SKA34
  CDS (1)..(933): transl_table=11
atggcaaatacagcagattacatttggtttaacggtgagatagtgccttgggctgatgctaatgttcacgttttaactcacgcaatgcactatggcacctcagtatttgaagggatccgttgctacaacacgccaaaaggcccagccgtttttcgtcatgaagaacacatggtacgactaaaaaattcggcaaaaatttatcgcttcccgatcccatacagctgcgatgagctaatggaaatttgccgtgaaacgatccgagtaaataaactcgattctgcttacattcgtccattgggttatgtaggtaatgttggcctaggcgtttgccctcccgttgatacaaaaatggatttgattgttgctgctttcccttggggttcttacttaggtgaagaagcgctagaaaacggtgtcgatgcaatgatctctagttggaaccgtgcagcgccaaataccattccaacagctgcaaaagcaggcggtaactacctatcatcactactggttggtagcgaagcacgtcgccatggttacgcagaagggatcgcattaagtgtggatggttatctatctgaaggtgctggcgaaaatatctttgttattcgtaacggcgttctttcaacgccaccaacgactagcgcaattttaccaggcatcacccgtgacactatcatgatcctagccaaagaacggggttacgaagtacgtgaagaaaacattgcccgtgaggcgctttaccttgccgatgagatcttcatgacaggtaccgctgctgagattgtgccagtgcgtagcgttgatcaaattaccgttggtgaaggcaagcgaggtcctatcaccaaagagctacaagccgcttacttcggtctgttcaatggtgaaacagaagataaatggggctggttagatttcgtttatccacaaaagtaa

SEQ ID NO: 105485 - protein, 310 aa, Photobacterium sp. SKA34
MANTADYIWFNGEIVPWADANVHVLTHAMHYGTSVFEGIRCYNTPKGPAVFRHEEHMVRLKNSAKIYRFPIPYSCDELMEICRETIRVNKLDSAYIRPLGYVGNVGLGVCPPVDTKMDLIVAAFPWGSYLGEEALENGVDAMISSWNRAAPNTIPTAAKAGGNYLSSLLVGSEARRHGYAEGIALSVDGYLSEGAGENIFVIRNGVLSTPPTTSAILPGITRDTIMILAKERGYEVREENIAREALYLADEIFMTGTAAEIVPVRSVDQITVGEGKRGPITKELQAAYFGLFNGETEDKWGWLDFVYPQK

SEQ ID NO: 105486 - DNA, 930 bp, marine gamma proteobacterium HTCC2207
  CDS (1)..(930): transl_table=11
atgtcgttttcggatcgtgatggttttatttggatggatggcaagatggttgattggcgagatgcacagacgcatttcctaacctcgtctctgcactatggcaacgccgtttttgaaggcattcgcgcctatgaaacagagcattcgggaacctgtattttccgccttgaagaccatattaagcgtctgtttaactcggcgaagatcatccatatggagattcctttctctcaggaagaaatttgccaggctcaccgtgacgtggtccgcttaaataacttagatgcggcttatattcgcccgctagtgtttttaggatccgaaggaatgggcttgcgcgccgaagggctcaaggttcatgtcggcattgccggctgggactggccttcctatatgtctccagaaaccctagaggccggtctaaaagttcgcacctcttcttacactaggcaccatgtcaatatcaccatggttaaagccaaggccagtggtaactatatcaactcgatgttggccctgcgcgaagcgctggactctggctgtgatgaagccattatgctcgaccccgaaggctatgttgccgagggcagtgcagaaaacttctttatcgttcgcaatggtgttatttacacgccagacctgacgtcctgcctcgacggaattacccgcgatacagtgtttaagttggcggcagatcatggcattgaagtgcgtgaaaaacgcattactcgcgatgaagtctatatctgcgatgaagcgttcttcaccggcactgctgccgagatcgtgcctattcgtgaatacgatagccgcattattggagatggcaagcgcggacccatcgcaactgttttgcaggccgcctattttgatttagtgcgcggtaaaaataataagtatcagaactggttagcgccggtagctgagtaa

SEQ ID NO: 105487 - protein, 309 aa, marine gamma proteobacterium HTCC2207
MSFSDRDGFIWMDGKMVDWRDAQTHFLTSSLHYGNAVFEGIRAYETEHSGTCIFRLEDHIKRLFNSAKIIHMEIPFSQEEICQAHRDVVRLNNLDAAYIRPLVFLGSEGMGLRAEGLKVHVGIAGWDWPSYMSPETLEAGLKVRTSSYTRHHVNITMVKAKASGNYINSMLALREALDSGCDEAIMLDPEGYVAEGSAENFFIVRNGVIYTPDLTSCLDGITRDTVFKLAADHGIEVREKRITRDEVYICDEAFFTGTAAEIVPIREYDSRIIGDGKRGPIATVLQAAYFDLVRGKNNKYQNWLAPVAE

SEQ ID NO: 105488 - DNA, 930 bp, marine gamma proteobacterium HTCC2080
  CDS (1)..(930): transl_table=11
atggacctgtctaaactgagcggaaaaatttggctcgacggtgagctcgtgccctggcaggaggcaaaggtgcatgttttgacccacacctttcactacggcgttggtgtttttgaaggcgtccgtgcctacagcacacccgatcaaggcacttgtatatttcgattaaaagagcacaccgatcgcctgtttcgctctgcaaaaattttgcagatgaatatgccttgggacaaagacgctttaaacgaggcccaacgcgaggtggttcgagttaacggtctcgaggaaggttatttgcgcccgatgtgttttttagggtcagaggggatgggcttgcgggccgacaatttaaaaacccatgtcatgatcgcagcttggccctggccttcttatatggaccctgaggctcgggatcgcggtatcgccgtgcgcacatcaagctacactcgccatcacgtcaatattacgatgtgtaaagccaaggctaacggcaattacatcaactctatcctagctctgcgcgaggccattgatagtggctgcgaagaagcgcttatgctcgataacgagggttatgtcgccgagggaagtggtgaaaacttttttatggtgcgtgatggcgttatttacactccggacctgacatcctgtctcgaaggcatcacccgcgatgctatttttaaaatagcccacgatgaagggtatgaagttcgcgaaaggcgtatcacacgggacgaagtttatatctgtgatgaggcgtttttcaccggcaccgcagcagaggtggtgcccgtaagggagcttgataaccgtcaggtcggtgcgggtggccgcggccccatcaccgaaaagcttcagagcatctacttccaaagcgttcgcggtgagcatgctcggtatcgtgattggttaaccccggttactgattga

SEQ ID NO: 105489 - protein, 309 aa, marine gamma proteobacterium HTCC2080
MDLSKLSGKIWLDGELVPWQEAKVHVLTHTFHYGVGVFEGVRAYSTPDQGTCIFRLKEHTDRLFRSAKILQMNMPWDKDALNEAQREVVRVNGLEEGYLRPMCFLGSEGMGLRADNLKTHVMIAAWPWPSYMDPEARDRGIAVRTSSYTRHHVNITMCKAKANGNYINSILALREAIDSGCEEALMLDNEGYVAEGSGENFFMVRDGVIYTPDLTSCLEGITRDAIFKIAHDEGYEVRERRITRDEVYICDEAFFTGTAAEVVPVRELDNRQVGAGGRGPITEKLQSIYFQSVRGEHARYRDWLTPVTD

SEQ ID NO: 105490 - DNA, 1158 bp, Pseudomonas putida GB-1
  CDS (1)..(1158): transl_table=11
atgtgctgcgaaaaatgcatcgcacgctatcaattcgtgactggccgttcccgatccgccaaggatgtattaaggtggcatggtgcgcatataacagcagcccgagcgatcgggcacttgcaagacaatgagggtgtcatgagcaacgaaagcattaattgggacaagctgggtttcgactacatcaagaccgacaaacgctacctgtccgtatggcgcaatggcgagtgggacaagggcaccctgaccgaagacaacgtactgcacatcagtgaaggctccacggccttgcactatggccagcagtgcttcgaaggcctgaaggcctaccgttgcaaggacggctcgatcaacctgttccgcccagaccagaacgccgctcgcatgcagcgcagctgcgctcgcctgctgatgccgcacgtgccgaccgatgtgttcatcgaagcgtgcaagcaagtggtcaaggccaacgaaaaattcgtgccaccgcacggcaaaggcgccctgtacctgcgcccgttcgtgatcggcaccggcgacaacattggcgtgcgcaccgcccccgagttcatcttctcggtgttcgccatcccggttggctcgtacttcaagggcggcatgaagccgcacaacttccagatttccagcttcgaccgtgccgccccgcaaggcaccggcgcagccaaggtcggcggcaactacgctgccagcctgcaaccgggtgctgaagcgaagaaagccaacttcgccgacgccatctacctcgacccgctgacccacaccaagatcgaggaagtcggttcggccaacttcttcggcatcaccgccaacaacgagttcgtgaccccgaaatcggcttcggtgctgcccggtatcacccgcctgtcgctgatggaactggcgcaatcgcgcctgggcctgaccgtgatcgaaggcgatgtcgaaatcaacaagctggaccgcttcatcgaagcgggtgcctgcggtaccgctgcggtgatcaccccgatcggcggcatcgagtacaacggcaagctgcacgtattccacgacctggaaaaggtcggcccggttacccagaagctctacaacgagctgaccggcatccagagcggtgacgttgaagcaccggctggctggatcgtcaaagtcgcctga

SEQ ID NO: 105491 - protein, 385 aa, Pseudomonas putida GB-1
MCCEKCIARYQFVTGRSRSAKDVLRWHGAHITAARAIGHLQDNEGVMSNESINWDKLGFDYIKTDKRYLSVWRNGEWDKGTLTEDNVLHISEGSTALHYGQQCFEGLKAYRCKDGSINLFRPDQNAARMQRSCARLLMPHVPTDVFIEACKQVVKANEKFVPPHGKGALYLRPFVIGTGDNIGVRTAPEFIFSVFAIPVGSYFKGGMKPHNFQISSFDRAAPQGTGAAKVGGNYAASLQPGAEAKKANFADAIYLDPLTHTKIEEVGSANFFGITANNEFVTPKSASVLPGITRLSLMELAQSRLGLTVIEGDVEINKLDRFIEAGACGTAAVITPIGGIEYNGKLHVFHDLEKVGPVTQKLYNELTGIQSGDVEAPAGWIVKVA

SEQ ID NO: 105492 - DNA, 927 bp, Marinobacter sp. ELB17
  CDS (1)..(927): transl_table=11
atgtcgatggctgatcgtgatggtgttatttggctagatggagaaatggtgccctggcgtgaagccaaagtgcatgtactgacccacaccctgcattatggtttgggctgttttgaaggcgtgcgagcgtacaacaccgatgaaggcgccgctattttccgcatgaaagatcacaccgaccggctattccgttcagcccacattctgaatatgaaaatgccgttcagcaaagacgaaatcaacgccgcccagctgtctgcggtacgggacaacaatctggacgaagcctacctgcgcccaatggtattttatggctccgaaggcatgggcctgcgcgccgacaacctgaaaacgcacgtaatggtcgcggcctggaattggccatcgtatatgtcgccagaagccaaagaactcggcatcaaggtgcgcacgtcgtcttacacccgccaccacgtgaacattaccatgtgtaaggcaaaggctaacggcaactacattaactccatgttggcgctgcaagaagccgtgtccagcggttgtgaagaagccctgatgctggataacgaaggttacgtggctgaaggctctggcgagaatgtgtttatttttcgcaacggcgtgctgcatacaccggagctgacctcctgcctggaaggtatcacccgccagaccattctggacttcgccaaagaactcaacattgaggtgaaagagcgccgcatcacccgcgacgaagtctacgtagctgaagaagccttcttcaccggtaccgccgccgaagtgttgcccattcgcgagctagacggccgtgccattggcaccggcaaacgtggcccgttgaccgaaaaactgcaggccatgtactttgatgccgtgaagggcaaatcgccccagcatcgggattggttgtcggtggttaataaataa

SEQ ID NO: 105493 - protein, 308 aa, Marinobacter sp. ELB17
MSMADRDGVIWLDGEMVPWREAKVHVLTHTLHYGLGCFEGVRAYNTDEGAAIFRMKDHTDRLFRSAHILNMKMPFSKDEINAAQLSAVRDNNLDEAYLRPMVFYGSEGMGLRADNLKTHVMVAAWNWPSYMSPEAKELGIKVRTSSYTRHHVNITMCKAKANGNYINSMLALQEAVSSGCEEALMLDNEGYVAEGSGENVFIFRNGVLHTPELTSCLEGITRQTILDFAKELNIEVKERRITRDEVYVAEEAFFTGTAAEVLPIRELDGRAIGTGKRGPLTEKLQAMYFDAVKGKSPQHRDWLSVVNK

SEQ ID NO: 105494 - DNA, 1275 bp, Aspergillus oryzae; identical to SEQ ID NO: 90519
  CDS (1)..(1275)

SEQ ID NO: 105495 - protein, 424 aa, Aspergillus oryzae; identical to SEQ ID NO: 90520

SEQ ID NO: 105496 - DNA, 1161 bp, Aspergillus oryzae
  CDS (1)..(1161)
atgactttcccacccgcaccagcagcgaatattggtccgtaccccattcgagcgtatacaggttggatggagactaacgatagctgcggaatagattggaccaagttagggctcgcggtgacggatttggtcaatggccatgtggagtcgacctattccgttacgactggggagtggacatcgcccaaattcgtggaggatccgtatcttcgcattcatggtttggccccggccctcaactatgggcaacaggtgtatgaaggattgaaagcctaccgatcggcaactgaccagatccttctctttcggccacgattccatgcggcgcgcatgcaacactcggcagaggtggtgtccattcctgctgtgcccacggaccactttctcgagtgcgtgaatctggcggtcgcgagaaacgccgagtgggtccctcctcacgcgagcggcgccgccttgtatgtgcgccctgtgctcttgggctccgccgcccatttcgcactgacccctcctgccgaatttaccttctgcgtatatgtacagccttttagcacctatcatggcattgcgcccctacccgcggtcgttctcgaagacttcgatcgggccgcaccccgcggaactggccacgcgaagatcggaggcaattatgcccccgtcatgaagtggtcggaaaaggccaagaaggagggattccctatgaccctgcatctggacagtgccactcattccgaaattgatgagttttccacctccggatttctgggggcgaaaatggacggggataagcccgtgttggtggtccccaagagtgacaatatcattgggagtgtgacgtccgatagttgtatgcagattgctcggtccttgggatggactgtcgagcatcgctcggtcaaatacgaggaactcgcgacctttaaagaggtgatggccgtcggcactgctgccgctctggttcctattcgatccattacccggaagtcgcgcgacgaccatttcgtctacaccgaggagaagtctgctggtccggtctgtcagcagctctatgccgcgctcactaagatccagcgtggtgaggctgaggatcagtttggatggcgtgaagaggttaagggcacatctgatgtgggttcttctggttctttctgtatcattatgtaa

SEQ ID NO: 105497 - protein, 386 aa, Aspergillus oryzae
MTFPPAPAANIGPYPIRAYTGWMETNDSCGIDWTKLGLAVTDLVNGHVESTYSVTTGEWTSPKFVEDPYLRIHGLAPALNYGQQVYEGLKAYRSATDQILLFRPRFHAARMQHSAEVVSIPAVPTDHFLECVNLAVARNAEWVPPHASGAALYVRPVLLGSAAHFALTPPAEFTFCVYVQPFSTYHGIAPLPAVVLEDFDRAAPRGTGHAKIGGNYAPVMKWSEKAKKEGFPMTLHLDSATHSEIDEFSTSGFLGAKMDGDKPVLVVPKSDNIIGSVTSDSCMQIARSLGWTVEHRSVKYEELATFKEVMAVGTAAALVPIRSITRKSRDDHFVYTEEKSAGPVCQQLYAALTKIQRGEAEDQFGWREEVKGTSDVGSSGSFCIIM

SEQ ID NO: 105498 - DNA, 1239 bp, Aspergillus oryzae; identical to SEQ ID NO: 90521
  CDS (1)..(1239)

SEQ ID NO: 105499 - protein, 412 aa, Aspergillus oryzae; identical to SEQ ID NO: 90522

SEQ ID NO: 105500 - DNA, 1200 bp, Aspergillus oryzae; identical to SEQ ID NO: 90523
  CDS (1)..(1200)

SEQ ID NO: 105501 - protein, 399 aa, Aspergillus oryzae; identical to SEQ ID NO: 90524

SEQ ID NO: 105502 - DNA, 981 bp, Aspergillus oryzae
  CDS (1)..(981)
atgacatctatgaacaaagtattttccggttactacgagcgcaaggctcgtctagataacagtgacaaccgctttgcgaaaggaattgcctacgtccagggatctttcgtcccactcgccgacgcacgagtcccactcctcgacgagggtttcatgcatagcgacctcacgtacgatgtgccatcggtctgggatgggcgctttttccgccttgatgatcatctcagtcgattggaagatagttgtgaaaagatgcgactgaagatcccactgtccagggacgaagtcaagcaaaccctaagggagatggttgctaagagtggaatcgaagatgcctttgtggagctgatcgtcactcgtggcctgaaaggggtccgtggcaataagccagaggatcttttcgacaatcatctctatctgatcgtcatgccgtatgtctgggtgatggagcccgccatccaacataccggaggtactgcgatcattgcccgtacagtacggcgcactccccccggtgctttcgatcctaccatcaagaatctccagtggggggacttgacacggggtctatttgaagcggctgaccgtggcgcggattacccatttctctcagatggagataccaatctcacagaaggatccggtttcaatatagtgttggttaaagatggtattatctacacgcccgaccgtggtgttctggaaggcattacacgtaagagtgtttttgatattgcccaggtcaagaacatcgaggtccgcgttcaggtggtgccactcgaacatgcctatcacgccgatgagatattcatgtgtactactgctggtggcattatgcctatcacgaaactcgatgggaaaccgatccggaatggagaagtcggtccccttactacaaagatatgggatgagtactgggcgatgcactatgacccgaaatatagctctgctatcgattacaggggccatgagggtaactga

SEQ ID NO: 105503 - protein, 326 aa, Aspergillus oryzae
MTSMNKVFSGYYERKARLDNSDNRFAKGIAYVQGSFVPLADARVPLLDEGFMHSDLTYDVPSVWDGRFFRLDDHLSRLEDSCEKMRLKIPLSRDEVKQTLREMVAKSGIEDAFVELIVTRGLKGVRGNKPEDLFDNHLYLIVMPYVWVMEPAIQHTGGTAIIARTVRRTPPGAFDPTIKNLQWGDLTRGLFEAADRGADYPFLSDGDTNLTEGSGFNIVLVKDGIIYTPDRGVLEGITRKSVFDIAQVKNIEVRVQVVPLEHAYHADEIFMCTTAGGIMPITKLDGKPIRNGEVGPLTTKIWDEYWAMHYDPKYSSAIDYRGHEGN

SEQ ID NO: 105504 - DNA, 1194 bp, Hordeum vulgare; identical to SEQ ID NO: 90527
  CDS (1)..(1194)

SEQ ID NO: 105505 - protein, 397 aa, Hordeum vulgare; identical to SEQ ID NO: 90528

SEQ ID NO: 105506 - DNA, 897 bp, Bacillus cereus
  CDS (1)..(897): transl_table=11
atgaatgagcaatggattttcttaaatggagaatttgttccaaaagatgaggcaaaagtttcagtatatgatcatggctatttatatggcgatggagtgtttgaaggaattagagtttatagcggtaatgttttccgtttgagagagcatcttgtccggttgtatgaatcagcaaaatcaatccttttagaaattccatattcattagatgaagtaacaaatattgttgttgagacgattcgacacaataaattatctaatggatacattcgccttgttgtatcaagaggagcagggaatcttggattggatcccgattcatgtaggaagccgaatgtagtagtgattgcagtgcctatttctttattcccgcaagaatattatgagatagatattccagttgtaacagttgcaacgcgccgaaatcgtcccgatgttttatcccctcaagtaaaatctttaaattacttaaacaatattttagttcgtattgtagcgaaattggctggagtacaagaagcgcttatgttaaatgatcaaggatatgtagctgaaggatcaggagataacgtgtttattgttaaaggaaataaattaattacaccaccaagttctgctggagcgttagaaggtattacacgaaacgccattttagaaatcggcgaaaaacttgggtatgacgtaagagaagagttatttacaagacatgatgtatatgtagctgatgaagtgtttttaacaggaacagctgctgaagtgattgctgttacgacagtagatggtagaacgattggcttagggcaaacaggtccacatacgaaccgtttattagaagagtttcgtaagttagttgtagaagatggagagaaaatttacgaagaaaataaagttggataa

SEQ ID NO: 105507 - protein, 298 aa, Bacillus cereus
MNEQWIFLNGEFVPKDEAKVSVYDHGYLYGDGVFEGIRVYSGNVFRLREHLVRLYESAKSILLEIPYSLDEVTNIVVETIRHNKLSNGYIRLVVSRGAGNLGLDPDSCRKPNVVVIAVPISLFPQEYYEIDIPVVTVATRRNRPDVLSPQVKSLNYLNNILVRIVAKLAGVQEALMLNDQGYVAEGSGDNVFIVKGNKLITPPSSAGALEGITRNAILEIGEKLGYDVREELFTRHDVYVADEVFLTGTAAEVIAVTTVDGRTIGLGQTGPHTNRLLEEFRKLVVEDGEKIYEENKVG

SEQ ID NO: 105508 - DNA, 876 bp, Bacillus cereus
  CDS (1)..(876): transl_table=11
atgaaagctactcataaagattggatcttgtttaatgggagaatgattaatacgaaagaagaacagccgatggtagcattagaagagagaggcttccaatttggtgatgggatttatgaagtatttagactatacgatggcaagcctcatttattagatttacatttggaacgattctttaactctatggcagaaataaaactaattccaccatttacgaaggaagaattagtagaagagttatatcaaatgattgaaaaaaatcaatttcaagaagatgggaatgtatatttacaaatatcaagaggtgcacaacagcgcaatcatgtatatgaatcagatttacaaccgacatattttgcaaatcttgtttcgttcccaagaccagttgcttcaatggaggcagggattaaggtgacagtagaagaggacatcaggtggaagttttgccatataaaatctttaaatttgcttcctaatatcatgatcaaaaacaaaataaatgaacaagggtatcaagaagcaatattagtacgagatggtattgtgactgaagggtgtcattccaatttctttatcgtgaagaataataagttgattacacatccagcggatcatttcattttacatggtattacacgtcactatgtaattacattagcgaaagagttacatatcgatgtagaggaacgagagttttcattacaagaagtatatgacgctgaggagtgcttctttacagcgacgccacttgaaatattcccagtcgttcaaattggtgatgaacagttcggggctggtgaaagaggaccaattacgaaaaaactacaagctgcatacgaagagagtattcgtttgtttaaagtgacaaattaa

SEQ ID NO: 105509 - protein, 291 aa, Bacillus cereus
MKATHKDWILFNGRMINTKEEQPMVALEERGFQFGDGIYEVFRLYDGKPHLLDLHLERFFNSMAEIKLIPPFTKEELVEELYQMIEKNQFQEDGNVYLQISRGAQQRNHVYESDLQPTYFANLVSFPRPVASMEAGIKVTVEEDIRWKFCHIKSLNLLPNIMIKNKINEQGYQEAILVRDGIVTEGCHSNFFIVKNNKLITHPADHFILHGITRHYVITLAKELHIDVEEREFSLQEVYDAEECFFTATPLEIFPVVQIGDEQFGAGERGPITKKLQAAYEESIRLFKVTN

SEQ ID NO: 105510 - DNA, 900 bp, Bacillus cereus
  CDS (1)..(900): transl_table=11
atgggaaaccagtacatatacatgaatggggaatttgtagaaaaagaaaaggcagttgtttcagtatatgatcacggttttttatacggagacggtgtatttaaagggattcgtagttacggaggaaatgtattttgtataaaggaacatgtgaaacgattggatgaaatcagcgaaatctattttactaacaattccaatgacggcagaagaaatggaagaagcagtttacatacactccaaaaaaacgaatatactgatgcttacattcgcttaattgtctcaagaggaaaaggtgacttagggctcgatccgagaagttgtgtgaagccgagcgtaattatcattgcagaacaattaaagttattcccacaagaattttatgataatgggctaagcgttgtatctgttgcatcaagacgtaatacgccagatgcgttagatccacgtattaagtcaatgaattatttaaataacgtacttgtaaaaattgaagcagcacaagcaggggtgttagaggctcttatgttaaatcaacaaggatatgtttgtgaaggttctggtgataatgttttcgttgtgaaagatggaaaagtattagccccgccatcctatttaggagcattagaaggtattacgagaaatagtgttatcgagctatgtgagcgactgagtattccgtgtgaggaaagaccgttcactcgccatgatgtatatatagcggatgaagtatttttaacaggaacagcagcggagttaattccagttgtaaaagttgattccagagaaattggagatgggaaaccaggaagtgtaacgaaacaattgaccgaagaatttaaaaaattaacgagagaaagaggagtacgtgttcccaggctgacggaaagcttagcataa

SEQ ID NO: 105511 - protein, 299 aa, Bacillus cereus
MGNQYIYMNGEFVEKEKAVVSVYDHGFLYGDGVFKGIRSYGGNVFCIKEHVKRLDEISEIYFTNNSNDGRRNGRSSLHTLQKNEYTDAYIRLIVSRGKGDLGLDPRSCVKPSVIIIAEQLKLFPQEFYDNGLSVVSVASRRNTPDALDPRIKSMNYLNNVLVKIEAAQAGVLEALMLNQQGYVCEGSGDNVFVVKDGKVLAPPSYLGALEGITRNSVIELCERLSIPCEERPFTRHDVYIADEVFLTGTAAELIPVVKVDSREIGDGKPGSVTKQLTEEFKKLTRERGVRVPRLTESLA

SEQ ID NO: 105512 - DNA, 1158 bp, Capsicum annuum
  CDS (1)..(1158)
atgattcgaggggctgcatgttttcgaaagttgtttcaatcttctgctctatcatcaaagtttacaacaaggtactatacggctcaggcagcagtacagcctgctatttacagtagtgatgaggagtctggaagtattgactgggacaatcttggattcaagttaatgcaaactgattatatgtatgtgacaaaaacctctgatgatggaatttttagacaaggccaacttgatcgttatggcaatattcaattgagcccatctgctggtgtactgaactatggacaggggttattcgaaggtacaaaagcgtttagaagagaggatggacgactatttctatttcgccctgaacagaacgcgatcagaatgcaaattggtgcagagagaatgtgtatgccagctccttcgactgatcaatttgtcgacgcccttaaacaaacagccctttctaacaagcgctggattcctcctcctggaaaaggatcactttacattaggcctcttttaataggcactggccccattttgggtttggccccagcacctgagtacacattccttgtctatgcctgccctgtgggtaattatttcaaggaaggaacagcaccattgaacttgtacgttgaagaagacgttcatcgtgcctcacgtggtggagctggcggagtcaaaagcattactaactatgctccggttttaaaagcgatgaagaaagcaaaggcgaacggatattcagatgtactgtatgttgatgcagtaaataagaaatatattgaagaagtttcttcttgcaacattttcgttgtcaaaggaaatgtagtttcaactccaatagccaaaggaactattcttgaaggagtaacaagaaaaagcatcatggacattgcacttgatcttggatatacggttgaagaacgtttaattgaagctgatgaattaattagtgctgatgaagtattctgtacgggaactgcagttggtgttgctcctgttggaagtatcacttacaaaggccaaaggattgagtataaaataagctcagatctatcttgtaagaaattttattcaagattagtagggattcaaaaaggtgtgatcaaagatgaaaggaactggatcgtggagattgaatcatcttatttggttcaagattag

SEQ ID NO: 105513 - protein, 385 aa, Capsicum annuum; identical to SEQ ID NO: 90530

SEQ ID NO: 105514 - DNA, 1146 bp, Oryza sativa subsp; identical to SEQ ID NO: 90531
  CDS (1)..(1146)

SEQ ID NO: 105515 - protein, 381 aa, Oryza sativa subsp; identical to SEQ ID NO: 90532

SEQ ID NO: 105516 - DNA, 1700 bp, Solanum tuberosum; identical to SEQ ID NO: 90535
  CDS (340)..(1473)

SEQ ID NO: 105517 - protein, 377 aa, Solanum tuberosum; identical to SEQ ID NO: 90536

SEQ ID NO: 105518 - DNA, 1257 bp, Solanum tuberosum
  CDS (1)..(1257)
atggagagcggcggcgcattagcagggcttcaccggaatcccactttccaccaccttctccggccaccacgaaccgccgttaataatcttctctcttcttcttcctccacctataagcgccatttttctcctcttcctctcaagtttcagaagcagtcacattttgcttcttatagttataattgctccataaacgatgggagtacttttcaggtggcttattctgctagtgcaacacactcattagccaacatcgattgggacaacttggcctttggggttatgcctactgattatatgtatagcatgaaatgttctcaagatgggaacttttctaagggcgagctacaacgttttgggaatattgagttgagcccagcttctgggatattaaattatggacagggattgtttgaaggtttaaaagcctataaaagacatgatggtaatatattgctgtttcgacccgaagaaaatgctctgcgtatgaagatgggagcagaacgtatatgcatgccttcaccatctgttgaacagtttgtggaagcagtaaaagccactgttttagcaaatgaaagatggattcctccaccaggtaaaggttcattatacataagaccactgcttatggggagtggagctattcttggtgttgctccagctcctgagtacacattcctgatttatgtatcacctgtgggaaattattttaaggaaggtatggcaccaataaatttggtaattgagacagaaatgcatcgcgcaactcctggtggtactggaggtgtcaagactatcggaaattatgctgcagttctgaaggcacagagtgctgctaaagcaaaaggctactctgatgttctgtaccttgattctgttaacaaaagatacctagaggaggttccctcttgtaatggcttcatcgtaaagggtaatctgatagcaactcctgcaattaaaggaaccattcttcctggtatcacacgaaagagcataattgacgtagctttaagccaagggttccaggttgaagaacggcaagtgtctgtggacgaattgcttgatgctgatgaagtgttctgcacaggaactgcagtggttgtatctcctgttggcagcattactcatcttgggaaaagggtatcatatggaagtgatggggttggtcgtgtatcaaagcaattatattctacacttacaagcctacaaatgggactagcaacggataacatgaattggactgttgcgctaaaatga

SEQ ID NO: 105519 - protein, 418 aa, Solanum tuberosum; identical to SEQ ID NO: 90538

SEQ ID NO: 105520 - DNA, 1143 bp, Schizosaccharomyces pombe; identical to SEQ ID NO: 90539
  CDS (1)..(1143)

SEQ ID NO: 105521 - protein, 380 aa, Schizosaccharomyces pombe; identical to SEQ ID NO: 90540

SEQ ID NO: 105522 - DNA, 1182 bp, Saccharomyces cerevisiae; identical to SEQ ID NO: 90541
  CDS (1)..(1182)

SEQ ID NO: 105523 - protein, 393 aa, Saccharomyces cerevisiae; identical to SEQ ID NO: 90542

SEQ ID NO: 105524 - DNA, 1131 bp, Saccharomyces cerevisiae; identical to SEQ ID NO: 90409
  CDS (1)..(1131)

SEQ ID NO: 105525 - protein, 376 aa, Saccharomyces cerevisiae; identical to SEQ ID NO: 90410

SEQ ID NO: 105526 - DNA, 1668 bp, Arabidopsis thaliana
  CDS (1)..(1668)
atggcagaaccggaggtgattcactcatggtctgcaccaagatctctcagcaccagcctcatgtactcctttgctcagagacttgacactgaagttgtcgacgagccgttgtatgcatcatttcttaaagctacaggttttgataggccatacagagacgaagttctctccaagatggagtgcaatggagagaaagttgtgaaagatgtcatatatggatcaggatctaagaagtaccggtattgtaagcatatctcgaagcagcggcttttcggtttgccaagtgaactgatgagtagaggaaagcatttcatattaatacgaaatcctcttaacatattgccttcctttgagaaggtacaccctccatcatttctcgaattaggcttgggggaattagtgtcgatatacagtgatctctgtcagatgggaacaccaccagcagtcatcgatgcggatgagcttcagcgagatcccgagactacacttcgcggtctttgtgatgatttggagattccatttcaagcctctatgcttaaatggaaggctggtcctataccagaagatggagtatgggcaccatggtggtacaagagtgttcacgaatcaacgggtttctcatctccaaagaagtatcctcggacattccctttgtcgcattacgatttgctggagcgaagtctaccgctttacaacattctcaggagccacgtgaagcacagttcctccctcttgagtagtcccttgcctcctcctagtctcccagttcctgaaaatgcaaaacttcttgcatgggtcggtgacgagattttgcctcgtgaaatggcaaaggtttctgtttttgactcggttgttcaaggcggtgactctgtatgggaaggacttcggatttacaagggaaagatattcaagcttgaggaacatctagatcggttgtttgattcagcaaaggctctggctttcgataatgttccagcgcgtgaagaggtaaaagaagcaatcttcagaactcttataaccaatggtatgtttgacaatacacatatcaggttgtctctaactcgaggcaaaaaggttacttctggaatgagccctgcatataatcgatatgggtgcactcttattgtgcttgccgaatggaagcctccggtatatgacaatgaaggtggaattgtgctggtgactgcaaccacacgccgcaattcgcctaataatttggattccaagattcatcacaacaaccttctcaataacatactagcaaagattgaaagtaacaacacgaatgctgctgacgccattatgcttgacaaagatggttatgtgtctgaaaccaatgcaaccaacattttcatggtgaagaaaggctgtgtacttactcctcacgcagattactgtctccctggcataaccagagcaactgtaatggaacttgtggtgaaagagaacttcatcttagaagaaagaagaatcagtctctccgaattccatacagctaatgaggtatggacaacaggaactatgggagaactaagcccggttgtgaaaatcgatgggcgtgtgattggtgacggcaaagttggaccggtaacgagaacactgcaaaacgcttacaagaaactgacagaggattcaggtgtgccgatacctacttatcaagaaccctga

SEQ ID NO: 105527 - protein, 555 aa, Arabidopsis thaliana
MAEPEVIHSWSAPRSLSTSLMYSFAQRLDTEVVDEPLYASFLKATGFDRPYRDEVLSKMECNGEKVVKDVIYGSGSKKYRYCKHISKQRLFGLPSELMSRGKHFILIRNPLNILPSFEKVHPPSFLELGLGELVSIYSDLCQMGTPPAVIDADELQRDPETTLRGLCDDLEIPFQASMLKWKAGPIPEDGVWAPWWYKSVHESTGFSSPKKYPRTFPLSHYDLLERSLPLYNILRSHVKHSSSLLSSPLPPPSLPVPENAKLLAWVGDEILPREMAKVSVFDSVVQGGDSVWEGLRIYKGKIFKLEEHLDRLFDSAKALAFDNVPAREEVKEAIFRTLITNGMFDNTHIRLSLTRGKKVTSGMSPAYNRYGCTLIVLAEWKPPVYDNEGGIVLVTATTRRNSPNNLDSKIHHNNLLNNILAKIESNNTNAADAIMLDKDGYVSETNATNIFMVKKGCVLTPHADYCLPGITRATVMELVVKENFILEERRISLSEFHTANEVWTTGTMGELSPVVKIDGRVIGDGKVGPVTRTLQNAYKKLTEDSGVPIPTYQEP

SEQ ID NO: 105528 - DNA, 1680 bp, Arabidopsis thaliana
  CDS (1)..(1680)
atggaggtgatacacgcatggtctgctccaagatcactcagcaccactctcatgtactcctttgcccagagagatgacattgaagtgcttgatgagccattatacgctgcgttcctcaagtctacgggtgttgataggccttacaaagatgagcttctctctaagatggagtgtgatggagaaaaggtggtgaaggatatcatttatggtccaggaaagaagaaatataggttttgtaagcatatatcgaaacagcgacttcttggtttgccaagtgaactaatgagtgaagggaagcactttatattgatacgcaatcccctcaacatattgccttcttttgagaagatacacccttcatcgtttcacgaattgggactgggagagttagtatcgatatacagtgatctctgtcagatgggaacaccaccagcaatcatcgatgcagatgagctccagcgagatcccgaggctacactacgcagtctttgtgatgacttagagatcccctttcaagcctctatgcttaaatgggaggctggtcctataccagaagatggactttgggctccatggtggtacgagactcttcataaatcaacagggttctcgtcgccccagaagtaccctcagactttccctttaatgcattacgatttgctggagcaatgtttaccgctgtacaacattctgaggtgccacatgaagcacaagtcatcgctcttgtccagcaccttacctcctcccagtctcccagttcctgaaaatgctaaacttcttgcttgggttggtgatgagattgtgccacgagagatggcgaaggtttctgtttttgactcggtcgtgcaaggcggtgactctgtatgggaaggtcttcgtatatacaaagggaaagtatttaagcttgaagaacatctagaccggttgtctgattccgcaaaggctctggctttcaacaatgtcccaacccgcgaggagataaaagaagccatcttcagaactctcataaccaatgggatgtttgacaatacacatataagattgtctctaactcgaggcaaaaaggtcacatctggaatgagccctgcatttaaccgttatggatgtactttgatcgtgcttgctgaatggaagcctccggtatatgacaatgatggcggaattgtgctggtgactgcaactacacgccggaattcacccaacaatttagattccaagattcatcacaacaacctcctcaataatatacttgcaaagattgaaagcaacaatgccaacgtcgatgatgcaatcatgcttgacaaggatgggtttgtgtctgaaaccaatgcaaccaacattttcatggtgaagaaagaccgagtactcactcctcacgcagattattgtctccccggcattactcgagctactgtgatggaactggtggtgaaagagaactttatcttagaagaacgtagaatcagcttgtcggaattccatacagctgatgaggtatggactacaggaactatgggagaactcagcccggttgtgaaaattgatgggcgtgtgatcggtgaaggaaaagtaggaccggtaacaagaagacttcaaaatgcttacaagaaactgacggatggttcaggtgtcccaatacctacttaccaagaagtcaagaaccttgaaccatgtgtttga

SEQ ID NO: 105529 - protein, 559 aa, Arabidopsis thaliana
MEVIHAWSAPRSLSTTLMYSFAQRDDIEVLDEPLYAAFLKSTGVDRPYKDELLSKMECDGEKVVKDIIYGPGKKKYRFCKHISKQRLLGLPSELMSEGKHFILIRNPLNILPSFEKIHPSSFHELGLGELVSIYSDLCQMGTPPAIIDADELQRDPEATLRSLCDDLEIPFQASMLKWEAGPIPEDGLWAPWWYETLHKSTGFSSPQKYPQTFPLMHYDLLEQCLPLYNILRCHMKHKSSLLSSTLPPPSLPVPENAKLLAWVGDEIVPREMAKVSVFDSVVQGGDSVWEGLRIYKGKVFKLEEHLDRLSDSAKALAFNNVPTREEIKEAIFRTLITNGMFDNTHIRLSLTRGKKVTSGMSPAFNRYGCTLIVLAEWKPPVYDNDGGIVLVTATTRRNSPNNLDSKIHHNNLLNNILAKIESNNANVDDAIMLDKDGFVSETNATNIFMVKKDRVLTPHADYCLPGITRATVMELVVKENFILEERRISLSEFHTADEVWTTGTMGELSPVVKIDGRVIGEGKVGPVTRRLQNAYKKLTDGSGVPIPTYQEVKNLEPCV

SEQ ID NO: 105530 - DNA, 1155 bp, Arabidopsis thaliana
  CDS (1)..(1155)
  misc_feature (475)..(475): m is a or c
atggctcttcgtcgctgcttacctcaatattcaacaacttcatcttatctctccaagatctggggatttcgtatgcatgggaccaaggcagcagcttctgttgtagaagaacatgtctcgggggcagaacgtgaggatgaagaatatgctgatgtagattgggacaaccttggattcagtcttgtacggacagatttcatgttcgccaccaaaagttgcagagacggaaacttcgaacagggttaccttagccgttacggcaacatcgagctcaaccctgctgctggaattctcaactatggccagggactaatagaggggatgaaagcgtacagaggagaagacggtagggttcttctcttccgtccagagctaaacgcgatgcgtatgaagataggagctgagagaatgtgtatgcattctccttctgttcatcagtttattgaaggtgttaagcagaccgttcttgcaaacmggcgttgggttcctcctccgggcaaaggctcgttgtatctcagaccgttgttgttcggaagtggagcaagcttgggtgtggctgcagcatcagagtacacgtttcttgtgtttggctctcctgttcaaaactacttcaaggaaggcacagcggcgttgaacctgtatgtggaggaggtgattccacgcgcttatcttggaggaactggtggtgtaaaggcaatatccaattacggtccagtgcttgaagtgatgagaagagcaaaatcaagagggttttcggatgttttgtatcttgatgcagatactgggaagaacatagaagaagtctctgctgctaatatattccttgtgaagggcaatacaatagtgacaccagctacgagcggaacgattctcggagggatcacacgtaagagcataatcgaaatcgcccttgatcttggttacaaagtggaagaacgaagtgttccggtagaagaactgaaggaagctgaagaagttttctgcactggaactgccgctggagttgcttctgttggaagcatcacttttaagaacacaaggactgagtacaaagttggagatgggattgttacacagcaacttcgatctattcttgtcggaatacaaactggttctatccaagacactaaagattgggttttgcagattgcctaa

SEQ ID NO: 105531 - protein, 384 aa, Arabidopsis thaliana; identical to SEQ ID NO: 90544

SEQ ID NO: 105532 - DNA, 1167 bp, Arabidopsis thaliana; identical to SEQ ID NO: 90545
  CDS (1)..(1167)

SEQ ID NO: 105533 - protein, 388 aa, Arabidopsis thaliana; identical to SEQ ID NO: 90546

SEQ ID NO: 105534 - DNA, 1242 bp, Arabidopsis thaliana; identical to SEQ ID NO: 90547
  CDS (1)..(1242)

SEQ ID NO: 105535 - protein, 413 aa, Arabidopsis thaliana; identical to SEQ ID NO: 90548

SEQ ID NO: 105536 - DNA, 1065 bp, Arabidopsis thaliana; identical to SEQ ID NO: 90549
  CDS (1)..(1065)

SEQ ID NO: 105537 - protein, 354 aa, Arabidopsis thaliana; identical to SEQ ID NO: 90550

SEQ ID NO: 105538 - DNA, 1248 bp, Arabidopsis thaliana
  CDS (1)..(1248)
atggagagaagcgccgttgcctcaggttttcatagaaattacatcctctgtgcttcacgcgccgccacttccacgacgcgcctccactctttgtcctccctcagaaactttccctcttcctctctcaggattcgtcactgtccttctcccatctcttccaatttcatcgttagtgaagtttcccgaaaccgacgatgcgacgccgtttcttccagcaccaccgatgtgactgaattagccgaaattgattgggacaagattgattttgggcttaaaccaacggattacatgtacgccatgaaatgtagccgtgatggtgaattctctcaaggtcaattgcaaccttttggtaacattgacattaacccagcagctggtgttctcaactatggacaaggtttgtttgaaggtctaaaagcttacagaaaacaagatgggaatattctactcttccgtcctgaggagaatgcgatccgaatgagaaatggcgctgaaagaatgtgtatgccttctccaaccgttgaacagtttgttgaggctgtgaaaactactgtattagctaacaaacgctggattccacctccaggtaaaggatcattatacataaggccattgctaatgggaactggagctgttcttggtcttgctcctgctcctgaatacactttccttatctttgtttcacctgtcgggaactacttcaaggaaggtgttgcgccgatcaacttaattgttgaaactgaattccatcgtgcaactcccggcggtactggaggtgttaaaaccatcggtaattatgctgcagtcttgaaggctcagtcgattgcgaaagctaaagggtattctgatgttttataccttgattgccttcacaaaagatatcttgaggaggtttcatcgtgcaatattttcattgtgaaggataatgtgatatctactcctgaaattaaaggaaccatcttgcctggaattacccggaagagtatcatcgaagtagctcgtagccaaggtttcaaggtggaggaacgaaatgtgacagttgatgaattggtagaagcagacgaggttttctgcacaggaaccgccgttgttttatctccggttggaagcatcacttacaaaagccaaaggttttcttatggagaagatggctttggaacagtctcgaaacaactctacacttccttgacgagcctgcaaatgggtctgagcgaagataacatgaactggactgttcaattgagttaa

SEQ ID NO: 105539 - protein, 415 aa, Arabidopsis thaliana; identical to SEQ ID NO: 90552

SEQ ID NO: 105540 - DNA, 1071 bp, Arabidopsis thaliana
  CDS (1)..(1071)
atggctccttcttcatcacctcttcgtactacaagtgaaacagatgaaaaatatgcgaatgtcaaatgggaagagcttggattcgctctgactccaatagattatatgtatgtagccaaatgcagacaaggagagagctttacacaagggaagattgttccttatggcgacatttcaattagcccttgttctccgattctcaattacggccagggactatttgaaggtctcaaagcttacagaacagaagacgaccggattaggattttccggcctgaccaaaacgctcttcgcatgcaaactggtgcggagaggctttgtatgacacctcctactctagaacaatttgtcgaggcagttaagcaaactgtgcttgccaacaagaaatgggttcctcctccgggtaaaggaactctgtatataaggcctctgctactagggagtggtgctacccttggagtagctccagcacctgaatacacttttctcatatatgcatctcccgtaggagattaccataaggtaagctcaggcttgaacctcaaagttgatcataagtatcaccgagcccattcaggtggaacggggggtgtcaagagctgcacaaactattctccagttgtgaaatcgttactcgaagcaaagtcagcgggtttctctgatgtcctgttcctggatgcagcaactggtagaaacatcgaagagcttactgcttgtaacatcttcattgtcaagggaaacattgtatccaccccaccaacttcaggaaccattttacctggagtcacgaggaaaagcataagtgagctggctcatgatattggctaccaggtcgaagaacgcgatgtatctgtggatgagctactagaggcagaagaagttttctgcacagggactgcagtggtcgttaaagctgttgaaactgtgaccttccatgacaaaaaggtaaaatacaggacaggagaagcagcattgtctacgaagcttcactcgatgttgaccaatattcagatgggagttgttgaagataagaaaggttggatggtggacattgatccttgtcaaggttga

SEQ ID NO: 105541 - protein, 356 aa, Arabidopsis thaliana; identical to SEQ ID NO: 90554

SEQ ID NO: 105542 - DNA, 1104 bp, Arabidopsis thaliana; identical to SEQ ID NO: 90555
  CDS (1)..(1104)

SEQ ID NO: 105543 - protein, 367 aa, Arabidopsis thaliana; identical to SEQ ID NO: 90556

SEQ ID NO: 105544 - DNA, 849 bp, Bacillus subtilis
  CDS (1)..(849): transl_table=11
atgaaggttttagtcaatggccggctgattgggcgcagtgaagcatcaatcgatttggaagatcgcggttatcagtttggtgacggcatctatgaagtgatcagggtgtacaaaggagtattgttcggcttacgtgagcatgcagagcgttttttcagaagtgctgctgaaatcggaatttcactgccattcagtatagaagatctcgagtgggacctgcaaaagcttgtacaggaaaatgcggtcagtgagggagcggtatacattcagacaacaagaggtgtggccccgcgaaaacaccagtatgaagccggcctcgagccgcagactactgcctatacgtttacggtgaaaaaaccggagcaagagcaggcatacggagtggcggccattacagatgaggatcttcgctggttaagatgtgatatcaaaagtctgaatttactgtataatgtcatgacgaagcaaagggcctatgaagccggagcatttgaagccattttacttagggacggcgttgttacggagggtacatcctctaacgtttatgccgttatcaacggcacagtgcgaacacatccggctaatcggctcattctcaatggaattacacggatgaatattttaggactgattgagaagaatgggatcaaactggatgagactcctgtcagtgaagaagagttgaaacaggcggaagagatctttatttcgtcaacgacggcagaaattattccggtcgtgacgctcgatggacaatcgatcggaagcgggaaacccggaccggtgaccaaacagcttcaggctgcttttcaagaaagcattcaacaggctgctagcatttcataa

SEQ ID NO: 105545 - protein, 282 aa, Bacillus subtilis
MKVLVNGRLIGRSEASIDLEDRGYQFGDGIYEVIRVYKGVLFGLREHAERFFRSAAEIGISLPFSIEDLEWDLQKLVQENAVSEGAVYIQTTRGVAPRKHQYEAGLEPQTTAYTFTVKKPEQEQAYGVAAITDEDLRWLRCDIKSLNLLYNVMTKQRAYEAGAFEAILLRDGVVTEGTSSNVYAVINGTVRTHPANRLILNGITRMNILGLIEKNGIKLDETPVSEEELKQAEEIFISSTTAEIIPVVTLDGQSIGSGKPGPVTKQLQAAFQESIQQAASIS

SEQ ID NO: 105546 - DNA, 936 bp, Aquifex aeolicus
  CDS (1)..(936): transl_table=11
atgctaaaatctttttccatggatttcgctttcttcgaaggcaaaatagtgcccgtggaagaggcaaaaataagcataatgaccaattccttccactacggcacggccatctttgaagggataagggcgtactggaacgaagaagaggaacaactctacatcctctttgcaaaggaacactacgaaagactcctcactaacgcaaggtgtctgtttatggaattaaactactctgctgaggaactcgttgaaattactaaagagatattaagaaaatctgagataagggaggacgtttacataagacctatagcttactttaaggacttgaaattaactcctaagttaatagactacacacccgaaatagcgatatacctctacaggttcggcaggtacctagacacttcaaagggtataagggcaaaggtttcttcttggaggaggaacgacgacaactcaataccatcccgctggaaggttgcgggggcctacgtgaacagtgcacttgcaaagactgaagccctcatgtctggatacgacgaggctatacttctcaactctcagggctacgttgcggaaggttcgggagaaaatatctttataataaaaaacggaaaggccataacaccttctcccaacgaacacatacttgaaggcataacgaggaacgcggtaataactcttttgaaaaaggaactagttgtggaggtggaggaaagaccaatagcgaggagtgagctttacaccgcggacgaggtgtttttgacggggacagctgccgaagtgactcccgtggtagagatagacaacaggaagataggaaacggagagataggtcctataacaaaacagcttcaggagttttactttaacgcagtaagggggaaaatccagaggtacaaaaagtggttaacgcccgtttatgataagtga

SEQ ID NO: 105547 - protein, 311 aa, Aquifex aeolicus
MLKSFSMDFAFFEGKIVPVEEAKISIMTNSFHYGTAIFEGIRAYWNEEEEQLYILFAKEHYERLLTNARCLFMELNYSAEELVEITKEILRKSEIREDVYIRPIAYFKDLKLTPKLIDYTPEIAIYLYRFGRYLDTSKGIRAKVSSWRRNDDNSIPSRWKVAGAYVNSALAKTEALMSGYDEAILLNSQGYVAEGSGENIFIIKNGKAITPSPNEHILEGITRNAVITLLKKELVVEVEERPIARSELYTADEVFLTGTAAEVTPVVEIDNRKIGNGEIGPITKQLQEFYFNAVRGKIQRYKKWLTPVYDK

SEQ ID NO: 105548 - DNA, 873 bp, Archaeoglobus fulgidus
  CDS (1)..(873): transl_table=11
atgctgtacgtttatatggatggtgagttcgtaccggaaaatgaagcgaaggtgagcatcttcgaccacggctttctttacggggatggcgtttttgaggggataagggcctacaacgggagagtcttcaggttaaaagagcacatagaccggctttacgattcggcaaaggccatcgacctcgaaataccaataacaaaggaggagttcatggagataatcctggaaacgctcaggaaaaacaacctcagagatgcttacatcagaccaatagtgacgagggggattggagacctcgggcttgatccgagaaagtgccagaatccgtcgataatagtcataacaaagccgtgggggaagctctacggggacctctacgagaaggggcttacggcgatcaccgttgccgtgagaaggaactccttcgacgcgctcccgccaaacataaagtcgctcaactacctgaacaacattctggcaaagatagaggcaaacgctaagggaggggacgaggccatattcctcgacagaaacggctacgtttcggaggggagcggagacaacattttcgtggtgaaaaatggagctatcacaaccccaccgacgataaacaacctgaggggaattacgagggaagctgtgatagagataataaacaggttaggaatacccttcaaggagacgaacataggcctctacgacctctacacggcagacgaggttttcgtaaccggcaccgctgctgaaattgcgcctattgttgttatcgacggcagaaaaatcggagacggaaagcccggagagattacgagaaagctaatggaggagttcagcaagctcaccgaaagcgaaggcgtaccaatatatgagtga

SEQ ID NO: 105549 - protein, 290 aa, Archaeoglobus fulgidus
MLYVYMDGEFVPENEAKVSIFDHGFLYGDGVFEGIRAYNGRVFRLKEHIDRLYDSAKAIDLEIPITKEEFMEIILETLRKNNLRDAYIRPIVTRGIGDLGLDPRKCQNPSIIVITKPWGKLYGDLYEKGLTAITVAVRRNSFDALPPNIKSLNYLNNILAKIEANAKGGDEAIFLDRNGYVSEGSGDNIFVVKNGAITTPPTINNLRGITREAVIEIINRLGIPFKETNIGLYDLYTADEVFVTGTAAEIAPIVVIDGRKIGDGKPGEITRKLMEEFSKLTESEGVPIYE

SEQ ID NO: 105550 - DNA, 1092 bp, Bacillus subtilis; identical to SEQ ID NO: 90557
  CDS (1)..(1092): transl_table=11

SEQ ID NO: 105551 - protein, 363 aa, Bacillus subtilis; identical to SEQ ID NO: 90558

SEQ ID NO: 105552 - DNA, 867 bp, Methanococcus jannaschii
  CDS (1)..(867): transl_table=11
atgaaaatctacttaaacggaaagtttgttgatgaaaaagatgcaaaggtttctgtgtttgaccacggtttattatatggagatggagtttttgaaggaattagggcttatgatggcgttgtttttatgttgaaggagcatatagacagattgtatgattcagcaaaatctctctgtatagatatcccactaacaaaagaagagatgattgatgttgttttagagacattgagagttaataatctgagagatgcatatataagattagttgttacaagaggagttggtgatttagggttagacccaagaaagtgtggaaagccaactattttctgtatagcaattcctatgcctcctttattaggggaggatggaatcagggctataaccgtttcagttagaagactgccagtagatgttttgaatccagcagttaaatccctcaactacttaaacagcgtcttagcaaagattcaggcaaactatgctggagttgatgaggcatttttattggatgataaaggttttgttgttgaaggaactggagataacatatttatagttaaaaatggagttttaaaaactcccccagtttatcagagtatcttaaaaggaatcacaagggatgttgtcataaaattagctaaggaagaaggaatagaggttgttgaagaacctttaactttacatgacttatacactgccgatgaactatttatcactggaacagctgctgaaatagtccctgtttttgagatagatggtagagtaataaataataaacaagttggagaaatcactaaaaaattaaaagagaagtttaaagatattagaaccaaatggggaataaaggtttatgatgaataa

SEQ ID NO: 105553 - protein, 288 aa, Methanococcus jannaschii
MKIYLNGKFVDEKDAKVSVFDHGLLYGDGVFEGIRAYDGVVFMLKEHIDRLYDSAKSLCIDIPLTKEEMIDVVLETLRVNNLRDAYIRLVVTRGVGDLGLDPRKCGKPTIFCIAIPMPPLLGEDGIRAITVSVRRLPVDVLNPAVKSLNYLNSVLAKIQANYAGVDEAFLLDDKGFVVEGTGDNIFIVKNGVLKTPPVYQSILKGITRDVVIKLAKEEGIEVVEEPLTLHDLYTADELFITGTAAEIVPVFEIDGRVINNKQVGEITKKLKEKFKDIRTKWGIKVYDE

SEQ ID NO: 105554 - DNA, 924 bp, Pseudomonas aeruginosa
  CDS (1)..(924): transl_table=11
atgtcgatggccgatcgtgatggcgtgatctggtatgacggtgaactggtgcagtggcgcgacgcgaccacgcacgtgctgacccataccctgcactatggaatgggcgtgttcgagggcgtgcgcgcctacgacaccccgcagggcacggcgatcttccgcctgcaggcgcataccgaccggctgttcgactccgcgcacatcatgaacatgcagatcccgtacagccgcgacgagatcaacgaggcgacccgcgccgccgtgcgcgagaacaacctggaaagcgcctatatccgcccgatggtgttctacggaagcgaaggcatgggcctgcgcgccagcggcctgaaggtccatgtgatcatcgccgcctggagctggggcgcctacatgggcgaggaagccctgcagcaaggcatcaaggtgcgcaccagttccttcacccgccaccacgtcaacatctcgatgacccgcgccaagtccaacggcgcctacatcaactcgatgctggccctccaggaagcgatctccggcggcgccgacgaggccatgatgctcgatccggaaggctacgtggccgaaggctccggcgagaacatcttcatcatcaaggatggcgtgatctacaccccggaagtcaccgcctgcctgaacggcatcactcgtaacactatcctgaccctggccgccgaacacggttttaaactggtcgagaagcgcatcacccgcgacgaggtgtacatcgccgacgaggccttcttcactggcactgccgcggaagtcacgccgatccgcgaagtggacggtcgcaagatcggcgccggccgccgtggcccggtcaccgaaaagctgcagaaagcctatttcgacctggtcagcggcaagaccgaggcccacgccgagtggcgtaccctggtcaagtaa

SEQ ID NO: 105555 - protein, 307 aa, Pseudomonas aeruginosa
MSMADRDGVIWYDGELVQWRDATTHVLTHTLHYGMGVFEGVRAYDTPQGTAIFRLQAHTDRLFDSAHIMNMQIPYSRDEINEATRAAVRENNLESAYIRPMVFYGSEGMGLRASGLKVHVIIAAWSWGAYMGEEALQQGIKVRTSSFTRHHVNISMTRAKSNGAYINSMLALQEAISGGADEAMMLDPEGYVAEGSGENIFIIKDGVIYTPEVTACLNGITRNTILTLAAEHGFKLVEKRITRDEVYIADEAFFTGTAAEVTPIREVDGRKIGAGRRGPVTEKLQKAYFDLVSGKTEAHAEWRTLVK

SEQ ID NO: 105556 - DNA, 1089 bp, Streptomyces coelicolor
  CDS (1)..(1089): transl_table=11
atgacgacgcccacgatcgagctcaagccctctgcccacccgctctcggactccgagcgcgcggcgattctggccaaccccgggttcggccgccacttcaccgaccacatggtgacgatcaagtggaccgagggccgcggctggcacgacggccagctggtgccgtacgccccgctctccctcgacccggccaccatggtcctgcactacgcgcaggagatcttcgagggcctgaaggcctaccggcggcccgacggctccgtcgccaccttccgcccggagaagaacggcgcccgcttccaggcgtcctcgcgccgcctgggcatgcccgagcttcccgtggacaccttcatcgaggcctgcgacgcgctggtcgcgcaggacgagaagtgggtgccggcgcacggcggcgaggagtccctgtacctgcgccccttcatgatcgcgaccgaggtcggcctgggcgtcaggccggccaacgagtacctcttcatcgtcatcgcctccccggccggcgcctacttcccgggcggggtcaagccggtctccatctgggtctccgaggaccgcgtccgcgccgtccccggcggcatgggcgacgccaagaccggcggcaactacgcggcctccctgctcgcccaggccgaggccgccgccaagggctgcgaccaggtctgctacctcgacgccatcgagcgcaagtgggtcgaggaactgggcggcatgaacctgtacttcgtgtacggcaacaagatcgtcacgccctccctcaccggctccatcctggagggcgtcacccgcgactccctgctcaccgtcgcccgcgacctcggttacgaggccgaggagggccgcgtctcggtcgaccagtggcagcgcgactcggagaacggcaccctcaccgaggtcttcgcctgcggcaccgcggccgtgatcacccccgtcggcacggtcaagcgggccggcgcgcagtggcagcagagcgggggcgagacgggtgaggtgacgcagcggctgcgggacgcgctgctcgacattcagcgcgggacggtcgccgacccgcacgggtggatgcacacgctggcctga

SEQ ID NO: 105557 - protein, 362 aa, Streptomyces coelicolor
MTTPTIELKPSAHPLSDSERAAILANPGFGRHFTDHMVTIKWTEGRGWHDGQLVPYAPLSLDPATMVLHYAQEIFEGLKAYRRPDGSVATFRPEKNGARFQASSRRLGMPELPVDTFIEACDALVAQDEKWVPAHGGEESLYLRPFMIATEVGLGVRPANEYLFIVIASPAGAYFPGGVKPVSIWVSEDRVRAVPGGMGDAKTGGNYAASLLAQAEAAAKGCDQVCYLDAIERKWVEELGGMNLYFVYGNKIVTPSLTGSILEGVTRDSLLTVARDLGYEAEEGRVSVDQWQRDSENGTLTEVFACGTAAVITPVGTVKRAGAQWQQSGGETGEVTQRLRDALLDIQRGTVADPHGWMHTLA

SEQ ID NO: 105558 - DNA, 1071 bp, Bacillus subtilis
  CDS (1)..(1071): transl_table=11
ttgaataagcttattgaacgagaaaaaactgtatattataaggaaaagcccgacccgtcttccttggggtttggacaatattttacagattatatgtttgtgatggactacgaagaggggattggatggcatcatccgagaattgcgccgtacgcaccgcttacgcttgatccgtcttcatctgtttttcattacggccaggctgtttttgaaggattaaaagcatacagaacagacgacggcagggtgctgctgttccgtccggatcaaaatatcaaacggctgaacagatcgtgtgagcgcatgagcatgccccctttagacgaagagctggtgcttgaggcattgacgcaattagttgagctggagaaagattgggttccaaaggaaaaaggaacgtcactgtatattcgtccttttgtcattgccacagaaccgagtctcggtgtgaaggcatccaggagctatacatttatgatcgtgctttcgcctgtcggctcctattatggcgacgatcagctgaagccggttagaatctatgtcgaagatgagtatgtgagggcggtcaacggaggagtcgggtttgcaaaaacggctggaaactatgccgccagtcttcaggcacagcggaaagcgaatgaactgggctatgaccaggtactgtggctggacgccatcgaaaagaaatatgtggaagaagtagggagcatgaacatctttttcgtcataaacggggaagctgtcacacctgctttaagcggaagcattttaagcggggttacacgtgcgtctgcgattgaattgattcgaagctggggcattccggttcgtgaagagagaatatcgattgatgaggtgtatgcggcctctgcacgcggagaattgacagaggtctttggcacaggcacggcagcagtcgttacgcctgtcggtgaactcaacatccatggaaaaacggtgattgtaggcgacgggcaaatcggggacctctcgaaaaagctgtatgaaacgataacagatattcagcttggcaaggtaaaaggcccgtttaactggacagtggaagtgtga

SEQ ID NO: 105559 - protein, 356 aa, Bacillus subtilis
MNKLIEREKTVYYKEKPDPSSLGFGQYFTDYMFVMDYEEGIGWHHPRIAPYAPLTLDPSSSVFHYGQAVFEGLKAYRTDDGRVLLFRPDQNIKRLNRSCERMSMPPLDEELVLEALTQLVELEKDWVPKEKGTSLYIRPFVIATEPSLGVKASRSYTFMIVLSPVGSYYGDDQLKPVRIYVEDEYVRAVNGGVGFAKTAGNYAASLQAQRKANELGYDQVLWLDAIEKKYVEEVGSMNIFFVINGEAVTPALSGSILSGVTRASAIELIRSWGIPVREERISIDEVYAASARGELTEVFGTGTAAVVTPVGELNIHGKTVIVGDGQIGDLSKKLYETITDIQLGKVKGPFNWTVEV

SEQ ID NO: 105560 - DNA, 1251 bp, Oryza sativa
  CDS (1)..(1251)
atggctgctgctgctgctgctgcgtcgtccgcgaagcgcgcgctcctcccgtgggcacgcgacgcccaccacgcgctggccagggccctgcagggatgcggcggcggcggcggcctcggtctccgcggggcgctcccgacggccggaggcaggtggtctctgctccagtgccggtggaggtcgtcgctgccgcagctcgactccgccgacaggtccgatgaggaaagcggcggcgaaatcgactgggacaacctggggttcgggctgacgccgaccgactacatgtacgtcatgcggtgctcgctggaggacggcgtcttctcccgcggcgagctcagccgctacggcaacatcgagctcagcccctcctccggcgtcatcaactacggccaggggctcttcgagggtctgaaggcgtacagggcggcgaaccaacaggggtcgtacatgctgttccggccggaggagaacgcgcggcggatgcagcacggcgccgagcgcatgtgcatgccgtcgccgtcggtggagcagttcgtccacgccgtcaagcagaccgtcctcgccaaccgccgctgggtgccaccgcaaggaaagggggcgctgtacatcaggccgctgctcatcgggagcggaccgattctcgggctggctcccgccccggagtacacgttcctcatctacgccgcaccggttggaacgtacttcaaggagggtctagcgccgataaaccttgtcgtagaggactcgatacaccgggccatgccgggcggcaccggcggggtcaagacgatcaccaactacgcgccggtgctcaaggcgcagatggacgccaagagcagagggttcactgacgtgctgtacctcgacgcggtgcacaagacgtacctggaggaggcctcctcctgcaacctcttcatcgtcaaggacggcgtcgtcgccacgccggccaccgtgggaaccatcctgccggggatcacgcgcaagagcgtcatcgagctcgccagggaccgcggctatcagcaggttgaagaacggctcgtctccatcgacgatctggtcggcgcagacgaggtgttctgcaccggaacagcggtggtcgttgccccagtatcgagtgttacttaccatgggcaaaggtacgagttcaggactggacatgacacgttatcgcagacactgcacacgactctgacgtccatccagatgggcctggctgaggacaagaaaggatggacagtggcaatagattaa

SEQ ID NO: 105561 - protein, 416 aa, Oryza sativa
MAAAAAAASSAKRALLPWARDAHHALARALQGCGGGGGLGLRGALPTAGGRWSLLQCRWRSSLPQLDSADRSDEESGGEIDWDNLGFGLTPTDYMYVMRCSLEDGVFSRGELSRYGNIELSPSSGVINYGQGLFEGLKAYRAANQQGSYMLFRPEENARRMQHGAERMCMPSPSVEQFVHAVKQTVLANRRWVPPQGKGALYIRPLLIGSGPILGLAPAPEYTFLIYAAPVGTYFKEGLAPINLVVEDSIHRAMPGGTGGVKTITNYAPVLKAQMDAKSRGFTDVLYLDAVHKTYLEEASSCNLFIVKDGVVATPATVGTILPGITRKSVIELARDRGYQQVEERLVSIDDLVGADEVFCTGTAVVVAPVSSVTYHGQRYEFRTGHDTLSQTLHTTLTSIQMGLAEDKKGWTVAID

SEQ ID NO: 105562 - DNA, 1233 bp, Oryza sativa; identical to SEQ ID NO: 90415
  CDS (1)..(1233)

SEQ ID NO: 105563 - protein, 410 aa, Oryza sativa; identical to SEQ ID NO: 90416

SEQ ID NO: 105564 - DNA, 1164 bp, Brassica napus; identical to SEQ ID NO: 90561
  CDS (1)..(1164)

SEQ ID NO: 105565 - protein, 387 aa, Brassica napus; identical to SEQ ID NO: 90562

SEQ ID NO: 105566 - DNA, 1236 bp, Brassica napus; identical to SEQ ID NO: 90563
  CDS (1)..(1236)

SEQ ID NO: 105567 - protein, 411 aa, Brassica napus; identical to SEQ ID NO: 90564

SEQ ID NO: 105568 - DNA, 1239 bp, Glycine max; identical to SEQ ID NO: 90565
  CDS (1)..(1239)

SEQ ID NO: 105569 - protein, 412 aa, Glycine max; identical to SEQ ID NO: 90566

SEQ ID NO: 105570 - DNA, 1212 bp, Zea mays; identical to SEQ ID NO: 90567
  CDS (1)..(1212)

SEQ ID NO: 105571 - protein, 403 aa, Zea mays; identical to SEQ ID NO: 90568

SEQ ID NO: 105572 - DNA, 1080 bp, Brassica napus; identical to SEQ ID NO: 90569
  CDS (1)..(1080)

SEQ ID NO: 105573 - protein, 359 aa, Brassica napus; identical to SEQ ID NO: 90570

SEQ ID NO: 105574 - DNA, 1161 bp, Brassica napus; identical to SEQ ID NO: 90571
  CDS (1)..(1161)

SEQ ID NO: 105575 - protein, 386 aa, Brassica napus; identical to SEQ ID NO: 90572

SEQ ID NO: 105576 - DNA, 1158 bp, Brassica napus; identical to SEQ ID NO: 90573
  CDS (1)..(1158)

SEQ ID NO: 105577 - protein, 385 aa, Brassica napus; identical to SEQ ID NO: 90574

SEQ ID NO: 105578 - DNA, 1164 bp, Brassica napus; identical to SEQ ID NO: 90575
  CDS (1)..(1164)

SEQ ID NO: 105579 - protein, 387 aa, Brassica napus; identical to SEQ ID NO: 90576

SEQ ID NO: 105580 - DNA, 1080 bp, Brassica napus; identical to SEQ ID NO: 90577
  CDS (1)..(1080)

SEQ ID NO: 105581 - protein, 359 aa, Brassica napus; identical to SEQ ID NO: 90578

SEQ ID NO: 105582 - DNA, 1161 bp, Brassica napus; identical to SEQ ID NO: 90579
  CDS (1)..(1161)

SEQ ID NO: 105583 - protein, 386 aa, Brassica napus; identical to SEQ ID NO: 90580

SEQ ID NO: 105584 - DNA, 1257 bp, Brassica napus; identical to SEQ ID NO: 90581
  CDS (1)..(1257)

SEQ ID NO: 105585 - protein, 418 aa, Brassica napus; identical to SEQ ID NO: 90582

SEQ ID NO: 105586 - DNA, 1233 bp, Brassica napus; identical to SEQ ID NO: 90583
  CDS (1)..(1233)

SEQ ID NO: 105587 - protein, 410 aa, Brassica napus; identical to SEQ ID NO: 90584

SEQ ID NO: 105588 - DNA, 1167 bp, Glycine max; identical to SEQ ID NO: 90585
  CDS (1)..(1167)

SEQ ID NO: 105589 - protein, 388 aa, Glycine max; identical to SEQ ID NO: 90586

SEQ ID NO: 105590 - DNA, 1680 bp, Zea mays
  CDS (1)..(1680)
atggcgtcggaggcggagtcgcccgtggtgatccacgcgtggtcggcgccgcgctccctcagcaccagcctcatgtactccttcgcccagagggacgacatggaggtgcttgacgagcctctctacgcaaatttcctgcgtgccacaggcgtcgacaggccctaccggcaggagctcctgtccaaaatggaccctgatggaaataaggttgtcaaagaggtgatttttggcccaggggacaaaaagtatcgttactgcaagcacatctcaaagcaacatctcccaaatctgtcaagcgacctcatgaagaagggaaaacatttcatattgatacggaaccctctagatatactgccatcttttgataaagtcgttccaccatccttcatggagcttggcataggcgaacttgtctcaatatacagtgaattatgtggacttgggagcccaccccctgtgatagatgcagatgatctgcaacaggatcctgaggccgtcctgagtggactctgtgaggatctgggcattcctttccagccacaaatgttgaaatgggaagctggccccaaggaatttgatggtatatgggcaccctggtggtatgggagtgtgcacaagtcttcaggtttctctaagcctcgccaatatcctctgactttcccattcgtgttttatgacctgcttgagcaaagcttgcctttctacaacatgctgaagcgccaaataaggaagataagaggaccgcagcaaccaccattatcggaccctcctctgcctgtccctgcaaataaaaacattcttgtttgggttggagatgaacttttgccccgtaacagtgcaaaggtttcagtgtttgattcagttgtacaaggaggagatgctgtttgggaaggtttacgtatatatgatggaaaagtattcaaattagatgaacatttggacagattgtttgattctgcaaaagctatggccttcagcaatgtgcctactcgtgattggattaaggatgccatctttaagactctgattgcaaatggaatgttcaacaatgctcatataaggctcacgctcacccgtgggaaaaaggtgacatctggaatgagtccagctttcaatctttatgggtgtgccttgattgtgcttgcagagtggaaaccaccagtttatgataactctcatgggataaaattggttactgccaccacacgtcgaaattctccaaatagtatagattccaagattcatcacaacaatcttatcaacaatattctggcaaagatagaaggtaatcttgcccaggctgaggatgccattatgctagataaggatggctttgtatcagaaacaaacgcaacaaatatttttatggtcaaaaagggaattgtattgacacctcatgctgactattgccttccaggcattacgcgagcaactgtcatggatcttgtggtgaaagaaaactttgtgttacatgaacgacgcattagtctgtcagaattccatgctgcagatgaggtatggacaaccggaacaatgggtgaaatcacaccggttgtaatgattgatggacgtgaaatcggcgacgggaaaattggtccagtcactagacaaatccagaaggcatacaagatcctgacagcagggcaaggagtaccgataccgggggttgctgaggtgtaa

SEQ ID NO: 105591 - protein, 559 aa, Zea mays
MASEAESPVVIHAWSAPRSLSTSLMYSFAQRDDMEVLDEPLYANFLRATGVDRPYRQELLSKMDPDGNKVVKEVIFGPGDKKYRYCKHISKQHLPNLSSDLMKKGKHFILIRNPLDILPSFDKVVPPSFMELGIGELVSIYSELCGLGSPPPVIDADDLQQDPEAVLSGLCEDLGIPFQPQMLKWEAGPKEFDGIWAPWWYGSVHKSSGFSKPRQYPLTFPFVFYDLLEQSLPFYNMLKRQIRKIRGPQQPPLSDPPLPVPANKNILVWVGDELLPRNSAKVSVFDSVVQGGDAVWEGLRIYDGKVFKLDEHLDRLFDSAKAMAFSNVPTRDWIKDAIFKTLIANGMFNNAHIRLTLTRGKKVTSGMSPAFNLYGCALIVLAEWKPPVYDNSHGIKLVTATTRRNSPNSIDSKIHHNNLINNILAKIEGNLAQAEDAIMLDKDGFVSETNATNIFMVKKGIVLTPHADYCLPGITRATVMDLVVKENFVLHERRISLSEFHAADEVWTTGTMGEITPVVMIDGREIGDGKIGPVTRQIQKAYKILTAGQGVPIPGVAEV

SEQ ID NO: 105592 - DNA, 1212 bp, Zea mays; identical to SEQ ID NO: 90587
  CDS (1)..(1212)

SEQ ID NO: 105593 - protein, 403 aa, Zea mays; identical to SEQ ID NO: 90588

SEQ ID NO: 105594 - DNA, 1206 bp, Zea mays; identical to SEQ ID NO: 90589
  CDS (1)..(1206)

SEQ ID NO: 105595 - protein, 401 aa, Zea mays; identical to SEQ ID NO: 90590

SEQ ID NO: 105596 - DNA, 1218 bp, Zea mays; identical to SEQ ID NO: 90591
  CDS (1)..(1218)

SEQ ID NO: 105597 - protein, 405 aa, Zea mays; identical to SEQ ID NO: 90592

SEQ ID NO: 105598 - DNA, 24 bp, Artificial sequence
  primer
atgaccacgaagaaagctgattac

SEQ ID NO: 105599 - DNA, 26 bp, Artificial sequence
  primer
ttattgattaacttgatctaaccagc

SEQ ID NO: 105600 - protein, 331 aa, Artificial sequence
  consensus sequence
  Variant (2)..(16): Xaa in position 2 to 16 is any amino acid
  Variant (17)..(19): Xaa in position 17 to 19 is any or no amino acid
  Variant (22)..(24): Xaa in position 22 to 24 is any amino acid
  Variant (28)..(35): Xaa in position 28 to 35 is any amino acid
  Variant (36)..(42): Xaa in position 36 to 42 is any or no amino acid
  Variant (45)..(48): Xaa in position 45 to 48 is any amino acid
  Variant (49)..(50): Xaa in position 49 to 50 is any or no amino acid
  Variant (52)..(55): Xaa in position 52 to 55 is any amino acid
  Variant (57)..(78): Xaa in position 57 to 78 is any amino acid
  Variant (79)..(81): Xaa in position 79 to 81 is any or no amino acid
  Variant (83)..(87): Xaa in position 83 to 87 is any amino acid
  Variant (88)..(96): Xaa in position 88 to 96 is any or no amino acid
  Variant (98)..(98): Xaa in position 98 is any amino acid
  Variant (101)..(103): Xaa in position 101 to 103 is any amino acid
  Variant (104)..(104): Xaa in position 104 is any or no amino acid
  Variant (106)..(108): Xaa in position 106 to 108 is any amino acid
  Variant (109)..(110): Xaa in position 109 to 110 is any or no amino acid
  Variant (112)..(155): Xaa in position 112 to 155 is any amino acid
  Variant (156)..(164): Xaa in position 156 to 164 is any or no amino acid
  Variant (166)..(169): Xaa in position 166 to 169 is any amino acid
  Variant (171)..(178): Xaa in position 171 to 178 is any amino acid
  Variant (179)..(179): Xaa in position 179 is any or no amino acid
  Variant (181)..(183): Xaa in position 181 to 183 is any amino acid
  Variant (185)..(190): Xaa in position 185 to 190 is any amino acid
  Variant (192)..(197): Xaa in position 192 to 197 is any amino acid
  Variant (198)..(200): Xaa in position 198 to 200 is any or no amino acid
  Variant (202)..(205): Xaa in position 202 to 205 is any amino acid
  Variant (207)..(207): Xaa in position 207 is any amino acid
  Variant (209)..(222): Xaa in position 209 to 222 is any amino acid
  Variant (223)..(231): Xaa in position 223 to 231 is any or no amino acid
  Variant (233)..(233): Xaa in position 233 is any amino acid
  Variant (238)..(243): Xaa in position 238 to 243 is any amino acid
  Variant (245)..(263): Xaa in position 245 to 263 is any amino acid
  Variant (264)..(272): Xaa in position 264 to 272 is any or no amino acid
  Variant (274)..(274): Xaa in position 274 is any amino acid
  Variant (275)..(280): Xaa in position 275 to 280 is any or no amino acid
  Variant (282)..(282): Xaa in position 282 is any amino acid
  Variant (284)..(285): Xaa in position 284 to 285 is any amino acid
  Variant (289)..(292): Xaa in position 289 to 292 is any amino acid
  Variant (294)..(305): Xaa in position 294 to 305 is any amino acid
  Variant (306)..(314): Xaa in position 306 to 314 is any or no amino acid
  Variant (316)..(329): Xaa in position 316 to 329 is any amino acid
  Variant (330)..(330): Xaa in position 330 is any or no amino acid
GXXXXXXXXXXXXXXXXXXYGXXXFEGXXXXXXXXXXXXXXXFRXXXXXXRXXXXAXXXXXXXXXXXXXXXXXXXXXXXXXNXXXXXXXXXXXXXXYXRPXXXXGXXXXXGXXXXXXXXXXXXXXXXXXXXXXXXXXXXXXXXXXXXXXXXXXXXXXXXXXXXXKXXXXYXXXXXXXXXAXXXGXXXXXXLXXXXXXXXXEXXXXNXFXXXXXXXXXXXXXXXXXXXXXXXLXGITRXXXXXXAXXXXXXXXXXXXXXXXXXXXXXXXXXXXAXXXXXXXEXFXXGTAXXXXPXXXXXXXXXXXXXXXXXXXXXGXXXXXXXXXXXXXXXG

SEQ ID NO: 105601 - protein, 15 aa, Artificial sequence
  protein pattern
  Variant (2)..(2): Xaa in position 2 is any amino acid
  Variant (3)..(3): Xaa in position 3 is any or no amino acid
  Variant (5)..(5): Xaa in position 5 is any amino acid
  Variant (6)..(6): Xaa in position 6 is Gly, Ser or Thr
  Variant (8)..(8): Xaa in position 8 is Ser or Thr
  Variant (9)..(9): Xaa in position 9 is Ala or Ser
  Variant (10)..(10): Xaa in position 10 is Ala, Cys, Ser, Thr or Val
  Variant (11)..(11): Xaa in position 11 is any amino acid
  Variant (12)..(12): Xaa in position 12 is Ala, Ile, Leu or Val
  Variant (13)..(13): Xaa in position 13 is any amino acid
  Variant (14)..(14): Xaa in position 14 is Ala, Pro or Ser
  Variant (15)..(15): Xaa in position 15 is Ala, Ile or Val
EXXFXXGXXXXXXXX

SEQ ID NO: 105602 - DNA, 546 bp, Escherichia coli
  CDS (1)..(546): transl_table=11
atgaaaacattaattcttttctcaacaagggacggacaaacgcgcgagattgcctcctacctggcttcggaactgaaagaactggggatccaggcggatgtcgccaatgtgcaccgcattgaagaaccacagtgggaaaactatgaccgtgtggtcattggtgcttctattcgctatggtcactaccattcagcgttccaggaatttgtcaaaaaacatgcgacgcggctgaattcgatgccgagcgccttttactccgtgaatctggtggcgcgcaaaccggagaagcgtactccacagaccaacagctacgcgcgcaagtttctgatgaactcgcaatggcgtcccgatcgctgcgcggtcattgccggggcgctgcgttacccacgttatcgctggtacgaccgttttatgatcaagctgattatgaagatgtcaggcggtgaaacggatacgcgcaaagaagttgtctataccgattgggagcaggtggcgaatttcgcccgagaaatcgcccatttaaccgacaaaccgacgctgaaataa

SEQ ID NO: 105603 - protein, 181 aa, Escherichia coli
MKTLILFSTRDGQTREIASYLASELKELGIQADVANVHRIEEPQWENYDRVVIGASIRYGHYHSAFQEFVKKHATRLNSMPSAFYSVNLVARKPEKRTPQTNSYARKFLMNSQWRPDRCAVIAGALRYPRYRWYDRFMIKLIMKMSGGETDTRKEVVYTDWEQVANFAREIAHLTDKPTLK

SEQ ID NO: 105604 - DNA, 531 bp, Dichelobacter nodosus VCS1703A
  CDS (1)..(531): transl_table=11
atgagtaaaatcgcccttttttattcaacaacggacgggcacaccctaaaaatttgtcactatattcaaagcgttttatcaacaaccgaacaaatcagcatcatacccattgctcaagcgcaagaacgcgatctcgccgccgccgataaaatcatcattggcgccagcattcgctacggcaaacatcaaaaagaactctatcaatttatcaaccgccatctaacgctgttacaacaaaaacccgccgcgttttttagcatcagcatcgtagcgcgcaaacccaaccgccagcgccccgacaataatccttattttaaacgctttttatcaaaaagcccgtggcaacccaaattaatcggcattttcgccggcaaactcgaaatgccgcgctaccgctacctcgataaaatcatgattcgactgatcatgaaaataggaaaatcgccggtcaacaatcaaagttgcattgaatttaccaattgggaacacgtgcgccaatttgccgaaaaactgcggcaattggaacaataa

SEQ ID NO: 105605 - protein, 176 aa, Dichelobacter nodosus VCS1703A
MSKIALFYSTTDGHTLKICHYIQSVLSTTEQISIIPIAQAQERDLAAADKIIIGASIRYGKHQKELYQFINRHLTLLQQKPAAFFSISIVARKPNRQRPDNNPYFKRFLSKSPWQPKLIGIFAGKLEMPRYRYLDKIMIRLIMKIGKSPVNNQSCIEFTNWEHVRQFAEKLRQLEQ

SEQ ID NO: 105606 - DNA, 528 bp, Mesorhizobium loti MAFF303099
  CDS (1)..(528): transl_table=11
gtgaacatcctgattgtctatggaacgaccgaaggccagacggggaaaattgctgcacggacggcaactcatttacgcgagcgcgggcaccaagtcgagttgcgtgacagcgcagcgctcgcgtccgatttgaagctcggacacttcgacgcgttcgtcatcgccgcgtcggtccaccaggagcaccaccaggaaaccgtcacgaacttcgtatttgcgcatcacgaagccctgagcaccaagccttcggccctcatatccgtcagtttgtcggcggcgctgggagaccaaaagaaggatgctcaaaaatacgtggatcgcttcgtctccgtgacagattggcaaccatccatgaccctccttcttgggggtgctttgcggttcaacaagtacgattactttcaggagcagttcgtcaaattcgtcgtcatgaaaagcggcgatccgagccccgagcgcgatcacgaattcactgactggaacgcactcgctaacttcgctgatcgatttcttgagacggccggctag

SEQ ID NO: 105607 - protein, 175 aa, Mesorhizobium loti MAFF303099
MNILIVYGTTEGQTGKIAARTATHLRERGHQVELRDSAALASDLKLGHFDAFVIAASVHQEHHQETVTNFVFAHHEALSTKPSALISVSLSAALGDQKKDAQKYVDRFVSVTDWQPSMTLLLGGALRFNKYDYFQEQFVKFVVMKSGDPSPERDHEFTDWNALANFADRFLETAG

SEQ ID NO: 105608 - DNA, 513 bp, Pasteurella multocida subsp. multocida str. Pm70
  CDS (1)..(513): transl_table=11
atgaaaacactgattctctattcaagccgtgatgggcaaacgaaaaaaatcgcagaatttattgcttctaaattaagtggtgatgtacaaacacaacctttgacagaaaagacagatattacgaaagccgatcgcatcgtaataggtgcctccattcgctatgggcattttgataaagtacttgataaatttgtgaaaaaacagaccgcacttttgagccaaaagccaaatgcattttttgcagttaatcttaccgcgcgtaaagctggaaaagatacgccagaaacgaatgtctatgtcagaaaatttttacagcgtattgattggcaaccgcatttagcggcggtttttgctggagcattatattatccacgctattctttttttgatcgtacaatgattcgcttgattatgaaaatcacaggtggagaaacagataccagcaaagaaattgaatacactgattggcagaaagttgaatttttcacagagcaatttgagaagcttaaataa

SEQ ID NO: 105609 - protein, 170 aa, Pasteurella multocida subsp. multocida str. Pm70
MKTLILYSSRDGQTKKIAEFIASKLSGDVQTQPLTEKTDITKADRIVIGASIRYGHFDKVLDKFVKKQTALLSQKPNAFFAVNLTARKAGKDTPETNVYVRKFLQRIDWQPHLAAVFAGALYYPRYSFFDRTMIRLIMKITGGETDTSKEIEYTDWQKVEFFTEQFEKLK

SEQ ID NO: 105610 - DNA, 534 bp, Yersinia pestis KIM
  CDS (1)..(534): transl_table=11
atgaaaatactaatactttactccagccgagacggccaaacgaaaactatagcttcttatatagctaagcaattaacagaggcagccacttgtgaaatacaagacctatctcaagtaggccaaatcgatctgagccagtatcagcaagttatcattggggcttctgtacggtatggacatttcagccccgtgttgaataagttcgttaataaacacgttgcgcaattgagtcagatgccaagtgcattctttgctgtgaacttaacggcacgcaagccagaaaaacgttcgccacaaaccaatacatatgtacgtaagtttttattgaacactccctggcagccaacgttgtgctcggtattcgctggtgctctgcgttatccacgctacagttggatagatcggataatgattcaacttattatgcgtatgactgggggagaaaccgataccagtaaagaagttgagtatacggattggcaagaggtaagccgttttactcaggatttcttggcactgcagtataaaaagtag

SEQ ID NO: 105611 - protein, 177 aa, Yersinia pestis KIM
MKILILYSSRDGQTKTIASYIAKQLTEAATCEIQDLSQVGQIDLSQYQQVIIGASVRYGHFSPVLNKFVNKHVAQLSQMPSAFFAVNLTARKPEKRSPQTNTYVRKFLLNTPWQPTLCSVFAGALRYPRYSWIDRIMIQLIMRMTGGETDTSKEVEYTDWQEVSRFTQDFLALQYKK

SEQ ID NO: 105612 - DNA, 546 bp, Shigella flexneri 2a str. 301
  CDS (1)..(546): transl_table=11
gtgaaaacattaattcttttctcaacaagggacggacaaacgcgcgagattgcctcctacctggcttcggaactgaaagaactggggatccagacggatgtcgccaatgtgcaccgcattgaagaaccacaatgggaaaactatgaccgtgtggtcattggtgcttctattcgctatggtcactaccactctgcgttccaggaatttgtcaaaaaacatgcgacgcgactgaattcgatgccgagcgccttttattccgtaaacctggtggcgcgcaaaccggagaagcgtactccacagaccaacagctacgcgcggaagtttctgatgaactcgcaatggcgtcccgatcgctgcgcggtcattgccggggcgctgcgttacccacgttatcgctggtacgaccgttttatgctcaagctgattatgaagatgtcaggcggtgaaacggatacgcgcaaagaagttgtctataccgattgggagcaggtggcgaatttcgcccgagaaatcgcccatttaaccgacaaaccgacgctgaaataa

SEQ ID NO: 105613 - protein, 181 aa, Shigella flexneri 2a str. 301
MKTLILFSTRDGQTREIASYLASELKELGIQTDVANVHRIEEPQWENYDRVVIGASIRYGHYHSAFQEFVKKHATRLNSMPSAFYSVNLVARKPEKRTPQTNSYARKFLMNSQWRPDRCAVIAGALRYPRYRWYDRFMLKLIMKMSGGETDTRKEVVYTDWEQVANFAREIAHLTDKPTLK

SEQ ID NO: 105614 - DNA, 525 bp, Shewanella oneidensis MR-1
  CDS (1)..(525): transl_table=11
atgcaaacattaataatctactcaaccatcgacggtcaaacgctagaaatttgtcgtaagattaaagcatttgctgagcgggcgggtgaaaaggtctccctctttagcttagaacaggctgaagctataaaccttgcagatgttgataaggtattgattggtgcgagtatccgctatggtaaacatagacctgagctttaccaatttgtgaatcgcaaccatgcggtgttaagcgcgaaagttaatggtttttttacggtaaatgtggtggcgcggaagccgttaaagaacaccccagaaaccaatccttatatgcagaaattcctcaaattatccctttggcaaccacaacacttggcggtatttgctggtaagattgattaccctaaatatggcttattcgaccgcacaatgatctgttttatcatgtggatgactaaggggccaacggatcttaagggcacgtttgagtttaccgattgggctaaagtcgaagcttttggcactcattttagtaagctataa

SEQ ID NO: 105615 - protein, 174 aa, Shewanella oneidensis MR-1
MQTLIIYSTIDGQTLEICRKIKAFAERAGEKVSLFSLEQAEAINLADVDKVLIGASIRYGKHRPELYQFVNRNHAVLSAKVNGFFTVNVVARKPLKNTPETNPYMQKFLKLSLWQPQHLAVFAGKIDYPKYGLFDRTMICFIMWMTKGPTDLKGTFEFTDWAKVEAFGTHFSKL

SEQ ID NO: 105616 - DNA, 555 bp, Shewanella oneidensis MR-1
  CDS (1)..(555): transl_table=11
atgacacgcatcctggtgctttattttacccgaggaggccatacggccaagattgccaatgcaatagcggagcaattaaccctgcgtggcgcaaaggttgacttagtcgatatcaatagtgcggctgcaacacgaatcaactggtccgattatcagctggtggctttgggtgcctgtgtactctatggcacttatgataagagtgtatttcaatttattgagcaacatgtgcaggctttgagttttttgccaaacagttttttctgcgtcaacgtggtcgcacgtaatccggagaaacgtattcctgaaaacaataaatacctgcaaaagtttatcactctatctccttggactcccgcagatttgaagattattgctggtaaagtcgattatccatcttggccttggtacgacagattaatgatccagttaattatgaaaatcactaaaggcccaacggatccaaaagcagttattgattataccgattgggaagatgtgaaagtctatgccgaccatctgctgaccttggtcgaggttgctgaacctgcctaa

SEQ ID NO: 105617 - protein, 184 aa, Shewanella oneidensis MR-1
MTRILVLYFTRGGHTAKIANAIAEQLTLRGAKVDLVDINSAAATRINWSDYQLVALGACVLYGTYDKSVFQFIEQHVQALSFLPNSFFCVNVVARNPEKRIPENNKYLQKFITLSPWTPADLKIIAGKVDYPSWPWYDRLMIQLIMKITKGPTDPKAVIDYTDWEDVKVYADHLLTLVEVAEPA

SEQ ID NO: 105618 - DNA, 528 bp, Vibrio parahaemolyticus RIMD 2210633
  CDS (1)..(528): transl_table=11
gtggcaaaagcattatttctatactcttctcgtgaagggcaaaccaaaaaaatcttccattatatagaagagcaattaacagactttgaatgtgagctggtggatttacataatgtagagacgatggatttcagccaatatgaaaaagtgctcattggtgcctctattcgttatggtcacctaaataagaagctataccaatttattgaacgcaacctcactcagctagaacagaataaagtggctttcttctgtgtgaacttaaccgctcgcaaagaagaccaagggaaagataccccagaaggaagtgcctacattcgtaagttcctaatcaaatctccttggaagccaacattaattggagtcttcgctggtgccctttattatccgcgctacggttggttcgacaaaatgatgattaagttcattatgtcgatgactggtggtgaaacggacacgactaaagaagtggagtacaccaactgggaaaaagtggctcttttcgcggataaattcaaagaactgtag

SEQ ID NO: 105619 - protein, 175 aa, Vibrio parahaemolyticus RIMD 2210633
MAKALFLYSSREGQTKKIFHYIEEQLTDFECELVDLHNVETMDFSQYEKVLIGASIRYGHLNKKLYQFIERNLTQLEQNKVAFFCVNLTARKEDQGKDTPEGSAYIRKFLIKSPWKPTLIGVFAGALYYPRYGWFDKMMIKFIMSMTGGETDTTKEVEYTNWEKVALFADKFKEL

SEQ ID NO: 105620 - DNA, 546 bp, Salmonella enterica subsp. enterica serovar Typhi Ty2
  CDS (1)..(546): transl_table=11
gtgaaaacattgattcttttctctacccgggacggacaaacgcgcgaaattgcctcttatctggcttctgaactcaaagagatggggatctgggccgatgtcgttaatctgcatcgcgcagaagagcctgactgggatagctatgatcgcgtagtgattggcgcgtctattcgttatggtcattaccacagcgcctttcaggagtttgttaagaaatatgccacgcggttgaacggaatgccgagcgccttttattccgttaacctggtggcgcgtaaagctgaaaaacggacgccgcagactaacagctacgcgcgtaagtttttaatgagttctccgtggcgacctgactactgtgccgtcattgcaggcgcgcttcgctatccccgctatcgctggtatgaccgtctgatgatcaagcttattatgaagatgtcgggcggcgaaacggataccagtaaagaagtggtgtacaccgactgggagcaagttgcgcactttgcccgtgaaatagcccatttaaccaacaaatcgtcggcaaaataa

SEQ ID NO: 105621 - protein, 181 aa, Salmonella enterica subsp. enterica serovar Typhi Ty2
MKTLILFSTRDGQTREIASYLASELKEMGIWADVVNLHRAEEPDWDSYDRVVIGASIRYGHYHSAFQEFVKKYATRLNGMPSAFYSVNLVARKAEKRTPQTNSYARKFLMSSPWRPDYCAVIAGALRYPRYRWYDRLMIKLIMKMSGGETDTSKEVVYTDWEQVAHFAREIAHLTNKSSAK

SEQ ID NO: 105622 - DNA, 903 bp, Rhodopirellula baltica SH 1
  CDS (1)..(903): transl_table=11
atgcgtaacctcattgtcttcgcgtcacacgaaggacaaacagaacagattgccgaacgaatccatcgacgcttgctagaacattccatgccaagcgatgtcttggatgtcgttcaacactcggcgactgaaattcaagtcgaagcgtatgacgcagtgctgattggatcgccaatgcactttggacgccacgatcctcgcattcgcttcttcatcgaacacaatctcgcatttcttcgcgaaataccaaccgcatttttctcggtgagcttggcgtccgcgagcaagaaacgaaaagaacgcgccgaagcagaaaggttggccaacgagttcttgcaatcgacacagtggataccaccagtcatggactgcttcgcgggtgctctcaagtattccaaatacggatggctgaaacgacaaatcatgcaccgaattgctcagcggtccggggaagaaacgagcttcgaacaggactacgaatacacagattgggaacgagtcgatgattttgcagatcgttttgcgacattggtccgagcgtgcaaacgttcgcccgagcttcgtcctcgtttcagcgaaatgcggttgcccactcgagaatattcgcttcgccgagttcgatcgaaacgacgaaccgctaatctgtaccacgtggtcgccaacggtggccgcctgaatggttgggtgcctcacaccggagcgtttcgatgcatgaagtctccgttgattggtcggatgtgtgcaaaacgatcgagaaccaaactgggactcgcgcggacctcaagaaaaagatcgcaaggggatttattactgggcgtcaaacaacagacaaacaagccactccccaaactcgcagcttcgcaacggaacggaatgccaatctggtgcaggacgaatcgttga

SEQ ID NO: 105623 - protein, 300 aa, Rhodopirellula baltica SH 1
MRNLIVFASHEGQTEQIAERIHRRLLEHSMPSDVLDVVQHSATEIQVEAYDAVLIGSPMHFGRHDPRIRFFIEHNLAFLREIPTAFFSVSLASASKKRKERAEAERLANEFLQSTQWIPPVMDCFAGALKYSKYGWLKRQIMHRIAQRSGEETSFEQDYEYTDWERVDDFADRFATLVRACKRSPELRPRFSEMRLPTREYSLRRVRSKRRTANLYHVVANGGRLNGWVPHTGAFRCMKSPLIGRMCAKRSRTKLGLARTSRKRSQGDLLLGVKQQTNKPLPKLAASQRNGMPIWCRTNR

SEQ ID NO: 105624 - DNA, 519 bp, Wigglesworthia glossinidia endosymbiont of Glossina brevipalpis
  CDS (1)..(519): transl_table=11
atgaaaattttaatattatattccagtaaagatggtcatacaaaaaaaattgctaattttatagcaaagaatttaaataaaaataatttttgtgttgtaaaaaatttacataaaaattttaacttaaatttaaaagattataataaaataataattggagcttcagtaagatacggatacttttcttttaaattttacaaatttattaatcttaaattaaatattttaaatcaaataccaagctttttttattcagtaagcttgattgctagaaaaaaagatacattaaataacaataaatatactaaaagatttttacaaaatacattatggcgaccaaaaatatcagaggtatttgctggagccttaaagtattctaaatataatatatttaataagattttaatttattttatgtttaaaataattaaaaataatttaaatataaaaaaaaatacagaatttactaattggaataaggttgatgaattttctaaaaaaattgaaaaattaaaataa

SEQ ID NO: 105625 - protein, 172 aa, Wigglesworthia glossinidia endosymbiont of Glossina brevipalpis
MKILILYSSKDGHTKKIANFIAKNLNKNNFCVVKNLHKNFNLNLKDYNKIIIGASVRYGYFSFKFYKFINLKLNILNQIPSFFYSVSLIARKKDTLNNNKYTKRFLQNTLWRPKISEVFAGALKYSKYNIFNKILIYFMFKIIKNNLNIKKNTEFTNWNKVDEFSKKIEKLK

SEQ ID NO: 105626 - DNA, 537 bp, Photorhabdus luminescens subsp. laumondii TTO1
  CDS (1)..(537): transl_table=11
atgcattgtttattactttattccagtcgggatggacagactaagaaaattatcacccgcattgctgaaaatctacgcagatcaggggagttatgtgagctcagagatttagcaacagtaaaaacgatcaatttggaatcttatgacaagattatgattggagcttcgatcagatatggtcatttcaattcggcactgaaaaagtttgcaatctgtcatcaacagcaacttaataaaatgccaaccgcattttttggcgtgaatttgacagcaaggaagccagagaaacgtacaccagaaacaaatgtgtatgttcgtaactttctgtttaataccccgtggaagccagatttgtgtggtgtttttgctggtgcattactttatcctcgttatcattggttggatcggataatggttaaaatgattatgaaaatgaccggtggggaaactgatacaactaaagaggttgaatataccgattggcagcaagttgattattttaccgatgacttccttaaaatagtgagtgaaaaataa

SEQ ID NO: 105627 - protein, 178 aa, Photorhabdus luminescens subsp. laumondii TTO1
MHCLLLYSSRDGQTKKIITRIAENLRRSGELCELRDLATVKTINLESYDKIMIGASIRYGHFNSALKKFAICHQQQLNKMPTAFFGVNLTARKPEKRTPETNVYVRNFLFNTPWKPDLCGVFAGALLYPRYHWLDRIMVKMIMKMTGGETDTTKEVEYTDWQQVDYFTDDFLKIVSEK

SEQ ID NO: 105628 - DNA, 531 bp, Vibrio vulnificus YJ016
  CDS (1)..(531): transl_table=11
atgatagtgaaagccctatttctttattcttcccgtgaggggcagaccaagaaaatccttcaatatatagaagaacagttaccgagctatcaatgtgatgtgaagaatctacatgacatcgatacggtggatttttctgtttatgacaaagtgctgattggcgcgtcgattcgctatggtcatttgaatcagaagctctatcaatttatccagcataacctaactcagttgaatgaacataaagtggcattcttttgtgtcaacctaaccgcaagaaaagaagagcaagggaaagatacgccagagggaagcgcttatattcgaacatttcttaaaaagtctccttggcagcctaacctaatcggcgttttcgctggtgcgctctattaccccagatataactggtttgatagaaatatgatcaaactcatcatgacattaactggcggagagacggacaccagtaaagaagtggagtacaccaactggaagaaagtacgccaattctctgagaagtttgctcgtttgtag

SEQ ID NO: 105629 - protein, 176 aa, Vibrio vulnificus YJ016
MIVKALFLYSSREGQTKKILQYIEEQLPSYQCDVKNLHDIDTVDFSVYDKVLIGASIRYGHLNQKLYQFIQHNLTQLNEHKVAFFCVNLTARKEEQGKDTPEGSAYIRTFLKKSPWQPNLIGVFAGALYYPRYNWFDRNMIKLIMTLTGGETDTSKEVEYTNWKKVRQFSEKFARL

SEQ ID NO: 105630 - DNA, 564 bp, Bdellovibrio bacteriovorus HD100
  CDS (1)..(564): transl_table=11
atggcgcgcatactcatcgtctacgaatcaaaatacggtcaaacagaaaaaatctctcgcttcattgccgataaaatgaaagctcgcggacacagtgtggaccttctggaggctcacgccaagagcacagacctgtctcactatcgaactatcattgtcggaggccccgtctatgccaatggctatcctcgggctttaagcaaatgggtaagaaatcattccggtgatttaaatatcaaaccgactgcgttcttttcggtttgtttgggggttatgcagaaggatcaaaccgtccaaagaagtgaagccagaatcgtgcaaggcttcttccgcaaaacaaattggctgccaaagaagtgggcgatctttgccggagcgctgaattattcgcgctacggatggttcacaaaaagaatcatgcacaccatcgcgaaacgatctggcgctgacacggattggaaccgggactacgaatacacagattggaaagaggtttcccaatttgccgacgatgttctcgcaatacaaaacgaagaacccatgaatatgaatctcgtattttaa

SEQ ID NO: 105631 - protein, 187 aa, Bdellovibrio bacteriovorus HD100
MARILIVYESKYGQTEKISRFIADKMKARGHSVDLLEAHAKSTDLSHYRTIIVGGPVYANGYPRALSKWVRNHSGDLNIKPTAFFSVCLGVMQKDQTVQRSEARIVQGFFRKTNWLPKKWAIFAGALNYSRYGWFTKRIMHTIAKRSGADTDWNRDYEYTDWKEVSQFADDVLAIQNEEPMNMNLVF

SEQ ID NO: 105632 - DNA, 537 bp, Prochlorococcus marinus str. MIT 9515
  CDS (1)..(537): transl_table=11
atgttctggagaaaatcaaaggttttaattttatattctactgttgatggtcatacaaaaaatatatgcgaatatatttataagaaactaaaaggcaaaaaaagtgtaagtattgtttcaatagaaaaatcttcagaatataagttagaggattttaatgaagttgttattggggcaagtgttaggtacggatatcacagaaagaatgtttatgaatatattcaaaaaaatttacaagaattaaataatttaaaaacagctttcttttcattaaatttaacagcaagaaaaccagaaaaatcaactcctgagactaacccttatttaataaaattcttaaaaaaagtaaaatggaatccttcaactaaagaggtatttgctggtagattagattatccaagtttggacacatttaataaattagcaattttatttataatgtttataactaatggtccaaaagatacttcaaaaacctacgagttaactgattggaaaaaagtagataaattaattaattccatatcaaaactttga

SEQ ID NO: 105633 - protein, 178 aa, Prochlorococcus marinus str. MIT 9515
MFWRKSKVLILYSTVDGHTKNICEYIYKKLKGKKSVSIVSIEKSSEYKLEDFNEVVIGASVRYGYHRKNVYEYIQKNLQELNNLKTAFFSLNLTARKPEKSTPETNPYLIKFLKKVKWNPSTKEVFAGRLDYPSLDTFNKLAILFIMFITNGPKDTSKTYELTDWKKVDKLINSISKL

SEQ ID NO: 105634 - DNA, 540 bp, Erwinia carotovora subsp. atroseptica SCRI1043
  CDS (1)..(540): transl_table=11
atgaaagctttgatcgtgttttcgagtcgggatgggcaaacaagagcgattgcctcctatattgcgaatacgctgaaaggaacgctggagtgtgatgttgttaacgtactcaatgcgaatgatatcgatctgggtcaatacgatcaggtccttattggggcgtcgattcggtacgggcgctttcatccagcggtaaatcaatttatccataagcatctggcttctctgcgacaactgcctagcgcattcttctctgtgaacctcactgcacgtaaaccagaaaagcgtacgatacaaaccaatgcctacacgcgtaaattcctgctgaattccccttggcagccggatttgtgctgtgtgttcgcgggtgctttgcgttatccgcgttatcgttggtttgatcgggtaatgattcagctaattatgcgtatgacgggcggcgaaacggatagcactaaagaagttgaatatacggactggcagcaggttgcccgttttgcacaggatttcgctcaattagcggcgaaaaatccggcataa

SEQ ID NO: 105635 - protein, 179 aa, Erwinia carotovora subsp. atroseptica SCRI1043
MKALIVFSSRDGQTRAIASYIANTLKGTLECDVVNVLNANDIDLGQYDQVLIGASIRYGRFHPAVNQFIHKHLASLRQLPSAFFSVNLTARKPEKRTIQTNAYTRKFLLNSPWQPDLCCVFAGALRYPRYRWFDRVMIQLIMRMTGGETDSTKEVEYTDWQQVARFAQDFAQLAAKNPA

SEQ ID NO: 105636 - DNA, 516 bp, Mannheimia succiniciproducens MBEL55E
  CDS (1)..(516): transl_table=11
atgaaaacaatcattctttattcaactcatgacggacaaacgaaaaaaatagcggaatatctggctcagaatttagacaagggcgccaaagttgttaatctgaccgagctaacgcaaaaccttgcggatttcgaccgcattattatcggcgcttccattcgttacggacgctttgataaaaatctttataaatttattgaaaaacataccgcacttttacagaccaagctcggctatttttatggtgtgaatctcacagcgcgtaaggcaggtaaagatacgccggaaactaatgtttatgtacgtaagttcttagcaaagattcattggaaaccgacggattcagccgtatttgccggcgcgttgttttatccgagatacaaatggattgatcggatcatgatccaattcattatgaaaataacgggtggagagacggatcctaccaaagaaattgaatttactaactgggaaagcgtgaaaaactttgctaaaaagatccaaaatatgaattaa

SEQ ID NO: 105637 - protein, 171 aa, Mannheimia succiniciproducens MBEL55E
MKTIILYSTHDGQTKKIAEYLAQNLDKGAKVVNLTELTQNLADFDRIIIGASIRYGRFDKNLYKFIEKHTALLQTKLGYFYGVNLTARKAGKDTPETNVYVRKFLAKIHWKPTDSAVFAGALFYPRYKWIDRIMIQFIMKITGGETDPTKEIEFTNWESVKNFAKKIQNMN

SEQ ID NO: 105638 - DNA, 528 bp, Geobacter metallireducens GS-15
  CDS (1)..(528): transl_table=11
atggcaaacattctcatcatctatgccaccacggacgggcaaaccagaaggatatccaggagattgcaagaggtcatcgaacgtcagtcacaccacgtcaccgttgttcccattgaggatgcaccgagccttgacctgacggccttcgacaagatcgtcatcggggccagcatccgctacggtaagcacagcccgctgattaccgacttcatcgagaagaacaagtcatttctggagagcagaccgaacgcgtttttttcggtaaacgtcgtggcgcgaaaacccgagaagagcaagcccgagcacaacccctacctgcagaaattcctcaatcgaatagagtggaaaccgagaaagctggcagtcttcgccggaaaaatcgattatccgagctaccggtttttcgaccgcctgatgattcggctgatcatgcggatgaccaaggggccgaccgaccccaaagccgttgtggaattcaccgactggggccaggtcgaggccttcgggagagtgataagcgatatgtag

SEQ ID NO: 105639 - protein, 175 aa, Geobacter metallireducens GS-15
MANILIIYATTDGQTRRISRRLQEVIERQSHHVTVVPIEDAPSLDLTAFDKIVIGASIRYGKHSPLITDFIEKNKSFLESRPNAFFSVNVVARKPEKSKPEHNPYLQKFLNRIEWKPRKLAVFAGKIDYPSYRFFDRLMIRLIMRMTKGPTDPKAVVEFTDWGQVEAFGRVISDM

SEQ ID NO: 105640 - DNA, 555 bp, Shewanella sp. MR-4
  CDS (1)..(555): transl_table=11
atgacacgcattctggtgctttattttacccgtggtggccatacggccaagatagcgaatgcgattgcgcaacaactcacgctgcgtggcgccaaggtggacttggtggatattaatagtgcggcggcaaccaagattaactggcccgattatcaactggtagcgctaggggcttgtgtactctatggtacctacgataagagtgtatttcagtttatagagcaacacgctccggccttaagtgcgttgccaaacagtttcttctgcgtcaacgtggtggcgcgtaacccagagaaacgcatcccagagaacaacaaatacctgcaaaaattcattgccttatcaccttggactcccgccgatttgaagattatcgccggtaaggtggattacccctcgtggccctggtacgacagactgatgatccagttgattatgaaaatcaccaaaggaccaacggatcctaaggcggtgatcgattataccgactgggaagatgtgaaggtctatgccgaccatctgctaaccttggccgaggttactgaacccgcctaa

SEQ ID NO: 105641 - protein, 184 aa, Shewanella sp. MR-4
MTRILVLYFTRGGHTAKIANAIAQQLTLRGAKVDLVDINSAAATKINWPDYQLVALGACVLYGTYDKSVFQFIEQHAPALSALPNSFFCVNVVARNPEKRIPENNKYLQKFIALSPWTPADLKIIAGKVDYPSWPWYDRLMIQLIMKITKGPTDPKAVIDYTDWEDVKVYADHLLTLAEVTEPA

SEQ ID NO: 105642 - DNA, 522 bp, Shewanella sp. MR-7
  CDS (1)..(522): transl_table=11
gtgaaaaaaattctgatcatcttctcaagtgttcatggtcaaactcgcaaaatcaccaatcaattggcgcagcaactcaaagagttaggtaattctgtggtgattgcggatattaaggctgtaccggcgatggaatccttcgataagatcgttattggcgccagtattcgccacggaaaacataatccggcgttgtacgaatttattcaaaagcatcaaaagatcctcacgcaaaaggtgagcggttttttctccgtcagtttagtcgctcgtaaacctgagaaaaacaccccagaaaccaatccttatatgcaggcgtttttaagcaaaaccacttggcgcccaaccctgttgcaagtgtttggcggtaatctgaattaccaaggctataatgccttcgatagaaatatcatccgctttatcatgtggttaactaaggggccgacggatcctgtcaccaatgtggaatacactgattggcaaaaagtggatgaattcggcctacagatccatcaagcctga

SEQ ID NO: 105643 - protein, 173 aa, Shewanella sp. MR-7
MKKILIIFSSVHGQTRKITNQLAQQLKELGNSVVIADIKAVPAMESFDKIVIGASIRHGKHNPALYEFIQKHQKILTQKVSGFFSVSLVARKPEKNTPETNPYMQAFLSKTTWRPTLLQVFGGNLNYQGYNAFDRNIIRFIMWLTKGPTDPVTNVEYTDWQKVDEFGLQIHQA

SEQ ID NO: 105644 - DNA, 525 bp, Shewanella sp. ANA-3
  CDS (1)..(525): transl_table=11
atgcagacactaatcatctattcgacaattgatggccaaacactggaaatctgccgcaaaatcaaaacgcttgccgaacaagcgggtgagcaggtgtctttagtgaccttagaacaagccgaagccttaagccttgctgatttcgataaagtattgattggtgcgagcattcgttatggcaaacataggcccgatctctaccagtttgtgaatcgcaatcatgctgtgctggacagtaaaatcaacggcttttttactgtgaatgtggtggcgcgcaagccattaaagaacacgccagaaaccaatccttacatgcaaaagttcctcaagttatccctgtggcaaccacagcaattggcggtgtttgcgggcaagattgattaccctaaatacggcttattcgaccgtactatgatccgttttatcatgtggatgactaagggaccgaccgatctgaagggcaccttcgagtttaccgactggggtaaagtcgaagcctttggggcacactttagcaagctataa

SEQ ID NO: 105645 - protein, 174 aa, Shewanella sp. ANA-3
MQTLIIYSTIDGQTLEICRKIKTLAEQAGEQVSLVTLEQAEALSLADFDKVLIGASIRYGKHRPDLYQFVNRNHAVLDSKINGFFTVNVVARKPLKNTPETNPYMQKFLKLSLWQPQQLAVFAGKIDYPKYGLFDRTMIRFIMWMTKGPTDLKGTFEFTDWGKVEAFGAHFSKL

SEQ ID NO: 105646 - DNA, 522 bp, Shewanella sp. ANA-3
  CDS (1)..(522): transl_table=11
gtgaaaaaaattctgatcatcttctctagtgttcatggtcaaactcgtaaaatcaccaatcaattggcgcagcaactcaaagagttaggcaactcagtggtgattgcggatattaaggccgtccctgcgatggaatccttcgataagatcattattggcgccagcattcgccatgggaaacataaccccgcgctgtacgagtttattcagaagcatcaacagatcctcacacaaaaggtgagtggctttttctccgtcagtttagtcgcccgtaagccagagaaaaatacccctgaaaccaatccctatatgcaggcgtttttaagtaaaacgacgtggcgccctaagctgttacaggtatttggcggtaacttaaattaccaaggctataacgcgttagatagaaatatcatccgctttatcatgtggttaactaaggggcctacggatcctgtcactaatgtggaatacactgactggcaaaaagtgaatgattttggccaacagatccatcaagcctaa

SEQ ID NO: 105647 - protein, 173 aa, Shewanella sp. ANA-3
MKKILIIFSSVHGQTRKITNQLAQQLKELGNSVVIADIKAVPAMESFDKIIIGASIRHGKHNPALYEFIQKHQQILTQKVSGFFSVSLVARKPEKNTPETNPYMQAFLSKTTWRPKLLQVFGGNLNYQGYNALDRNIIRFIMWLTKGPTDPVTNVEYTDWQKVNDFGQQIHQA

SEQ ID NO: 105648 - DNA, 513 bp, Haemophilus somnus 2336
  CDS (1)..(513): transl_table=11
atgaagacattgattttatatttaagccgagagggtcagactaaaaaaatcgcagaatatataggcacaaaatttgaaaaaagtgcggtacaatctttgcttgatttttctggtgatttagctaccttcgatcgtattattattggtgcctcggttcgctatggtcattttgatcaaagactttatcaatttttgcaaaaaaataccgcacttttacagcagaaagagagcagtttttttggtgtgaatttgacagctcgtaaagaaaataagaatacaccggaaacgaatgtttatgttaggaagtttttacaacgtattcggtggaaacccaaatatgtaggggtgtttgccggagcgttgttttatcctcgttattcttggtttgatcggatgatgattagattaataatgaaaataacagggggtgaaaccgatgtaagtaaagaaattgaatatacagattgggaaaaagtagacgattttgtactaaaaattagacaaggtgaatga

SEQ ID NO: 105649 - protein, 170 aa, Haemophilus somnus 2336
MKTLILYLSREGQTKKIAEYIGTKFEKSAVQSLLDFSGDLATFDRIIIGASVRYGHFDQRLYQFLQKNTALLQQKESSFFGVNLTARKENKNTPETNVYVRKFLQRIRWKPKYVGVFAGALFYPRYSWFDRMMIRLIMKITGGETDVSKEIEYTDWEKVDDFVLKIRQGE

SEQ ID NO: 105650 - DNA, 537 bp, Photobacterium sp. SKA34
  CDS (1)..(537): transl_table=11
atggaaaaggtattgttgctgcattcgagttgtgaagggcaaaccaagaaaatcttaaatcatattgagcaacaattaggtgagcaatatcactgcgactatgtagacattcatagtgagcttaatattgattttagtttgtatgatcgtgtacttattggtgcttctattcgttatggccacttcaataagaaactgtatcgctttatcaataaataccaacaagaactgtcacaacataatgttgctttcttctgcgtaaatctcactgcgcgtaaagaaggtaaagatacgccagagggcagtgcttatattaagaagttcttaattaagtcaccatggcaccctgtgttaatcggcgtttttgctggcgcacttagatatcctcgttataacttctttgatcgcacaatgattaagttgattatgaaaatcacaggtggagaaacggatacgacgaaagaagtggagtacacggattggaataaagtgagcgattttgctgcgcaatttaagcagcaaaggaatgaaaaatag

SEQ ID NO: 105651 - protein, 178 aa, Photobacterium sp. SKA34
MEKVLLLHSSCEGQTKKILNHIEQQLGEQYHCDYVDIHSELNIDFSLYDRVLIGASIRYGHFNKKLYRFINKYQQELSQHNVAFFCVNLTARKEGKDTPEGSAYIKKFLIKSPWHPVLIGVFAGALRYPRYNFFDRTMIKLIMKITGGETDTTKEVEYTDWNKVSDFAAQFKQQRNEK

SEQ ID NO: 105652 - DNA, 28 bp, Artificial sequence
  primer
atgaaaacattaattcttttctcaacaa

SEQ ID NO: 105653 - DNA, 23 bp, Artificial sequence
  primer
ttatttcagcgtcggtttgtcgg

SEQ ID NO: 105654 - protein, 168 aa, Artificial sequence
  consensus sequence
  Variant (2)..(8): Xaa in position 2 to 8 is any amino acid
  Variant (12)..(13): Xaa in position 12 to 13 is any amino acid
  Variant (15)..(21): Xaa in position 15 to 21 is any amino acid
  Variant (23)..(44): Xaa in position 23 to 44 is any amino acid
  Variant (45)..(51): Xaa in position 45 to 51 is any or no amino acid
  Variant (56)..(56): Xaa in position 56 is any amino acid
  Variant (60)..(67): Xaa in position 60 to 67 is any amino acid
  Variant (69)..(75): Xaa in position 69 to 75 is any amino acid
  Variant (77)..(82): Xaa in position 77 to 82 is any amino acid
  Variant (84)..(85): Xaa in position 84 to 85 is any amino acid
  Variant (87)..(89): Xaa in position 87 to 89 is any amino acid
  Variant (93)..(94): Xaa in position 93 to 94 is any amino acid
  Variant (95)..(96): Xaa in position 95 to 96 is any or no amino acid
  Variant (98)..(99): Xaa in position 98 to 99 is any amino acid
  Variant (101)..(103): Xaa in position 101 to 103 is any amino acid
  Variant (104)..(104): Xaa in position 104 is any or no amino acid
  Variant (106)..(108): Xaa in position 106 to 108 is any amino acid
  Variant (111)..(114): Xaa in position 111 to 114 is any amino acid
  Variant (116)..(116): Xaa in position 116 is any amino acid
  Variant (118)..(123): Xaa in position 118 to 123 is any amino acid
  Variant (126)..(126): Xaa in position 126 is any amino acid
  Variant (128)..(128): Xaa in position 128 is any amino acid
  Variant (130)..(131): Xaa in position 130 to 131 is any amino acid
  Variant (133)..(135): Xaa in position 133 to 135 is any amino acid
  Variant (137)..(139): Xaa in position 137 to 139 is any amino acid
  Variant (141)..(142): Xaa in position 141 to 142 is any amino acid
  Variant (145)..(148): Xaa in position 145 to 148 is any amino acid
  Variant (150)..(150): Xaa in position 150 is any amino acid
  Variant (153)..(157): Xaa in position 153 to 157 is any amino acid
  Variant (159)..(159): Xaa in position 159 is any amino acid
  Variant (163)..(164): Xaa in position 163 to 164 is any amino acid
  Variant (166)..(167): Xaa in position 166 to 167 is any amino acid
LXXXXXXXGQTXXIXXXXXXXLXXXXXXXXXXXXXXXXXXXXXXXXXXXXXIGASXRYGXXXXXXXXFXXXXXXXLXXXXXXFXXVXXXARKXXXXKXXPXXXXYXXXFLXXXXWXPXXXXXXAGXLXYXXYXXXDXXXIXXIMXXXXGXTDXXXXXEXTDWXXVXXF

SEQ ID NO: 105655 - protein, 35 aa, Artificial sequence
  protein pattern
  Variant (3)..(6): Xaa in position 3 to 6 is any amino acid
  Variant (8)..(8): Xaa in position 8 is any amino acid
  Variant (10)..(13): Xaa in position 10 to 13 is any amino acid
  Variant (14)..(14): Xaa in position 14 is Cys or Val
  Variant (15)..(15): Xaa in position 15 is Phe or Ile
  Variant (16)..(16): Xaa in position 16 is Ala or Gly
  Variant (18)..(18): Xaa in position 18 is any amino acid
  Variant (19)..(19): Xaa in position 19 is Ile or Leu
  Variant (20)..(20): Xaa in position 20 is any amino acid
  Variant (22)..(22): Xaa in position 22 is Pro, Gln or Ser
  Variant (23)..(28): Xaa in position 23 to 28 is any amino acid
  Variant (29)..(29): Xaa in position 29 is Lys or Arg
  Variant (30)..(31): Xaa in position 30 to 31 is any amino acid
  Variant (32)..(32): Xaa in position 32 is Ile, Leu, Met or Val
  Variant (33)..(34): Xaa in position 33 to 34 is any amino acid
  Variant (35)..(35): Xaa in position 35 is Ile or Met
FLXXXXWXPXXXXXXXGXXXYXXXXXXXXXXXXXX

SEQ ID NO: 105656 - protein, 25 aa, Artificial sequence
  protein pattern
  Variant (2)..(2): Xaa in position 2 is any amino acid
  Variant (3)..(3): Xaa in position 3 is any or no amino acid
  Variant (6)..(11): Xaa in position 6 to 11 is any amino acid
  Variant (12)..(12): Xaa in position 12 is Phe or Tyr
  Variant (14)..(14): Xaa in position 14 is Asp or Asn
  Variant (16)..(17): Xaa in position 16 to 17 is any amino acid
  Variant (19)..(20): Xaa in position 19 to 20 is any amino acid
  Variant (21)..(21): Xaa in position 21 is Phe or Tyr
  Variant (22)..(22): Xaa in position 22 is Ala, Gly, Ser, Thr or Val
  Variant (23)..(24): Xaa in position 23 to 24 is any amino acid
  Variant (25)..(25): Xaa in position 25 is Phe, Ile, Leu or Val
GXXTDXXXXXXXTXWXXVXXXXXXX

SEQ ID NO: 105657 - protein, 8 aa, Artificial sequence
  protein pattern
  Variant (5)..(5): Xaa in position 5 is Ile or Val
  Variant (7)..(7): Xaa in position 7 is His or Tyr
IGASXRXG

SEQ ID NO: 105658 - protein, 13 aa, Artificial sequence
  protein pattern
  Variant (2)..(2): Xaa in position 2 is Phe or Tyr
  Variant (3)..(3): Xaa in position 3 is Ala, Cys, Gly, Ser or Thr
  Variant (5)..(5): Xaa in position 5 is Asn or Ser
  Variant (6)..(6): Xaa in position 6 is Leu or Val
  Variant (7)..(7): Xaa in position 7 is any amino acid
  Variant (10)..(12): Xaa in position 10 to 12 is any or no amino acid
FXXVXXXARXXXK

SEQ ID NO: 105659 - DNA, 621 bp, Escherichia coli
  CDS (1)..(621): transl_table=11
atgagctataccctgccatccctgccgtatgcttacgatgccctggaaccgcacttcgataagcagaccatggaaatccaccacaccaaacaccatcagacctacgtaaacaacgccaacgcggcgctggaaagcctgccagaatttgccaacctgccggttgaagagctgatcaccaaactggaccagctgccagcagacaagaaaaccgtactgcgcaacaacgctggcggtcacgctaaccacagcctgttctggaaaggtctgaaaaaaggcaccaccctgcagggtgacctgaaagcggctatcgaacgtgacttcggctccgttgataacttcaaagcagaatttgaaaaagcggcagcttcccgctttggttccggctgggcatggctggtgctgaaaggcgataaactggcggtggtttctactgctaaccaggattctccgctgatgggtgaagctatttctggcgcttccggcttcccgattatgggcctggatgtgtgggaacatgcttactacctgaaattccagaaccgccgtccggactacattaaagagttctggaacgtggtgaactgggacgaagcagcggcacgttttgcggcgaaaaaataa

SEQ ID NO: 105660 - protein, 206 aa, Escherichia coli
MSYTLPSLPYAYDALEPHFDKQTMEIHHTKHHQTYVNNANAALESLPEFANLPVEELITKLDQLPADKKTVLRNNAGGHANHSLFWKGLKKGTTLQGDLKAAIERDFGSVDNFKAEFEKAAASRFGSGWAWLVLKGDKLAVVSTANQDSPLMGEAISGASGFPIMGLDVWEHAYYLKFQNRRPDYIKEFWNVVNWDEAAARFAAKK

SEQ ID NO: 105661 - DNA, 928 bp, Oryza sativa
  CDS (63)..(758)
gacctgccactcgcccactcctcctcctcccccatcctccagtgctacggtgtcacgcagccatggcgctccgcacgctggcctcgaggaaaaccctagccgccgcggcgctgccgctggctgcggcggcggcggcgaggggtgtgacgaccgtcgcgctcccggacctcccctacgactacggcgcgctggagccggccatctccggggagatcatgcgcctgcaccaccagaagcaccacgccacctacgtcgccaactacaacaaggccctcgagcagctcgacgccgccgtcgccaagggcgacgcccccgccatcgtgcacctccagagcgccatcaagttcaacggcggaggccatgtcaatcattcgatcttctggaataacctcaagcctatcagcgagggtggtggtgatccaccacatgcaaaacttggctgggccattgatgaggattttggttcatttgaggcacttgtaaagaagatgagtgcagaaggtgctgctttacaaggatctggatgggtgtggctagctttggataaagaggcaaagaagctttcagtggaaacaactgctaaccaggaccctctggtaacgaagggggccaacttggttcctttgttgggaattgatgtctgggagcatgcgtactacctgcagtacaagaatgtcaggccagactacctgagcaacatctggaaggtgatgaactggaaatacgcaggggaggtgtacgaagatgcgactgcttgatgttgtctgaaggcaacgctcatggttttttttcacctagtactgccatggatctttgtatgcaataaaaatgggcctattgcacttctggaccttgtgtacattgcgtagaggtggactaatgcataacataatatgcctgagattttcttcttgtgctgctttcctgc

SEQ ID NO: 105662 - protein, 231 aa, Oryza sativa
MALRTLASRKTLAAAALPLAAAAAARGVTTVALPDLPYDYGALEPAISGEIMRLHHQKHHATYVANYNKALEQLDAAVAKGDAPAIVHLQSAIKFNGGGHVNHSIFWNNLKPISEGGGDPPHAKLGWAIDEDFGSFEALVKKMSAEGAALQGSGWVWLALDKEAKKLSVETTANQDPLVTKGANLVPLLGIDVWEHAYYLQYKNVRPDYLSNIWKVMNWKYAGEVYEDATA

SEQ ID NO: 105663 - DNA, 940 bp, Glycine max
  CDS (56)..(778)
accagctccactctagcgttgttgcattgcagaagcgtctccattttctttcgcgatggccgcgcgagccctgttgaccagaaaaaccctagccaccgttctccgcaacgacgcgaagcccataatcggagctggcatagctgcagctactcattctcgtgggttgcacgtgtacacgctccccgatctggattacgactatggcgctctggagccagccatcagcggcgaaatcatgcagctgcaccaccagaagcaccaccagacttacatcaccaacttcaacaaggccctcgagcagctccaagacgccgtcgccaagaaagattcctccgccgtcgttaagctccagggcgccatcaagttcaacggcggaggtcacgtcaaccattctattttctggaaaaatctagctcctgttcgtgaaggaggtggtgaaccacccaagggttcactgggatgggccattgacacacattttggctcttttgaagcattagtacaaaaagttaatgcagaaggtgctgcactacaggggtctggatgggtgtggcttggtctggacaaagagttgaagaggcttgtagttgaaaccactgccaaccaggacccactggttactaagggaccaaatttggttccattgcttggtattgatgtttgggagcatgcgtactacttacagtacaagaatgttagaccagactatcttaagaacatttggaaagttattaattggaaatatgccagtgaagtgtatgagaaagagagctcttagtctgaagggctacttgatatagctcctgggatgacagatttgcagcacggtaacgagatgtggaataaaatatgatggatgtgatgtattagacagctactatttttaatgattgactgagaacctcaggcattgatggctggatttctttggctaagtccc

SEQ ID NO: 105664 - protein, 240 aa, Glycine max
MAARALLTRKTLATVLRNDAKPIIGAGIAAATHSRGLHVYTLPDLDYDYGALEPAISGEIMQLHHQKHHQTYITNFNKALEQLQDAVAKKDSSAVVKLQGAIKFNGGGHVNHSIFWKNLAPVREGGGEPPKGSLGWAIDTHFGSFEALVQKVNAEGAALQGSGWVWLGLDKELKRLVVETTANQDPLVTKGPNLVPLLGIDVWEHAYYLQYKNVRPDYLKNIWKVINWKYASEVYEKESS

SEQ ID NO: 105665 - DNA, 882 bp, Glycine max
  CDS (1)..(882)
atgggttctcttgcaaattctcccacgcgtccgcttacgagtacgcccacgcgtccgcccacgcgtccgtacggctgcgagaagacgacagaagggggtcctaaatcctcattccagccacacgcttcagaagacatggcctcattgggtgggttacaaaatgtgagcggcatcaattttcttatcaaagagggtccaaaagtcaatgcaaagttcgagctgaagccgccaccatatccactgaatggtttggagccggtgatgagccagcagacacttgagtttcactgggggaagcaccacaagacttatgtggaaaatctgaaaaaacaagttgttgggacagagcttgatgggaagtcactagaagagattattgtcacatcatacaataagggtgacattcttccagctttcaacaatgcagcacaggtatggaaccatgacttcttctgggagtgcatgaaaccaggtggaggtggaaagccatccggggagcttctagaactgattgaaagagactttggttcatttgtaaaattccttgatgagttcaaggctgctgctgcaacacaatttggttcagggtgggcttggctagcatatagagcaagaaaatttgatggggaaaatgtagcaaatcctccttcacccgatgaggacaacaagctagtggtgctcaagagtcccaatgctgtgaacccccttgtttggggaggttactacccacttcttaccattgatgtttgggagcatgcttactaccttgattttcagaaccggcgtcctgattatatatcagtgttcatggataagcttgtttcctgggatgcagtgagctctagacttgaacaagctaaggctttaattaccagtgcatga

SEQ ID NO: 105666 - protein, 293 aa, Glycine max
MGSLANSPTRPLTSTPTRPPTRPYGCEKTTEGGPKSSFQPHASEDMASLGGLQNVSGINFLIKEGPKVNAKFELKPPPYPLNGLEPVMSQQTLEFHWGKHHKTYVENLKKQVVGTELDGKSLEEIIVTSYNKGDILPAFNNAAQVWNHDFFWECMKPGGGGKPSGELLELIERDFGSFVKFLDEFKAAAATQFGSGWAWLAYRARKFDGENVANPPSPDEDNKLVVLKSPNAVNPLVWGGYYPLLTIDVWEHAYYLDFQNRRPDYISVFMDKLVSWDAVSSRLEQAKALITSA

SEQ ID NO: 105667 - DNA, 1182 bp, Glycine max
  CDS (56)..(910)
ggctcgagctcgagccgctcgagccgctcgagcggctcgagcgcctcagtagaccatggcctcattgggtgggttacaaaatctaagcggcatcaattttcttatcaaaaaagagggtccaaaagtcaatgcgaagttcgagctgaagccgccaccatatccactgaatggtttggagccggtgatgagccagcagacacttgagtttcattgggggaaacaccacaagacatatgtggaaaatctgaaaaaacaaattgttgggacagagcttgatgggaaatcactagaagagattatagtgacatcatataataagggtgacattcttccagctttcaacaatgcagcacaggtatggaaccatgacttcttctgggagtgcatgaaacctggtggtggtggaaggccatctggggatcttctaaatctgattgaaagagactttggttcattcgaaaaattccttgatgagttcaagactgctgcttcaacacagtttggttcaggatgggcatggcttgcatataaagaaagcagacttgacgtggaaaatgctgtgaaccctcttcaatctgatgaggacaagaagctagttgtggtgaagactcccaatgctgtaaacccccttgtttggaactactatcatccactccttaccattgatgtttgggagcatgcttacttcattgactttcagaaccagcgccgtgattatatatcagttttcatggataagcttgtgtcttgggatgcagtcagctcaagacttgagcaagccaaggctctaatcaaggagagagagagagaggctgagaggaaaagaagagaggaagaagagaaacggacaagcagtgaagccattcctgagatatattctgatggtgatgctgacttggatgcagaatgagtaattttatttgcaaatagatgtagtttaaaattatgtatcctttgcactagctaggtgtggtatagaggctcaatcacttcaagctgcaaattttgttttatgataaatgttgtaatttagtgtttcttagttcattcatgcattgatggcataaagtctgattttatagattgtgtttcaaaaaccaattagactttgaggttgtcagaaaaaaatttgtatttctttctgaaaggaaaaaaaaaaatcttactcagttgagcattgat

SEQ ID NO: 105668 - protein, 284 aa, Glycine max
MASLGGLQNLSGINFLIKKEGPKVNAKFELKPPPYPLNGLEPVMSQQTLEFHWGKHHKTYVENLKKQIVGTELDGKSLEEIIVTSYNKGDILPAFNNAAQVWNHDFFWECMKPGGGGRPSGDLLNLIERDFGSFEKFLDEFKTAASTQFGSGWAWLAYKESRLDVENAVNPLQSDEDKKLVVVKTPNAVNPLVWNYYHPLLTIDVWEHAYFIDFQNQRRDYISVFMDKLVSWDAVSSRLEQAKALIKEREREAERKRREEEEKRTSSEAIPEIYSDGDADLDAE

SEQ ID NO: 105669 - DNA, 1390 bp, Zea mays
  CDS (40)..(816)
cggccgggccgggaatttggatagcgcggcgcaggaaaaatggcggcttccgctctccacctccgcctccacccctcgccgccggcgggtgtgaagcttcagcagcggaaactgcgctcgaaaatacagaggcagggtggcctatctcgaagattttcaaaagttgtgtcctattacggtctcacaaccccaccatataaactggatgctctggaaccttatatgagcaagaggacagttgaacttcactggggtaagcaccatcaagattacgtggatggcttgaataagcagttggctaccagccctctgtatggatacactctggaggatctgataaaagaagcttataacaatggcaatccattaccagagtataacaacgcagcacaggtctggaaccatcacttcttctgggaatcaatgcaaccagaaggtggtggcttacctgagggaggtgtgctgcagcagattgaaaaggattttggctcgtttactaattttagggaagagtttatccgctcagccttacagctgttagggtctggttgggtttggcttgtcttgaagagaaatgagagaaagctttcggttgttcatacacgaaatgctatctccccacttgcttttggtgacattccaatcatcagcctagacttgtgggagcacgcttactacttagactacaaggatgataagctaacatatgtcacaaactttatggaccatcttgtctcttggcatactgtcactctacgcatgatgcgtgcagagtcttttgtgaaccttggtgagccaaatatcccagaggcttgagctacagatacaccctagttatcatcgtgaggcattcttcggatacatcggatcaaatcctgctggaggaaccagagagttggaaaatctcatgtctcacaagaaatgcttatcaccccaatgtcatacacgccaagataagctgctgggatttcaccattgcccttggatattgctacaaggaaatcactagtcagcatccagtttgaagacatgcaacaaaacagctctagaagctatggagctggtagattctggagttggcagtgaggcagtgatccaacttgggctttgaagccatggtgctttctctagacggctattatttccatagtgttgttagaataatcctggttctgtgttttcataacttcatcatgctagggttctgttgtagcgtaacgcagaatggaacggaacaatattcttgttttactggttgagaaacctgttagttttggactgcagggaaatcttttacttgtatcagacgctgcaagcatggactttttttgtctggaaggaagttgaaacttctgaacttgaatgcaatactatagccatccaattccaa

SEQ ID NO: 105670 - protein, 258 aa, Zea mays
MAASALHLRLHPSPPAGVKLQQRKLRSKIQRQGGLSRRFSKVVSYYGLTTPPYKLDALEPYMSKRTVELHWGKHHQDYVDGLNKQLATSPLYGYTLEDLIKEAYNNGNPLPEYNNAAQVWNHHFFWESMQPEGGGLPEGGVLQQIEKDFGSFTNFREEFIRSALQLLGSGWVWLVLKRNERKLSVVHTRNAISPLAFGDIPIISLDLWEHAYYLDYKDDKLTYVTNFMDHLVSWHTVTLRMMRAESFVNLGEPNIPEA

SEQ ID NO: 105671 - DNA, 1335 bp, Triticum aestivum
  CDS (31)..(813)
tctcctctcctcgccggcgccaccgcccccatgctcctcccagtgcgcggcctcccggccgcccctccccgcccgctcgcccacccacacaccgcccccgcgccgccgccctccctcctcggtccccggcgccgccgtccgtcccggaggctctccaaggtcgtgtcctactacggcctcaccactccgccgtacaaaaccgacgccctggagccgtacatgagcaggcgggcggtggagctgcactggggcaagcaccagcaggactacgtggacgggctcaacaggcagctcgccatcagcccgctctacggccacaccctcgaggacctcatcaaggaggcctacaacaacggcaacccgctgcccgagtacaacgacgcggccgaggtctggaaccatcacttcttctgggaatcgatgcagccggaaggcggcggctcgcccgaggcaggtgtgctgcagcagatcgagaaggatttcggctccttttttaatttcagggaggagttcatgcgctcggcgttgtcgttgttggggtctggttgggtttggcttgtcttgaagagaagcgagaggaagcttgaggtggttcacacgcgaaacgctatcaacccacttgcttttggagatattccaatcatcagcctagacttgtgggagcatgcttactacttggattacaaggatgacaggcgaacatatgtgtcaaactttctggatcaccttgtctcttggcatactgtcactctacgcatgatgcgcgcggaggcttttgtgaaccttggtgaaccaactatcccagtggcatgagatgatatggacatgacctggagttgtctctaaatatgtcaatctcacgagggatgccaaggaaaatcctgaaccacatcctactggatgagacggagagtttgcggggggcagcctgatgtaaccacgtcatgcaatgcacggtgaacaagtaagctctgcctggagataagacagctgatgtttcgtcgttgtcctcattcgtcgctacagggaagtgacctcccatttcaagttattatgcggtaaaagcagaaatggacgcttcagagcacgggcacttgagtttagactttagagtacgcgcccgcgatctaacttgtgcttgaagccacagaactttatgtcttcagaacaatctccccatggtgctgttagagcagcccctagttttccaccgacttgtaggcacagcttttcatcattctgttgcaacagaattcagccattgtgggccgaggcagattcccccatgaatgtttgccttgctcaaacatactcttctttttcatcaatagttgc

SEQ ID NO: 105672 - protein, 260 aa, Triticum aestivum
MLLPVRGLPAAPPRPLAHPHTAPAPPPSLLGPRRRRPSRRLSKVVSYYGLTTPPYKTDALEPYMSRRAVELHWGKHQQDYVDGLNRQLAISPLYGHTLEDLIKEAYNNGNPLPEYNDAAEVWNHHFFWESMQPEGGGSPEAGVLQQIEKDFGSFFNFREEFMRSALSLLGSGWVWLVLKRSERKLEVVHTRNAINPLAFGDIPIISLDLWEHAYYLDYKDDRRTYVSNFLDHLVSWHTVTLRMMRAEAFVNLGEPTIPVA

SEQ ID NO: 105673 - DNA, 1265 bp, Triticum aestivum
  CDS (3)..(680)
ccatggcgctccgcacgttggccgcgaagaaaaccctaggcctggcgctcggcggcgccaggggcgtggcgacgttcacgctccccgacctcccctacgactacggtgcgctggagccggccgtctccggcgagatcatgcgcctgcaccaccagaagcaccacgccacctacgtcgcccactacaacaaggcgctcgagcagctcgacgccgccgtcagcaagggggacgcgtccgccgtcgtccacctccagagcgccatcaagttcaacggcggcggtcatgttaaccattccatcttctggaagaacctcaagcctattagcgagggtggtggtgaggcacctcatggcaaacttggctgggccattgatgaggattttggttctattgagaaacttataaagaagatgaatgcagagggtgctgctttacaaggatctggatgggtgtggctagctttggataaagaggccaaaaggctttcagttgaaactactcctaatcaggaccctcttgtgaccaaagggtcaaacctgcatcctttgttgggaattgatgtctgggagcatgcgtactacctgcagtacaagaacgtgaggccggactacctgaccaacatctggaaggtggtgaactggaaatacgctggagaagagtatgaaaaagtgcttgcgtgatttgtctgatgagtagacagacagtacttctcgccctcttgagttccgctgttggatctgtacatgcagtaataaaagtgggcactattccactgtcgggattcgtctgtacattgcatagaggtggactactgtctaatgcgcacaacagtgcccgtccgttttggtacttgttactgtgcctgcgtggcctataaactcattcgctagtgctgttgctgcgtgatttgtctgatgagtagacaggctcgctcttgagtttcccgctgttggatctttgtatatgcagtaataaaagtgggcactattccactgtcgggaccttctgtacattgcatagaggtgacactactgtctaaagcgcactagtgcatgtccattttggtacttgttactgtgcctgcgttgctaataaactcattcgctagtgctgtttcagtccttgtgtgcacgtattagtatgtgtgggtgataatctgccgagattttgatgttatgttaacgtttgcgtgcatggactaagcacaccaagcatgcttttactggtttgggtgtgtagtaaaaaaaaaaaaaaaaaaactcgag

SEQ ID NO: 105674 - protein, 225 aa, Triticum aestivum
MALRTLAAKKTLGLALGGARGVATFTLPDLPYDYGALEPAVSGEIMRLHHQKHHATYVAHYNKALEQLDAAVSKGDASAVVHLQSAIKFNGGGHVNHSIFWKNLKPISEGGGEAPHGKLGWAIDEDFGSIEKLIKKMNAEGAALQGSGWVWLALDKEAKRLSVETTPNQDPLVTKGSNLHPLLGIDVWEHAYYLQYKNVRPDYLTNIWKVVNWKYAGEEYEKVLA

SEQ ID NO: 105675 - DNA, 812 bp, Triticum aestivum
  CDS (56)..(799)
  misc_feature (719)..(719): n is a, g, c or t
ctgtgcggcgctcaggcggcggctcggatctcacagatctcattaattcttccctatggcttccgctcttcttcgatcaactcccgccctccgcgctggcctgcgcgcccgctctactcccctcgcggctatggctaccaccagcttcgtccgcggcaaggccactctccccgatcttccctacgactatggcgctcttgagccctacatctctggccagatcatggagcttcaccactccaagcaccaccagacctacgttaccggcttcaacaacgctaccgacgccatcgccgaggccaaccacaagggcgacgccaaggctgctgccgctcaggctcctctcctcaacttccacggcggtggtcacgtcaaccactccctcttctgggagaaccttgctcccaacggtaagggcggtggtggtgagcccgagggcaagcttctgacttccatcaacgaggactttggctccttcgaggccttcaagaagcagaccaacgctaccctcgccggtatccagggctccggctgggcctggctcgtcaaggacaagaacgctggcactctgtccatcgttacccgacccaaccaggaccccgtcaccggtaaccttgagcccctcctcggcattgacgcctgggagcacgcctactaccttcagtaccagaaccgcaaggccgagtacttcagcgccatctgggacgtcatcaactggngcactgtcgccaagcgatttgagaagaaatcaatccatattagtaaagtgaagagcttgagtggagataatgtcaaatagcgatgacttgcgc

SEQ ID NO: 105676 - protein, 247 aa, Triticum aestivum
  misc_feature (222)..(222): The Xaa at location 222 stands for Arg, Cys, Gly, or Ser.
MASALLRSTPALRAGLRARSTPLAAMATTSFVRGKATLPDLPYDYGALEPYISGQIMELHHSKHHQTYVTGFNNATDAIAEANHKGDAKAAAAQAPLLNFHGGGHVNHSLFWENLAPNGKGGGGEPEGKLLTSINEDFGSFEAFKKQTNATLAGIQGSGWAWLVKDKNAGTLSIVTRPNQDPVTGNLEPLLGIDAWEHAYYLQYQNRKAEYFSAIWDVINWXTVAKRFEKKSIHISKVKSLSGDNVK

SEQ ID NO: 105677 - DNA, 1007 bp, Zea mays subsp. mays
  CDS (227)..(928)
tctagtctagtacacgaatcacgaacgcgtccacctgcgcgcatcgccacgcaggttctctccaccaaaccttaacctccccttccagaaaccctccaagaggcagctcaaaggaatagtgagccgccccgccgctcctcagccatcctctccatctcggtgtcacacactccgcatacgcacctacgagagtcgagtgacagcgagcgagcgagcgagcgaagccatggctctccgcaccctggcatcgaagaacgccctatccttcgcgctcggcggcgcggcccggccgtcggcggcgtccgcgaggggggtgacgacggtcgcgctccccgacctctcctacgacttcggcgcgctggagccggccatctcgggggagatcatgcgcctgcaccaccagaagcaccacgccacctacgtcgccaactacaacaaggcgctggagcagctcgacgctgccgtcgccaagggcgacgcctccgctgtcgtccagctccagggcgccatcaagttcaacggcggcggtcatgtgaaccattcaatcttttggaagaacctcaagcctattagcgaaggtggtggggagccgccacatgggaaacttggctgggccatcgatgaggattttggttcatttgaggcacttgtaaagaggatgaatgcagaaggcgctgctttacaaggatctggatgggtgtggttagctttggataaagaggcaaaaaagctttcagttgaaactacagctaatcaggatcctctggtgactaaaggtgcaagcttggttccgctgttggggattgatgtctgggagcatgcgtactacctgcagtacaagaatgttaggccggattacctgaacaacatctggaaggtgatgaactggaaatatgctggagaggtgtacgaaaatgttcttgcttgaattgtcttaatggacaatactcatctgcgcgggtttgttttcggctgtttgaccatgtgaaataaagatggacttgtgt

SEQ ID NO: 105678 - protein, 233 aa, Zea mays subsp. mays
MALRTLASKNALSFALGGAARPSAASARGVTTVALPDLSYDFGALEPAISGEIMRLHHQKHHATYVANYNKALEQLDAAVAKGDASAVVQLQGAIKFNGGGHVNHSIFWKNLKPISEGGGEPPHGKLGWAIDEDFGSFEALVKRMNAEGAALQGSGWVWLALDKEAKKLSVETTANQDPLVTKGASLVPLLGIDVWEHAYYLQYKNVRPDYLNNIWKVMNWKYAGEVYENVLA

SEQ ID NO: 105679 - DNA, 618 bp, Moraxella catarrhalis
  CDS (1)..(618): transl_table=11
atggcattcactctaccagagttgggctacagctacgatgcactagagccacattttgacaaagaaacgatggaaattcaccattcacgccaccatcaagcttatgttaataacgccaatggtctgcttgaaggtactcagtgggcggataaatctgctgaagaggttatcgcaaatcttgaccaaatcccagcagacaaaagaacaggcgtcagaaataatgctggtggtcatgccaaccatagcctattttggaccattttaaaaacaggcacgactttgggcggatcattaaaagatgccatcgtgagagattttggttctgttgaagcattccaagaacagtttgaaaaagcagccgccagccgttttggttcaggttgggcgtggttggtacttgatgaaggttcgctaaaagttgtctcgaccgccaaccaagatagcccattgatgggtgaagcggtcgcaggctgcaagggatatcctatcattggtttggatgtgtgggagcatgcttattatctaaaataccaaaataaacgcccagattatatcaaagctttttgggaagtggttaactgggacgaagcacaaaagcgttttgactcagcaaactaa

SEQ ID NO: 105680 - protein, 205 aa, Moraxella catarrhalis
MAFTLPELGYSYDALEPHFDKETMEIHHSRHHQAYVNNANGLLEGTQWADKSAEEVIANLDQIPADKRTGVRNNAGGHANHSLFWTILKTGTTLGGSLKDAIVRDFGSVEAFQEQFEKAAASRFGSGWAWLVLDEGSLKVVSTANQDSPLMGEAVAGCKGYPIIGLDVWEHAYYLKYQNKRPDYIKAFWEVVNWDEAQKRFDSAN

SEQ ID NO: 105681 - DNA, 996 bp, Nicotiana plumbaginifolia
  CDS (99)..(785)
ggggggggggggggggctggcctctctgggcatgacctgcaactataaaaggacaccatagagttaacagctagaaagcatttaggaatatctcaaaaatggcactacgaaccctagtgagcagacggaccttagcaacagggctagggttccgccagcaactccgcggcttgcagaccttttcgctccccgatctcccctacgactatggagcactggagccggcaattagcggtgacataatgcagctccaccaccagaatcaccatcagacttacgtcaccaattacaataaagcccttgaacagctacatgacgccatttccaaaggagatgctcctaccgtcgccaaattgcatagcgctatcaaattcaacggcggaggtcacattaaccactcgattttctggaagaatcttgcccctgtccgcgagggtggtggtgagcctccaaagggttctgttggttgggctatcgacactaactttggctccctagaagctttagttcaaaagatgaatgcagaaggtgctgctttacagggctctggctgggtgtggcttggtgtggacaaagagcttaagcgcctggtgattgaaaccactgctaatcaggaccctttggtttctaaaggagcaaatttggttcctcttctgggaatagacgtttgggaacatgcatactacttgcagtacaaaaatgtaagacctgattatctgaagaacatatggaaagttatgaactggaaatatgcaaatgaagtttatgagaaagaatgtccttgaacagggatatttgatgttgttttgaggacgtctgtaaaactttttgatgggaaataaggctgagtgacatgagcaggtgtcctgtttttcttgcatgtagtcgctggctgatgtacttgatgtatttctggaaaaggttgatgtatgtacttgatatatggagcctaaataaaactactctatcgtttgagcgcaaacccccccccccccc

SEQ ID NO: 105682 - protein, 228 aa, Nicotiana plumbaginifolia
MALRTLVSRRTLATGLGFRQQLRGLQTFSLPDLPYDYGALEPAISGDIMQLHHQNHHQTYVTNYNKALEQLHDAISKGDAPTVAKLHSAIKFNGGGHINHSIFWKNLAPVREGGGEPPKGSVGWAIDTNFGSLEALVQKMNAEGAALQGSGWVWLGVDKELKRLVIETTANQDPLVSKGANLVPLLGIDVWEHAYYLQYKNVRPDYLKNIWKVMNWKYANEVYEKECP

SEQ ID NO: 105683 - DNA, 1035 bp, Nicotiana plumbaginifolia
  CDS (1)..(684)
atgaccatgattacgaattcgagctcggtacccggggatcctctagagtcgacctgcagggggggggggggggctaaatttgaactccagcctcctccttatcccatggatgctttggagcctcatatgagtagtagaacgtttgaattccactgggggaagcatcacagggcttatgtcgacaatttaaacaagcaaatagacggaacagaactagatggaaagacactagaagacataatacttgttacgtataacaaaggtgctcccctcccagcattcaacaatgctgctcaggcctggaatcatcagtttttctgggaatcaatgaagcccaacggaggaggagagccatctggtgaattactagaactaatcaacagagactttggttcctatgatgcatttgttaaagaatttaaggcagctgcggcaacacaatttggctctggttgggcctggctcgcatacaaacctgaagagaaaaagcttgccttggtgaaaactcccaacgctgaaaatcctcttgttttgggttacacaccgctcctcaccatagacgtttgggagcatgcttactatctggactttcagaaccggcggcctgactacatatctatctttatggagaagctcgtgtcgtgggaagcagtcagttctaggcttaaagcagcaacagcttgagctgcttagcgagaagacagaaaggaggaagaggcaaatctagcaggcacgagagtaaatatttgagacagaatgatttttgttaaagagacactattttcaatcctgctatccttctttctcagttgagaattttagatgtcttattatgtgcactttactagagagtcaagtgatgctctgtatttggaggatagtgttatttctgttctttagcagctgttaatggcagggaaaaataattcaagttgaggtgtgggacaacaatgtaaggacgtgaataaacaaatctattgcactttggtgccctaattttagaattagaatgaaaaaaaaccccccccccccccc

SEQ ID NO: 105684 - protein, 227 aa, Nicotiana plumbaginifolia
MTMITNSSSVPGDPLESTCRGGGGAKFELQPPPYPMDALEPHMSSRTFEFHWGKHHRAYVDNLNKQIDGTELDGKTLEDIILVTYNKGAPLPAFNNAAQAWNHQFFWESMKPNGGGEPSGELLELINRDFGSYDAFVKEFKAAAATQFGSGWAWLAYKPEEKKLALVKTPNAENPLVLGYTPLLTIDVWEHAYYLDFQNRRPDYISIFMEKLVSWEAVSSRLKAATA

SEQ ID NO: 105685 - DNA, 719 bp, Eimeria tenella
  CDS (1)..(645)
atgccgttcgaactccccccgctgccgtaccccatggacgccctcgagccgtacatcagcaaagagactctcgagtaccactatgggaagcaccacgcggcttacgtgaacaacttgaacagactcgtcgaggggaagccggaggcttccaagagcctggaggaaataataaagacctcctcggggtcggtgctgaacaacgcgggccaggcgtggaaccacacgttctactggaagtcgatgcggccggcctcggcggggggccccccgggggcccccggcgggggccccccgggggccccgggggcccccctgcgggaggagctggagagcgcgttcgggggcgtggagaagttccgggaggcctttgctgctgctgctgctgcgcacttcggctcgggctgggcctggctctgcttctgcaagaagtcccgcagcctctttttgctgcagacccacgacggggccacgcctttcagagacaaccccaactgcgcgccgctgctcacctgcgacctgtgggagcacgcctactacatcgaccgcagaaacgaccgcaagagctacctcgacgcgtggtggtctgtggtgaattgggacttcgcgaacgagaacttgaagaaggcaatgcagggaagcgactaggcgcgtggtggtctgtggtgaattgggacttcgcgaacgagaacttgaagaaggcaatgcagggaagcgactag

SEQ ID NO: 105686 - protein, 214 aa, Eimeria tenella
MPFELPPLPYPMDALEPYISKETLEYHYGKHHAAYVNNLNRLVEGKPEASKSLEEIIKTSSGSVLNNAGQAWNHTFYWKSMRPASAGGPPGAPGGGPPGAPGAPLREELESAFGGVEKFREAFAAAAAAHFGSGWAWLCFCKKSRSLFLLQTHDGATPFRDNPNCAPLLTCDLWEHAYYIDRRNDRKSYLDAWWSVVNWDFANENLKKAMQGSD

SEQ ID NO: 105687 - DNA, 1187 bp, Glycine max
  CDS (90)..(1031)
gctgtagtgctgtactagtgttacgcccgagtagattaggagagccaaaaaacttttgaaacagctcactcggaagcagagcagaatagatgaatttgttatcgcaatccactgccccttctacttctctatcaccttcctgttttcttccacgccaccctcatggttccacctggttctcttctggtaccttcaaattcttgaagaaagagagtagatgtctaaggaaagctggacgtactaaaatcactgcaaagtttgagctgaagccaccaccatatcctttgagtgctttggagccaattatgagtcaggagacactcgaataccattgggggaagcatcataggacttatgtagataatctgaacaggcaaattgatggaacagatctagatgggaattcactggagaacactatagttattacgtacaataagggtgacattcttccagctttcaacaatgcagcgcaggcatggaaccatgacttcttctgggagtccatgaaacctggtggtggtggaaggccatctggggatcttctaaatctgattgaaagagactttggttcattcgaaaaattccttgatgagttcaagactgctgcttcaacacagtttggttcaggatgggcatggcttgcatataaagaaagcagacttgacgtggaaaatgctgtgaaccctcttcaatctgatgaggacaagaagctagttgtggtgaagactcccaatgctgtaaacccccttgtttggaactactatcatccactccttaccattgatgtttgggagcatgcttacttcattgactttcagaaccagcgccgtgattatatatcagttttcatggataagcttgtgtcttgggatgcagtcagctcaagacttgagcaagccaaggctctaatcaaggagagagagagagaggctgagaggaaaagaagagaggaagaagagaaacggacaagcagtgaagccattcctgagatatattctgatggtgatgctgacttggatgcagaatgagtaattttatttgcaaatagatgtagtttaaaattatgtatcctttgcactagctaggtgtggtatagaggctcaatcacttcaagctgcaaattttgttttatgataaatgttgtaatttagtgtttcttagttcattcaaaaaaaaaaaaaaaa

SEQ ID NO: 105688 - protein, 313 aa, Glycine max
MNLLSQSTAPSTSLSPSCFLPRHPHGSTWFSSGTFKFLKKESRCLRKAGRTKITAKFELKPPPYPLSALEPIMSQETLEYHWGKHHRTYVDNLNRQIDGTDLDGNSLENTIVITYNKGDILPAFNNAAQAWNHDFFWESMKPGGGGRPSGDLLNLIERDFGSFEKFLDEFKTAASTQFGSGWAWLAYKESRLDVENAVNPLQSDEDKKLVVVKTPNAVNPLVWNYYHPLLTIDVWEHAYFIDFQNQRRDYISVFMDKLVSWDAVSSRLEQAKALIKEREREAERKRREEEEKRTSSEAIPEIYSDGDADLDAE

SEQ ID NO: 105689 - DNA, 651 bp, Bombyx mori
  CDS (1)..(651)
atgttaatgtcacaaaggattggatcattgattcgagttgccggtgcttctcgccagaagcatactttgccagagcttccgtacgagtacaatgcactggagccggtcattagccgtgaaatcatgagtcttcatcacagcaaacatcacgcgacttatatcaacaatctaaacgttgctgaagagaaactcgcacaggcacaagctaaaggtgatatcgacaccattatcaaccttgcaccagccttgaaattcaatggtggtggtcacatcaaccactcgatcttttggcacaacctgtcaccaaatggtggcaagccttctgatgttctcaccaaagccgttgagaaagactttggatcctgggataacataaagaatcaactgtcgacagcttctgtggcagtacagggctcaggctggggttggcttggctacaacaaacaaatgaagaaattgcaaatagctacatgccagaaccaggatcctctgcaggccaccactggattggtcccgctcttcggaatcgatgtatgggagcacgcgtactatcttcagtacaagaacgttcgtgccgactacgtgaaagctattttcgatgtagccaactggaatgatatatctcagagatatgaaaaagcgctcaagtga

SEQ ID NO: 105690 - protein, 216 aa, Bombyx mori
MLMSQRIGSLIRVAGASRQKHTLPELPYEYNALEPVISREIMSLHHSKHHATYINNLNVAEEKLAQAQAKGDIDTIINLAPALKFNGGGHINHSIFWHNLSPNGGKPSDVLTKAVEKDFGSWDNIKNQLSTASVAVQGSGWGWLGYNKQMKKLQIATCQNQDPLQATTGLVPLFGIDVWEHAYYLQYKNVRADYVKAIFDVANWNDISQRYEKALK

SEQ ID NO: 105691 - DNA, 600 bp, Mesorhizobium loti MAFF303099
  CDS (1)..(600): transl_table=11
atggcttttgaattgcccgctctgccctacgactatgaggccttgcagccttacatgtcgaaagagacgctggaatatcaccacgacaagcatcacaaggcctatgtcgacaatggcaacaagctggctgccgaggccggaatgggtgatctgtcggtcgaagaggtggtcaagcagtcgttcggcaagaatgccggtctcttcaacaatgccgcgcagcactacaatcacatccatttctggaagtggatgaagaagggcggcggcggcaacaagctgccggccgcgctgcagaaggctttcgacagcgatctgggcggctacgacaagttcaaggctgattttgtcgccgccggcacgacgcagttcggttcgggctgggcctgggtgtccgtcaaggacggcaagctggcgatctcgaagaccccgaacggcgaaaatccgctcgttcatggcgcctcaccgatcctcggcgtcgacgtctgggaacactcctattacatcgactaccgcaacgcccgcccgaaatatctcgaggccttcgtcgacagcctgatcaactgggatcatgtgctggagctctacgaaaaggcaaagtga

SEQ ID NO: 105692 - protein, 199 aa, Mesorhizobium loti MAFF303099
MAFELPALPYDYEALQPYMSKETLEYHHDKHHKAYVDNGNKLAAEAGMGDLSVEEVVKQSFGKNAGLFNNAAQHYNHIHFWKWMKKGGGGNKLPAALQKAFDSDLGGYDKFKADFVAAGTTQFGSGWAWVSVKDGKLAISKTPNGENPLVHGASPILGVDVWEHSYYIDYRNARPKYLEAFVDSLINWDHVLELYEKAK

SEQ ID NO: 105693 - DNA, 726 bp, Arabidopsis thaliana
  CDS (1)..(726)
atgacgaccaccgttattatcattatcttcgttgccatcttcgctacgactcttcacgacgccagaggagcaaccatggaaccgtgtctcgaatcaatgaagactgcttcgcttcctgatcttccgtatgcttatgatgcgctagagccagcaatcagtgaggagatcatgcggctacaccatcagaaacaccaccagacttatgtcactcagtacaacaaagccctcaacagccttcgttctgccatggctgacggtgatcactcctccgtcgtcaaactccaaagcctcatcaagttcaacggcggagggcacgttaaccatgcaatcttctggaaaaacctagccccggttcatgaaggaggtggcaaaccaccgcatgatcctttggcttcggcgatcgatgctcatttcggatcactagaaggattgatccaaaaaatgaacgcggaaggcgctgctgtacagggatctggatgggtgtggtttggattagacagagagcttaagagacttgtcgttgaaaccacagccaaccaggatccattggtgactaagggatcacacctagttcctctaattgggattgacgtgtgggagcatgcctactatccacagtacaagaatgcaagagcggagtacttgaagaacatatggactgtaatcaactggaaatatgcagcggacgtcttcgagaagcacactcgtgatcttgatattaactga

SEQ ID NO: 105694 - protein, 241 aa, Arabidopsis thaliana
MTTTVIIIIFVAIFATTLHDARGATMEPCLESMKTASLPDLPYAYDALEPAISEEIMRLHHQKHHQTYVTQYNKALNSLRSAMADGDHSSVVKLQSLIKFNGGGHVNHAIFWKNLAPVHEGGGKPPHDPLASAIDAHFGSLEGLIQKMNAEGAAVQGSGWVWFGLDRELKRLVVETTANQDPLVTKGSHLVPLIGIDVWEHAYYPQYKNARAEYLKNIWTVINWKYAADVFEKHTRDLDIN

SEQ ID NO: 105695 - DNA, 918 bp, Arabidopsis thaliana
  CDS (1)..(918)
atgatgaatgttgcagtgacagccactccctcgtctctcttgtactctcctctgcttcttccttctcaagggccaaaccggcgaatgcaatggaaaagaaacggaaagagacggttagggacaaaggtggctgtttccggtgttatcacagctggatttgagctgaaaccacctccatatcctcttgatgctctggaaccgcatatgagccgggaaaccttggattatcactggggcaaacatcacaaaacttatgtagagaacctgaacaagcaaatcttaggcacggatctagatgcattatccttggaagaagttgtgcttctttcatacaacaaaggcaatatgcttcctgctttcaacaacgctgcacaggcttggaaccacgagttcttctgggagtctatccaacctggaggtggaggaaagccaactggagagctcctcagattaatagaaagagattttgggtctttcgaagagtttttggaaaggttcaagtcggctgcagcttcgaattttggttcgggttggacatggcttgcatataaggcgaatagacttgacgttgcaaatgccgttaatcctctcccaaaggaggaagacaagaaacttgttatagtgaagacgcccaatgcagtaaatccgctcgtatgggattattctccacttctcaccattgatacctgggagcacgcttactatctggattttgagaaccgaagagctgaatacataaatacattcatggaaaagcttgtgtcatgggaaactgtaagcacaaggttggaatccgcaattgctcgagcagtgcaaagagaacaagaaggaacagagacagaagatgaagagaatccagatgatgaagtaccagaggtctatttagatagtgacatcgatgtatctgaggttgactaa

SEQ ID NO: 105696 - protein, 305 aa, Arabidopsis thaliana
MMNVAVTATPSSLLYSPLLLPSQGPNRRMQWKRNGKRRLGTKVAVSGVITAGFELKPPPYPLDALEPHMSRETLDYHWGKHHKTYVENLNKQILGTDLDALSLEEVVLLSYNKGNMLPAFNNAAQAWNHEFFWESIQPGGGGKPTGELLRLIERDFGSFEEFLERFKSAAASNFGSGWTWLAYKANRLDVANAVNPLPKEEDKKLVIVKTPNAVNPLVWDYSPLLTIDTWEHAYYLDFENRRAEYINTFMEKLVSWETVSTRLESAIARAVQREQEGTETEDEENPDDEVPEVYLDSDIDVSEVD

SEQ ID NO: 105697 - DNA, 645 bp, Borrelia burgdorferi B31
  CDS (1)..(645): transl_table=11
ttgtcatggcaaaagttaaaacaggaggtttttatgtttaagctgccagaacttggttatgattatgatgctgttgagccttatattgatgctaaaactatggaaattcatcatagcaagcatcataatggttttgtaatgaatttgaattctattttggaaaaaatggggaaaattcatttaacagatgtgtcaaacatattaaaaaatattcatgattttccagaagaatttcaaactttaataagaaataatgctggtggttattctaaccatactttatattttagaactttaaggccaggaaacaaggacaatctttttgaaaagtttaaagatgatattaatgcagcttttggaagcctagacgttcttaaggccaatttgaaagatactgcaatgaaaatttttggaagtggttgggcatggttagtattgtgtcctgagagtggccttaaagtgatttcaatgcctaatcaggatagtcctttgatgaattcttataagccgattttaggtattgatgtttgggagcatgcctattaccttaaatatcaaaatagaagaattgaatatgttgatgcatttttaaaggctttaaattgggaagaagtttcaaaagtttacaatgaagtgattaattag

SEQ ID NO: 105698 - protein, 214 aa, Borrelia burgdorferi B31
MSWQKLKQEVFMFKLPELGYDYDAVEPYIDAKTMEIHHSKHHNGFVMNLNSILEKMGKIHLTDVSNILKNIHDFPEEFQTLIRNNAGGYSNHTLYFRTLRPGNKDNLFEKFKDDINAAFGSLDVLKANLKDTAMKIFGSGWAWLVLCPESGLKVISMPNQDSPLMNSYKPILGIDVWEHAYYLKYQNRRIEYVDAFLKALNWEEVSKVYNEVIN

SEQ ID NO: 105699 - DNA, 588 bp, Neisseria meningitidis Z2491
  CDS (1)..(588): transl_table=11
atggaacataagctgccgcaactgccttatgaactggacgcattgtccccgcatctgagcaaagaaactttggaattccactacggcaaacaccatcaaacctacatcaccaacctgaacaatcaaatcaaaggcaccgaatttgaaaacctgcctttggaagagattgtgaaaaaatcttcgggcggcgtgttcaacaacgcagcccaaacttggaaccacactttctactggctgggtttcacgcccaaaggtcaaggcaaaccttccggcgaactggccgccgccatcgacgcgaaatggggcagcttcgagaaattccaagaagcattctccgcttgcgctgccggtactttcggctccggttgggcgtggctggtgaaaacccctgccggcggattggatttggtttccacttccaacgccgctacgccgctgaccactgaaaacacgccgctgctgacctgcgacgtgtgggaacacgcctattacatcgactaccgcaacagccgtcccaactacctgaaaggtttctgggaaatcgtcaactgggacgaagtcgccaaacgttttgccgccttgtcctga

SEQ ID NO: 105700 - protein, 195 aa, Neisseria meningitidis Z2491
MEHKLPQLPYELDALSPHLSKETLEFHYGKHHQTYITNLNNQIKGTEFENLPLEEIVKKSSGGVFNNAAQTWNHTFYWLGFTPKGQGKPSGELAAAIDAKWGSFEKFQEAFSACAAGTFGSGWAWLVKTPAGGLDLVSTSNAATPLTTENTPLLTCDVWEHAYYIDYRNSRPNYLKGFWEIVNWDEVAKRFAALS

SEQ ID NO: 105701 - DNA, 624 bp, Chlamydia muridarum Nigg
  CDS (1)..(624): transl_table=11
atggctatggttttttcttcttataagcttcccgatttaccttatgattacgatgctttggaacctgtaattagcgcggagattatgcatctccaccatcaaaaacatcatcaaggatatataaataatttgaatgaagctttgaaaagcttggatgtagcaagtgctactcaggatctcacgggattaatcgcaattaacccagctttgcgtttcaatggcggggggcatattaatcattcattgttttgggaaatgctagcgccacaaaacaaaggcggagggactccacctcgtcatgagttgcttaagttaatagaaaaattttggggctctttcgacaattttttaaaaaattttattagttcttctgctgccgtacagggatccggctggggttggttggctttttgtcccaaaaaacaagagcttatgatacagaccacagcaaaccaagatcctctagaggctacaacggggatgatacctctcctcggagtagatgtgtgggagcatgcgtactatctccagtataaaaatgcaagattggattatttaaagaattttccaagtataattaactgggattatatagagagtcgttttgtagaaatgagtaagtaa

SEQ ID NO: 105702 - protein, 207 aa, Chlamydia muridarum Nigg
MAMVFSSYKLPDLPYDYDALEPVISAEIMHLHHQKHHQGYINNLNEALKSLDVASATQDLTGLIAINPALRFNGGGHINHSLFWEMLAPQNKGGGTPPRHELLKLIEKFWGSFDNFLKNFISSSAAVQGSGWGWLAFCPKKQELMIQTTANQDPLEATTGMIPLLGVDVWEHAYYLQYKNARLDYLKNFPSIINWDYIESRFVEMSK

SEQ ID NO: 105703 - DNA, 729 bp, Xylella fastidiosa 9a5c
  CDS (1)..(729): transl_table=11
atgtttcttttgagacaaggtcacttaacactctgcttgattgctgcattgcttgcttcattcctatcctttgcttcgacacaaccacaaatcgccccgttcacactgccgccactcccctacgctgtcagcgcgctggagccggcgattgacacgcagaccatgacattacatcacgacttccatcacaaggcctacgtagataacctcaatgctgcaatcaaggatataccgacactctctggaaaaacgctggagcaacttctggccatcgcatccacgttgccgccagcggtacgaaacaacgccggcggcgactggaaccacagcgagttctggaagatgatggctccggttggcaagggagggaaaccatcggcagcgctggaaacacaaattaaaaaggactttggttcactagacgctttcaaagagcgcttcaacaaagccgcaacaggtcgttttggctccggctgggcttggatgatattaaccagtagcggactgcagatcacatcaacacccaatcaggataacccattgatggatgtggcagaggtacgcggccagccattgctagccttagatgtttgggagcatgcgtactatctcaagtacaagtacaaacgtgctgattatctgaacgcttggtggacagtggtgaactggaacgaggtcaaccatttattcgaagtggcaaaaaaggagcaacataacctgaatcattaa

SEQ ID NO: 105704 - protein, 242 aa, Xylella fastidiosa 9a5c
MFLLRQGHLTLCLIAALLASFLSFASTQPQIAPFTLPPLPYAVSALEPAIDTQTMTLHHDFHHKAYVDNLNAAIKDIPTLSGKTLEQLLAIASTLPPAVRNNAGGDWNHSEFWKMMAPVGKGGKPSAALETQIKKDFGSLDAFKERFNKAATGRFGSGWAWMILTSSGLQITSTPNQDNPLMDVAEVRGQPLLALDVWEHAYYLKYKYKRADYLNAWWTVVNWNEVNHLFEVAKKEQHNLNH

SEQ ID NO: 105705 - DNA, 612 bp, Xylella fastidiosa 9a5c
  CDS (1)..(612): transl_table=11
atggcttacacccttcccatcctgccttacgcttacgatgcgttgcaaccgcacattgatgcgcagacaatggaaatccattacaccaagcaccatgccacctatatcaataatcttaatgctgcgttggaaggaacggagtacgcggatttgcccattgaagaattgctccgtaacttgaaaagtttgccggaaagcttgcaggggccagtacgtaacaacggcggtggttgtgtcaatcattcactgttctggacggtgatggctcagggtggcggcggcaagccgaaaggagaggttgctaaagcgattgaccagcagctgggtggttttgagacatttaaagatgcttttaccaaagctgcactcagtcgtttcggctccggttggtcattgctaaacgtcactccgagcaaaactttggtggttgaaagcagcgctaatcaggacagccctctatgcgatggtaagacgcctattttgtgcttggatgtgtgggaacatgcatattacttgcactatcagaatcgtcgtgcggattacgttaatgcgttctacaacgtgatcaactgggatgaggttgagcgacgctatgtggctgcgatgagctga

SEQ ID NO: 105706 - protein, 203 aa, Xylella fastidiosa 9a5c
MAYTLPILPYAYDALQPHIDAQTMEIHYTKHHATYINNLNAALEGTEYADLPIEELLRNLKSLPESLQGPVRNNGGGCVNHSLFWTVMAQGGGGKPKGEVAKAIDQQLGGFETFKDAFTKAALSRFGSGWSLLNVTPSKTLVVESSANQDSPLCDGKTPILCLDVWEHAYYLHYQNRRADYVNAFYNVINWDEVERRYVAAMS

SEQ ID NO: 105707 - DNA, 603 bp, Agrobacterium tumefaciens str. C58
  CDS (1)..(603): transl_table=11
atggccttcgaacttcctgaactcccctacgactatgacgcgcttgcaccttacatgtcgcgcgagacgctcgagttccatcacgacaagcaccacaaggcttatgtcgacaacggcaacaagctggctgcagaagccggtctttccgacctgtcgctcgaagaagtcgtgaagaagtcgtttggcaccaatgccggcctcttcaacaatgctgcccagcactacaaccacgtccatttctggaagtggatgaagaaggacggcggcggcaacaagctgccgggcaagctggaacaggcattcgcttccgatctcggcggctacgacaagttcaaggcagatttcatcgctgccggcaccacgcagttcggctccggctgggcatggctctccgtcaagaacggcaagcttgaaatctccaagaccccgaacggtgaaaacccgctggttcacggcgcagatccgatcctcggcgtcgacgtatgggaacactcctattacatcgactaccgcaacctgcgtccgaagtacctcgaagccttcgttgataacctcatcaactgggactacgtcctggagcgttacgaagccgctgccaagtaa

SEQ ID NO: 105708 - protein, 200 aa, Agrobacterium tumefaciens str. C58
MAFELPELPYDYDALAPYMSRETLEFHHDKHHKAYVDNGNKLAAEAGLSDLSLEEVVKKSFGTNAGLFNNAAQHYNHVHFWKWMKKDGGGNKLPGKLEQAFASDLGGYDKFKADFIAAGTTQFGSGWAWLSVKNGKLEISKTPNGENPLVHGADPILGVDVWEHSYYIDYRNLRPKYLEAFVDNLINWDYVLERYEAAAK

SEQ ID NO: 105709 - DNA, 717 bp, Caulobacter crescentus CB15
  CDS (1)..(717): transl_table=11
atgcaacgcttgctgaccgccatcgcgatctcggcttttgggatcacgactccggttctcgcccagacctcgccagcgccgcaggtcgctgctgcgccacaacccgcattcacgctggcgcccctcccctacgtctatgaggccctctcgccggtcatcgacaccgagaccatgcgcatccaccacggtcgccaccatcaggcctatgtgaacgcgctgaacggcgccgtggccgtaacccccgccttgcagggaaagtctctggatgcggtcctgtcggaggtctcgcggcatccgccggtcgtgcgcaacaacgccggtggtcactataatcacaccctcttctggagcttgatggcgccttcgggcgccggcggcgcgccgtcttcgaagctgctcgcccagatcgataaggatttcgggagtctggacgccttcaagaaggccttcgagacggctggccttcagcgcttcggctcgggctgggcctggctgatctggagcgagggaaagctccgcgtcgtcagcacgcccaaccaggacaatccgctgatggacgacgcgccggtcaagggcgcgccgatcctggccaatgatgtctgggaacacgcctactacctgaaacaccagaacaaccgcggcgcctatctcggcggctggtggcaggtcgtgaactggaacaaggccaacgccctgttcgacgccgccgcgcgctag

SEQ ID NO: 105710 - protein, 238 aa, Caulobacter crescentus CB15
MQRLLTAIAISAFGITTPVLAQTSPAPQVAAAPQPAFTLAPLPYVYEALSPVIDTETMRIHHGRHHQAYVNALNGAVAVTPALQGKSLDAVLSEVSRHPPVVRNNAGGHYNHTLFWSLMAPSGAGGAPSSKLLAQIDKDFGSLDAFKKAFETAGLQRFGSGWAWLIWSEGKLRVVSTPNQDNPLMDDAPVKGAPILANDVWEHAYYLKHQNNRGAYLGGWWQVVNWNKANALFDAAAR

SEQ ID NO: 105711 - DNA, 654 bp, Drosophila melanogaster
  CDS (1)..(654)
atgttcgtggcccgtaaaatttcgcaaactgcaagcctggcggtgcgtggcaagcacaccctaccgaagctgccctacgactatgccgccctggagcctatcatctgccgggagatcatggagctgcatcaccagaagcaccaccagacctacgtcaacaatctaaatgccgccgaggagcagctggaggaggccaagtcgaagagcgacaccaccaagctgattcagctggctcctgccctgcgtttcaatggcggtggccacatcaaccacaccatcttctggcagaacctctcgcccaacaagacccagcccagcgatgatctgaagaaggccatcgagtcgcagtggaagagcctcgaggagttcaaaaaggagctgaccacgctgaccgtggcggtccagggctccggctggggctggctgggcttcaacaagaagtcgggcaaactgcaactggccgccctgcccaaccaggatcccctggaggcctccaccggcctgatcccgctcttcggcatcgatgtctgggagcacgcctactatctgcagtacaagaacgtgcgtccctcctacgtggaggccatctgggacatcgccaactgggatgacatctcgtgccgcttccaggaggccaagaagctcggttgctaa

SEQ ID NO: 105712 - protein, 217 aa, Drosophila melanogaster
MFVARKISQTASLAVRGKHTLPKLPYDYAALEPIICREIMELHHQKHHQTYVNNLNAAEEQLEEAKSKSDTTKLIQLAPALRFNGGGHINHTIFWQNLSPNKTQPSDDLKKAIESQWKSLEEFKKELTTLTVAVQGSGWGWLGFNKKSGKLQLAALPNQDPLEASTGLIPLFGIDVWEHAYYLQYKNVRPSYVEAIWDIANWDDISCRFQEAKKLGC

SEQ ID NO: 105713 - DNA, 813 bp, Nostoc sp. PCC 7120
  CDS (1)..(813): transl_table=11
atgaaatcatctctgtggcaacggtttattggctttttcatggtcattctagtgacatctatgctttatgcttgccaacctcaagaagcagcaaattccctgccgactaacgtagcaagtcctgtacaaaccactacgcccacaacagataaacgttccataggttttatcgatcgccaactgggtacaaatccagccgagttaccaccattaccttacggttatgatgccctagagaaagcgattgatgcagaaaccatgaaactgcatcacgataaacaccatgcagcatacgttaataaccttaacaatgctttgaagaagcatccagaactgcaaaatagtagtgtagaagctttactacgggatttgaacagtgtacctgaagatattcgcacaacggtacgtaacaatggtggcggacatctcaaccatacaattttctggcaaatcatgagtcctgatgggggtggacaaccaacaggagacatcgcccaagaaatcaaccaaacctttggcagttttgaagagttcaaaaaacagtttaaccaagcaggaggcgatcgctttggtagtggttgggtttggttagtgcgaaatccccaaggacagttacagattgtcagcactcccaatcaagatagccctatcatggaaggttcatacccaatcatggggaatgatgtctgggaacacgcttattacctcagatatcaaaaccgtcgtcctgagtatttaaataactggtggaatgtagttaattggtcagaaattaacagacgcacccaagcttcacggcaaagtaattcttaa

SEQ ID NO: 105714 - protein, 270 aa, Nostoc sp. PCC 7120
MKSSLWQRFIGFFMVILVTSMLYACQPQEAANSLPTNVASPVQTTTPTTDKRSIGFIDRQLGTNPAELPPLPYGYDALEKAIDAETMKLHHDKHHAAYVNNLNNALKKHPELQNSSVEALLRDLNSVPEDIRTTVRNNGGGHLNHTIFWQIMSPDGGGQPTGDIAQEINQTFGSFEEFKKQFNQAGGDRFGSGWVWLVRNPQGQLQIVSTPNQDSPIMEGSYPIMGNDVWEHAYYLRYQNRRPEYLNNWWNVVNWSEINRRTQASRQSNS

SEQ ID NO: 105715 - DNA, 579 bp, Ralstonia solanacearum GMI1000
  CDS (1)..(579): transl_table=11
atggcccacacgctccccccgctgccgtacgcactcgacgccctggcgccgcacatctccaaggaaaccctggagttccactacggcaagcaccaccagacctacgtcacgaacctgaacaacctgatcccggggaccgagttcgagaacctgagcctggaagacatcgtcaagaagtcctcgggcggcctcttcaacaacgccgcgcaggtgtggaaccacacgttctactggaacggcctgaagcccaacggcggcggtgctccggccggcgcgctggctgacgccatcaacgccaagtggggcagcttcgacaagttcaaggaagagttcaccaaggtcgccattggcaccttcggctcgggctgggcctggctggtgaagaaggcggacggctcgctggacctggtgtccacctccaatgccgccacgccgctgacgacggacgccaagccgctgctgacctgcgacgtgtgggaacacgcctactacatcgactatcgcaacgcccgtccgaagtacgtcgaggcgttctggagcctggtcaactgggatttcgtcgcgagcaacttcgcctga

SEQ ID NO: 105716 - protein, 192 aa, Ralstonia solanacearum GMI1000
MAHTLPPLPYALDALAPHISKETLEFHYGKHHQTYVTNLNNLIPGTEFENLSLEDIVKKSSGGLFNNAAQVWNHTFYWNGLKPNGGGAPAGALADAINAKWGSFDKFKEEFTKVAIGTFGSGWAWLVKKADGSLDLVSTSNAATPLTTDAKPLLTCDVWEHAYYIDYRNARPKYVEAFWSLVNWDFVASNFA

SEQ ID NO: 105717 - DNA, 732 bp, Brucella melitensis 16M
  CDS (1)..(732): transl_table=11
ttgcgccattgcgccattgccgcccgcattgttgcggcttatgtagattgcgcacgcaagttttgctcttgcatccgggcatcatctatttgctttgcccgccgcaagcttaaagaaaagaggagagtttccatggctttcgaactgcccgcccttccgtatgactatgatgcgcttgcgcctttcatgtcgcgcgaaacgcttgaatatcatcacgacaagcatcatcaggcctatgtcaccaacggtaacaagcttctcgaaggttccggcctggaaggcaagagcctcgaagaaatcgtcaaggaaagcttcggcaagaatcaggccctcttcaacaatgccggccagcactacaaccatatccttttctggaaatggatgaagaaggatggcggcggcaagaaactgccgggcaagctggaaaaggcctttgattccgatcttggcggttatgacaagttccgcgctgatttcatcgctgccggtgccggccagttcggttcgggctgggcctggctttccgtcaaggacggcaagcttgaaatttccaagaccccgaacggtgaaaacccgctcgtgcacggtgcggcgccgatcctcggcgtggatgtgtgggaacactcctattacatcgattaccgcaacgcgcgtccgaaatatctcgaagctttcgtcgatagcctcgtgaactgggattacgtgctggaaatgtacgaaaaggcggcataa

SEQ ID NO: 105718 - protein, 243 aa, Brucella melitensis 16M
MRHCAIAARIVAAYVDCARKFCSCIRASSICFARRKLKEKRRVSMAFELPALPYDYDALAPFMSRETLEYHHDKHHQAYVTNGNKLLEGSGLEGKSLEEIVKESFGKNQALFNNAGQHYNHILFWKWMKKDGGGKKLPGKLEKAFDSDLGGYDKFRADFIAAGAGQFGSGWAWLSVKDGKLEISKTPNGENPLVHGAAPILGVDVWEHSYYIDYRNARPKYLEAFVDSLVNWDYVLEMYEKAA

SEQ ID NO: 105719 - DNA, 684 bp, Clostridium perfringens str. 13
  CDS (1)..(684): transl_table=11
atgaaaaataattttttaaaacacaaaaaaagtccattaatgtatccagcttactgtggatcatcttcaactaaaggggaaggttttaaattaaaacctttagattatccttatgatgctttagagccatcaatagatgcagaaacagtaaaaattcatcatgacaaacatcaacaagcttatgtagataagttaaataaagctttagaaaaacatcctgagctttatggcaaaagcttatacgatattttaagcaatttagatgatatgccagaggatattatggctgatttagtaaatcaaggtggtggagtttataaccatgaattctactggagcattttaggaaaaggatgtaatagaccagttgctgaaatagcagatgctatagacagagattttggttcttttgaagaattcaaagaaaagtttaaacaatgtggaatctctacctttggttcaggttgggcatggttagttagtgataaagatggaaagttagaaatcatgtcaactaaggatcaatcatctcctatttctttaggattaattcctatattaacaatggatgtttgggaacatgcttattatttaaaatatcaaaatagacgtccagagtatatagactatttcttcgatataataaactggaaaaagtgtgaagaatattataacaatagataa

SEQ ID NO: 105720 - protein, 227 aa, Clostridium perfringens str. 13
MKNNFLKHKKSPLMYPAYCGSSSTKGEGFKLKPLDYPYDALEPSIDAETVKIHHDKHQQAYVDKLNKALEKHPELYGKSLYDILSNLDDMPEDIMADLVNQGGGVYNHEFYWSILGKGCNRPVAEIADAIDRDFGSFEEFKEKFKQCGISTFGSGWAWLVSDKDGKLEIMSTKDQSSPISLGLIPILTMDVWEHAYYLKYQNRRPEYIDYFFDIINWKKCEEYYNNR

SEQ ID NO: 105721 - DNA, 702 bp, Encephalitozoon cuniculi GB-M1
  CDS (1)..(702)
atggtccgaaatgtagtacccatggaattcaaactacccgaactcgactatccatacgatgcacttgagccgattatcgacgaggagacaatgaggacgcaccactccaagcaccaccaggcttacataaatagcctcgagaagacactcaggagtaacagcatcaagggcaagagcctctactactacgtgaccaagggccgggggatcaggggagtcaagagcagtgcaaggagagacctgctcaacttctctggagggcactacaaccacagtctgttctggaagatgatgtgtcccccaggaaccagcgggcctatgagcccaaggcttttggagtacatagagagatcctttggatctcaggagaagatggtcaaggagtttagtaatgcggcagtgtcgctatttggctccggatgggtgtggctatgctatagacagagcgagggcattcttgtgataaggaagacatacaaccaggatgctatatgcatgaagacctccagcaccgttccgatacttggactggatgtctgggagcatgcatattacctgaagtacaagaatgtgagatctgagtatgtagcaaactggtggaaggttgtaaactggggcctggttagtagactgtttgaggagatagcactagaaaacaagaagctgtgtgttatgtctgacggttctattaaatttgattaa

SEQ ID NO: 105722 - protein, 233 aa, Encephalitozoon cuniculi GB-M1
MVRNVVPMEFKLPELDYPYDALEPIIDEETMRTHHSKHHQAYINSLEKTLRSNSIKGKSLYYYVTKGRGIRGVKSSARRDLLNFSGGHYNHSLFWKMMCPPGTSGPMSPRLLEYIERSFGSQEKMVKEFSNAAVSLFGSGWVWLCYRQSEGILVIRKTYNQDAICMKTSSTVPILGLDVWEHAYYLKYKNVRSEYVANWWKVVNWGLVSRLFEEIALENKKLCVMSDGSIKFD

SEQ ID NO: 105723 - DNA, 648 bp, Streptomyces coelicolor A3(2)
  CDS (1)..(648): transl_table=11
atggcgctttacacgcttccggaacttccgtacgactactcggcgctggctccggtcatcagcccggagatcatcgagctgcaccacgacaagcatcatgcggcgtacgtgaagggtgcgaacgacaccctggagcagctggccgaggcgcgggagaaggagtcgtggggttcgatcaacggcctggagaagaacctcgcgttccacctctccgggcacattctgcactcgatctactggcagaacatgacgggcccgaaggacggcggcggcgagcccctcgcccaggacggtgtcggtgacctggccgacgcgatcaccgagtccttcggttccttcgccggcttcaaggcccagctgaccaaggccgccgccaccacccagggctccggctggggcgtcctcgcctacgagccgctcagcggccggctgatcgtcgagcaggtctacgaccaccagggcaacgtcggccagggcgccaccccgatcctcgtcttcgacgcctgggagcacgccttctacctgcagtacaagaaccagaaggtcgacttcatcgaggcgatgtgggccgtcgtcaactggcaggacgtggccaagcgtcacgccgccgccaaggagcgcggcgacagcctgctcctcaagccgtga

SEQ ID NO: 105724 - protein, 215 aa, Streptomyces coelicolor A3(2)
MALYTLPELPYDYSALAPVISPEIIELHHDKHHAAYVKGANDTLEQLAEAREKESWGSINGLEKNLAFHLSGHILHSIYWQNMTGPKDGGGEPLAQDGVGDLADAITESFGSFAGFKAQLTKAAATTQGSGWGVLAYEPLSGRLIVEQVYDHQGNVGQGATPILVFDAWEHAFYLQYKNQKVDFIEAMWAVVNWQDVAKRHAAAKERGDSLLLKP

SEQ ID NO: 105725 - DNA, 612 bp, Xanthomonas axonopodis pv. citri str. 306
  CDS (1)..(612): transl_table=11
atggcttacacccttccgcagttgccctacgcctacgacgcgctggaaccgaacatcgatgcgcagacgatggaaatccatcacaccaagcatcaccagacctatatcaacaacgtcaatgcggcgctggaagggaccgagtacgccgatctgccgatcgaagaactggtctccaagctgaagagcctgccggaaaacctgcagggcccggtgcgcaacaacggcggcggccacgccaaccactccctgttctggaccgtgctgtcgcccaacggtggcggcgagcccaagggcgaggtcgccaaggcgatcgacaaggatctcggcggcttcgagaagttcaaggaagccttcaccaaggccgccgtcagccgcttcggctccggttgggcgtggctgagcgtgaccccggacaaaaagctggtggtggaaagtaccgccaaccaggacagcccgctgttcgaaggcaacactccgatcctgggtctggacgtgtgggaacatgcgtactacctgaagtaccagaaccgtcgcccggaatacattggcgcgttctacaacgccgtcaattgggaagaagtcgagcgccgctaccacgccgcgatcgcctga

SEQ ID NO: 105726 - protein, 203 aa, Xanthomonas axonopodis pv. citri str. 306
MAYTLPQLPYAYDALEPNIDAQTMEIHHTKHHQTYINNVNAALEGTEYADLPIEELVSKLKSLPENLQGPVRNNGGGHANHSLFWTVLSPNGGGEPKGEVAKAIDKDLGGFEKFKEAFTKAAVSRFGSGWAWLSVTPDKKLVVESTANQDSPLFEGNTPILGLDVWEHAYYLKYQNRRPEYIGAFYNAVNWEEVERRYHAAIA

SEQ ID NO: 105727 - DNA, 603 bp, Chlorobium tepidum TLS
  CDS (1)..(603): transl_table=11
atggcatatcagcaacctgcactcccctacgccgataacgcgctcgaaccgcatatctctgccaataccatcggctttcactacggcaagcaccatgcggcctacgtcaaaaactacaacggtttcgtcgaaggcacgccatatgacgccatgagtctcgaagaggtgatcatccagacggcaagtgacgcctcgaagactggcatattcaacaatggcgcgcaggcatggaaccacagcttctactggaactgcctcactccgaacggcggcggcgagccaaccggcgaaatcgccacgaaaatcaccgaagatttcggcagcgttgacaagttcaaagaggagctgaaaaacgccgctgcaacccagttcggtagcggctgggcctggctggtgctcgatggcggcaagctcaaggtaaccaaaaccggcaacgcccagaacccgatgacctccggccagaccccgctgctctgcatcgacgtctgggaacacgcctactacctcgattaccagaaccgccgccccgaccacgtggccgccgtgatcgaaaacctgatcaactgggagttcatcaacgctaattacgctgcggcgaaataa

SEQ ID NO: 105728 - protein, 200 aa, Chlorobium tepidum TLS
MAYQQPALPYADNALEPHISANTIGFHYGKHHAAYVKNYNGFVEGTPYDAMSLEEVIIQTASDASKTGIFNNGAQAWNHSFYWNCLTPNGGGEPTGEIATKITEDFGSVDKFKEELKNAAATQFGSGWAWLVLDGGKLKVTKTGNAQNPMTSGQTPLLCIDVWEHAYYLDYQNRRPDHVAAVIENLINWEFINANYAAAK

SEQ ID NO: 105729 - DNA, 621 bp, Yersinia pestis KIM
  CDS (1)..(621): transl_table=11
ttgaagagcaaacaccctgagcacccccgaaaggagagagctatgtcttttgaattacctgcattaccttacgcgcaaaatgcgctggaaccccacatctctgccgaaacgctggaataccattatggtaagcaccacaacacctatgtgatcaacctcaataatctgattaaagatactgagtttgcaggcaaatcactggaagagatcgtgaaaaccgccaatggcggtgtgtttaataatgcggcccaagtttggaaccataccttctactggcattgcctgtcgccaaatggaggcggtgaacctactggaaaaatcgccgaggccattaataagtcttttggctcatttgctgaatttaaagcgcaatttactgatgctgccgtgaaaaactttggcgctggttggacgtggctcgttaaaaaagcggatgggacattggcgattgtcagtacttctaacgcaggaacaccgctgacaacaacagataaacccctgttgaccgtcgatgtgtgggaacatgcttactatattgattaccgtaatgcgcgaccaaaatatctggagaatttctgggcagtagttaactggtctttcgctgagaaaaacctagactga

SEQ ID NO: 105730 - protein, 206 aa, Yersinia pestis KIM
MKSKHPEHPRKERAMSFELPALPYAQNALEPHISAETLEYHYGKHHNTYVINLNNLIKDTEFAGKSLEEIVKTANGGVFNNAAQVWNHTFYWHCLSPNGGGEPTGKIAEAINKSFGSFAEFKAQFTDAAVKNFGAGWTWLVKKADGTLAIVSTSNAGTPLTTTDKPLLTVDVWEHAYYIDYRNARPKYLENFWAVVNWSFAEKNLD

SEQ ID NO: 105731 - DNA, 624 bp, Yersinia pestis KIM
  CDS (1)..(624): transl_table=11
atgagttattcactgccatcactgccttatgcttatgatgccttagaaccacacttcgataagcagacgatggaaatccatcacaccaaacaccatcagacctatgttaacaatgcaaatacggtgttggagagcttcccggagctggcggacctgagcgttgaagatctgatcaaagatctggataaagtccctgctgaaaagcgcacctttatgcgtaacaacgcaggcggccacgctaaccacagtctgttctggaaaggcctgaaactgggcaccaccctagccggtgacctgaaagccgctatcgagcgcgatttcggcagcgtagacagcttcaaagaaaaatttgaacaagctgctgcgacccgtttcggttctggctgggcttggctggtactgaaagacgacggcaaactggcggttgtttcaaccgctaaccaagacagcccgctgatgggcgaagccgtttctggcgtatcaggtttcccgattgtgggcctggacgtatgggaacacgcttactacctgaaattccaaaaccgccgcccagactacatcaaagccttctggaacgtggttaactgggatgaagctgcagcgcgtttcgctcaagccaagtaa

SEQ ID NO: 105732 - protein, 207 aa, Yersinia pestis KIM
MSYSLPSLPYAYDALEPHFDKQTMEIHHTKHHQTYVNNANTVLESFPELADLSVEDLIKDLDKVPAEKRTFMRNNAGGHANHSLFWKGLKLGTTLAGDLKAAIERDFGSVDSFKEKFEQAAATRFGSGWAWLVLKDDGKLAVVSTANQDSPLMGEAVSGVSGFPIVGLDVWEHAYYLKFQNRRPDYIKAFWNVVNWDEAAARFAQAK

SEQ ID NO: 105733 - DNA, 723 bp, Thermosynechococcus elongatus BP-1
  CDS (1)..(723): transl_table=11
atgcgcctaacccgtcgtcaaaccctcggcctcctcggcgtcagtgctgctaccctgtggttgcgatcgcgccccgccgtggcggcaggtgagccatcagaaatttatacgctgccgcctttgccctatgactacgatgccctagagccagtgattgatgcagagacgatgcgtctgcaccacgacaaacaccatgcagcctatgtcaacactctcaacaaggcactgacaccctaccgtcaatggcacgggctcgccatcgaaacgctcctgcgccaccttcaccaactccccaccgctatccaatcaactgtgcgcaaccacggcggtggccatgctaatcattccctcttttggcaaagtatggcaccgaatggcggcggtgagcccgcgggggacttagccatagccatagaaaacacttttggctcgttcccagaatttcaagcccagtttcagcaagcaggtctgaggcactttggcagtggctgggtctggcttgtgctgacgccccaagggaatttgaccattaccaccacgctcaaccaagattctccgctgatgcaagggcaagtgcccatcttgggtaatgatctgtgggaacatgcctactacctaacctatcgcaaccgtcgcgatcagtacctagaggcttggtggcaggtggttaattggccttgggtgagcgatcgctatgcccagatgcgcgagcttttggcttag

SEQ ID NO: 105734 - protein, 240 aa, Thermosynechococcus elongatus BP-1
MRLTRRQTLGLLGVSAATLWLRSRPAVAAGEPSEIYTLPPLPYDYDALEPVIDAETMRLHHDKHHAAYVNTLNKALTPYRQWHGLAIETLLRHLHQLPTAIQSTVRNHGGGHANHSLFWQSMAPNGGGEPAGDLAIAIENTFGSFPEFQAQFQQAGLRHFGSGWVWLVLTPQGNLTITTTLNQDSPLMQGQVPILGNDLWEHAYYLTYRNRRDQYLEAWWQVVNWPWVSDRYAQMRELLA

SEQ ID NO: 105735 - DNA, 603 bp, Thermosynechococcus elongatus BP-1
  CDS (1)..(603): transl_table=11
atggcatttgtacaagaaccccttccctttgatccgggtgcccttgaaccctatggcatgtctgcgaaaacccttgaatttcactatggcaaacaccataagggctacgtggataacctcaataagctgactcaagataccgaactcgctgacaaatcccttgaagatgtcattcgcacaacctatggcgatgctgccaaagtgggcatcttcaacaatgccgctcaagtgtggaatcacaccttcttctggaatagcctcaagccaggtggcggtggtgtgcctacgggtgatgtggccgctcggatcaacagtgcttttgggagctacgacgaattcaaagcccagttcaaaaatgccgcggcgacccaatttggcagtggttgggcatggctggtgctcgaagctggcacactgaaggtgactaaaactgccaatgccgaaaaccccttagttcacggtcaagtgcccctactgacgattgatgtttgggagcacgcctactatctcgactaccaaaaccgtcgtcccgactttattgataacttcctgaaccaattggtgaactgggattttgttgctaagaacttggcggctgcctaa

SEQ ID NO: 105736 - protein, 200 aa, Thermosynechococcus elongatus BP-1
MAFVQEPLPFDPGALEPYGMSAKTLEFHYGKHHKGYVDNLNKLTQDTELADKSLEDVIRTTYGDAAKVGIFNNAAQVWNHTFFWNSLKPGGGGVPTGDVAARINSAFGSYDEFKAQFKNAAATQFGSGWAWLVLEAGTLKVTKTANAENPLVHGQVPLLTIDVWEHAYYLDYQNRRPDFIDNFLNQLVNWDFVAKNLAAA

SEQ ID NO: 105737 - DNA, 612 bp, Oceanobacillus iheyensis HTE831
  CDS (1)..(612): transl_table=11
atggcaaaatttgaattaccggaattaccatatgcatatgatgcattggaaccgacaattgacaaagaaacaatgaacattcatcatacgaaacatcacaacacgtatgtaactaaattaaatgatgcattggaaggacatgcagaccttcaaagtaagtctgtagaagaattaattagtaatcttgatgcagtccctgaaaatgcaaaaactgcagtacgtaacaatggtggcggacatgctaaccatagcctattttggaagttattatcaccaaatggcggcggtgagccaacaggtgaattagctgataaaattaatgctaaatttggttcattagacaaattcaaagaagaatttgcagcagctgcagcaggacgtttcggttctggatgggcttggctaattgttaacaatggtgaactagaaattacaagcacaccaaaccaagattcaccattaatggaaggaaaaactcctgtattaggacttgatgtttgggaacacgcttattatcttaaatatcaaaacaaacgcccagagtacatttcagcattctggaatgtagttaattgggatcaagttgcaaaaaactacgaagaagctaagtaa

SEQ ID NO: 105738 - protein, 203 aa, Oceanobacillus iheyensis HTE831
MAKFELPELPYAYDALEPTIDKETMNIHHTKHHNTYVTKLNDALEGHADLQSKSVEELISNLDAVPENAKTAVRNNGGGHANHSLFWKLLSPNGGGEPTGELADKINAKFGSLDKFKEEFAAAAAGRFGSGWAWLIVNNGELEITSTPNQDSPLMEGKTPVLGLDVWEHAYYLKYQNKRPEYISAFWNVVNWDQVAKNYEEAK

SEQ ID NO: 105739 - DNA, 600 bp, Brucella suis 1330
  CDS (1)..(600): transl_table=11
atggctttcgaactgcccgcccttccgtatgactatgatgcgcttgcgcctttcatgtcgcgcgaaacgcttgaatatcatcacgacaagcatcatcaggcctatgtcaccaacggtaacaagcttctcgaaggttccggcctggcaggcaagagcctcgaagaaatcgtcaaggaaagcttcggcaagaatcaggccctcttcaacaatgccggccagcactacaaccatatccatttctggaaatggatgaagaaggatggcggcggcaagaaactgccgggcaagctggaaaaggcctttgattccgatcttggcggttatgacaagttccgcgctgatttcatcgctgccggtgccggccagttcggttcgggctgggcctggctttccgtcaaggacggcaagcttgaaatttccaagaccccgaacggtgaaaacccgctcgtgcacggtgcggcgccgatcctcggcgtggatgtgtgggaacactcctattacatcgattaccgcaacgcgcgtccgaaatatctcgaagctttcgtcgatagcctcgtgaactgggattacgtgctggaaatgtacgaaaaggcggcataa

SEQ ID NO: 105740 - protein, 199 aa, Brucella suis 1330
MAFELPALPYDYDALAPFMSRETLEYHHDKHHQAYVTNGNKLLEGSGLAGKSLEEIVKESFGKNQALFNNAGQHYNHIHFWKWMKKDGGGKKLPGKLEKAFDSDLGGYDKFRADFIAAGAGQFGSGWAWLSVKDGKLEISKTPNGENPLVHGAAPILGVDVWEHSYYIDYRNARPKYLEAFVDSLVNWDYVLEMYEKAA

SEQ ID NO: 105741 - DNA, 585 bp, Shewanella oneidensis MR-1
  CDS (1)..(585): transl_table=11
atggctttcgaattacccgcattaccatatgcaaagaacgcacttgaaccacacatttctcaagaaaccattgaataccactacggcaagcatcacaacacctacgttgttaagctaaacggtttaatcgaaggaaccgatttcgcaggtaaatctttagaagaaatcatcaaaacttctacaggtggcgtatttaacaacgcagctcaagtttggaaccacactttctactggaactgcttagcaccaaacgctggcggtgaaccaacaggccctgtggctgatgctatcaaagcggctttcggttcattcgatgcattcaaagcccaatttaccgattcagcggtcaacaacttcggtagcgcctggacttggttagtgaaaaaagccgatggtactgtcgctatcgttaacactagcaatgctgcaacacctctgactgacagcactgttaccccaatcctgactgtggatgtgtgggaacacgcttactacatcgattaccgcaatgttcgccctgactacttagcccacttctggcaattagtaaactgggacttcgtgaaccaaaacttcgcaggttaa

SEQ ID NO: 105742 - protein, 194 aa, Shewanella oneidensis MR-1
MAFELPALPYAKNALEPHISQETIEYHYGKHHNTYVVKLNGLIEGTDFAGKSLEEIIKTSTGGVFNNAAQVWNHTFYWNCLAPNAGGEPTGPVADAIKAAFGSFDAFKAQFTDSAVNNFGSAWTWLVKKADGTVAIVNTSNAATPLTDSTVTPILTVDVWEHAYYIDYRNVRPDYLAHFWQLVNWDFVNQNFAG

SEQ ID NO: 105743 - DNA, 630 bp, Corynebacterium efficiens YS-314
  CDS (1)..(630): transl_table=11
atgccgaacccaacgaaaggaaacaatatggctgtttacgaacttccggaacttgattacgcatacgacgctctcgagccacacatcgcggctgagatcatggagctgcaccactccaagcaccacgcaacctacgttgcgggcgccaacgctgctctcgaggccctggagaaggcacgcgaggagggcaccaaccctgaccaggtccgcgcactgtccaagaaccttgccttcaacctgggtggccacaccaaccactccatcttctggaagaacctttcccccaacggtggcggcgagcctaccggtgcgctggctgaggccatcaaccgcgacttcggttccttcgagaagttcaaggaccacttcaactccgcagcacttggtctgcagggctccggctgggcggtccttggttacgaccacatcgctggccgcctcgtcatcgagcagctgaccgaccagcagggcaacatctccatcgacatcaccccgctgctgatgctcgacatgtgggagcacgccttctacctgcagtacaagaacgtgaaggctgactacgtcaaggcagtctggaacgtcttcaactgggatgacgttgcacagcgcttcgacgctgcctccaagtag

SEQ ID NO: 105744 - protein, 209 aa, Corynebacterium efficiens YS-314
MPNPTKGNNMAVYELPELDYAYDALEPHIAAEIMELHHSKHHATYVAGANAALEALEKAREEGTNPDQVRALSKNLAFNLGGHTNHSIFWKNLSPNGGGEPTGALAEAINRDFGSFEKFKDHFNSAALGLQGSGWAVLGYDHIAGRLVIEQLTDQQGNISIDITPLLMLDMWEHAFYLQYKNVKADYVKAVWNVFNWDDVAQRFDAASK

SEQ ID NO: 105745 - DNA, 633 bp, Pseudomonas putida KT2440
  CDS (1)..(633): transl_table=11
atgcctacggaattcactgacatgccccataccttgcctgcattgccatacgcctacgatgcgctggaaccacacattgatgcccagacaatggaaatccaccacaccaagcatcaccagacttacgtgaacggcctcaatgccgccctcgagggtaccgagtgggccgaatggccggtggaaaaactggtcgctgccgtcaagcaactgccggaaaacctgcgtggcgccgtgaccaaccacggcggtggtcacgccaaccacagcctgttctggactgtcatgtcgcctcagggcggtggcgagcctgtgggccagctggcgcaagccgtcactgcacaacttggcggcttcgaggctttcaaggaggctttcaccaaagccgcgttgacccgcttcggcagcggttgggcctggctcagcgtgacgccgcaaaaaaccttgatggtggagagtagcggcaaccaggacagcccgctgatgcacggcaatgcgccgatcctgggcctggacgtgtgggagcacgcgtactacctcaagtaccagaaccgtcgtccggaatacatcggtgccttctacaacgtcattgactgggtggaagttgaacgtcgttaccttgaagccctgaagtga

SEQ ID NO: 105746 - protein, 210 aa, Pseudomonas putida KT2440
MPTEFTDMPHTLPALPYAYDALEPHIDAQTMEIHHTKHHQTYVNGLNAALEGTEWAEWPVEKLVAAVKQLPENLRGAVTNHGGGHANHSLFWTVMSPQGGGEPVGQLAQAVTAQLGGFEAFKEAFTKAALTRFGSGWAWLSVTPQKTLMVESSGNQDSPLMHGNAPILGLDVWEHAYYLKYQNRRPEYIGAFYNVIDWVEVERRYLEALK

SEQ ID NO: 105747 - DNA, 627 bp, Escherichia coli CFT073
  CDS (1)..(627): transl_table=11
atgaatatgagttataccctgccatccctgccgtatgcttacgatgccctggaaccgcacttcgataagcagaccatggaaatccaccacaccaaacaccatcagacttacgtcaacaacgccaacgcggcgctggaaaacctgccagaatttgccaacctgccggttgaagagctgatcaccaaactggaccagctgccagcagacaagaaaaccgtactgcgcaataacgctggtggtcacgctaaccacagtctgttctggaaaggtctgaaaaaaggcaccaccctgcagggcgacctgaaagcggctatcgaacgtgatttcggttccgttgataatttcaaagcagaatttgaaaaagcggcagcttcccgctttggttccggctgggcatggctggtgcaaaaaggcgataaactggcggtggtttctactgctaaccaggactctccactgatgggcgaagccatttctggcgcttccggcttcccgattctgggcctggatgtgtgggaacatgcttactatctgaaattccagaaccgccgtccggactacattaaagagttctggaacgtggtgaactgggacgaagcagcggcacgtttcgcggcgaaaaaataa

SEQ ID NO: 105748 - protein, 208 aa, Escherichia coli CFT073
MNMSYTLPSLPYAYDALEPHFDKQTMEIHHTKHHQTYVNNANAALENLPEFANLPVEELITKLDQLPADKKTVLRNNAGGHANHSLFWKGLKKGTTLQGDLKAAIERDFGSVDNFKAEFEKAAASRFGSGWAWLVQKGDKLAVVSTANQDSPLMGEAISGASGFPILGLDVWEHAYYLKFQNRRPDYIKEFWNVVNWDEAAARFAAKK

SEQ ID NO: 105749 - DNA, 609 bp, Vibrio vulnificus CMCP6
  CDS (1)..(609): transl_table=11
atgtcacacactttccctgagcttccctattcctacgatgcattagagccatacatcgatgcaaaaaccatggaagtgcactacagcaaacaccataaaacctattacgataagtttctcgcggcgattcaaggcagtgagcttgagcatcaaacgctcactgagatcttctcaagcatctctcaacacagccctgcagtgcgcaataatggcggtggctactacaaccatattctctactggcagtgcatgtctcccaatggtggagggcaacctcaaggcgcgctcgcccacgcgattcaagaaaagtttggcacttttgcggcgttcaaagaggccttttcccaagccgccgtcaacacctttggctctggctttgcatggttagtggtcaaagagggtgatattcatatcacctccaccagcaatcaggataacccactgatggatattgccagcgtacgtggcgaaccgatcctcgccctcgatgtttgggagcatgcgtactacatccgctatcaaaatcgccgcccagaatacattgatgcttggtggaatgtggtcgactggcaagtggtggagcaaaattatgctcaagcaataggctaa

SEQ ID NO: 105750 - protein, 202 aa, Vibrio vulnificus CMCP6
MSHTFPELPYSYDALEPYIDAKTMEVHYSKHHKTYYDKFLAAIQGSELEHQTLTEIFSSISQHSPAVRNNGGGYYNHILYWQCMSPNGGGQPQGALAHAIQEKFGTFAAFKEAFSQAAVNTFGSGFAWLVVKEGDIHITSTSNQDNPLMDIASVRGEPILALDVWEHAYYIRYQNRRPEYIDAWWNVVDWQVVEQNYAQAIG

SEQ ID NO: 105751 - DNA, 600 bp, Vibrio vulnificus CMCP6
  CDS (1)..(600): transl_table=11
atggagaatcgagcaatggcatttgaactaccagctcttccttacgcaaaagacgcgcttgagccacacatctctgcagaaactcttgagttccaccacggcaaacaccacaacacttacgttgtgaaactgaacggcctaattcctggtactgaattcgaaggtaaaactctagaagagatcatcaagacttctactggcggtatcttcaacaacgcagcgcaagtatggaaccacactttctactggcactgtcttgctccaaatgcaggcggcgagccaacaggtgcagttgcagaagcgatcaacgcagcattcggttcattcgaagagttcaaagcaaaattcacggattcagcaatcaacaactttggttcatcttggacttggttggtgaagaaagctgacggctctctagcaatcgttaatacttcaaatgcggcaacaccaatcactgaagaaggcgtaactccactactgactgtagacctatgggaacacgcttactacatcgattaccgcaacctacgtccagactacatgaacggtttctgggcactggttaactgggatttcgttgcagagaacctagcgaaataa

SEQ ID NO: 105752 - protein, 199 aa, Vibrio vulnificus CMCP6
MENRAMAFELPALPYAKDALEPHISAETLEFHHGKHHNTYVVKLNGLIPGTEFEGKTLEEIIKTSTGGIFNNAAQVWNHTFYWHCLAPNAGGEPTGAVAEAINAAFGSFEEFKAKFTDSAINNFGSSWTWLVKKADGSLAIVNTSNAATPITEEGVTPLLTVDLWEHAYYIDYRNLRPDYMNGFWALVNWDFVAENLAK

SEQ ID NO: 105753 - DNA, 642 bp, Bradyrhizobium japonicum USDA 110
  CDS (1)..(642): transl_table=11
atgaccgttagaacacgttccccacccagttgcggacaagaacccatgacctttacgctgccccctctcccttacgcctatgacgccctcggccagttcatgtcgaaggagacgctcgaattccaccacgacaagcatcatcaggcctacgtcaccaacggcaacaacgcgctcaagggcaccgaatgggaaggcaagtcccttgaggagatcgtcaagggctcgttcggcaagaaccccgcggtgttcaacaatgccggccagcactacaaccacatccacttctggagctggatgaagcccaatggcggcggcaccaagctgcccggcaagctcgagaagaagatcaacgaggacctcggcggcttcgagaagttcaagaccgacttccaggcggccggcgtcggccagttcggctccggctggtgctggctccaggtcaagaacggcaagctcgagatctccaagaccccgaacggcgagaatccgctggtgcacggcgccaccccgatcctcggctgcgacgtctgggagcactcctactacatcgactatcgcaaccgccgtccggactatctcaaggcgttcgtcgagaacctcgtgaactgggaatacgtcgagtccctgttcgacaaggcgtaa

SEQ ID NO: 105754 - protein, 213 aa, Bradyrhizobium japonicum USDA 110
MTVRTRSPPSCGQEPMTFTLPPLPYAYDALGQFMSKETLEFHHDKHHQAYVTNGNNALKGTEWEGKSLEEIVKGSFGKNPAVFNNAGQHYNHIHFWSWMKPNGGGTKLPGKLEKKINEDLGGFEKFKTDFQAAGVGQFGSGWCWLQVKNGKLEISKTPNGENPLVHGATPILGCDVWEHSYYIDYRNRRPDYLKAFVENLVNWEYVESLFDKA

SEQ ID NO: 105755 - DNA, 693 bp, Xylella fastidiosa Temecula1
  CDS (1)..(693): transl_table=11
ttgcttgcttcgtccccatcttttgcttcgacacaaccacaaaccgcgccgttcacactaccgccactcccctacgctgtcagcgcgctggagccggcgattgatacgcagaccatgacgttacatcacgacttccatcacaaggcctacgtagataacctcaatgctgcaatcaaggatataccgacactctccggaaaaacgctggagcaacttctggccatcgcatccacgttgccgccagtggtacgaaacaacgccggcggccactggaatcacagcgagttctggaagatgatggctccggttggcaagggagggaaaccatcggcagcgctggaagcacaaattaaaaaggactttggttcactagacgctttcaaggagcgcttcaacaaagccgcaacaggtcgtttcggctcgggctgggcttggatgatattgaccagtagcggactgcagatcacatcaacacccaatcaggataacccactgatggatgtggtagaggtacgcggtcagccattgctagccttagatgtttgggagcatgcgtactatctcaagtacaagtacaaacgtgctgattatctgaacgcttggtggacagttgtgaactggaatgaggtcaaccatttattcgaagtggcaaaaaaggatcaacataagcgaatcattaatccccagcattaa

SEQ ID NO: 105756 - protein, 230 aa, Xylella fastidiosa Temecula1
MLASSPSFASTQPQTAPFTLPPLPYAVSALEPAIDTQTMTLHHDFHHKAYVDNLNAAIKDIPTLSGKTLEQLLAIASTLPPVVRNNAGGHWNHSEFWKMMAPVGKGGKPSAALEAQIKKDFGSLDAFKERFNKAATGRFGSGWAWMILTSSGLQITSTPNQDNPLMDVVEVRGQPLLALDVWEHAYYLKYKYKRADYLNAWWTVVNWNEVNHLFEVAKKDQHKRIINPQH

SEQ ID NO: 105757 - DNA, 612 bp, Xylella fastidiosa Temecula1
  CDS (1)..(612): transl_table=11
atggcttacacccttcccatcctgccttacgcttacgatgcgttggaaccacacattgatgcccagacaatggaaatccattacaccaagcaccatgccacctatatcaataatcttaatgctgcgttggaaggaacggagtacgcggatttacccattgaagaattgctccgtaacttaaaaagtttgccggaaagcttgcaggttccagtacgtaacaacggcggtggtcacgccaatcattcactgttctggacggtgatggctcaggatggcggcggcaagccgaaaggagaggttgctaaagcgattgaccagcagctgggtggttttgagacatttaaagatgcttttaccaaagctgcactcagtcgtttcgggtccggttggtcattgctaaacgtcactccgagcaaaactttggtggttgaaagcagcgctaatcaggacagccctctatgcgatggtaagacgtctattttgtgcttggatgtgtgggaacatgcatattacttgcactatcagaatcgtcgtgcggattacgttaatgcgttctacaacgtgatcaactgggatgaggttgagcgccgctatgtggttgcgatgagctga

SEQ ID NO: 105758 - protein, 203 aa, Xylella fastidiosa Temecula1
MAYTLPILPYAYDALEPHIDAQTMEIHYTKHHATYINNLNAALEGTEYADLPIEELLRNLKSLPESLQVPVRNNGGGHANHSLFWTVMAQDGGGKPKGEVAKAIDQQLGGFETFKDAFTKAALSRFGSGWSLLNVTPSKTLVVESSANQDSPLCDGKTSILCLDVWEHAYYLHYQNRRADYVNAFYNVINWDEVERRYVVAMS

SEQ ID NO: 105759 - DNA, 597 bp, Clostridium tetani E88
  CDS (1)..(597): transl_table=11
atggctcatactttaccagctctaccctatgcttataatgctttagaaccccattatgatgaagctactttaagaattcatcatgatattcaccataaaacttatgtagatggattaaataatgcagaaaataaaattgaagagtgtagaaggactggagattatacattaattaaacactatgaaagagaattagctttccatggctcaggtcatatacttcatacattattttgggaaaatatgatgcctggcggtagccaaccaaaagatgagatattaaatcaaataaataaggactttacagattatgaaactttcaaaaaagaattctcagcggcagctgtagcagtagaaggatcaggttgggctatactctgttggaattgtatgtttaataaattagttatattaactgcagagaagcatcaagacttaactcaatggggagttaaaccattgctaattttagatgtgtgggagcatgcgtattatttaaaatatcaaaataaaagagcagcttttatagatgcttggtggaacattgtaaactgggatgttgtaaatgaaagatttaagcaggctactacaaagtaa

SEQ ID NO: 105760 - protein, 198 aa, Clostridium tetani E88
MAHTLPALPYAYNALEPHYDEATLRIHHDIHHKTYVDGLNNAENKIEECRRTGDYTLIKHYERELAFHGSGHILHTLFWENMMPGGSQPKDEILNQINKDFTDYETFKKEFSAAAVAVEGSGWAILCWNCMFNKLVILTAEKHQDLTQWGVKPLLILDVWEHAYYLKYQNKRAAFIDAWWNIVNWDVVNERFKQATTK

SEQ ID NO: 105761 - DNA, 609 bp, Tropheryma whipplei str. Twist
  CDS (1)..(609): transl_table=11
ttgttgttgtatacgctccctgatctgccttacggttattctgctctagagccctatataagcggaaaaatcatggagcttcatcactcaaagcatcacaaggcgtatgttgacggcgcaaatcaagctctggagcagctttgtgaagcacgtgataaaggtgatttttctagggtgccacaattgcaaaagaatctggcgtttaatcttgccgggcataagaatcattctgttttttggagtgttctaacccccgaggttggtcaggcaccggccggtccctttcttgaggttattgagcgggattttggcagcttcgactctttcatgaatcatttttcggccgcagccttgagcatacagggctctgggtgggccgttctgtcatgggagccggtcgcatcaaggcttattattcagcaattttatgatcatcaaaataacgcagtatctgcgaggaatctcctcctcctcgatatgtgggagcatgcgtattacttagactatttaaatgtaaaagctgattacgtaaaggctttttggagtatagtcaattggcatggcgttacagataagtttttgaaaattgccggcaggtctgtcgtttag

SEQ ID NO: 105762 - protein, 202 aa, Tropheryma whipplei str. Twist
MLLYTLPDLPYGYSALEPYISGKIMELHHSKHHKAYVDGANQALEQLCEARDKGDFSRVPQLQKNLAFNLAGHKNHSVFWSVLTPEVGQAPAGPFLEVIERDFGSFDSFMNHFSAAALSIQGSGWAVLSWEPVASRLIIQQFYDHQNNAVSARNLLLLDMWEHAYYLDYLNVKADYVKAFWSIVNWHGVTDKFLKIAGRSVV

SEQ ID NO: 105763 - DNA, 609 bp, Tropheryma whipplei TW08/27
  CDS (1)..(609): transl_table=11
ttgttgttgtatacactccctaatctgccttacggttattctgccctagagccctatataagcggaaaaatcatggagcttcatcactcaaagcatcacaaggcttatgttgacggcgcaaatcaagctctggagcagctttgtgaagcacgtgataaaggtgatttttctagggtgccacaattgcaaaagaatctggcgtttaatcttgccgggcataagaatcattctgttttttggagtgttctaacccccgaggttggtcaggcaccggccggtccctttcttgaggttattgagcgggattttggcagcttcgactctttcatgaatcatttttcggccgcagccttgagcatacagggctctgggtgggccgttctgtcatgggagccggtcgcatcaaggcttattattcagcaattttatgatcatcaaaataacgcagtatctgcgaggaatctcctcctcctcgatatgtgggagcatgcgtattacttagactatttaaatgtaaaagctgattacgtaaaggctttttggagtatagtcaattggcatggcgttacagataagtttttgaaaattgccggcaggtctgtcgtttag

SEQ ID NO: 105764 - protein, 202 aa, Tropheryma whipplei TW08/27
MLLYTLPNLPYGYSALEPYISGKIMELHHSKHHKAYVDGANQALEQLCEARDKGDFSRVPQLQKNLAFNLAGHKNHSVFWSVLTPEVGQAPAGPFLEVIERDFGSFDSFMNHFSAAALSIQGSGWAVLSWEPVASRLIIQQFYDHQNNAVSARNLLLLDMWEHAYYLDYLNVKADYVKAFWSIVNWHGVTDKFLKIAGRSVV

SEQ ID NO: 105765 - DNA, 582 bp, Pseudomonas syringae pv. tomato str. DC3000
  CDS (1)..(582): transl_table=11
atggcttttgaattgccaccactgccctacgccaaagacgctctggtgccgcacatttctgcggagactctggaatatcaccacgacaagcaccacaacacctacgtcgtgaacctgaacaacctggtgcccggcaccgagttcgaaggcaagaccctggaagagatcatcaagacttcttcgggcggtatcttcaacaacgccgctcaggtctggaaccacacgttctactggaactgcctggcgcctaacgctggcggcgagcctaccggcgctctggccgaggcgatcaacactgcattcggttccttcgacaagttcaaggaagagttcagcaagacctccatcggcaccttcggctccggctggggctggctggtgaagaaagccgacggctccctggcactggccagcaccattggtgccggcaacccgctgaccagcggcgacacgccgttgctgacctgcgatgtctgggaacacgcctactacatcgactaccgcaacctgcgtccgaagtacgtagaagcgttctggaacctggtgaactgggacttcgtggccaagcaatacgcggcctga

SEQ ID NO: 105766 - protein, 193 aa, Pseudomonas syringae pv. tomato str. DC3000
MAFELPPLPYAKDALVPHISAETLEYHHDKHHNTYVVNLNNLVPGTEFEGKTLEEIIKTSSGGIFNNAAQVWNHTFYWNCLAPNAGGEPTGALAEAINTAFGSFDKFKEEFSKTSIGTFGSGWGWLVKKADGSLALASTIGAGNPLTSGDTPLLTCDVWEHAYYIDYRNLRPKYVEAFWNLVNWDFVAKQYAA

SEQ ID NO: 105767 - DNA, 612 bp, Pseudomonas syringae pv. tomato str. DC3000
  CDS (1)..(612): transl_table=11
atgtcttataccttgccagcactgccttacgcctacgatgcccttgaaccgcatatcgatgcgcaaacaatggaaatccattacaccaaacaccaccagacctacatcaacaacctcaatgcggcggtggaaggcacggagttttctgactggtcggtggagaagctggtcgccagcgtcaaacagctcccggaaaacctgcgtccggcagtcatcaaccagggtggcggccatgccaatcattcgttgttctgggaaatcatggtgccgggcggtggaggcttgccaaagggcccgatcgccgcggccattgacgagcaactgggtggctatgacagcttcaaagaggcgttcaccaaagcagcgctgacccgtttcggcagcggctgggcgtggctgagcgtcacacctgaaaagaaactggtggtcgagagcagcggcaaccaggacagcccgctgatgaatggcaatacccccattctggggctcgatgtatgggagcacgcctactatctgcgctatcagaaccgtcgtcccgaatacatcaatgcgttttacaacgtgatcaattgggatgaagtttcccgacgttaccaggctgctctggcctga

SEQ ID NO: 105768 - protein, 203 aa, Pseudomonas syringae pv. tomato str. DC3000
MSYTLPALPYAYDALEPHIDAQTMEIHYTKHHQTYINNLNAAVEGTEFSDWSVEKLVASVKQLPENLRPAVINQGGGHANHSLFWEIMVPGGGGLPKGPIAAAIDEQLGGYDSFKEAFTKAALTRFGSGWAWLSVTPEKKLVVESSGNQDSPLMNGNTPILGLDVWEHAYYLRYQNRRPEYINAFYNVINWDEVSRRYQAALA

SEQ ID NO: 105769 - DNA, 582 bp, Bacteroides thetaiotaomicron VPI-5482
  CDS (1)..(582): transl_table=11
atgacttacgaaatgcctaaacttccttacgcaaacaatgcgctggaacctgtaatcagtcagcaaacgatagatttccattacggaaaacatctgcaaacatatgtaaataatctgaatagccttgtgcccggaacagaatatgaaggcaaaacggtagaagaaatcgttgccaccgctcccgatggagctatcttcaacaacgccggccaagtgctgaatcacaatttatatttcctccaattcgctccgaaaccttcgaaaaaggaaccggcaggcaaactgggagaagccatcaaacgtgatttcggcagctttgaaaacttcaagaaagaattcaatgcagcagcagtcggattgttcggttcaggatgggcctggctgtcagtagacaagaacggtaaactgcatatcaccaaagaaggaaacggcagtaaccctgtacgcgccggactgaaaccacttctgggttttgatgtgtgggaacactcctactacctggactaccagaaccgccgcgccgaccacgtaaacgccctgtggaacatcatcgactgggatgtggtagaaaaacgaatgtaa

SEQ ID NO: 105770 - protein, 193 aa, Bacteroides thetaiotaomicron VPI-5482
MTYEMPKLPYANNALEPVISQQTIDFHYGKHLQTYVNNLNSLVPGTEYEGKTVEEIVATAPDGAIFNNAGQVLNHNLYFLQFAPKPSKKEPAGKLGEAIKRDFGSFENFKKEFNAAAVGLFGSGWAWLSVDKNGKLHITKEGNGSNPVRAGLKPLLGFDVWEHSYYLDYQNRRADHVNALWNIIDWDVVEKRM

SEQ ID NO: 105771 - DNA, 618 bp, Chlamydophila caviae GPIC
  CDS (1)..(618): transl_table=11
atgacctttgttccctatactttgcccgaattgccctacgattacgatgctttagaaccagtgattagcgcagaaattatgcttttacatcatcaaaagcaccaccaaagttatataaataatttgaatgaagccttgaagaaattagacgttgctggtgttcagcaagatcttacacgcctgattgccttagagcctgccttacgttttaatggcgggggacatattaaccactctctattttgggaaatgctcgctccagtagatcgtggcggcggcgtacccccaaaacatgggttgctcaagctgattgagaaattctggggaactttcgataattttttaaaagaatttattgaatttgcagctcctattcaaggatcgggatgggcgtggctagctttttgtccaaaaaaacaggagcttatgctatgtgcaacagcaaatcaggatcctctagaggcgaccactggtaaggtgccccttctcggagtggatgtctgggaacatgcttactatctccagtataaaaatgttagattagattatttaaaagctattcctcgagtaattaattggggatatattgaaaaaagattctctgagacaactaattaa

SEQ ID NO: 105772 - protein, 205 aa, Chlamydophila caviae GPIC
MTFVPYTLPELPYDYDALEPVISAEIMLLHHQKHHQSYINNLNEALKKLDVAGVQQDLTRLIALEPALRFNGGGHINHSLFWEMLAPVDRGGGVPPKHGLLKLIEKFWGTFDNFLKEFIEFAAPIQGSGWAWLAFCPKKQELMLCATANQDPLEATTGKVPLLGVDVWEHAYYLQYKNVRLDYLKAIPRVINWGYIEKRFSETTN

SEQ ID NO: 105773 - DNA, 639 bp, Nitrosomonas europaea ATCC 19718
  CDS (1)..(639): transl_table=11
atgagcactaatctggataatttttcaagagctgcacaatcaggtgatacctatgtgctggcgccgttgccttatgccgataatgcgctggaacctgttatttccgcacatacactgagcttccactatggcaagcatcataaggcttatgtggataatctgaataaactcgttgcaggaacaccattttccggacaatcactggaacagatcatcacggctacagccgggcaggctgataaggcaggaattttcaacaatgcagcacaaatctggaatcacatgttctactggtacagtctcagccctaaaggaggaggagagccgcctgcagcattgaaacagaagatcgaggaatctttcggcagtgtagaggctttcaaacaggaatttgccaatgccgccatcacacaattcggtagtggctgggcctggcttgctcaggaaggatccaagctggccatcatcaagaccagtaatgccgattcacccctgacacgcggtattcgcccactgctgacgatcgacgtatgggaacacgcctactacctggatttccagaatcgtcgcccggattatgtcaacacggttatcgataaactgatcaactgggaatttgctgcagcaaatctcggatga

SEQ ID NO: 105774 - protein, 212 aa, Nitrosomonas europaea ATCC 19718
MSTNLDNFSRAAQSGDTYVLAPLPYADNALEPVISAHTLSFHYGKHHKAYVDNLNKLVAGTPFSGQSLEQIITATAGQADKAGIFNNAAQIWNHMFYWYSLSPKGGGEPPAALKQKIEESFGSVEAFKQEFANAAITQFGSGWAWLAQEGSKLAIIKTSNADSPLTRGIRPLLTIDVWEHAYYLDFQNRRPDYVNTVIDKLINWEFAAANLG

SEQ ID NO: 105775 - DNA, 687 bp, Rhodopirellula baltica SH 1
  CDS (1)..(687): transl_table=11
ttggtacgctatcgacgaagacgaagtctctatttccgccacccacaaacccctatgagcaccatggctttcacgctgcccgaattgccgtatgcctacgacgccctcgagccgcacattgacgcgcggacgatggaaatccaccactccaagcaccacaacgcatacgtgaccaagaccaacgacgcgttggctggtaccgatctggcttccaagtcgatcgaagaagtcatctccgacctgtcggctgttcccgatgacaaacgcggcgcagtccgcaacaacggcggtggacacgccaaccactcgttgttctggacggtcctcggtcctggcaaaggtggctcgccatcgggcgatttggccgccgccatcgacgaagcttgcggttcgttcgacgccttcaaagaacagttcgccaacgccgccgcaactcgcttcggtagcggttgggcgtggttgtacgtctccggtggcaagctgcacgtcggcagcaccgccaaccaagacagcccgctgatgggtgaagctgtcgccggcattggcggcacgccaatcctgggattggacgtttgggaacacgcttactacctgaactaccaaaaccgtcgtcccgattacatctccgcattctggaatgttgttgactgggacgccgttgccacccgctttgcggctgccaagtaa

SEQ ID NO: 105776 - protein, 228 aa, Rhodopirellula baltica SH 1
MVRYRRRRSLYFRHPQTPMSTMAFTLPELPYAYDALEPHIDARTMEIHHSKHHNAYVTKTNDALAGTDLASKSIEEVISDLSAVPDDKRGAVRNNGGGHANHSLFWTVLGPGKGGSPSGDLAAAIDEACGSFDAFKEQFANAAATRFGSGWAWLYVSGGKLHVGSTANQDSPLMGEAVAGIGGTPILGLDVWEHAYYLNYQNRRPDYISAFWNVVDWDAVATRFAAAK

SEQ ID NO: 105777 - DNA, 627 bp, Wigglesworthia glossinidia endosymbiont of Glossina brevipalpis
  CDS (1)..(627): transl_table=11
atgagttttactttaccagatttaaattatagttataatgatcttgagccattttttgatcgtgaaacaatgaaaattcatcatactaagcatcatcaagcttatattgataattctaataatattataaaattatttcccaatatttctaatatttccatagaaaaaataattaaaaatttagatgttgtaccttctagtcatagattaattttaagaaataacctaggaggacattttaaccattcttttttttggaaaactttggaaaaaaacaaaaaacctataaataagtcttttgaaaatattataaattcttattttggatcttttgacaaatttaaagaaatttttgaagatacaggaatgaaacattttggttcaggttgggtgtggttaataaaaaataaaaataataaactatctattgtaagtactttaaaccaagataacccaattatgggagttaatgtatgtaaatcttttggatatccattattagggttagatctttgggaacatgcttattatttgaaatatcaaaatagaagaaaagaatatattcaagctttttggaatttagttaattgggatattgtttatgatagatttctcaataataaataa

SEQ ID NO: 105778 - protein, 208 aa, Wigglesworthia glossinidia endosymbiont of Glossina brevipalpis
MSFTLPDLNYSYNDLEPFFDRETMKIHHTKHHQAYIDNSNNIIKLFPNISNISIEKIIKNLDVVPSSHRLILRNNLGGHFNHSFFWKTLEKNKKPINKSFENIINSYFGSFDKFKEIFEDTGMKHFGSGWVWLIKNKNNKLSIVSTLNQDNPIMGVNVCKSFGYPLLGLDLWEHAYYLKYQNRRKEYIQAFWNLVNWDIVYDRFLNNK

SEQ ID NO: 105779 - DNA, 624 bp, Candidatus Blochmannia floridanus
  CDS (1)..(624): transl_table=11
atgaattttgttttacctaaattatcttattcttacgattcactagaacctttttttgatgaaaaaactatgagaattcatcatactaaacatcatcaaacatatattgataacacaaactctgctctatctacattacaagaattttcccatctctccatagaagaactgatgcaaaatttaaattccattcccaaagaaaaaagaaatttattacgaaataatggaggaggacacattaatcatagtttattttggaaatctttaaaatatggaactatactgcaaggatcattaaaaagaaaaatagaaaatgctttttcaagtgttgataattttaaaaaaaagttcgagacaactgcgatgagtcgttttggatcaggatggatatggttaatacaacataatgatgatctaaaaattatttccactgcaaatcaagacaatccactaatgaaattggattatttatatgaagaaaataataccaatatacacctattacttggattagatgtatgggagcatgcttattatttacaataccaaaacaggcgcttagattatgttcaagctttttggaatatagtagattggaatgaagtatctaatagactatgctaa

SEQ ID NO: 105780 - protein, 207 aa, Candidatus Blochmannia floridanus
MNFVLPKLSYSYDSLEPFFDEKTMRIHHTKHHQTYIDNTNSALSTLQEFSHLSIEELMQNLNSIPKEKRNLLRNNGGGHINHSLFWKSLKYGTILQGSLKRKIENAFSSVDNFKKKFETTAMSRFGSGWIWLIQHNDDLKIISTANQDNPLMKLDYLYEENNTNIHLLLGLDVWEHAYYLQYQNRRLDYVQAFWNIVDWNEVSNRLC

SEQ ID NO: 105781 - DNA, 693 bp, Bordetella bronchiseptica RB50
  CDS (1)..(693): transl_table=11
ttggtaaatggaaatgactatcatttgtctttaccaaatgcaaatgccggagaccgcatgccatacgtcctgcctgccctttcgtatgcctacgatgcgctcgagccgcatatcgatgcacgcacgatggaaatacaccatacgcgccatcaccagacctacgtcaacggcctgaacgccgcgctcgaaggcgccggcctggacagcgaggagccggtcgagcaactgttgcgccgcatcccggcgctgccgccgggcatccacggcgcggtgcgcaaccacggcggcggccatgccaaccacagcctgttctggaccgtcatgtcgccgtcgggcggcggccgcccggatggacggctggcggccgacatccaggcccagctgggcggacacgacgccttccaggcggccttcacgcaggccgcgctgggccgattcggcagcggctgggcctggctgaccgtcacgcctgccggccgcctgcgggtcgacagcagcgccaaccaggattcgccgctcatggagggcaacaccccgatactcggcctggatgtctgggagcacgcgtattacctccagtaccagaaccgccgtcccgaatacatcgaggccttctaccgggtggtggactgggccgaagtggcgcgccgctacgagatcgccctggccgagctcggccgggaggccgcatga

SEQ ID NO: 105782 - protein, 230 aa, Bordetella bronchiseptica RB50
MVNGNDYHLSLPNANAGDRMPYVLPALSYAYDALEPHIDARTMEIHHTRHHQTYVNGLNAALEGAGLDSEEPVEQLLRRIPALPPGIHGAVRNHGGGHANHSLFWTVMSPSGGGRPDGRLAADIQAQLGGHDAFQAAFTQAALGRFGSGWAWLTVTPAGRLRVDSSANQDSPLMEGNTPILGLDVWEHAYYLQYQNRRPEYIEAFYRVVDWAEVARRYEIALAELGREAA

SEQ ID NO: 105783 - DNA, 579 bp, Bordetella bronchiseptica RB50
  CDS (1)..(579): transl_table=11
atggcacacactcttccccccctgccttacgctctggatgcgctggctccgcgcatttccaaggaaacgctcgagtttcactacggcaagcaccaccagacgtacgtcaccaacctgaacaacctgatccccggcacggagttcgagaacctgtcgctggaagagatcgtcaagaagtcctcgggtggcgttttcaacaatgccgcccaagtctggaaccacacgttctactggaacagcctgtcgcccaacggcggcggcgagcccaccggcgcgctggccgatgccatcaaggccaagtggggcagcgtggacgccttcaaggaagccttcaacaagtcggccgccggcaacttcggctcgggctggacctggctggtcaagaaggccgacggtacgctggacatcgtcaacaccagcaacgccgccacgccgctgacgaccgccgacaaggcgctgctgacctgtgacgtgtgggagcacgcgtactacatcgattaccgcaatgcccgtcccaagtacctggaaaatttctgggcgctggtgaactgggaattcgccgcgaagaatttcgcctaa

SEQ ID NO: 105784 - protein, 192 aa, Bordetella bronchiseptica RB50
MAHTLPPLPYALDALAPRISKETLEFHYGKHHQTYVTNLNNLIPGTEFENLSLEEIVKKSSGGVFNNAAQVWNHTFYWNSLSPNGGGEPTGALADAIKAKWGSVDAFKEAFNKSAAGNFGSGWTWLVKKADGTLDIVNTSNAATPLTTADKALLTCDVWEHAYYIDYRNARPKYLENFWALVNWEFAAKNFA

SEQ ID NO: 105785 - DNA, 705 bp, Chromobacterium violaceum ATCC 12472
  CDS (1)..(705): transl_table=11
atgcccgacccgaacgccgaactctcccgccgcggcttcctgctttccgccgccggttcgctggccgccctggccctgcccggcctgccaggcgccgcccatgcctcgtcggcccaggtcctgccgccgctgccctacgccgacaatgcgctggagccggtaatctcggcgcgcaccataggcttccactacggcaagcaccacaaggcttacctcgacaacctgaacaagctgatcgccggccgcgactacgccgacctgccgctggaggacatcctcacccgctccttcggccccgccagcgatgccgccgtgttcaacaacgccgcccaactgtggaaccacactttctattggcgcagcatgcggccgaaaggcggcggtatcccgcctcaagggctgagggaaaaaatagaagcctcgttcggcagcgtggacgcctgtaagcggcagctggccggcgccgccatttcccagttcggcagcggctgggcctggctggtgcaggacggcgacaagctgcgcgtggtgaagaccggcaacgccgacaatccgctcacctccggactgactccgctgctcaatgtcgacgtgtgggagcacgcctactacctggactaccagaaccgccgcgccgactatgtcaacgcggtgctggacaagctgatcgactgggaattcgcgcagcgcaacctgaaggcctga

SEQ ID NO: 105786 - protein, 234 aa, Chromobacterium violaceum ATCC 12472
MPDPNAELSRRGFLLSAAGSLAALALPGLPGAAHASSAQVLPPLPYADNALEPVISARTIGFHYGKHHKAYLDNLNKLIAGRDYADLPLEDILTRSFGPASDAAVFNNAAQLWNHTFYWRSMRPKGGGIPPQGLREKIEASFGSVDACKRQLAGAAISQFGSGWAWLVQDGDKLRVVKTGNADNPLTSGLTPLLNVDVWEHAYYLDYQNRRADYVNAVLDKLIDWEFAQRNLKA

SEQ ID NO: 105787 - DNA, 579 bp, Chromobacterium violaceum ATCC 12472
  CDS (1)..(579): transl_table=11
atggaacacaaactgcctgaactgccgtacgcgctggacgctctggcgccgcacatctccaaggaaaccctggaattccactacggcaagcatcatcagacctacatcaccaacctgaacaacctgatcaagggcaccgagttcgagaacgcctccctggaagaaatcgtcaagaaatcctccggcggcatcttcaacaacgccgcccaggtgtggaaccacaccttctactggttcggcctggccccgaacgccggcggccaaccgaccggcgcgctggccgacgccatcaacgccaagtggggttcgttcgacgaattcaagaaagccttcacccagaccgccatcggcaccttcggctccggctgggcctggctggtgaagaacagcgacggcagcctggacctggtatccaccagcaacgccgccaccccgctgaccaccgacaagaagccgctgctgacctgtgacgtgtgggaacacgcgtattatatcgactaccgcaacagccgcccgaactatctggaacacttctgggcgctggtgaactgggacttcgtggccaagaacttcgcctga

SEQ ID NO: 105788 - protein, 192 aa, Chromobacterium violaceum ATCC 12472
MEHKLPELPYALDALAPHISKETLEFHYGKHHQTYITNLNNLIKGTEFENASLEEIVKKSSGGIFNNAAQVWNHTFYWFGLAPNAGGQPTGALADAINAKWGSFDEFKKAFTQTAIGTFGSGWAWLVKNSDGSLDLVSTSNAATPLTTDKKPLLTCDVWEHAYYIDYRNSRPNYLEHFWALVNWDFVAKNFA

SEQ ID NO: 105789 - DNA, 699 bp, Wolinella succinogenes DSM 1740
  CDS (1)..(699): transl_table=11
atgctaaagagtaccgtttcttctttcaagagcctactggttgcctcgtttttgacgctcacagcctcagtggcgatggccaatccattcaccctggctcctttgccctatgcctttgatgcgctagaaccagccattgacaaagagacgatgcaaatccaccacggcaagcatcaccaagcctatgtcaataacctcaatgctcaagtcgcaacctatcccgagcttgccaaaatgagcctagagcagatcatggcgaagatctctagctataacatggcggtgcgaaacaatggaggcggacactataaccacgccctgttttggacactcatggcgcctgtgggcaaaggcgggactccttctagtgcgctagccaaagcgattgatagagattttggttcgctggataagatgaaagaggcattcgagaaagcgggagccacacgctttggctctggatgggcatgggtcgtggtcacagcggataagaagcttgccatcacctccactcccaaccaagacaacccccttatggatatcgctgaagtgaagggtactcctatcttggcgctggatgtttgggagcacgcctactatctcaaatatcagaatcgccgtggcgactatctcaaagagtggtggaaggtcgtcaattggaacgaagtgaacaaactgtttgaccaagccgtgaagtaa

SEQ ID NO: 105790 - protein, 232 aa, Wolinella succinogenes DSM 1740
MLKSTVSSFKSLLVASFLTLTASVAMANPFTLAPLPYAFDALEPAIDKETMQIHHGKHHQAYVNNLNAQVATYPELAKMSLEQIMAKISSYNMAVRNNGGGHYNHALFWTLMAPVGKGGTPSSALAKAIDRDFGSLDKMKEAFEKAGATRFGSGWAWVVVTADKKLAITSTPNQDNPLMDIAEVKGTPILALDVWEHAYYLKYQNRRGDYLKEWWKVVNWNEVNKLFDQAVK

SEQ ID NO: 105791 - DNA, 951 bp, Gloeobacter violaceus PCC 7421
  CDS (1)..(951): transl_table=11
atggttttgggtgttttgcttacaggtaaggcgcgatattctccgttactaaaggctgcctgcaattttccagccgggcgtgccccttgcggttcacctgaggcaaaaaccggttcactctgccaggagttcgtctcgatgaaatgctccgtatccacgctggtcggcaccctttgccttaccgctgccgcgttgttgtccacagctgccgaagcccagatcaacatcccgacaccgacgattaccccgcccaccgtcactgtaccgtcggtgcaaccgccttcggtcacgatgccgtccgccacccaggcgtcgacaacggcgtcgggctatccctacaaacttgctcccctcccctacgactacagcgctcttgagccttatatcgacgcagaaaccatgaagcttcaccacgacaagcaccaccaggcttacgtggacaatctcaacaaagcgctcgagaagtatccggatctccaaaaaaaatcgcccgaacaactcctgcgcgatcttaagcaagtacccgaggacacccgtgccgccgtgcgcggcaatggcggcggccacgtcaaccacacgatgttctgggagatcatgaagcccaaagggggcggcgagcccgccggtccgatcgccgccgccatccgcaccaacttcggcagcttcgacgccttcaaaacccagttcaatgaagcgggcaccaagcgcttcggcagcggttgggtgtggcttgtgagcaatcccggcggcaagcttgagatcgtgagcaccgccaatcaggattcgcccattgccgacggcaagtacccgatcatgggcaacgacgtctgggagcacgcttactatctcaagtaccagaaccgccgggccgattatctgagcgcctggtggaacacgctcaactgggatgagatcaatcgtcgtttccagaaagcctccaccgggttgtag

SEQ ID NO: 105792 - protein, 316 aa, Gloeobacter violaceus PCC 7421
MVLGVLLTGKARYSPLLKAACNFPAGRAPCGSPEAKTGSLCQEFVSMKCSVSTLVGTLCLTAAALLSTAAEAQINIPTPTITPPTVTVPSVQPPSVTMPSATQASTTASGYPYKLAPLPYDYSALEPYIDAETMKLHHDKHHQAYVDNLNKALEKYPDLQKKSPEQLLRDLKQVPEDTRAAVRGNGGGHVNHTMFWEIMKPKGGGEPAGPIAAAIRTNFGSFDAFKTQFNEAGTKRFGSGWVWLVSNPGGKLEIVSTANQDSPIADGKYPIMGNDVWEHAYYLKYQNRRADYLSAWWNTLNWDEINRRFQKASTGL

SEQ ID NO: 105793 - DNA, 612 bp, Gloeobacter violaceus PCC 7421
  CDS (1)..(612): transl_table=11
atggctcatacactcccgccgctgccctacgacgagaacgctctcgctccgtacgtttcggctcagactttgagcttccattacggcaagcaccacaccggctatctcaacaacatgaacaaggcgatcgccggcaccgagctggagtcgctgtcgctggtggacctcatccgtaccgccgccaaaaatgccgaacaaaagacgttgttcaacaacgccgcccaggtctggaaccatacgttctactggaacagcatgcgccccggcggcggcggcgagccgggcgggacgctgggcgagatgatcaaagatgccttcggcagctacgacgaattcaagaagcagttcgtcaccgccggtaccacccagttcggcagcggctacgcctggttggtcaaagacggtgagaagctggtggtcaccaagacccccaacgccgagacccccatcaccgacgagagcaagctgccgctgctcaacatggacgtctgggagcacgcctactacctcgactaccagaacctgcgccccgactacgagaacgccttcgccgacaatctgatcaattgggagtttgccgagaagaacctggagcgcgtcttcgcgggttga

SEQ ID NO: 105794 - protein, 203 aa, Gloeobacter violaceus PCC 7421
MAHTLPPLPYDENALAPYVSAQTLSFHYGKHHTGYLNNMNKAIAGTELESLSLVDLIRTAAKNAEQKTLFNNAAQVWNHTFYWNSMRPGGGGEPGGTLGEMIKDAFGSYDEFKKQFVTAGTTQFGSGYAWLVKDGEKLVVTKTPNAETPITDESKLPLLNMDVWEHAYYLDYQNLRPDYENAFADNLINWEFAEKNLERVFAG

SEQ ID NO: 105795 - DNA, 627 bp, Photorhabdus luminescens subsp. laumondii TTO1
  CDS (1)..(627): transl_table=11
atgagctattcattaccttctcttccttattcttatgaagctctggaacctcattttgataagcagacgatggaaatccaccataccaagcatcatcagacttacgttaataataccaatagcgccctagaagccttccctgagctggcaggactgggtattgatgatctgattcagcaattagataagatacctgctgataaacgtacttttgttcgtaataatgctggtgggcacgctaaccatagcttgttttggaaaggtctgaaattaggcacaactctgcaaggcccattaaaagaagctattgagcgcgatttcggtagcatagattcttttaaagagaaatttgagcaggcagcggctacccgttttggttctggctgggcgtggctagtactgaaagatgatggcaaactggcagttgtatcgactgctaaccaggatagcccattaatgggtgaagcgatttctggtgcatctggttatccgattactggtctggatgtttgggaacacgcttattacttacagtaccaaaaccgtcgtcctgactatattaaagcgttctggagcgttgttaactgggatgaagcagcgaagcgttatcaggaaaaagtgaaataa

SEQ ID NO: 105796 - protein, 208 aa, Photorhabdus luminescens subsp. laumondii TTO1
MSYSLPSLPYSYEALEPHFDKQTMEIHHTKHHQTYVNNTNSALEAFPELAGLGIDDLIQQLDKIPADKRTFVRNNAGGHANHSLFWKGLKLGTTLQGPLKEAIERDFGSIDSFKEKFEQAAATRFGSGWAWLVLKDDGKLAVVSTANQDSPLMGEAISGASGYPITGLDVWEHAYYLQYQNRRPDYIKAFWSVVNWDEAAKRYQEKVK

SEQ ID NO: 105797 - DNA, 609 bp, Vibrio vulnificus YJ016
  CDS (1)..(609): transl_table=11
atgtcacacactttccctgagcttccctattcctacgatgcgttagagccatacatcgatgcgaaaaccatggaagtacactacagcaaacaccataaaacctattacgataagtttctcgcggcgattcaaggcagtgagctggagcatcaaacgctcactgagatcttcacaaacatctctcaacacagccctgcagtgcgcaataatggcggtggctactacaaccatattctctactggcagtgcatgtcccccaatgggggaggggaacctcaaggcgcgctcgcccacgcgattcaagaaaagtttggcacttttgcggcgttcaaagaggccttttcccaagccgccgtcagcacctttggctctggctttacatggttagtggtcaaagagggtgatattcatatcacctccaccagcaatcaggataacccattgatggatattgccagcgtacgtggcgagccgatcctcgccctcgatgtttgggagcatgcgtactacatccgctatcaaaatcgccgcccagaatacattgatgcttggtggaatgtggtcgactggcgagtggtggagcaaaattatactcaagcaataggctaa

SEQ ID NO: 105798 - protein, 202 aa, Vibrio vulnificus YJ016
MSHTFPELPYSYDALEPYIDAKTMEVHYSKHHKTYYDKFLAAIQGSELEHQTLTEIFTNISQHSPAVRNNGGGYYNHILYWQCMSPNGGGEPQGALAHAIQEKFGTFAAFKEAFSQAAVSTFGSGFTWLVVKEGDIHITSTSNQDNPLMDIASVRGEPILALDVWEHAYYIRYQNRRPEYIDAWWNVVDWRVVEQNYTQAIG

SEQ ID NO: 105799 - DNA, 597 bp, Rhodopseudomonas palustris CGA009
  CDS (1)..(597): transl_table=11
atgaccttcacgctacccgaattgccgtatgcctacgacgcgttgcagccgtacatgtcgaaggagaccctggaatatcaccacgacaagcatcatcaggcgtatgtcaccaacggcaacaacctgctgaagggcaccgaattcgagggcaagtcgctcgaggaggtggtcaagggctcgttcaacaagaacgccccgttgttcaataacgccgcccagcacttcaaccacatccacttctggaagtggatgaagccgaacggcggcggcagcaagctgccgggcgcgctggaaaagaagatcaacgaagacctcggcggcttcgagaagttcaagaccgatttcgccgcggctggcgccggccagttcggctcgggctgggcctggctctcggtcaagaacggcaagctcgaaatctccaagactccgaacggcgagaacccgctggtgcacggcgccacgccgatcctcggcgtcgacgtctgggagcactcctactacattgattatcgcaaccgccgtccggactacctgaaggcgttcgtcgatagcctgatcaactgggagtatgtcgaggagctgtactccaaggcctga

SEQ ID NO: 105800 - protein, 198 aa, Rhodopseudomonas palustris CGA009
MTFTLPELPYAYDALQPYMSKETLEYHHDKHHQAYVTNGNNLLKGTEFEGKSLEEVVKGSFNKNAPLFNNAAQHFNHIHFWKWMKPNGGGSKLPGALEKKINEDLGGFEKFKTDFAAAGAGQFGSGWAWLSVKNGKLEISKTPNGENPLVHGATPILGVDVWEHSYYIDYRNRRPDYLKAFVDSLINWEYVEELYSKA

SEQ ID NO: 105801 - DNA, 609 bp, Onion yellows phytoplasma OY-M
  CDS (1)..(609): transl_table=11
atgaactttactctactttctcttccttatcaatatgatgctttagaacctttttttgatactcaaactatgcaattacatcatctcaaacaccatcaaacatacattaataaccttaatgatgctctcaaaaaacaccctcaactaaatttatctttggaacaaatgctaactgatttatcgttagtaccacaagatattagacaaacagttagaaataatggtggcggacattttaatcattcttttttttggaacattctaaaagtaaataatggcaatactcctcaaggattattaaaagaaatgattgactgcgaatttggttctatagattctttcaaagacaaatttgctaatgctgctaaaaccatttttggaagcggttgggcttggcttgtattaactccacaacaaaaacttgcaattacttttactcctaatcaagatgtagttctaaaccaaggaactcctcttttgggtctagatgtttgggaacatgcttattatttaagttatcaaaatcgtagagttgattatattgaagctttttttagtgtcttagactgggaaaaagtacaaaataaccttactcaaacattaaaataa

SEQ ID NO: 105802 - protein, 202 aa, Onion yellows phytoplasma OY-M
MNFTLLSLPYQYDALEPFFDTQTMQLHHLKHHQTYINNLNDALKKHPQLNLSLEQMLTDLSLVPQDIRQTVRNNGGGHFNHSFFWNILKVNNGNTPQGLLKEMIDCEFGSIDSFKDKFANAAKTIFGSGWAWLVLTPQQKLAITFTPNQDVVLNQGTPLLGLDVWEHAYYLSYQNRRVDYIEAFFSVLDWEKVQNNLTQTLK

SEQ ID NO: 105803 - DNA, 621 bp, Wolbachia endosymbiont of Drosophila melanogaster
  CDS (1)..(621): transl_table=11
atgagttttactttacctgaattaccatacgataaaacagctttggagccttatatatctgcaaaaaccttagattttcattatgataagcaccataaaggatatttaaataaactcaatgagctagttgaaaatacggattatcaacatgtaaaaattgaggaattaataacaaaagtgcatggtaatagcggcaacttgcctatatttaataatgcagcacaagtttggaaccatactttttattggaattcaatgaaaaaaaatggtggtggtaagcctaaagatggtagtcttctagcaaaaaaaattcaagacgatatcggtggctttgataaattttatgaagaattttcgagtcatggagtaagccagtttggcagtggatgggtatggttagtgctcgaaaaaggtaggttaggaaagctcaaaatcaccaagactccaaatgcagatttgccaataatttatggccaagtgccactactcactatggatgtgtgggagcacgcctattatttagattgtcaaaaccgtagaattgactacataaaagttttccttgatcatttgattaattgggattttgcagaagagaacttagaagaatatatgagatga

SEQ ID NO: 105804 - protein, 206 aa, Wolbachia endosymbiont of Drosophila melanogaster
MSFTLPELPYDKTALEPYISAKTLDFHYDKHHKGYLNKLNELVENTDYQHVKIEELITKVHGNSGNLPIFNNAAQVWNHTFYWNSMKKNGGGKPKDGSLLAKKIQDDIGGFDKFYEEFSSHGVSQFGSGWVWLVLEKGRLGKLKITKTPNADLPIIYGQVPLLTMDVWEHAYYLDCQNRRIDYIKVFLDHLINWDFAEENLEEYMR

SEQ ID NO: 105805 - DNA, 609 bp, Apis mellifera
  CDS (1)..(609)
atgtcttttgaattaccacaacttccctttccctataatgctctggctcgttcaggaatgagcgaagaaaccatgcaatttcaccatgacaagcatcatcaagcttatgttaataccctgaatgatcttatcaaagcaaaccctgcacttgaagggaaatcattagaagaattaattgtaacggcagcaaaggatgaatccttaacacctgttttgaataatgcaggtcaacattacaaccattctttattctggaattccctaagtcctgatggtggttcaatgtctcctgcatttgaagagttaatccgtaaaaattttggttcagttgaaaatttcaaagctgaattcaaaaaggccgctaccacgcaatttggctcgggatgggcttggctggttttgacttctgacaataaattaatcgttaccaaaacaccaaatggtaaaaacccgatttccgagggccagggaaagcctctattaaccattgatgtatgggaacatgcatattatattgatttccgtaatcgccgccctgattttgtggataatttccttaataacctcgcaaattatgattttgcagaagcccaaataaacgcaaaataa

SEQ ID NO: 105806 - protein, 202 aa, Apis mellifera
MSFELPQLPFPYNALARSGMSEETMQFHHDKHHQAYVNTLNDLIKANPALEGKSLEELIVTAAKDESLTPVLNNAGQHYNHSLFWNSLSPDGGSMSPAFEELIRKNFGSVENFKAEFKKAATTQFGSGWAWLVLTSDNKLIVTKTPNGKNPISEGQGKPLLTIDVWEHAYYIDFRNRRPDFVDNFLNNLANYDFAEAQINAK

SEQ ID NO: 105807 - DNA, 858 bp, Strongylocentrotus purpuratus
  CDS (49)..(858)
tataatagcagtgcagttactgtatgtctttgcacttcaaataacataatggcgtctgcttgctacgttgacagcaaaatgttcgcgtttttcatcattttatggatgtgcacaacaagttattgtgtttcctatccgtttgagtgtatcgcagaaattagatcagagtatattctaccagatttaccttttggttatgacgatttagaaccttacattgacagtgcaactttgaacgtacatcatcgcggtcatcatgcaggctatacacgtaaactcaatgcagcattgcatcagtgggggagtgaggagccagacagctatgcagcaacatctatcctcgacctgttgcagcatcttgatgacataccgcccaaatataaacaaagcatcaggaataacggaggagggtttgtcaatcataacatctactggtcaacaatggcttcaaacaaggaaaatgtcaccaccatgccctctggagacctcctaggtgagatcaatgagtcctttggaagctttgaagaattcaagaatcagttcactggtcgagcccttaccttgtttggatctggatatgtgtggcttagccgtcgcaaaccctcatcaccatttgaagaagtggaggaagagcctgcaagtcttatcatctcgacgactgccaaccaagacacgcccatctcaaacggccttcagccaatcctggtgctggatgtctgggaacacgcctactacctgaagcaccagaacaaacgagccaatcacatcgaggactggtggagggtagtcgactggtcggctgttgccaatttgagagattggtggtctggggattatgaggttcatgacgagttgtag

SEQ ID NO: 105808 - protein, 269 aa, Strongylocentrotus purpuratus
MASACYVDSKMFAFFIILWMCTTSYCVSYPFECIAEIRSEYILPDLPFGYDDLEPYIDSATLNVHHRGHHAGYTRKLNAALHQWGSEEPDSYAATSILDLLQHLDDIPPKYKQSIRNNGGGFVNHNIYWSTMASNKENVTTMPSGDLLGEINESFGSFEEFKNQFTGRALTLFGSGYVWLSRRKPSSPFEEVEEEPASLIISTTANQDTPISNGLQPILVLDVWEHAYYLKHQNKRANHIEDWWRVVDWSAVANLRDWWSGDYEVHDEL

SEQ ID NO: 105809 - DNA, 675 bp, Strongylocentrotus purpuratus
  CDS (1)..(675)
atgctagctgcaactgctgtagtaggaagggcactcctgaggagtcaagccagagtagtttccggagtgagttcccttcacacattgccagagcttccctatgactacaatgccttgtctccagtcattagcacagagatcatggagctccatcacaagaaacatcacaacacatatgtgaccaacctcaatgtggctgaagaggcattggaacatgcagttgaagcaggcgatatcagcaccatcatttctttgcaagcagcactgagattcaatggaggagggcatatcaaccataccatcttctggcagaacctctcaccagacggtggaggagaaccaacaggcgagttgctgaacgtgatcaagaaggactttggttcgtatgatgatatgaggagcaagctttctgctgctaccgtggcgatccaaggatctggatgggggtggttagggtacaacaaaggcaccaggagtcttcagatcgctacatgtcctaaccaagatcctctaaaagccactacaggattgatcccgctgtttggtattgatgtgtgggaacacgcctactacctgcagtataagaatgtccgtcctgattacgtcaaggctatctttaacattgctaactggagcgatgtggagaagagattgacagacgctatgactacttag

SEQ ID NO: 105810 - protein, 224 aa, Strongylocentrotus purpuratus
MLAATAVVGRALLRSQARVVSGVSSLHTLPELPYDYNALSPVISTEIMELHHKKHHNTYVTNLNVAEEALEHAVEAGDISTIISLQAALRFNGGGHINHTIFWQNLSPDGGGEPTGELLNVIKKDFGSYDDMRSKLSAATVAIQGSGWGWLGYNKGTRSLQIATCPNQDPLKATTGLIPLFGIDVWEHAYYLQYKNVRPDYVKAIFNIANWSDVEKRLTDAMTT

SEQ ID NO: 105811 - DNA, 1109 bp, Nasonia vitripennis
  CDS (130)..(792)
acggtgtcgatcggccggtgataacaccaaacttatatataggtagtccagagccgaggatttggcaaactgatcctctagacaccggtgaagcagttatttttcaccttttttaccccgagaagcgatatgtttgcagggaggagagcgatcgtcagcggagctatccgaggcaaggaggctcttgtcagggccaagcacacgctgccagacctgccttatgattacagggctttggagccaatcatctgtgctgagattatgcagcttcatcactcgaagcatcatgccacttatgtaaataatctcaatgtggccgaggagaagttgaaggaggccactgccaagggagatgtaaacactcagattgcactggctccagctatcaagttcaacggaggtggtcacttgaaccactctatcttctggcagaatctttctcccaatggcggcaaaccagatgctgcccttgtgagccagatcgagaaggactttggaagcatggaggaaatgaagaagcgactgtccgaaagcacagttgctattcaaggttcaggctggggctggcttggctacaatcaaaaggagaagaggctgcaaatcaccacctgtgccaaccaggatcctctgcaggcgaccacaggcctgattcctctgtttggtattgatgtttgggaacatgcttactatttgcagtacaaaaatgttcgaccagattacgtcaaggcaatctttgacattgctaactggaaagacgtcagcgctcgtttcaagaacgcagcaggctgctaagcatatatataccttaagcatttaatagtgcagttgtaaagacatgatgttagtgctatgaagtttaactctcatatcgttaatgatattattagtctgcttctttcaatattacatgatctgtgatcacattaaatgatattttcactatatcaatgacgcatgtaaactttcgtactaaaacaaaaaaaaaaaaacttttatatctgcaaacattcgcttttacttaatttttgttaacaaacgttccgcaaaaattgtaaaatttttaaatacttgtttactcgtataatttttcaataaaatgtttagtcttt

SEQ ID NO: 105812 - protein, 220 aa, Nasonia vitripennis
MFAGRRAIVSGAIRGKEALVRAKHTLPDLPYDYRALEPIICAEIMQLHHSKHHATYVNNLNVAEEKLKEATAKGDVNTQIALAPAIKFNGGGHLNHSIFWQNLSPNGGKPDAALVSQIEKDFGSMEEMKKRLSESTVAIQGSGWGWLGYNQKEKRLQITTCANQDPLQATTGLIPLFGIDVWEHAYYLQYKNVRPDYVKAIFDIANWKDVSARFKNAAGC

SEQ ID NO: 105813 - DNA, 853 bp, Aedes aegypti
  CDS (84)..(743)
gtgctgaccatctcgtaaaatccttgcgagatcactcctgtaaactttgttgttcaatcagatcgtaaattttgctgcttacaatgttggctcttcgcagtgctgttctggtatctaccagaaatgttgcagctgttctgggatgtcgcaacaagcataccctgccggatcttccgtacgactttggcgctctggagccggtcatctgccgtgaaatcatggaggttcaccaccagaagcaccacaatgcctatgtgaccaatttaaacgccgccgaggagcagttggcggaagccgttgcaaagaaggacacttccaagatcattcagctgggtggtgcactcaagttcaacggcggtggtcacatcaaccattcgattttctggaagaatctctcgccggaacgctcggatccgtcggcggagctgaagaagctgttggagcgcgacttccacggattggaaaacttcaaaaaggaaatgaaagccgccgctgttgccgtgcagggatccggttgggcatggctgggctataatcagaagacgaaagccctgcaggtggccgcctgccctaaccaggacccgctgcaagctactacgggattggttccactgttgggaatcgacgtttgggagcatgcgtactatttgcagtacaaaaatctccggccgaactacgttgatgctatttgggatgtcgtcaactggaaggatgtttccgaacgtctggccaaggcacaataaacgaagggtaagtttgtgctcgaatatgtttgtgtaataatagcagctctcaaaatttgttctacgtagagagtatcttcggaataaagtaatacaggaaatgcaaaaga

SEQ ID NO: 105814 - protein, 219 aa, Aedes aegypti
MLALRSAVLVSTRNVAAVLGCRNKHTLPDLPYDFGALEPVICREIMEVHHQKHHNAYVTNLNAAEEQLAEAVAKKDTSKIIQLGGALKFNGGGHINHSIFWKNLSPERSDPSAELKKLLERDFHGLENFKKEMKAAAVAVQGSGWAWLGYNQKTKALQVAACPNQDPLQATTGLVPLLGIDVWEHAYYLQYKNLRPNYVDAIWDVVNWKDVSERLAKAQ

SEQ ID NO: 105815 - DNA, 660 bp, Aedes aegypti
  CDS (1)..(660)
atgaacgttttgaagaaagtgagtgtctcaagattcgtcccacatttccgatggaagcacaccttgccagaactgccgtatgagtattctgcgcttgagcccacgatatgccgggagatcatggaactgcatcaccagaaacatcacgctggatacgtagaagccttcaacagtgccgaagagcagttacgcgaagcgctggtcaactgcaaccctaacaaggtcattcaactgggcaacgtactccgattcaatggcggtggtcacatcaatcactcacttttctgggaaaacctttcgccacactgtaccgcaccttccaaagcactagaaagcggcctgaagcaaaatttctacagtaaggaagatttcaaacaattgatgcgtgatacggcactgtcagtacagggctccggatgggtttggctgggatggcataagccgtccaaaacgatgaagattgctgcctgctgtaatcaggatcctctggaagccaccaccggattgttgccactgcttgggatcgatgtttgggagcatgcctattacatccagtacaaaaatgatcgtgccaagtactttgacgctttgtgggagatcatcgactggaaggtggtctcaaatcgatacgaaaaattgcgcagtcttattgagaagtaa

SEQ ID NO: 105816 - protein, 219 aa, Aedes aegypti
MNVLKKVSVSRFVPHFRWKHTLPELPYEYSALEPTICREIMELHHQKHHAGYVEAFNSAEEQLREALVNCNPNKVIQLGNVLRFNGGGHINHSLFWENLSPHCTAPSKALESGLKQNFYSKEDFKQLMRDTALSVQGSGWVWLGWHKPSKTMKIAACCNQDPLEATTGLLPLLGIDVWEHAYYIQYKNDRAKYFDALWEIIDWKVVSNRYEKLRSLIEK

SEQ ID NO: 105817 - DNA, 705 bp, Chlamydomonas reinhardtii
  CDS (1)..(705)
atggccctcgcgatgaaggctcaggcttccagcctggtggctggccagcgccgcgctgtgcgccccgcttcgggccgtcgcgctgtgatcactcgcgctgctctggagctgaagtctcccccctacgctctggatgctctggagccccacatgagcaagcagaccctggagttccactggggcaagcaccaccgcgcctacgtggataacatgaacaagcaggtcgctggcactcccctggacggcaagtcgctggaggagatcgtcctggccagctggaacaatggccagcccaccccggtgttcaacaacgccgctcaggtctggaaccacactttcttctgggagagcatgaagcccaacggtggcggtgcccccaccggcgcgctggctgaggccatcacccgcgacttcggcagcctggacaagttcaaggaggagttcaagcaggctggcatgacccagttcggctctggctgggcctggctgaacgccgacaagaccggcaagctgtcgatcagcaagtcgcccaacgccgtgaaccccgtggtggagggcaagacccccatcctgactgtcgatgtgtgggagcacgcctactacattgacgtgcagaaccgccgccccgactacatcaccaccttcatggagaagctgatcaactgggacgccgttgctcagcgctacgccgctgccaccaagtaa

SEQ ID NO: 105818 - protein, 234 aa, Chlamydomonas reinhardtii
MALAMKAQASSLVAGQRRAVRPASGRRAVITRAALELKSPPYALDALEPHMSKQTLEFHWGKHHRAYVDNMNKQVAGTPLDGKSLEEIVLASWNNGQPTPVFNNAAQVWNHTFFWESMKPNGGGAPTGALAEAITRDFGSLDKFKEEFKQAGMTQFGSGWAWLNADKTGKLSISKSPNAVNPVVEGKTPILTVDVWEHAYYIDVQNRRPDYITTFMEKLINWDAVAQRYAAATK

SEQ ID NO: 105819 - DNA, 1427 bp, Chlamydomonas reinhardtii
  CDS (72)..(935)
caacatccacgagagatttccggacttgcctttcgctcgaccaaccgctcggtctattttggtgagaaccaatggcagggcaaactcgggccttgctggccagccaactggcagcggctgctctcctggtgtgcgctgtgctcgcaagcgctaccaagaggcagccgtacccagtcgagtgccagctgaaggtgaacggcacctacgccattcccggcttaccactggcttacgacgcgtacatgcctgccatcgacaacgagaccatgttcctgcactcccagcgccacgtcggggctgctgtcacgtccgtgaacagcgtgctggctcgctaccccgaactgcgcgagctgtcgctgtcggagattgtcagccagatcggcaccaggcgcttcaaccgcaagtacgccatcgccgccgccgatagcaccgccctgcgcaacaacgccggcagcctgtggaaccacgcccacttctggcgcatcatgaccaccttcaactcctccaaccccgccaccgtcctcaccgacgccgcgcctcgcgcgggggtgccctctctcaaggctgccatcgctgccaagtggggcaacgcaacggcgctgctggactcgctgcgtgcgaccggtgccggcgtgttcggctcgggctgggcctggctggtggtgcggccccaggagtcaggcaagggcttcgagctggccattgtccccagccccaaccaggataacccgctgatggacggctacaccactgacaagacccgccgcggcgtccccatcctgggcgtggacgtctgggagcacgcatactacctgcgctaccgcaacgtgcgcgcctcctacctgtcctcctgggtgggtctggtggactgggcggctgtgcagcgcaactacgggttcgcagtggcgggccgcgtggacgcaatgctgtgctaagcatgaacacccggttgcagcagctgaactgggttaaagattgcaaggctgtcgggagcattgagccgctatgtatatgaggctttgcggacaagaaactctttgcggacaaggacttcgttcaagaggttcgcgcagaagggattctggtcgtgcctgccggctgatgattgagcgcctttcgtatgacactgtgacagtaaatgtatgacccggacccaacttggacccggatggactttcatgtagctgagggccctttttaatcttaacacgtacatatgctgacgctcatgcgtgtggacactgcggtgtggccattgaccgcattcattatgtgcgctaccggaaacacagggaatgggggtcacgtgcctattgtaatggaaccgttatgctacgtcgccatgactgcctctatcagtttgtacgcgggtcatgtcagaacgaacaagacgacgaagacggcgcgatgtatcacattccgagttg

SEQ ID NO: 105820 - protein, 287 aa, Chlamydomonas reinhardtii
MAGQTRALLASQLAAAALLVCAVLASATKRQPYPVECQLKVNGTYAIPGLPLAYDAYMPAIDNETMFLHSQRHVGAAVTSVNSVLARYPELRELSLSEIVSQIGTRRFNRKYAIAAADSTALRNNAGSLWNHAHFWRIMTTFNSSNPATVLTDAAPRAGVPSLKAAIAAKWGNATALLDSLRATGAGVFGSGWAWLVVRPQESGKGFELAIVPSPNQDNPLMDGYTTDKTRRGVPILGVDVWEHAYYLRYRNVRASYLSSWVGLVDWAAVQRNYGFAVAGRVDAMLC

SEQ ID NO: 105821 - DNA, 1299 bp, Chlamydomonas reinhardtii
  CDS (74)..(745)
gctcactattttgctgcatactccctcctgtaacctgtgcttgaacttgcccgtgcgtaaacggctctcggagatgctcgcgcgtgttgctctgggcctggcccgcgatggccagagcgctgtgcccactatgacccgcgctatgtcgtccgtgaagctgcctgacctgccctattcttacggggcgctggagccctacatttcgggccaaatcatggagctgcaccactccaagcaccacgccacttacgtagcgaacctgaacaaggcgctggagcagcaggcggaggctgagcacaagggcgacgtggcaaagcttatttcgctgcagagcgctatcaagttcaacggcgggggtcacgtcaaccatgacattttctggaccaacctgtgcccgcacaaggagtggcagcctccctcgggcgacctgaaggccctcattgaggcgcagtggaagactctggacaacttcaccaccaccttcagtgcgcagacggccgctgtgcagggctcgggctggggctggctgggctacaacaaggccacacacaagctggaggtggtgacgctgcccaaccaggacccgctgagcgtcacgggcctggtgccgctgctgggcatcgacgtgtgggagcacgcctactacctgcagtacaagaacgtgcggcccgactacctcaaggccatttggaacatcgtcaactggcagaacgtggagcagcgcctggccgccgccaagaagtaaggctggtgggaggcaggcaggcagtggggggaggaggaggacagcagtgcgctgcggcagcagcggacaggaaccggcggcggcaggcagcggcgctggcgaggaggcggaggcgccacggacgattgaggacgagggtttgtgaggaggggctgcggcagcgggctggggcggtagcagagtaggggatttgtaatgaggaccacatgaatgggagggcgaggaagttagaggagcagccgggatggcacaggtacaacccgagcgcagggcaggccggctgcaggggctgtgtgggttgcggagggtatggcgcaagagcttatcaacatgaacatgggcgtgtggtgtgcagtggattgcgcgtgtgcatgccttaccatgcatgcagtttagggcattgctgttgacgttgagacttgttggcaacggacgtgtggaaaacagagcggtgacaggtcacaggacagctgtgacacccctgactgttgtaattgcgctgttgaccagaggcggggagctagtgccgacgctgtaacatacgacggtgttac

SEQ ID NO: 105822 - protein, 223 aa, Chlamydomonas reinhardtii
MLARVALGLARDGQSAVPTMTRAMSSVKLPDLPYSYGALEPYISGQIMELHHSKHHATYVANLNKALEQQAEAEHKGDVAKLISLQSAIKFNGGGHVNHDIFWTNLCPHKEWQPPSGDLKALIEAQWKTLDNFTTTFSAQTAAVQGSGWGWLGYNKATHKLEVVTLPNQDPLSVTGLVPLLGIDVWEHAYYLQYKNVRPDYLKAIWNIVNWQNVEQRLAAAKK

SEQ ID NO: 105823 - DNA, 642 bp, Magnaporthe grisea 70-15
  CDS (1)..(642)
atggcaagctcaaccacctacaagctccccgagctcccattcgcctacgacgccctggagccgcacatctccaagcagatcatggagctgcaccacagcaagcaccacgcggcctacgtggccaacctcaacaaggcgctcgagacgtacgcgtcgggccagctggcggaccgcgtcgccaccctcgcggccatcaacttcaacgccggcggccacatcaaccacacgctcttctgggagaacctgacgccggcgtcgagcccagacgccgacgccgccacgtcggcgccctcgctggttacgcagatcgagaagcagtggggcagcctcgaccaattcaaggcggagttctcggccgagctgctgggcatcaagggcagcggctggggctggctggtcaaggagaagtcggcggctggcgcgctggtcgtcgtcaccaccaaggatcaggattccgtgccgagcgggatccccgtatttggcgttgacatgtgggagcatgcttactatcttcagtacctgaacggcaaggccgcctatgtcgaaaacatttggaaggttatcaactggaaaactgccgaaaagaggttcgcgtcaccagggcgttccgaggttttcaaagcactacatgcttccctgtaa

SEQ ID NO: 105824 - protein, 213 aa, Magnaporthe grisea 70-15
MASSTTYKLPELPFAYDALEPHISKQIMELHHSKHHAAYVANLNKALETYASGQLADRVATLAAINFNAGGHINHTLFWENLTPASSPDADAATSAPSLVTQIEKQWGSLDQFKAEFSAELLGIKGSGWGWLVKEKSAAGALVVVTTKDQDSVPSGIPVFGVDMWEHAYYLQYLNGKAAYVENIWKVINWKTAEKRFASPGRSEVFKALHASL

SEQ ID NO: 105825 - DNA, 684 bp, Magnaporthe grisea 70-15
  CDS (1)..(684)
atggcgtctctcatccgtacaacacccgccgtccgtggagctcttcgctcgcgcgctttcaagcctgctgccatggccagcaccagctttgtccgcggcaaggccacactccccgacctgaagtacgactacggcgcgctcgagccctacatctcggccgagatcatggagctccaccactccaagcaccacaacacgtacgtgcagggctacaacagcgccgtgcaggccatcgccgaggcgcccacgccccaggccgccgccgccgtcgccccgctcctcaacttccacggcggcggccacgtcaaccactcgctgttctgggagaacctggcccccgcctcgcgcgagggcggcggcgagcccgacggcaagctcagggccggcatcgacgccacctttggctcgtttgagaccttcaccaagcagatgaacacgacgctggccggcatccagggcagcggctgggcctggctggccaaggacaagaccaccggcgccctgtccatcgtcaccagggcgaaccaggaccccgtcgcgggcaacctggccccgctgctgggtatcgatgcttgggagcacgcctactacctgcagtaccagaaccgcaaggccgagtacttctctgccatctggaacgtcatcaactggaagactgttggcaacaggtttgacaagtcttga

SEQ ID NO: 105826 - protein, 227 aa, Magnaporthe grisea 70-15
MASLIRTTPAVRGALRSRAFKPAAMASTSFVRGKATLPDLKYDYGALEPYISAEIMELHHSKHHNTYVQGYNSAVQAIAEAPTPQAAAAVAPLLNFHGGGHVNHSLFWENLAPASREGGGEPDGKLRAGIDATFGSFETFTKQMNTTLAGIQGSGWAWLAKDKTTGALSIVTRANQDPVAGNLAPLLGIDAWEHAYYLQYQNRKAEYFSAIWNVINWKTVGNRFDKS

SEQ ID NO: 105827 - DNA, 765 bp, Gibberella zeae PH-1
  CDS (1)..(765)
atgtttcccctcctacccctcctcctccttctcacttcacctacatcttcttcctctgtcagcgctaaacctgaccttgcttctgacaataacatcctccccgacaatatcccaacttattcagccatgtctgttggaacctactctcttccggcgctgccgtacgcctacgatgcccttgagcctagcatctctgctcaaatcatggaacttcaccactcaaagcatcatcaagcctacgtaacaaacctcaacgtcgccctcaagaactacgccaccgctacttcatccagcgacatcgccggccagatcgcccttcagtccgccatcaagttcaacggcggcggccacatcaaccattctctcttctgggagaatctctgtccctccagctctccagactccaagcccgacagcgcccccacgctcggtgctgaaatctcaaagacgtggggcagcatcgaggctttccaggagaccttcaagaagactctgctgggtctgcagggcagcggctggggatggctggtcaaggacacgcagggcttgcgtatcgttaccaccaaggaccaggaccctgtcgtgggaggggaggtgcccatttttggcgtcgatatgtgggagcatgcctactacctgcagtacctgaacggaaaggctgcctatgttgacaacatctggaatgtcatcaactggaagaccgccgaggctcgcttcactggctcccgtgaggacgcattcaaggtcctccgagcttctatctag

SEQ ID NO: 105828 - protein, 254 aa, Gibberella zeae PH-1
MFPLLPLLLLLTSPTSSSSVSAKPDLASDNNILPDNIPTYSAMSVGTYSLPALPYAYDALEPSISAQIMELHHSKHHQAYVTNLNVALKNYATATSSSDIAGQIALQSAIKFNGGGHINHSLFWENLCPSSSPDSKPDSAPTLGAEISKTWGSIEAFQETFKKTLLGLQGSGWGWLVKDTQGLRIVTTKDQDPVVGGEVPIFGVDMWEHAYYLQYLNGKAAYVDNIWNVINWKTAEARFTGSREDAFKVLRASI

SEQ ID NO: 105829 - DNA, 693 bp, Gibberella zeae PH-1
  CDS (1)..(693)
atggcttccgctcttcttcgatcaactcccgccctccgcgctggcctgcgcgcccgctctactcccctcgcggctatggctaccaccagcttcgtccgcggcaaggccactctccccgatcttccctacgactatggcgctcttgagccctacatctctggccagatcatggagcttcaccactccaagcaccaccagacctacgttaccggcttcaacaacgctaccgacgccatcgccgaggccaaccacaagggcgacgccaaggctgctgccgctcaggctcctctcctcaacttccacggcggtggtcacgtcaaccactccctcttctgggagaaccttgctcccaacggtaagggcggtggtggtgagcccgagggcaagcttctgacttccatcaacgaggactttggctccttcgaggccttcaagaagcagaccaacgctaccctcgccggtatccagggctccggctgggcctggctcgtcaaggacaagaacgctggcactctgtccatcgttacccgacccaaccaggaccccgtcaccggtaaccttgagcccctcctcggcattgacgcctgggagcacgcctactaccttcagtaccagaaccgcaaggccgagtacttcagcgccatctgggacgtcatcaactggggcactgtcgccaagcgatttgagaagtaa

SEQ ID NO: 105830 - protein, 230 aa, Gibberella zeae PH-1
MASALLRSTPALRAGLRARSTPLAAMATTSFVRGKATLPDLPYDYGALEPYISGQIMELHHSKHHQTYVTGFNNATDAIAEANHKGDAKAAAAQAPLLNFHGGGHVNHSLFWENLAPNGKGGGGEPEGKLLTSINEDFGSFEAFKKQTNATLAGIQGSGWAWLVKDKNAGTLSIVTRPNQDPVTGNLEPLLGIDAWEHAYYLQYQNRKAEYFSAIWDVINWGTVAKRFEK

SEQ ID NO: 105831 - DNA, 657 bp, Apis mellifera
  CDS (1)..(657)
atgtttgcagcaagacgtatcctattttccaatacagtcaaagatacatttacaagaacaaaacatacacttcctgatttaccatatgactacaaagctttggaacctattatttccgccgaaattatgcaacttcaccattcaaagcaccatgcaacttatgtgaataatttaaatgttgctgaagaaaaaatgaaagaagctgtcgccaaaggtgatgtcaatacacaagttgcattaagtcctgctattaaattcaatggtggtggtcatttgaatcattcaattttttggtgcaatctttccccaaatggcggtaaaccagacgctgcacttcttaatcagattaaaaaagattttggtagcatagaagaaatgaaaaaacggttatctgaaaataccattgcgattcaaggttctggttggggttggcttggatattgtcaaaaatcaaaatctttaaggatagctacttgtgctaatcaagatcctttgcaagctacaactggtttaataccactttttggtattgatgtttgggaacatgcatattatctacaatataaaaatgttcgacccgattacgtaaaagctatctttgatgttgtgaattggaatgatgtgaattctcgttataagaaagctattggatcttag

SEQ ID NO: 105832 - protein, 218 aa, Apis mellifera
MFAARRILFSNTVKDTFTRTKHTLPDLPYDYKALEPIISAEIMQLHHSKHHATYVNNLNVAEEKMKEAVAKGDVNTQVALSPAIKFNGGGHLNHSIFWCNLSPNGGKPDAALLNQIKKDFGSIEEMKKRLSENTIAIQGSGWGWLGYCQKSKSLRIATCANQDPLQATTGLIPLFGIDVWEHAYYLQYKNVRPDYVKAIFDVVNWNDVNSRYKKAIGS

SEQ ID NO: 105833 - DNA, 711 bp, Candida glabrata CBS 138
  CDS (1)..(711)
atgttgtctacgtctaggattgctttcaaatctactcaactaagagctgcctctacagtgctaagacgcacgaaggtgacgttgccagagctagagtgggacttcggtgctcttgagccacacatctccggccagatcaacgaattgcactactccaagcaccaccagacctatgtcaacggcctgaacaccgctgtcgaccagttccaggaactgacccacaagttgtccaaggaccccaacgacttgcaagctgcacgtgatctaatccaagtgcagcagaacatcaagttccatggaggtgggtacacgaaccactgtctgttctggaagaacctggctccagagaagaacggtggtggtgaagcgccatccagctccagtgctcttggccagcagatcgagaagcagtacggctccttggacaagctgatcgaggtcaccaatgccaaattggccggtgtgcaaggttccggttgggccttcattgtcaagaacttggagaacggcggccagctggatgttgtgcagacttacaaccaggacacagtcggcaaccagtttgtcccactggtggccatcgacgcctgggagcacgcctactacttgcaataccaaaacaagaaggtcgactacttcaaggctatttggaacgtcatcaactggaaggaagctgcgaagaggtacgaaacatccaaagtcactaaatag

SEQ ID NO: 105834 - protein, 236 aa, Candida glabrata CBS 138
MLSTSRIAFKSTQLRAASTVLRRTKVTLPELEWDFGALEPHISGQINELHYSKHHQTYVNGLNTAVDQFQELTHKLSKDPNDLQAARDLIQVQQNIKFHGGGYTNHCLFWKNLAPEKNGGGEAPSSSSALGQQIEKQYGSLDKLIEVTNAKLAGVQGSGWAFIVKNLENGGQLDVVQTYNQDTVGNQFVPLVAIDAWEHAYYLQYQNKKVDYFKAIWNVINWKEAAKRYETSKVTK

SEQ ID NO: 105835 - DNA, 681 bp, Kluyveromyces lactis NRRL Y-1140
  CDS (1)..(681)
atgtttgctaagagtgtagcccgtagagctttgcaattgcaaccaactttgttggctaagagaactaaggtttctttaccagaattggactgggatttcggtgccttggaaccacacatttcaggtcaaatcaatgaattgcattacactaagcaccatcaaacctacgtcaatgggtttaacgcagctgttgagcaattcgatgaattgaagagcaagttggataacgatccagctgttgccaagcaaattgttgccgttcaacagaaccttaagttccacggtggtggttacgtcaaccattgtttgttctggaagaacttggcaccaacttctcaaggtggtggtgaagcaccaaccggtgccttggccaagcaaattgagactcaattcggctctctagacaacttgatctcattgactaatgctaaattggctggtgttcaaggttcgggctgggctttcatcgtgaagaacgtggaaaatggtaaccaattggaagtcgtccaaacatacaaccaagataccgttaccggtccattgaagcctttggtcgctattgactcttgggaacatgcttactacttacaataccaaaaccaaaaggctaactacttcaaagctatctggaacgttatcaactggaaggaagctgctaagagatttgaagctgctgcttaa

SEQ ID NO: 105836 - protein, 226 aa, Kluyveromyces lactis NRRL Y-1140
MFAKSVARRALQLQPTLLAKRTKVSLPELDWDFGALEPHISGQINELHYTKHHQTYVNGFNAAVEQFDELKSKLDNDPAVAKQIVAVQQNLKFHGGGYVNHCLFWKNLAPTSQGGGEAPTGALAKQIETQFGSLDNLISLTNAKLAGVQGSGWAFIVKNVENGNQLEVVQTYNQDTVTGPLKPLVAIDSWEHAYYLQYQNQKANYFKAIWNVINWKEAAKRFEAAA

SEQ ID NO: 105837 - DNA, 687 bp, Debaryomyces hansenii CBS767
  CDS (1)..(687)
atgctttcatctactttaagaaatacagtttctcgtggattctcaaataccgctgctaagagcacaattggagcagttagaactaagatttcattgccagatttggactgggactttggtgcattagaaccacacatttctggacaaatcaacgaattacattacaccaagcaccatcaaacttatgtcaatggttacaacacagcaattgagcaacaagccgaagctaagtctaagggcgaagtcaagaagaccattgaattacaaaagaacatcaacttccatggtggtggatacaccaaccattgtttgttctggaagaacttggcaccagaaaagcaaggtggtggtgaaccaccatcgtcggactctgaattggcacaaagaattgctgctcaatacggatcgatcgagaacttgcaatcgatcgccaacgctaaattggccggtattcaaggttctggatgggccttccttgtcaagaacaaggaaaatggtggatccttagatgttgttactacttacaaccaagacactgttacgggaccattagttccattgcttgcaattgatgcttgggaacacgcctactacttacagtaccaaaacgttaaagctgattacttcaaggctatctggaaggttattaactggaaggaagctgagaagagatacttagttaactaa

SEQ ID NO: 105838 - protein, 228 aa, Debaryomyces hansenii CBS767
MLSSTLRNTVSRGFSNTAAKSTIGAVRTKISLPDLDWDFGALEPHISGQINELHYTKHHQTYVNGYNTAIEQQAEAKSKGEVKKTIELQKNINFHGGGYTNHCLFWKNLAPEKQGGGEPPSSDSELAQRIAAQYGSIENLQSIANAKLAGIQGSGWAFLVKNKENGGSLDVVTTYNQDTVTGPLVPLLAIDAWEHAYYLQYQNVKADYFKAIWKVINWKEAEKRYLVN

SEQ ID NO: 105839 - DNA, 690 bp, Yarrowia lipolytica CLIB122
  CDS (1)..(690)
atgctcgcccgaaacactcttcgacagaccattcgaaaggcccagcccatggccggccgaaccctgaccaccgccgttctgcccaagctggactacgactttggcgccctggagccctttgtggccggccagatcaacgagatccactacaccaagcaccaccagacctacgtcaactcgttcaacgccgcctccgagcagctggcctccgccgagaaggacggagacctcaagaagattgtcgagctgcagaacctgatcaacttccacggcggaggacacatcaaccactctctgtggtggaagaacctggctcccaagggccagggtggaggcgagctgccttctcccgactcgcctctcggcaaggccatcaaggagcagtggggagacgccaacaagctgatcgaaaccaccaacgctgctctcgccggtgtccagggctccggatgggcctggatcgtcaagaacaagctcaccggtgacatcgaggtcatcaccaagcagaaccaggaccccgtggccggcaaccacatccctctcgtcggtatcgacgcctgggagcacgcctactacctccagtacaagaacgtcaaggctgactacttcaaggccatctggaacgtcatcaactggcaggaggctgagaagcgattcctcggtgaggccaagtttgtcaacggccagtaa

SEQ ID NO: 105840 - protein, 229 aa, Yarrowia lipolytica CLIB122
MLARNTLRQTIRKAQPMAGRTLTTAVLPKLDYDFGALEPFVAGQINEIHYTKHHQTYVNSFNAASEQLASAEKDGDLKKIVELQNLINFHGGGHINHSLWWKNLAPKGQGGGELPSPDSPLGKAIKEQWGDANKLIETTNAALAGVQGSGWAWIVKNKLTGDIEVITKQNQDPVAGNHIPLVGIDAWEHAYYLQYKNVKADYFKAIWNVINWQEAEKRFLGEAKFVNGQ

SEQ ID NO: 105841 - DNA, 621 bp, Yarrowia lipolytica CLIB122
  CDS (1)..(621)
atgcatggtctcaatcagtcagcatcaatgctccggtctaagtggatggaggccctcgagccccagatctccgcccagatcatggagatccatcactccaagcaccaccagacctacgtgaacaacctcaatgctgccaccaagcagctgcaggaggctgtcgccgccaacgacgtggtcagacaaattgctctgcagaaggccatcaacttcaacggaggaggccatgtcaaccactccattttctggaagtcactgaccccctcgtcttccgacggagccaagggaggcgcgaaactcaaggaggagattgccaagcagtttggctctctggatgagttcaaagccaagctcaaggctgatcttctggctctccagggctctggttgggcttggctcgtgtcttaccccgacggaactctcaagatcgaggtcaccagcaaccaggacgctatttcggcccccggagccgtcactctgctgggaatcgacttttgggagcacgcctactacatccagtactacaacaacaaggccgcctactttgacaacctctgggaggtgctcaactgggactttgccgagaaacagtgggcccagcgacctctggccaagtactaa

SEQ ID NO: 105842 - protein, 206 aa, Yarrowia lipolytica CLIB122
MHGLNQSASMLRSKWMEALEPQISAQIMEIHHSKHHQTYVNNLNAATKQLQEAVAANDVVRQIALQKAINFNGGGHVNHSIFWKSLTPSSSDGAKGGAKLKEEIAKQFGSLDEFKAKLKADLLALQGSGWAWLVSYPDGTLKIEVTSNQDAISAPGAVTLLGIDFWEHAYYIQYYNNKAAYFDNLWEVLNWDFAEKQWAQRPLAKY

SEQ ID NO: 105843 - DNA, 642 bp, Aspergillus nidulans FGSC A4
  CDS (1)..(642)
atgtccacccagaaatacactctcccaccccttccctacgcctacgatgcccttgaacccatcatctcctcccagataatgaccctccaccatcaaaaacaccaccaaacgtacatcacgaacctgaacgcctcgctcgaggcacaagctagtgccacgcaagcaaacaacgtccccttgctcatctctcttcagcaaaaaataaaatttaacggcggcggtcatattaaccactccctcttctgggagaatctggcaccgtataattcgcccgccacggacattgtcgcgtccgctccggagttgaagcgcgcaattgagggccagttcggctctgtagaggcgttcatcaaggccttcaatactgttctactgggaatccaggggagcggatgggggtggcttgtcaaagactcggcgggcaaactggacattgtgacgacaaaggaccaggatcctgtcacggggcttgtggcgatctttggtgttgatatgtgggagcatgcgtattacttgcagtatttgaataacaaggcggcgtatgtggagggtgtgtggaaggtgctgaactggggggtagcggaggaaagattcaagagtggtgttccaattgaggtcagtggaggtgggattaagctgtaa

SEQ ID NO: 105844 - protein, 213 aa, Aspergillus nidulans FGSC A4
MSTQKYTLPPLPYAYDALEPIISSQIMTLHHQKHHQTYITNLNASLEAQASATQANNVPLLISLQQKIKFNGGGHINHSLFWENLAPYNSPATDIVASAPELKRAIEGQFGSVEAFIKAFNTVLLGIQGSGWGWLVKDSAGKLDIVTTKDQDPVTGLVAIFGVDMWEHAYYLQYLNNKAAYVEGVWKVLNWGVAEERFKSGVPIEVSGGGIKL

SEQ ID NO: 105845 - DNA, 672 bp, Aspergillus nidulans FGSC A4
  CDS (1)..(672)
atggcctctcttatccgcacttccctccgcactggcctgcgcgccagctcttcctcggctgcgcccttgacctttacccgcggcaaggctacgctgcccgatcttgcttacgactatggcgctttggagcccgctatctccggcaagatcatggagctgcaccacaagaaccaccaccagacctacgtcaacagctacaacaccgccatcgagcagctccaggaagcccaggcaagcaacaacattgccgctcagattgccctcaagcctctgatcaacttccacggcggtggtcacatcaaccacaccctcttttgggagaacttggctcccaagaacgccggcggtggtgagcctccttctggtgctctctccaaagccatcaacgagagcttcggtagcctcgagaatttccagggccagatgaacactgctctcgccgctatccagggaagcggctgggcctggctggttcaggacaagcaaactggcagcatcgccatcaagacctacgcgaaccaggaccccgttgttggacagttcaagcccctccttggtattgatgcttgggagcacgcctactacctgcaataccagaaccgcaaggccgaatacttcaaggcgatctgggaggtcatcaactggaaggccgttgagaagcgctttgcgtaa

SEQ ID NO: 105846 - protein, 223 aa, Aspergillus nidulans FGSC A4
MASLIRTSLRTGLRASSSSAAPLTFTRGKATLPDLAYDYGALEPAISGKIMELHHKNHHQTYVNSYNTAIEQLQEAQASNNIAAQIALKPLINFHGGGHINHTLFWENLAPKNAGGGEPPSGALSKAINESFGSLENFQGQMNTALAAIQGSGWAWLVQDKQTGSIAIKTYANQDPVVGQFKPLLGIDAWEHAYYLQYQNRKAEYFKAIWEVINWKAVEKRFA

SEQ ID NO: 105847 - DNA, 705 bp, Candida albicans SC5314
  CDS (1)..(705): transl_table=12
atgttttctatcagatcatcatctcgtgttttattaaaggcttcttccgcaactacccgtgctactttgaacgccgctgcttccaagactttcactagatctaaatatagtttaccagaattggactatgaattctccgctactgaaccatacatttctggtcaaataaacgaaattcactacactaaacatcaccaaacttatgttaacaaccttaatgcttcaattgaacaagccgttgaagccaaatctaaaggtgaagttaaaaaattggttgccttacaaaaagccatcaatttcaacggtggtggttacctcaatcattgtttgtggtggaaaaacttggctcctgtctctcaaggtggtggtcaaccaccaagtgaagattccaaattaggtaaacaaatcgtcaaacaatttggttctttggataaattgattgaaatcaccaatggcaaattggctggtattcaaggttctgggtgggcttttattgttaaaaacaaagccaatggtgatactattgatgtcatcaccactgctaaccaagatactgttactgatccaaacttggttccattgattgctattgatgcttgggaacatgcttattatttgcaataccaaaatgttaaagctgattacttcaagaacctttggcatgttatcaactggaaggaagctgaaagaagatttgaattttaa

SEQ ID NO: 105848 - protein, 234 aa, Candida albicans SC5314
MFSIRSSSRVLLKASSATTRATLNAAASKTFTRSKYSLPELDYEFSATEPYISGQINEIHYTKHHQTYVNNLNASIEQAVEAKSKGEVKKLVALQKAINFNGGGYLNHCLWWKNLAPVSQGGGQPPSEDSKLGKQIVKQFGSLDKLIEITNGKLAGIQGSGWAFIVKNKANGDTIDVITTANQDTVTDPNLVPLIAIDAWEHAYYLQYQNVKADYFKNLWHVINWKEAERRFEF

SEQ ID NO: 105849 - DNA, 684 bp, Ustilago maydis 521
  CDS (1)..(684)
atgcttcgcactgcccttactcgatcgtccggagccgtcaaggcgtcgtcgcgcagttttgtcgcctctgcccctgcggccgtgcgagccaagcacacgcttcccgacctggctttcgactacggtgcactcgagcccgccatttcatccaagatcatggagctacaccacaccaagcaccaccagacctatgtcaacggtctcaaccaggcggaagagcagctctctgaagcgatccacaagaaggacgtcaagtcggcaatcgctcttcagaaagcgatcaactttaacggcggtggtcacatcaaccacactctcttttgggagaatctggccccgcagaagaatggcggtggtgagttgagcagcggcgctctcaaggacgctatcgaccgagactttggtggtttggaccagctcaagtccaagttcaatgctcagatcgctgccatccagggttccggttggggttggctcggctacaacccgcagaccaagaagctcgacattgtcactaccgccaaccaggaccctctgctctcgcatgtgcctctgatcggtgtcgacgcttgggaacatgccttctacctccagtaccagaacgtcaaggccgactacttcaaggccatctgggacgtcattaatttcaaggctgccgaggagcgtctcaagaaagctcagtag

SEQ ID NO: 105850 - protein, 227 aa, Ustilago maydis 521
MLRTALTRSSGAVKASSRSFVASAPAAVRAKHTLPDLAFDYGALEPAISSKIMELHHTKHHQTYVNGLNQAEEQLSEAIHKKDVKSAIALQKAINFNGGGHINHTLFWENLAPQKNGGGELSSGALKDAIDRDFGGLDQLKSKFNAQIAAIQGSGWGWLGYNPQTKKLDIVTTANQDPLLSHVPLIGVDAWEHAFYLQYQNVKADYFKAIWDVINFKAAEERLKKAQ

SEQ ID NO: 105851 - DNA, 621 bp, Ustilago maydis 521
  CDS (1)..(621)
atgtctgagcacacccttccccagctcccttacggctacaatgagctcgagcccgccatctcggaggagatcatgaccatccaccacaccaagcaccaccagctttacgtcaccaatctcaacaacgctatcaaggcctacaactcggccatctcgagcaacgacgttcgcaagcagattgagctccagagcgccatcaagttcaacggcggtggccacattaaccactcgctcttctggaagaaccttgctcctgccagccagggcggtggacagcttcaagatggtcccttcaagcaggccgtcgaacgtgactttggctcgctcgacaacctcaaatccaccttcaacgctaccattgccaccatccagggctctggttggggctggctcggtttcaaccccaagaactcgaagcttgaggttgtcaccaccaaggaccaggaccctctgatctcgcaccaccccatcatcggtgtcgacgcttgggagcacgctttctacctccagtacaagaatgttaaggctgactacttcaagaacatttggtcggtcatcaacttcaaggaggccgaggagcgcttcaaggctgcccagactgacgccaaggctcgtgtttaa

SEQ ID NO: 105852 - protein, 206 aa, Ustilago maydis 521
MSEHTLPQLPYGYNELEPAISEEIMTIHHTKHHQLYVTNLNNAIKAYNSAISSNDVRKQIELQSAIKFNGGGHINHSLFWKNLAPASQGGGQLQDGPFKQAVERDFGSLDNLKSTFNATIATIQGSGWGWLGFNPKNSKLEVVTTKDQDPLISHHPIIGVDAWEHAFYLQYKNVKADYFKNIWSVINFKEAEERFKAAQTDAKARV

SEQ ID NO: 105853 - DNA, 678 bp, Cryptococcus neoformans var. neoformans B-3501A
  CDS (1)..(678)
atgatcactgctatcactcgaaccgctcttccgcgagctactctccgcacttctcttgcgaccatgtccaccattagagccaagcacaccctccctcctctcccttacgcctatgatgcattggagccttccatctcagctgagattatgaatctccaccacaccaagcaccaccagacttacgtcaacggtctcaacgccgctgaggagtctctccagaaggcctctgctgctggcgacttcaaggctgctattgcccttcagcctgccctcaagttcaacggtggtggtcacattaaccactctctcttctggaagaaccttgctcccaccggctctgctcaagtcaaggttcccacctctggtgtcttctacgaccaggtccaggctgactttggcggcttcgagaacctcaagaaggagatgaatgccaagactgctgccatccaaggctctggctggggctggcttggctataacaaggccaccaagaagctcgagattgtcactactcccaaccaggacccactcttgtctcacgttcccatcatcggcattgacatctgggagcacgctttctatctccagtacaagaacgtcaagcccgactatctcaatgccatctggaatgttatcaactacgaggaggccgaaagtcgtctcaaggctgctcagtaa

SEQ ID NO: 105854 - protein, 225 aa, Cryptococcus neoformans var. neoformans B-3501A
MITAITRTALPRATLRTSLATMSTIRAKHTLPPLPYAYDALEPSISAEIMNLHHTKHHQTYVNGLNAAEESLQKASAAGDFKAAIALQPALKFNGGGHINHSLFWKNLAPTGSAQVKVPTSGVFYDQVQADFGGFENLKKEMNAKTAAIQGSGWGWLGYNKATKKLEIVTTPNQDPLLSHVPIIGIDIWEHAFYLQYKNVKPDYLNAIWNVINYEEAESRLKAAQ

SEQ ID NO: 105855 - DNA, 621 bp, Candida albicans SC5314
  CDS (1)..(621): transl_table=12
atgattaccgaaaacgaaaagatatccttacccaagattgattgggctcttgatgccttggagccatatatctctaaagaaattaacgatttgcatatcaacaaacaccatgttgcttatgtaaacgggtacaatgccgctattgacgcacttgaaaaagctgttggcaagagggatctcaagtcggtagttgagatccagcaaaatatcaaattccacggtggcggacacaccaaccacagtttgttctggaagaatttggcccctgtatctaaaggtggtggcaaacaccctgataccagttccgctttgggtaaacaaatcgttgctcagtatgggtctgtttcaaaccttattgatatcaccaattccaaattagctggcatccaaggatcaggttgggcatttatagtcaaaaacaagcaaaacggaggggctttggatgtggtcactactgccaatcaggatacaatctctgcaccacatttggttccaattattgccatcgatgcttgggaacatgcgtactacttgcaatatcaaaatgtcaagcttgattatttcaaagcaatttggaacgtgatcaactgggctgaggcagagtcaagatactctgcgtaa

SEQ ID NO: 105856 - protein, 206 aa, Candida albicans SC5314
MITENEKISLPKIDWALDALEPYISKEINDLHINKHHVAYVNGYNAAIDALEKAVGKRDLKSVVEIQQNIKFHGGGHTNHSLFWKNLAPVSKGGGKHPDTSSALGKQIVAQYGSVSNLIDITNSKLAGIQGSGWAFIVKNKQNGGALDVVTTANQDTISAPHLVPIIAIDAWEHAYYLQYQNVKLDYFKAIWNVINWAEAESRYSA

SEQ ID NO: 105857 - DNA, 814 bp, Tribolium castaneum
  CDS (85)..(732)
ggttagacaggccgacattttccgataatccgtaaattacgctaaagtcgttacataagcccttagctcggctcagagacaacaatgtttgccctccgccgcctcgctacagcccccttggcgggctcccgggctgcccacagcctcccggagctcccatacgcctacgaggccctcgagccggtcatctcgcgcgacatcatgtgtctccaccactccaaacaccaccaaacctacgtaacaaacctaaacgccgctgaggaaaagctaaaagccgccttgagcaagggggacatcagcacggctatatccctcgaaccggcgctccgattcaacggtggggggcacttgaaccactcgattttttggcagaatctgtcccccgaatcgacccaacctagcgatgcccttaagaaagccattgaggactcgtttgggggcgtccaacagttgaaagaccagttatcggcctcgtcgattggggtacaggggtcgggctggggctggttgggctattgcagcaagtccgggaaattgaaaatcgcgacttgcgccaaccaggacccccttcaggccaccacagggctggtgccccttctggggatcgacgtgtgggagcacgcctattatttgcagtacaagaacgtgcgggctgactatgtcaaggccattttcgagattgtgaactggaaggatgtctcccagaggtttgagaaggcgaagagttgttagatttgatatgtttggcgaaattgatttttatagaacgtactgtaattcatttgcgcgtttctaataaataattaagtgcaaa

SEQ ID NO: 105858 - protein, 215 aa, Tribolium castaneum
MFALRRLATAPLAGSRAAHSLPELPYAYEALEPVISRDIMCLHHSKHHQTYVTNLNAAEEKLKAALSKGDISTAISLEPALRFNGGGHLNHSIFWQNLSPESTQPSDALKKAIEDSFGGVQQLKDQLSASSIGVQGSGWGWLGYCSKSGKLKIATCANQDPLQATTGLVPLLGIDVWEHAYYLQYKNVRADYVKAIFEIVNWKDVSQRFEKAKSC

SEQ ID NO: 105859 - DNA, 705 bp, Clostridium difficile 630
  CDS (1)..(705): transl_table=11
atgaagaaaaaaatattaataccagttattatgtctttatttataatctcacagtgcataacttcatttgcttttacacctgaaaataacaaatttaaggttaaaccattaccttatgcatatgatgcacttgaaccttatatagataaagaaacaatgaaactgcatcatgataagcattatcaagcttatgttgataaattaaatgctgctcttgaaaaatatcctgagctttataattattctttatgtgaattattgcaaaatttagattctttacctaaagatattgctacaactgtaagaaataatgcaggtggagcttataatcataaattcttttttgatataatgacgccagaaaaaaccataccttctgaatctttaaaagaagctattgatagagactttggttcttttgaaaaatttaagcaagagttccaaaaatctgctttagatgtctttggttctggttgggcttggcttgtagctactaaagatgggaaattatctattatgactactccaaatcaggatagccctgtaagtaaaaacctaactcctataataggacttgatgtttgggagcatgcttactatttaaaatatcaaaatagaagaaatgaatacattgacaactggtttaatgtagtaaattggaatggtgctttagaaaattacaaaaatttaaaatctcaagattaa

SEQ ID NO: 105860 - protein, 234 aa, Clostridium difficile 630
MKKKILIPVIMSLFIISQCITSFAFTPENNKFKVKPLPYAYDALEPYIDKETMKLHHDKHYQAYVDKLNAALEKYPELYNYSLCELLQNLDSLPKDIATTVRNNAGGAYNHKFFFDIMTPEKTIPSESLKEAIDRDFGSFEKFKQEFQKSALDVFGSGWAWLVATKDGKLSIMTTPNQDSPVSKNLTPIIGLDVWEHAYYLKYQNRRNEYIDNWFNVVNWNGALENYKNLKSQD

SEQ ID NO: 105861 - DNA, 579 bp, Herminiimonas arsenicoxydans
  CDS (1)..(579)
atggaacataccctgccggcactgccctatgcgttggatgcacttgctccacatatctccaaagagacgctcgaattccactatggcaagcatcatcagacctatgtgacgaatttgaacaacctgatcaagggtaccgaattcgaaaatgcatcgctcgaagacatcatcaagaaatcttccggcggcgtattcaacaatgcagcacaagtctggaaccataccttctactggaacggcatgaagccaaacggcggcggcgctccaaccggcaaggtagctgacgctatcaacgccaaatggggttccttcgacaagttcaaggaagaattcaccaagtcctgcgtcaccaacttcggctccggctggacctggctggtgaaaaaagccgacggctcgctcgatctggccaatacttcaaacgccggctgcccattgactggcaccgacaccccattgctgacctgcgacgtgtgggaacacgcttactacatcgactaccgcaatgcgcgtccgaagtatgttgagtcgttctgggcgctggtgaactgggatttcgttgcgaaaaacctgggctaa

SEQ ID NO: 105862 - protein, 192 aa, Herminiimonas arsenicoxydans
MEHTLPALPYALDALAPHISKETLEFHYGKHHQTYVTNLNNLIKGTEFENASLEDIIKKSSGGVFNNAAQVWNHTFYWNGMKPNGGGAPTGKVADAINAKWGSFDKFKEEFTKSCVTNFGSGWTWLVKKADGSLDLANTSNAGCPLTGTDTPLLTCDVWEHAYYIDYRNARPKYVESFWALVNWDFVAKNLG

SEQ ID NO: 105863 - DNA, 579 bp, Burkholderia vietnamiensis G4
  CDS (1)..(579): transl_table=11
atggctcatacgctcccgccgctcccgtacgcagaagacgcactcgcgccgaccatctcgaaagagacgatcgagtaccactacggcaagcatcaccaggcatacgtcacgaacctgaacaatctgatcccgggcacggaattcgaaaacctgccgctggaagagatcgtgaagaagtcgttgggcggcatcttcaacaatgccgcgcaaatctggaaccacacgttcttctggaacagcctgtcgccgaacggcggcggcgcaccgtcgggcgcgctgggcgacgcgatcaacgcgaagtggggttcgtacgacgcattcaaggaagccttcacgaaggctgcggtcggcacgttcggttcgggctgggcatggctcgtgaagaaggccgacggttcgctcgacatcgtgtcgacgagcaacgccgcgacgccgctgacgacggccgacaagccgctgctgacgatcgacgtgtgggaacacgcgtactacatcgactaccgcaacgcacgtccgaagttcgtcgaagcgttctggaacatcgtgaactgggacttcgcagcgaagaacttcgcgtaa

SEQ ID NO: 105864 - protein, 192 aa, Burkholderia vietnamiensis G4
MAHTLPPLPYAEDALAPTISKETIEYHYGKHHQAYVTNLNNLIPGTEFENLPLEEIVKKSLGGIFNNAAQIWNHTFFWNSLSPNGGGAPSGALGDAINAKWGSYDAFKEAFTKAAVGTFGSGWAWLVKKADGSLDIVSTSNAATPLTTADKPLLTIDVWEHAYYIDYRNARPKFVEAFWNIVNWDFAAKNFA

SEQ ID NO: 105865 - DNA, 606 bp, Streptococcus pyogenes str. Manfredo
  CDS (1)..(606)
atggctattattttaccagaacttccatacgcgtatgatgctcttgaaccacagtttgatgcggagacaatgactcttcatcatgataaacaccatgccacttatgtcgctaataccaatgcggctttagaaaaacacccagagatcggagaaaatctggaggaactattggcagatgtcactaagattccagaagatattcgtcaagccttaattaataatggtggcggacacctaaaccatgcgcttttctgggaactattatcacctgaaaaacaagacgtcactcctgatgttgcacaagccattgatgatgcttttgggtcatttgacgcctttaaagaacaatttacagcagctgctactggacgttttggttcaggttgggcatggttagttgttaataaagaaggacaactcgaaatcacatcaaccgctaaccaagatactccaatttcagaaggcaaaaaaccaattctagcgcttgatgtgtgggagcatgcttactacttgaattatcgtaatgtacgtccaaattatatcaaagctttctttgaaatcattaattggaaaaaagtatcagaactttaccaagccgctaaataa

SEQ ID NO: 105866 - protein, 201 aa, Streptococcus pyogenes str. Manfredo
MAIILPELPYAYDALEPQFDAETMTLHHDKHHATYVANTNAALEKHPEIGENLEELLADVTKIPEDIRQALINNGGGHLNHALFWELLSPEKQDVTPDVAQAIDDAFGSFDAFKEQFTAAATGRFGSGWAWLVVNKEGQLEITSTANQDTPISEGKKPILALDVWEHAYYLNYRNVRPNYIKAFFEIINWKKVSELYQAAK

SEQ ID NO: 105867 - DNA, 600 bp, Bradyrhizobium sp. ORS278
  CDS (1)..(600): transl_table=11
atgacctttacgcttccccccctgccttacgcctatgacgccctcggcgcctacatgtccaaggagacgctggagtatcatcacgacaagcatcaccaggcctatgtgaccaacggcaacaatctgatcaaggggaccgaattcgaaggcaagtccctcgaggagatcgtcaagggctcgttcggcaagaacgcaccgatcttcaacaatgccggccagcactacaatcacatccacttctggtcgtggatgaagccgaatggcggcggcaccaagctgccgggcgcgttggagaagaagatcaacgaggacctcggcggctacgagaagttcaagacggacttcatcgccgccggcgtcggccagttcggctcgggctgggcctggctctcggtcaagaacggcaagctggagatctccaagaccgccaatggcgagagcccgctggtgcatggcgcgaccccgatcctcggcgtcgacgtctgggagcactcctattacatcgactaccgcaaccgccgtcccgactacctgaaggccttcgtcgaaaacctcatcaactgggaatacgtcgaagagctgtacagcaaggctgtctga

SEQ ID NO: 105868 - protein, 199 aa, Bradyrhizobium sp. ORS278
MTFTLPPLPYAYDALGAYMSKETLEYHHDKHHQAYVTNGNNLIKGTEFEGKSLEEIVKGSFGKNAPIFNNAGQHYNHIHFWSWMKPNGGGTKLPGALEKKINEDLGGYEKFKTDFIAAGVGQFGSGWAWLSVKNGKLEISKTANGESPLVHGATPILGVDVWEHSYYIDYRNRRPDYLKAFVENLINWEYVEELYSKAV

SEQ ID NO: 105869 - DNA, 612 bp, Dichelobacter nodosus VCS1703A
  CDS (1)..(612): transl_table=11
atgagctacacttttcaaaatcttccttatgcttatgatgcattagcacccgttatcgatgaagcaaccatgcatttgcataaagataaacatcacaaaacttattttgacaaattcaccgctgcgattgccgaaaccgaagaaaacggtcaaccgatcagcgcaatttttgcccgtatttcagaatttagcagcgctatccgcaataatggcggtggttattacaatcatgatctttatttcaacgcgatgcgcgcgccgcgagaaaataatgagccgactggagcactgctcgaagcaatcaatgcgcaatttggcagttttgaaaaatttaaaaccgatttttcaaccgcgggcgttaatcaatttggctctggctgggcttggttaatcgttaaaaatggtaaattagccatcacgcaaacaccgaatcaagataatccgctgatggacgttgtggtcattcgcggtacaccgattttagcctgcgatctttgggaacacgcttattatttgaattatcaaaataaacgcgccgattatattgctcattggtggaaagtggtcaattgggattacgttgcccaattatttgctgcggcaaacgcttag

SEQ ID NO: 105870 - protein, 203 aa, Dichelobacter nodosus VCS1703A
MSYTFQNLPYAYDALAPVIDEATMHLHKDKHHKTYFDKFTAAIAETEENGQPISAIFARISEFSSAIRNNGGGYYNHDLYFNAMRAPRENNEPTGALLEAINAQFGSFEKFKTDFSTAGVNQFGSGWAWLIVKNGKLAITQTPNQDNPLMDVVVIRGTPILACDLWEHAYYLNYQNKRADYIAHWWKVVNWDYVAQLFAAANA

SEQ ID NO: 105871 - DNA, 627 bp, Arthrobacter nitroguajacolicus
  CDS (1)..(627): transl_table=11
atgaccgaatacgtactgcctgaactcagctacgactacgctgccctggagccgcacatctctgcgcggataatggagctgcaccacagtaagcaccatgcggcatacgttgcaggcgccaacaacgccctcgcccagctggccgacgcgcgcgagaagaatgatttcgccaacatcaaccgcctctccaaggacctcgcgttccacaccggtgggcacatcaaccactccgtgttctggaacaacatctccccggacggcggcgacaagcccgaaggcgaactggctgctgccattgacgacgctttcggctccttcgatgctttccgtgcacagttcagcgcggctgcactgggcctgcagggttccggctgggccttcctggcgtacgagcccatcggtggaaacctgctcatcgagcagctctacgatcagcagggcaacgtggcagtgggcaccaccccgctgctgatgctggacatgtgggagcacgccttctacttggactacgtcaacgtcaaggccgactacgtcaaggcattctggaacatcgtgaactgggctgacgtcgcccagaggtttgaggctgcacgcgccaacgcgacgggcctcgtgacccttcggtag

SEQ ID NO: 105872 - protein, 208 aa, Arthrobacter nitroguajacolicus
MTEYVLPELSYDYAALEPHISARIMELHHSKHHAAYVAGANNALAQLADAREKNDFANINRLSKDLAFHTGGHINHSVFWNNISPDGGDKPEGELAAAIDDAFGSFDAFRAQFSAAALGLQGSGWAFLAYEPIGGNLLIEQLYDQQGNVAVGTTPLLMLDMWEHAFYLDYVNVKADYVKAFWNIVNWADVAQRFEAARANATGLVTLR

SEQ ID NO: 105873 - DNA, 600 bp, Synechococcus sp. WH 7803
  CDS (1)..(600): transl_table=11
atggcccataccctccctgcgctgccctacgccctcgatgcgctggagccccacatctcccgctccacgctcgagttccaccacggcaagcaccacaacggttacgtcaccaacctgaataaggcgatcgagggcacggatctcgacggcaaaagcctcgaagaagtgatctccgctgtgtccggtgacgccagcaaggccggcgtgttcaacaacgctgcccaggtttggaaccacagcttctactggcagtgcatgaagcccggtggtggtggtcagcccagtggagccctcctcgacaagatcaacgctgacttcggcagctacgacgccttcgttgagcagttcaaggctgctggtgccacccagttcggcagcggctgggcctggttgatcgtcgagaacggcacgctcaagatcaccaaaaccgccaacgctgatcttcctctggcccacggtcagaaggctctgctcaccatggacgtgtgggagcacgcctactacctcgactatcagaaccgccgccccgattacatcaccacctacctcgagaagctggtgaattgggatttcgtggccgccaacctggctgccgcctga

SEQ ID NO: 105874 - protein, 199 aa, Synechococcus sp. WH 7803
MAHTLPALPYALDALEPHISRSTLEFHHGKHHNGYVTNLNKAIEGTDLDGKSLEEVISAVSGDASKAGVFNNAAQVWNHSFYWQCMKPGGGGQPSGALLDKINADFGSYDAFVEQFKAAGATQFGSGWAWLIVENGTLKITKTANADLPLAHGQKALLTMDVWEHAYYLDYQNRRPDYITTYLEKLVNWDFVAANLAAA

SEQ ID NO: 105875 - DNA, 582 bp, Klebsiella pneumoniae subsp. pneumoniae MGH 78578
  CDS (1)..(582): transl_table=11
atgtcgtttgaattacctgcattaccatatgcaaaagacgccctggcgccgcacatttccgcagaaaccctggaatatcactacggtaaacaccaccaggcgtatgtcactaacctcaacaacctgatcaaaggcactacgttcgaaggcaagtccctcgaagagatcgtccgcacgtctgaaggcggcgtgttcaacaacgcagcgcaggtctggaaccacaccttctactggaactgcctggcgcctaacgccggcggcgaaccggaaggcgaactggcggccgcaatcgccaaatctttcggcagcttcgcggattttaaagccaaatttaccgatgccgcggcgaaaaatttcggcgctggctggacctggctggtcaaaaatgccgacggcagcctggctatcgtctccaccagcaacgccggtaccccgctgaccaccgacgcgaagccgctgctgaccgttgacgtttgggaacacgcctactacatcgactatcgcaacgcccgtccaagctacctggaccacttctgggcgctggttaactggaagtttgttgcggctaacctcgcggcataa

SEQ ID NO: 105876 - protein, 193 aa, Klebsiella pneumoniae subsp. pneumoniae MGH 78578
MSFELPALPYAKDALAPHISAETLEYHYGKHHQAYVTNLNNLIKGTTFEGKSLEEIVRTSEGGVFNNAAQVWNHTFYWNCLAPNAGGEPEGELAAAIAKSFGSFADFKAKFTDAAAKNFGAGWTWLVKNADGSLAIVSTSNAGTPLTTDAKPLLTVDVWEHAYYIDYRNARPSYLDHFWALVNWKFVAANLAA

SEQ ID NO: 105877 - DNA, 633 bp, Klebsiella pneumoniae subsp. pneumoniae MGH 78578
  CDS (1)..(633): transl_table=11
atggagatgattatgagctataccctgccatccctgccttacgcttacgatgctctggaaccgcacttcgacaagcagacgatggagatccatcacactaaacaccaccagacctacgtgaacaatgccaacgccgcgctggaaagcctgccggagttcgctaacctgtccgctgaagagctgattaccaagctggatcagctgccggctgacaaaaaaaccgtactgcgtaacaacgccggcggccacgcgaaccacagcctgttctggaaaggcctgaaaaccggtaccaccctgcagggcgacctgaaagcggctatcgagcgcgatttcggttccgtggagaacttcaaagcggaattcgaaaaagccgctgctacccgtttcggctccggctgggcgtggctggtcctgaaaggtgacaaactggccgttgtctccaccgccaaccaggattccccgctgatgggcgaagccatttccggcgcttccggcttcccgattatcggcctggacgtctgggaacacgcttactacctgaaattccagaaccgccgcccggactacatcaaagccttctgggacgtagtgaactgggacgaagctgcagcgcgttttgccgccaaaaaataa

SEQ ID NO: 105878 - protein, 210 aa, Klebsiella pneumoniae subsp. pneumoniae MGH 78578
MEMIMSYTLPSLPYAYDALEPHFDKQTMEIHHTKHHQTYVNNANAALESLPEFANLSAEELITKLDQLPADKKTVLRNNAGGHANHSLFWKGLKTGTTLQGDLKAAIERDFGSVENFKAEFEKAAATRFGSGWAWLVLKGDKLAVVSTANQDSPLMGEAISGASGFPIIGLDVWEHAYYLKFQNRRPDYIKAFWDVVNWDEAAARFAAKK

SEQ ID NO: 105879 - DNA, 624 bp, Kineococcus radiotolerans SRS30216
  CDS (1)..(624): transl_table=11
atggctgactacacgcttccggatctgccctacgactactccgcgctcgagccccacatctccggggcgatcatggagctgcaccacgacaagcaccacgccacctacgtggccggggcgaacaccgcgctggagaagctcgccgaggcccgcgccaaggacgacctctcgacggtgaacctgcacgagaagaacctcgcgttcaacctcggcgggcacgtcaaccactcggtgttctggccgaacctgtccccggacggcggcgacaagccggtcggcgagctggccgcggccatcgacgagaacttcggttccttcgagggcttccagaagcacttcaccgccaccgccctgggcatccagggctccggctggtcgatcctggcctgggactccatcgggcagaagctcgtcaacgtgcagctctacgaccagcagtcgaacctggccctgggcctggtgccggtcctcatgctggacatgtgggagcacgcgttctacctggactacaagaacgtgaagccggactacgtcaaggcgtggtggaacgtggcgaactgggccgacgcggcgcagcgcttcgagcgtgcccgcacccagacggtgggcctcatcgtcccctga

SEQ ID NO: 105880 - protein, 207 aa, Kineococcus radiotolerans SRS30216
MADYTLPDLPYDYSALEPHISGAIMELHHDKHHATYVAGANTALEKLAEARAKDDLSTVNLHEKNLAFNLGGHVNHSVFWPNLSPDGGDKPVGELAAAIDENFGSFEGFQKHFTATALGIQGSGWSILAWDSIGQKLVNVQLYDQQSNLALGLVPVLMLDMWEHAFYLDYKNVKPDYVKAWWNVANWADAAQRFERARTQTVGLIVP

SEQ ID NO: 105881 - DNA, 597 bp, Xanthobacter autotrophicus Py2
  CDS (1)..(597): transl_table=11
atgtccttcacgctgcccgaactgccctacgcctatgacgccctcgccccctacatgtcgcgcgagacgctggaataccaccacgacaagcaccacctcgcttacgtgaacaatggcaacaatctcctaaagggaactgaatttgaaggaaaatccctggaggagatcgtcaagggctcgttcggcaagaacgccccgctcttcaacaatgccggccagcactacaaccacctgcatttctggaactggatgaagcccaacggcggcggcgccatccccggcgagatcgagaagaagatcatcgaggacatcggctcggtcgagaagttcaaggaagacttcatcgccgccggcgtcggccagttcggctcgggctgggcctggctcgccctcaaggacggcaagctcgtggtgctcaagtcccccaacggcgagaacccgctggtgcagggcgcgacccccatcctcggcgtcgacgtgtgggagcactcctactacatcgactaccgcaaccgccgccctgactatctcaaggcgttcgtggaccacctcgtgaactgggactacgtcgcggaactgtacagcaaggctgtctga

SEQ ID NO: 105882 - protein, 198 aa, Xanthobacter autotrophicus Py2
MSFTLPELPYAYDALAPYMSRETLEYHHDKHHLAYVNNGNNLLKGTEFEGKSLEEIVKGSFGKNAPLFNNAGQHYNHLHFWNWMKPNGGGAIPGEIEKKIIEDIGSVEKFKEDFIAAGVGQFGSGWAWLALKDGKLVVLKSPNGENPLVQGATPILGVDVWEHSYYIDYRNRRPDYLKAFVDHLVNWDYVAELYSKAV

SEQ ID NO: 105883 - DNA, 630 bp, Rickettsia akari str. Hartford
  CDS (1)..(630): transl_table=11
atgacatattgcaacaaatctaatcaaacctcatatccttttatcttacctgatttaccttatgacaaagagagttttaaaccacattttactcccgagacttttgattatcattatggtaaacatcataatgcttatgtacaaaatctaaataacttactcaaagataaagaagaattacaaaaaaaagatttagaaaaaataatatactggtcgtctcaaaactcaaatgcagctatttttaataacgcagcccaaatatggaatcatacttttttttggcattcaataaagccgcatggcggaggtaagccaaatggtaaaatattagaacagattaataaagatttcggtagttttgaaggattttgcgagcagtttaagcaagaagcagtggggcagttcggtagcggctgggcatggctggtatatcacgataataggctacaaattataaaaactgctaatgccggcacacctatagcaaacggtatgaagccgcttcttgcatgtgatgtatgggaacatgcttattatattgattatcgtaacaaaagacctgattatgtggacatatttattaagcatatgattaactggcagtttgtagaagataacttaatgaagtaa

SEQ ID NO: 105884 - protein, 209 aa, Rickettsia akari str. Hartford
MTYCNKSNQTSYPFILPDLPYDKESFKPHFTPETFDYHYGKHHNAYVQNLNNLLKDKEELQKKDLEKIIYWSSQNSNAAIFNNAAQIWNHTFFWHSIKPHGGGKPNGKILEQINKDFGSFEGFCEQFKQEAVGQFGSGWAWLVYHDNRLQIIKTANAGTPIANGMKPLLACDVWEHAYYIDYRNKRPDYVDIFIKHMINWQFVEDNLMK

SEQ ID NO: 105885 - DNA, 627 bp, Candidatus Protochlamydia amoebophila UWE25
  CDS (1)..(627)
atgaatcaacaaaaatcacaagcttataaacttcccgatctttcttatgattttaatgctttagagcctgtcattagtgcagaaattatgtctcttcactataccaaacaccatcaaacttatgtaacaaatttaaataaagctttagaacagtatttggaagccgaagccaataatgatttatctacaatgattgctcttcaatcagtcattaaatttaatggaggtgggcatgtcaatcattcgattttttggacgaatcttgctccaaaaaataaagctggaggaatggcaccagagggaattttagctgatgcgattaataaagagtttggatctttacaaaccctaattgaacaattaagtgcgaaagcaatcgctattcaaggctctggttggggttggctcggctatgataaagctaaagatcgtttaactcttgccacttgtgaaaaccaagaccccctctctacaaaaggtctcattcctttactcggtatcgatgtttgggagcatgcttattatttacaatataaaaatgtccgggctgattacgtaaaaaatatttggaatatcattaattggaaaaacgtagcggaaagataccaagctgctaaaactaaataa

SEQ ID NO: 105886 - protein, 208 aa, Candidatus Protochlamydia amoebophila UWE25
MNQQKSQAYKLPDLSYDFNALEPVISAEIMSLHYTKHHQTYVTNLNKALEQYLEAEANNDLSTMIALQSVIKFNGGGHVNHSIFWTNLAPKNKAGGMAPEGILADAINKEFGSLQTLIEQLSAKAIAIQGSGWGWLGYDKAKDRLTLATCENQDPLSTKGLIPLLGIDVWEHAYYLQYKNVRADYVKNIWNIINWKNVAERYQAAKTK

SEQ ID NO: 105887 - DNA, 603 bp, Bartonella quintana str. Toulouse
  CDS (1)..(603): transl_table=11
atggcttttgaattggctaagttgccttatgattatgatgccctttcgccttatatgtcacgcgaaacacttgaatatcaccatgataagcatcacctcgcttatcttaccaataccaacaattttgtgaaagatttaggcttagaaaatgaaagccttgagcatattgttaaaaaaagctttggacagaatattggtttgtttaataatgcagcccaatactacaaccataatcatttttggcattggatgaaaaaaggtggtggtggtcaaaaactgcctgaaaaattagcaaaagctattgaatctgatctaggtggttataataagttccgggcagattttattgctgccgccgttgcccaatttggttctggatgggcatgggtcgctgttaaagatggtaaacttgaaattatgaaaacatctaatagtgaaaatcctttagttcatgatgcgcaacctattctgggtgttgatgtgtgggaacattcctattatattgactatcgcaatgcgcgcccaaaatatcttgaagcttttgtggataatttaattaattgggactatgttttaaaactttatgaagattgtggattttaa

SEQ ID NO: 105888 - protein, 200 aa, Bartonella quintana str. Toulouse
MAFELAKLPYDYDALSPYMSRETLEYHHDKHHLAYLTNTNNFVKDLGLENESLEHIVKKSFGQNIGLFNNAAQYYNHNHFWHWMKKGGGGQKLPEKLAKAIESDLGGYNKFRADFIAAAVAQFGSGWAWVAVKDGKLEIMKTSNSENPLVHDAQPILGVDVWEHSYYIDYRNARPKYLEAFVDNLINWDYVLKLYEDCGF

SEQ ID NO: 105889 - DNA, 627 bp, Acinetobacter sp. ADP1
  CDS (1)..(627): transl_table=11
atgacaaccattactttacctgcattaccttatgcttacgatgcgcttgagccacacatttctaaagaaactttagaatatcatcacgataagcatcatcaaacttatgtgactaacctcaacaacctgatcaaaggtacagagcttgaaggtcaggaacttgaagacatcattaaagcaagtgcaggtgattcatctaaagcaggtattttcaacaatgctgcacaagtatggaaccacacgttctactggaactcgattgctccaaacggtggtggtaaaccaactggcgcacttgctgcaaaaattgatgaagcgtttggttcatatgaaaaatttgcagaagaattcaccactgctgcaaccactcaatttggttcaggctgggcttggttagtcgctgacgaaatcaatggtaaactttcaattactaaaacgtctaacgcagatactccacttgcacatggtcaagttgctgtattaacgattgatgtatgggaacatgcttactatatcgattaccgtaatgcacgtcctaaatacatttcgactttccttgaaagcctagtcaactgggattatgcgaatgctaaacttgcaggccaacctgctggtgtagaaaaataa

SEQ ID NO: 105890 - protein, 208 aa, Acinetobacter sp. ADP1
MTTITLPALPYAYDALEPHISKETLEYHHDKHHQTYVTNLNNLIKGTELEGQELEDIIKASAGDSSKAGIFNNAAQVWNHTFYWNSIAPNGGGKPTGALAAKIDEAFGSYEKFAEEFTTAATTQFGSGWAWLVADEINGKLSITKTSNADTPLAHGQVAVLTIDVWEHAYYIDYRNARPKYISTFLESLVNWDYANAKLAGQPAGVEK

SEQ ID NO: 105891 - DNA, 612 bp, Acinetobacter sp. ADP1
  CDS (1)..(612): transl_table=11
atggcatactctttacctgcccttccttatgcttatgatgcgcttgaaccgaacattgatgctaagaccatggaaattcatcacacgaagcatcatcaaacctatatcaacaatattaatgccgcgattgagggaactgaatgggaaaaattgactatagaaaaactggtgagcaaagtggatgaggttcccgccgacatcaaaaatattgtgatcaataacggtggtggtcatgctaatcattcattgttctggactgtgatgagtccaaaaggcggtggtgaacctgtcaatgaagttgcacatgccattaataatgaactgagtgggtttgatgcatttaaagatgcttttaccaaagcagcgattagtcgatttggcagtggatgggcatggcttagcgtaacgccagagaaaaaattgatcgttgaaagtagtggtaatcaggactcccctttaatgcatggtaacacacctattttaggtctggatgtatgggaacatgcctactatttgaagtatcaaaaccgtcgtcctgaatatattgctgcattttataatgttgtcgactggcatgaagttaatcgtcgttatctgggtgcgattcgataa

SEQ ID NO: 105892 - protein, 203 aa, Acinetobacter sp. ADP1
MAYSLPALPYAYDALEPNIDAKTMEIHHTKHHQTYINNINAAIEGTEWEKLTIEKLVSKVDEVPADIKNIVINNGGGHANHSLFWTVMSPKGGGEPVNEVAHAINNELSGFDAFKDAFTKAAISRFGSGWAWLSVTPEKKLIVESSGNQDSPLMHGNTPILGLDVWEHAYYLKYQNRRPEYIAAFYNVVDWHEVNRRYLGAIR

SEQ ID NO: 105893 - DNA, 627 bp, Erwinia carotovora subsp. atroseptica SCRI1043
  CDS (1)..(627): transl_table=11
atgagttattcactgccatcgctgccttatgcttatgacgcactggaaccgcatttcgacaaagaaacgatggaaattcaccattccaaacaccatcaggcttacgtcaataatgctaatgccgtgctggaatctctgcctgaactggctaaattgtctgttgaagagctgattgctcaactggataaagtccctgctgagaaaaaagcagcgctgcgtaacaacgctggcggccacgctaaccacagcctgttctggaaaggcctgaaattagatactacgctgactggcgatctgaaagcagcaatcgaacgcgatttcggcagcgttgatgcgtttaaagaaaaatttgagcaagcagcagcaacccgtttcggttctggctgggcttggctggttctgaaagacgacggcaaactggctgtagtctctactgcaaaccaagacagcccgctgatgggtgaagcaatttctggtacctctggctacccaatcgtcggtctggacgtatgggagcacgcttactacctgaaattccaaaaccgtcgcccagattatgctaaagcattctggaacgtgctgaactgggacgaagcctcagctcgcttcgctagcgcgaaaaaataa

SEQ ID NO: 105894 - protein, 208 aa, Erwinia carotovora subsp. atroseptica SCRI1043
MSYSLPSLPYAYDALEPHFDKETMEIHHSKHHQAYVNNANAVLESLPELAKLSVEELIAQLDKVPAEKKAALRNNAGGHANHSLFWKGLKLDTTLTGDLKAAIERDFGSVDAFKEKFEQAAATRFGSGWAWLVLKDDGKLAVVSTANQDSPLMGEAISGTSGYPIVGLDVWEHAYYLKFQNRRPDYAKAFWNVLNWDEASARFASAKK

SEQ ID NO: 105895 - DNA, 618 bp, Propionibacterium acnes KPA171202
  CDS (1)..(618): transl_table=11
atggctgtttacacccttcccgatctcgactacgactacggagcactggagccccacatctcgggcaagatcatggaactgcaccatgacaagcaccacaacacctacgttcagggtgccaacaccgccctggagaagctggccgaggcccgcgagaagggcgacttcggaaccatcaacaaactcgaaaaggacctggcctttaacctcggcggccacatcaaccactccgtgttctggaagaacatgtcccctcatgggggcggtcgtccggagggcaacgaactcgctgctgcgattgacgagttcttcggttcctttgacagcttcaaaaagcagtttgaggaaaccgctaagggcgttcagggctccggctggggcatgctcgtgtgggacgtgatgggtcagcgcctcaacaccatgcagctgtttgaccaccagggcaatctgccgtcaacccagatcccggtcgtccagctcgacatgtgggaacacgcttattacctgcagtaccagaacgtcaaggccgactacgttaccgcctggtggaacgtcgttagctggaccgacgccgagcagcggttcgtcaaggcccgttcgatcaccggtttgttctga

SEQ ID NO: 105896 - protein, 205 aa, Propionibacterium acnes KPA171202
MAVYTLPDLDYDYGALEPHISGKIMELHHDKHHNTYVQGANTALEKLAEAREKGDFGTINKLEKDLAFNLGGHINHSVFWKNMSPHGGGRPEGNELAAAIDEFFGSFDSFKKQFEETAKGVQGSGWGMLVWDVMGQRLNTMQLFDHQGNLPSTQIPVVQLDMWEHAYYLQYQNVKADYVTAWWNVVSWTDAEQRFVKARSITGLF

SEQ ID NO: 105897 - DNA, 627 bp, Leifsonia xyli subsp. xyli str. CTCB07
  CDS (1)..(627): transl_table=11
atggctgactacacgctcgccgatcttccctatgactattcggctctcgagccgaacatcagcggtcggatcatggagctccaccatgacaagcaccacaagacctatgtcgacggtgcgaacaccgcgctcgcccaactcgccgaggcccgcgatgcggacaacctcacttacgtgaacaaactgcagaaagacctcgccttcaacctggccggtcacgtcaaccacacggttttctggaacaacctctcgccggaagggggggacaagccggacggcgaacttgccgcggcgatcgacgagttcttcggatcgttcgacaagttccgcgcccatttcaccgcgtcggcgctcggcatccagggctccggctggtcgatcctcgcctgggattcgctcagccagaagctcatcatcgagcagttgtacgaccaccaggccaacctcgcggcggcgaccgtccccctgctcctgatcgacatgtgggagcacgccttctacctcgactatgtcaatgtgaaggcggattacgtcaaggcgttctggaacatcgtcagctgggccgatgttggccagcgcttcgtccgggcgcgccagagtacctcgggtctgctggtactctcatag

SEQ ID NO: 105898 - protein, 208 aa, Leifsonia xyli subsp. xyli str. CTCB07
MADYTLADLPYDYSALEPNISGRIMELHHDKHHKTYVDGANTALAQLAEARDADNLTYVNKLQKDLAFNLAGHVNHTVFWNNLSPEGGDKPDGELAAAIDEFFGSFDKFRAHFTASALGIQGSGWSILAWDSLSQKLIIEQLYDHQANLAAATVPLLLIDMWEHAFYLDYVNVKADYVKAFWNIVSWADVGQRFVRARQSTSGLLVLS

SEQ ID NO: 105899 - DNA, 594 bp, Desulfotalea psychrophila LSv54
  CDS (1)..(594): transl_table=11
atgagtatcaccctacccgagcttccctacctaaaaaatgccctggcaccatatatcagctctgagacattggattttcatcatggcaaacaccacagtacctatgtcaccaacctgaataagctcatcgccggtactgaactggaaaatgcgacattggaagagatcataaaaaagacagtaaacgatgccagcaaaagcggagtcttcaacaatgccgcccagatttggaaccatacattttactggcaatcaatgaaggccgagggtggtggtatgccaaggggtgccattgccgaaaagatcgatgccgacttcggtagctacgacaacttcgtagagcagctgaaaaatgccggtcttactcagttcggcagcggttgggcctggttggtcctgaacaacaacaagctggaaatcatgaaaaccgccaacgccgatacccccatagcccatggtttgcaagctcttctgaccgtggatgtctgggaacatgcctattatcttgactaccaaaacggccgaggcacctacctggatgcctttttcaacaaccttatcaactgggattttgttaacgccaatctcgcctag

SEQ ID NO: 105900 - protein, 197 aa, Desulfotalea psychrophila LSv54
MSITLPELPYLKNALAPYISSETLDFHHGKHHSTYVTNLNKLIAGTELENATLEEIIKKTVNDASKSGVFNNAAQIWNHTFYWQSMKAEGGGMPRGAIAEKIDADFGSYDNFVEQLKNAGLTQFGSGWAWLVLNNNKLEIMKTANADTPIAHGLQALLTVDVWEHAYYLDYQNGRGTYLDAFFNNLINWDFVNANLA

SEQ ID NO: 105901 - DNA, 612 bp, Borrelia garinii PBi
  CDS (1)..(612): transl_table=11
atgtttaaactgccagaacttggttataattacgatgctgttgagccttatattgatgctaaaactatggaaattcatcatagcaagcaccataatggttttgtaatgaatttgaattctatttttgaaaaaatgggaaaaagttatttaaaagacgtgtcaagcatattaaaaaatattcatgattttccagatgaatttcaaaccccaataagaaataatgctgggggctattcgaaccacactttatattttagaagtttgaaaccaggaaacaagagcaatcttttagaaaagtttgaaaatgatgttaatacagcttttggaagcccggatgttcttaaggctagcttgaaagataccgcaatgaaaatttttggaagtggttgggcatggttagtattgtgtcctgatagtgggcttaaagtgatttcaatgcccaatcaggacagtcctttaatgaagtcttataagccgattttaggtattgatgtttgggaacatgcctattatcttaaatatcaaaatagaagaattgaatatgttgatgcatttttaaaggctttaaattgggaagaagtttcaaaaatttacaatgaagctaacaattag

SEQ ID NO: 105902 - protein, 203 aa, Borrelia garinii PBi
MFKLPELGYNYDAVEPYIDAKTMEIHHSKHHNGFVMNLNSIFEKMGKSYLKDVSSILKNIHDFPDEFQTPIRNNAGGYSNHTLYFRSLKPGNKSNLLEKFENDVNTAFGSPDVLKASLKDTAMKIFGSGWAWLVLCPDSGLKVISMPNQDSPLMKSYKPILGIDVWEHAYYLKYQNRRIEYVDAFLKALNWEEVSKIYNEANN

SEQ ID NO: 105903 - DNA, 615 bp, Symbiobacterium thermophilum IAM 14863
  CDS (1)..(615): transl_table=11
atggctttccagctgcctgcgcttccgtatccgaccaacgccctggagccgtacatcgacgcccagaccatggagatccaccacggcaagcatcacgccgcgtacgtcaacaacctgaatgccgccctggaggggcatcccgagctgcagtccaagtcgattgaggagctgctccgggggatcgacagcgtgcccgagtccatccgcaccgccgtgcggaacaacggcggcggccacgccaaccacaccctgtactgggagatcatgacccccggtggtgccaaggagcccggcggcgagctggccgaggcgatcaacgcggccttcggctcgttccagaacttcaaggacgagttcgccaaggccggcgcgggccggttcggctccggctgggcctggctggtggtgacgaaggacggcaagctggcggtctactccacggccaaccaggacagcccgctgatgcagggcgatacgccgatcctgggcatggacgtgtgggagcacgcctactacctgaagtaccagaaccgccggccggagtacatccaggccttcatgaacgtgatcaactgggacaaggtggccgagcgctacgccgcggccaggaagtag

SEQ ID NO: 105904 - protein, 204 aa, Symbiobacterium thermophilum IAM 14863
MAFQLPALPYPTNALEPYIDAQTMEIHHGKHHAAYVNNLNAALEGHPELQSKSIEELLRGIDSVPESIRTAVRNNGGGHANHTLYWEIMTPGGAKEPGGELAEAINAAFGSFQNFKDEFAKAGAGRFGSGWAWLVVTKDGKLAVYSTANQDSPLMQGDTPILGMDVWEHAYYLKYQNRRPEYIQAFMNVINWDKVAERYAAARK

SEQ ID NO: 105905 - DNA, 915 bp, Bacillus cereus E33L
  CDS (1)..(915): transl_table=11
atgagtcagcaaggtgtattcacagattactttcatgaagtagaaagctggtgtgaaagtgttcttcacgtattagatagccgtgcaatggaagtgtatgatgtccatatgcttgcttataaaattcaaacgttattagatcgtatgaaagagcatgagtatgatacagatgcagagtttatgtatgaaataagtgatgatgtagaacatattcagcatcatttgcaggaagtattcgtgcagggagaagaggaatatgaactatgtgaaagaggggatagtgaacgagctgttccaattggagggcatacactcccgccactaccatatccatataatgcgttagaaccgtatatttctagagaaattatgatgttacaccatgataaacatcatcgtagttacgtggaaggattaaataaggcagagaagatgatggaagaagcgagaaaaacaaatcaatttgatttaattaagcattgggaaagagaagctgcttttcatggatcaggtcattacttgcacacaatattttggaataacatgaagaaaggtggcggcggaagtccaagaggggctctttcacaccggattgaacaagattttggaagtttcttgcgttttcaaaaacattttacagaagcagcctctaaagtggaaggttcaggatgggcaattctcgtttgggttccgcgctcgggaagattagaaattttacagagtacacttcatcaattatttacacaatgggatacgataccgctccttgtactagacgtgtgggaacatgcgtattatttacaataccaaaatcgaaaagatgaatatattaaaaattggtggaatgttgtaaattggccggatgtagaaaaaagatttgaaagtgcaaaacaaatagaatggacaccttattag

SEQ ID NO: 105906 - protein, 304 aa, Bacillus cereus E33L
MSQQGVFTDYFHEVESWCESVLHVLDSRAMEVYDVHMLAYKIQTLLDRMKEHEYDTDAEFMYEISDDVEHIQHHLQEVFVQGEEEYELCERGDSERAVPIGGHTLPPLPYPYNALEPYISREIMMLHHDKHHRSYVEGLNKAEKMMEEARKTNQFDLIKHWEREAAFHGSGHYLHTIFWNNMKKGGGGSPRGALSHRIEQDFGSFLRFQKHFTEAASKVEGSGWAILVWVPRSGRLEILQSTLHQLFTQWDTIPLLVLDVWEHAYYLQYQNRKDEYIKNWWNVVNWPDVEKRFESAKQIEWTPY

SEQ ID NO: 105907 - DNA, 612 bp, Bacillus cereus E33L
  CDS (1)..(612): transl_table=11
atggcaaaacacgaattaccaaatttaccttatgcgtatgatgctttagagcctcactttgacaaagaaacaatgaacatccatcatacaaaacaccataacacgtacattacaaacttaaacgctgctttagaaggttatgcagaattagctgacaaaagcgtagaagaattagttgcaaacttaaacgaagtaccagaagcaatccgtacagcagtacgtaacaatggtggcggacatgctaaccacacattcttctggacaatcttatctccaaacggcggtggacaaccagtaggtgaacttgcaactgcaattgaagcaaaattcggtagcttcgatgcgttcaaagaagaattcgcaaaagctggcgcaactcgcttcggttctggttgggcttggttagtagtaaataatggtgagttagaagtaacaagcacgccaaaccaagattctcctctaactgaaggtaaaactccagttatcggtttagatgtttgggaacatgcttactacttaaattaccaaaaccgtcgtccagattacatcggtgcattctggaacgttgtagattggaacgctgctgaaaaacgttaccaagaagcaaaataa

SEQ ID NO: 105908 - protein, 203 aa, Bacillus cereus E33L
MAKHELPNLPYAYDALEPHFDKETMNIHHTKHHNTYITNLNAALEGYAELADKSVEELVANLNEVPEAIRTAVRNNGGGHANHTFFWTILSPNGGGQPVGELATAIEAKFGSFDAFKEEFAKAGATRFGSGWAWLVVNNGELEVTSTPNQDSPLTEGKTPVIGLDVWEHAYYLNYQNRRPDYIGAFWNVVDWNAAEKRYQEAK

SEQ ID NO: 105909 - DNA, 666 bp, Mannheimia succiniciproducens MBEL55E
  CDS (1)..(666): transl_table=11
atggcttacactctacctgaattaggttacgcatatgatgcgttagaaccacattttgatgcgttaacaatggaaattcaccatagcaaacaccatcaaacttatgtaaacaatgccaacgcggcggttgaagcggcggttaaaaacgtgccggcattagcggaatatcttgacgcctgcccgggtaaaattctgaaaaacttagataaagttgctgcggaaaaccgtactgccgtacgtaacaacgtgggcggtcatgcaaatcacagtttattctggaaagcattaaaaaccggcacaacattacaaggtgcgttaaaagatgcaatcattcgcgatttcggttccgttgaagcattccaggctgaatttgaaaaagcagccgcaacgcgttttggttccggttgggcttggttagttgtacaggaaggcggcaaattagcagtcgtttcaacggcaaaccaggattctccgattatgggaaaagaaattgccggttgcgaaggcttcccgctattttgcttagatgtttgggaacacgcttattacttgaaattccaaaaccgtcgtccggactacattaaagaattctggaacgtagtaaactgggactttgcggcagagcgcttcgaaaagaaattagcggaatgcggttgcgctaaataa

SEQ ID NO: 105910 - protein, 221 aa, Mannheimia succiniciproducens MBEL55E
MAYTLPELGYAYDALEPHFDALTMEIHHSKHHQTYVNNANAAVEAAVKNVPALAEYLDACPGKILKNLDKVAAENRTAVRNNVGGHANHSLFWKALKTGTTLQGALKDAIIRDFGSVEAFQAEFEKAAATRFGSGWAWLVVQEGGKLAVVSTANQDSPIMGKEIAGCEGFPLFCLDVWEHAYYLKFQNRRPDYIKEFWNVVNWDFAAERFEKKLAECGCAK

SEQ ID NO: 105911 - DNA, 609 bp, Bacillus licheniformis ATCC 14580
  CDS (1)..(609): transl_table=11
atggcttacaaacttccagaattaccttatgcttacgatgcgttagaacctcacatcgacaaagagacgatgaatattcaccatacgaagcaccataacacatatgttacaaaattgaacgaagcggtggcaggcaaacaggatcttgaaagcaaatctgttgaagagcttgttgcaaaccttgatgcagtaccggaaaacatccgtacagctgtccgcaacaatggcggagggcatgccaaccactcattgttctggaaacttctttctccaaacggaggaggcgctccaactggtgaattggcagaagccatcaacagcaaattcggcagcttcgatcaattcaaagaagactttgcggctgcagcagcaggccgtttcggctccggctgggcatggcttgttgtcaataacggagagcttgaaatcacaagcacgccaaaccaagattctcctctttcagaaggcaagactcctatcttaggtcttgatgtatgggagcacgcatactacctgaattatcaaaaccgccgtccagattacattaaagcattctggaacgtcgttaactgggatgaagttgcacgcctttacagcgaagcaaaataa

SEQ ID NO: 105912 - protein, 202 aa, Bacillus licheniformis ATCC 14580
MAYKLPELPYAYDALEPHIDKETMNIHHTKHHNTYVTKLNEAVAGKQDLESKSVEELVANLDAVPENIRTAVRNNGGGHANHSLFWKLLSPNGGGAPTGELAEAINSKFGSFDQFKEDFAAAAAGRFGSGWAWLVVNNGELEITSTPNQDSPLSEGKTPILGLDVWEHAYYLNYQNRRPDYIKAFWNVVNWDEVARLYSEAK

SEQ ID NO: 105913 - DNA, 591 bp, Legionella pneumophila subsp. pneumophila str. Philadelphia 1
  CDS (1)..(591): transl_table=11
ctggagattgatatgacttttaccctgccgcaattaccttatgcattggatgcactggctcctcatgtttccaaagaaaccttggaataccattatggtaaacaccataacacttacgtcaccaacttaaataaattaattcccggaacagaatttgaatccatgactctggaagagatcatcatgaaagctaaaggcggtatttttaacaacgccgctcaggtttggaatcacaccttttattggcacagcatgagccctaatggtggaggtgagccaaaaggcaggctggcggaagccattaataaaagctttggttcttttgcagcattcaaagaacaattttcacaaacagctgctacaacattcggttccgggtgggcatggctagtccaggatcagtcaggggctttaaaaattatcaacacaagcaatgctggaacaccaatgactgaaggattaaatgccttattaacttgtgacgtatgggagcacgcttattacatcgattatagaaataggcgcccggattatattgaagccttttggtcattagttaattgggattttgcgagcagtaatctgaaataa

SEQ ID NO: 105914 - protein, 196 aa, Legionella pneumophila subsp. pneumophila str. Philadelphia 1
MEIDMTFTLPQLPYALDALAPHVSKETLEYHYGKHHNTYVTNLNKLIPGTEFESMTLEEIIMKAKGGIFNNAAQVWNHTFYWHSMSPNGGGEPKGRLAEAINKSFGSFAAFKEQFSQTAATTFGSGWAWLVQDQSGALKIINTSNAGTPMTEGLNALLTCDVWEHAYYIDYRNRRPDYIEAFWSLVNWDFASSNLK

SEQ ID NO: 105915 - DNA, 666 bp, Burkholderia mallei ATCC 23344
  CDS (1)..(666): transl_table=11
ttgcggggttattcggactcgcctacaatcgggcgttccgcggcatccaacactgccctccctacatacacttcgaaggaaccgatcatggctcatacgctcccgccgctgccgtacgctgaagacgccctcgctccgcatatctcgcaggagacgatccagtttcactacggcaagcatcaccaggcttatgtgacgaacctgaacaacctgatccccggcaccgagttcgagaacctgccgctggaagagatcgtgaagaagtcgtcgggcggcatcttcaacaacgccgcgcagatctggaatcacacgttcttctggaacagcctgtcgccgaacggcggcggcgcgccgacgggcgcgctcggcgacgcgatcaacgcgaagtggggttcgttcgacgcgttcaaggaggcgttcacgaaggcagcggtcggcacgttcggctcgggctgggcttggctcgtgaagaaggcggacggctcgctcgacatcgtgtcgacgagcaatgcggccacgccgctcacgacggccgacaagccgctcgtcacgatcgacgtgtgggaacacgcttactacatcgattaccgcaacgcgcgcccgaagttcgtcgaagcgttctggaacatcgtgaactgggacttcgccgcgaagaacttcgcgtaa

SEQ ID NO: 105916 - protein, 221 aa, Burkholderia mallei ATCC 23344
MRGYSDSPTIGRSAASNTALPTYTSKEPIMAHTLPPLPYAEDALAPHISQETIQFHYGKHHQAYVTNLNNLIPGTEFENLPLEEIVKKSSGGIFNNAAQIWNHTFFWNSLSPNGGGAPTGALGDAINAKWGSFDAFKEAFTKAAVGTFGSGWAWLVKKADGSLDIVSTSNAATPLTTADKPLVTIDVWEHAYYIDYRNARPKFVEAFWNIVNWDFAAKNFA

SEQ ID NO: 105917 - DNA, 633 bp, Methylococcus capsulatus str. Bath
  CDS (1)..(633): transl_table=11
ttggcggcaggcgggctccccagagtttcgaaggctgcatccccccatgtcttgccgccgctgccttatgccgagaacgccctggcgccggtgatttcggccaataccatcggctttcactatggcaagcatcacaagggttatgtggacaacctgaacaagctcgtggcagggacggaatatgccgattctactttggaaaaaatcattcacgatactggcgggaaggcggaccggacttcgattttcaataatgcggcccaggtttggaatcataccttttactggaaaagcctgcggcccaacggtggtggcgagcccccggccgcgctgaggcggaaaatcgaagcttccttcggcagcgtcgctgcttgtaaaaaggagttcgcgagcgcagcggtttcgcagttcggtagtggctgggcctggctcgttctcgatggcgacaaactcgagatcatcaggacggccaatgccgacattcctttgacgtccggaaaaaagccattgctggtaatcgacgtctgggagcatgcttattatctggactaccagaaccgccgcgccgattatgtgaatgccgttctcgaaaagctgttgaactgggagtttgctctccagaacgccagctaa

SEQ ID NO: 105918 - protein, 210 aa, Methylococcus capsulatus str. Bath
MAAGGLPRVSKAASPHVLPPLPYAENALAPVISANTIGFHYGKHHKGYVDNLNKLVAGTEYADSTLEKIIHDTGGKADRTSIFNNAAQVWNHTFYWKSLRPNGGGEPPAALRRKIEASFGSVAACKKEFASAAVSQFGSGWAWLVLDGDKLEIIRTANADIPLTSGKKPLLVIDVWEHAYYLDYQNRRADYVNAVLEKLLNWEFALQNAS

SEQ ID NO: 105919 - DNA, 588 bp, Azoarcus sp. EbN1
  CDS (1)..(588): transl_table=11
atggaacataccctgcctcagctgccctacgcgaaagaagcgctggccccgcacatctcggccgagacgatggaattccactacggcaagcatcaccaggcctacgtgacgaacctgaacaacctgatcaagggcaccgaattcgagaacctcgatctcgaggcaatcgtcaagaaggccccggctggcggcatctacaacaactccgcccaggtctggaaccacaccttcttctggaactgcatgaagcccaacggcggcggcgaaccggcgggctcactggccgacgcgatcaaagccaagtgggggtcgttcgaagacttcaagaaggctttcaccacctcggccgtcggcaacttcggctccggctggacgtggctcgtgaaaaaagccgacggcagcgtcgacatcgtcaacatgggcgctgcgggcacgccgctgacgaccggcgacgagccgctgctgtgcatcgacgtgtgggaacacgcctattacatcgattaccgcaaccgccgcccggacttcgtcgccgcgttcctgaacaatctcgcgaactgggacttcgcatcgaagaatttcgccgcctga

SEQ ID NO: 105920 - protein, 195 aa, Azoarcus sp. EbN1
MEHTLPQLPYAKEALAPHISAETMEFHYGKHHQAYVTNLNNLIKGTEFENLDLEAIVKKAPAGGIYNNSAQVWNHTFFWNCMKPNGGGEPAGSLADAIKAKWGSFEDFKKAFTTSAVGNFGSGWTWLVKKADGSVDIVNMGAAGTPLTTGDEPLLCIDVWEHAYYIDYRNRRPDFVAAFLNNLANWDFASKNFAA

SEQ ID NO: 105921 - DNA, 600 bp, Silicibacter pomeroyi DSS-3
  CDS (1)..(600): transl_table=11
atggcttttgaacttcccgaccttccttatgcacatgacgcgctggcttccaagggcatgagcgccgagacgctggaatatcaccacgacctgcaccacaaggcctatgtcgacaacggcaacaagctgatcgccgacaccgagtgggacggcaagtcgatggaagagatcatcaccggcacctatgacaagagcgccgtggcacagaacggcatcttcaacaacatcagccagctgtggaaccacaaccagttctgggaaatgatgggcccgggcgaaagcaagatgccgggcgagctggaaaaggcgattgccgagagctttggctcggtcgacgagttcaagtcgcagttttccgctgccggtgccggccagttcggttcgggctggtgctggctggtcaagaatgccgacggctcgctggcagtgaccaagaccgagaacggtgtgaacccgctctgctttggtcagaccgctctgctgggctgcgatgtgtgggagcattcctattacatcgacttccgcaacaagcgcccagcctatctgaccaacttcctcgacaatctggtcaattgggaaaacgtcgcctcgcgcatgtaa

SEQ ID NO: 105922 - protein, 199 aa, Silicibacter pomeroyi DSS-3
MAFELPDLPYAHDALASKGMSAETLEYHHDLHHKAYVDNGNKLIADTEWDGKSMEEIITGTYDKSAVAQNGIFNNISQLWNHNQFWEMMGPGESKMPGELEKAIAESFGSVDEFKSQFSAAGAGQFGSGWCWLVKNADGSLAVTKTENGVNPLCFGQTALLGCDVWEHSYYIDFRNKRPAYLTNFLDNLVNWENVASRM

SEQ ID NO: 105923 - DNA, 690 bp, Synechococcus elongatus PCC 6301
  CDS (1)..(690): transl_table=11
atgctgcaggagacgctcagacgagggaagcgtccggtttttattaatctaggtaaagacaacctgctcaagggaacacactgcgtgtcctacgaattgccagcattgccctttgactacacggcactggcgccttacatcaccaaggaaacgctggagttccaccacgataagcaccacgcggcctacatcaataactacaacaacgccgtcgaagacaccgacctcgatggccagccgatcgaagccgtgatcaaagcgatcgcgggtgacgctagcaaagccggtctgttcaacaatgcggctcaagcttggaaccacagcttttactggaactcgatcaagcccaatggcggtggcgctcccaccggcgcgttggccgacaaaatcgccgctgacttcggcagtttcgagaacttcgtgaccgagttcaaacaagccgcagcaacccagttcggcagcggctgggcttggttggtgctggacaatggcaccctcaaaatcaccaaaaccggcaacgccgacaccccgattgcccatggtcaaaccccgctactgaccatcgatgtctgggaacacgcttactacctcgactaccaaaaccgtcgtcccgactacatcagcaccttcgttgagaagctggcgaactgggacttcgcctctgccaactacgcagctgcgatcgcttag

SEQ ID NO: 105924 - protein, 229 aa, Synechococcus elongatus PCC 6301
MLQETLRRGKRPVFINLGKDNLLKGTHCVSYELPALPFDYTALAPYITKETLEFHHDKHHAAYINNYNNAVEDTDLDGQPIEAVIKAIAGDASKAGLFNNAAQAWNHSFYWNSIKPNGGGAPTGALADKIAADFGSFENFVTEFKQAAATQFGSGWAWLVLDNGTLKITKTGNADTPIAHGQTPLLTIDVWEHAYYLDYQNRRPDYISTFVEKLANWDFASANYAAAIA

SEQ ID NO: 105925 - DNA, 609 bp, Bacillus clausii KSM-K16
  CDS (1)..(609): transl_table=11
atggcttacaaactaccagaattgccttatgctgcaaatgcacttgagccgcatattgatgaggcgacaatgaacattcaccacggcaaacaccacaatacgtatgtaacaaacttaaatgctgcattggaagggcatgcagcccttgcagagaagagcattgaagacttggtggcaaacttggatgctgttccagaaaacattcgtacagcggttcgcaacaatggcggaggccatgcaaaccacacatttttttggcaaattttaagtccaaatggtggcggcgagccgactggtgctctagcagaagatattaaatcaactttcggcagcgttgaagaattcaaaaacaaatttgcagacgcagcaaaagggcgctttggttcaggatgggcttggctagttgtcaacaacggcaatttagaaattacaagcacgcctaaccaagatacacctttatctgaagggaaaacgcctatcctcggacttgacgtctgggaacacgcttactacttgaactaccaaaaccgtcgcccagactacattgcagctttctggaatgtcgtcaattgggacgaggttagcaaacgttacgaagcagcaaaataa

SEQ ID NO: 105926 - protein, 202 aa, Bacillus clausii KSM-K16
MAYKLPELPYAANALEPHIDEATMNIHHGKHHNTYVTNLNAALEGHAALAEKSIEDLVANLDAVPENIRTAVRNNGGGHANHTFFWQILSPNGGGEPTGALAEDIKSTFGSVEEFKNKFADAAKGRFGSGWAWLVVNNGNLEITSTPNQDTPLSEGKTPILGLDVWEHAYYLNYQNRRPDYIAAFWNVVNWDEVSKRYEAAK

SEQ ID NO: 105927 - DNA, 867 bp, Bacillus clausii KSM-K16
  CDS (1)..(867): transl_table=11
atggattcgcatgagcaagcattaagaaaatggaaagatgagcttgccaggctttggaaagagcaggaaagcgagtttgtcaggtccataggagaagagcaaacacagccttttacaaagtcgttaagccaattggaatatgcgcttgaacacgatcctacacaagcaaacgaacatgctcaacacgcctatgactcatgggtagtaatggccgatttaagaggaaaagggaaaaataacagcgtccccatcggcggtcataggctaccaccaatgccttattcatataatgcgttggaaccgtacattgatgcaaagaccatgcgccttcatcatttaaagcatcatcagacgtatgtcaatgatttaaataaagcagagaaagaaatggaaaaggcgagacgtactggaaattatgatttgattaagcattgggagagggaagcggcgttcaatggggcgggtcattatttgcacacgcttttttggcatgtcatgtcaccaaatgggggcggagagccgcaagggctgctaaaagcaagaataacagaagactttggctcctttcaaaaaatgaaagcccatttttccaatgctgctgaaaaagtcgaaggcggcggctgggcgatgctcatttacgcgccgaggtcccaccggttagaaattcttcaggcggaaaagcaccaaaacctttcccaacaagaccaagtgccgctgttggtgttggatgtatgggagcacgcctactatttaaagtatcaaaatgagcgtaaagcgtatattgaggcatggtggaatgttgtgaactggaaggaagctgaaaatcgttaccgccaggcctcgcagttaaaatgggtgccctattaa

SEQ ID NO: 105928 - protein, 288 aa, Bacillus clausii KSM-K16
MDSHEQALRKWKDELARLWKEQESEFVRSIGEEQTQPFTKSLSQLEYALEHDPTQANEHAQHAYDSWVVMADLRGKGKNNSVPIGGHRLPPMPYSYNALEPYIDAKTMRLHHLKHHQTYVNDLNKAEKEMEKARRTGNYDLIKHWEREAAFNGAGHYLHTLFWHVMSPNGGGEPQGLLKARITEDFGSFQKMKAHFSNAAEKVEGGGWAMLIYAPRSHRLEILQAEKHQNLSQQDQVPLLVLDVWEHAYYLKYQNERKAYIEAWWNVVNWKEAENRYRQASQLKWVPY

SEQ ID NO: 105929 - DNA, 621 bp, Bacillus clausii KSM-K16
  CDS (1)..(621): transl_table=11
atggctacccattcattaccagaactaggcttcgcttttgacgcgctagagccaacgattgacagaaaaacaatggaaatccatcacggcaagcatcatcaaacatacgttaccaatttgaatgcggcattggaaaacgagccatcgttgcaaagccaatcgcttgaacaattgctcgccaacatcgagtcacttccggcatcgattcaaaccccagtccgcaataatggcggcggccaccttaaccattcattgttctggcaagtaattgccccgttaaaaggcgcaaatgaaatgagcgctgctttaaaagaagccatcgatcaagcattcggcagttttgaaggctttaaagaaacatttactaaagcagcaacgacacgttttggctcaggctgggcttggcttgtcgtcaatgaaagcaaagagttagaagtttacagtacagccaaccaagacaatccgattatggacggaaaacaagccatcctcggtcttgatgtttgggagcatgcctactatttgaactaccaaaacaagcggccagagtacattgcgaactttttctccattattaattgggaggccgtatcggaagcatacgaaaaggcgatcggttaa

SEQ ID NO: 105930 - protein, 206 aa, Bacillus clausii KSM-K16
MATHSLPELGFAFDALEPTIDRKTMEIHHGKHHQTYVTNLNAALENEPSLQSQSLEQLLANIESLPASIQTPVRNNGGGHLNHSLFWQVIAPLKGANEMSAALKEAIDQAFGSFEGFKETFTKAATTRFGSGWAWLVVNESKELEVYSTANQDNPIMDGKQAILGLDVWEHAYYLNYQNKRPEYIANFFSIINWEAVSEAYEKAIG

SEQ ID NO: 105931 - DNA, 624 bp, Chlamydophila abortus S26/3
  CDS (1)..(624): transl_table=11
atgacctttgttccctatactttgcccccattgccctatgattattctgctctagagccagtaattagtgctgagattatgcatctacatcatcaaaagcatcatcaaggttatataaataatttgaatgaagctttgaagaagttagatctagctgatgtacaacaagaccttacgcagttgattgctttagagcctactatacgatttaatgggggagggcatattaaccactccttattttgggaaatgctcgctccgataggtcaaggtggaggcgtccctcctaagcacggcttacttaagcttattgagaaattctggggaacttttgacaactttttaaaagaatttattaaatttgccgccccgattcagggttccgggtgggcttggctaggtttttgtctcgaaaaacaagaacttacgctacacgcgacagtaaaccaggatcctctcgaagccaccacaggtaaggtgcctcttctcggagtcgacgtctgggagcatgcgtattacctccaatataaaaatgttagattagattacttaaaagcaattcctcaagtaattaattggggatatattgaaaaaagattttctgagataactaaagataactaa

SEQ ID NO: 105932 - protein, 207 aa, Chlamydophila abortus S26/3
MTFVPYTLPPLPYDYSALEPVISAEIMHLHHQKHHQGYINNLNEALKKLDLADVQQDLTQLIALEPTIRFNGGGHINHSLFWEMLAPIGQGGGVPPKHGLLKLIEKFWGTFDNFLKEFIKFAAPIQGSGWAWLGFCLEKQELTLHATVNQDPLEATTGKVPLLGVDVWEHAYYLQYKNVRLDYLKAIPQVINWGYIEKRFSEITKDN

SEQ ID NO: 105933 - DNA, 582 bp, Pseudomonas syringae pv. syringae B728a
  CDS (1)..(582): transl_table=11
atggcttttgaattgccgccactgccctacgaaaaaacagctctggcgccgcacatttctgcggagactctggaatatcaccacgacaagcaccacaacacctacgtcgtgaacctgaacaacctggtgcctggcaccgagttcgaaggcaagaccctggaagagatcgtcaagacttcttcgggcggtatcttcaacaacgccgctcaggtctggaaccacacgttctactggaactgcctggcccctaacgctggcggcgagcctaccggcgctctggccgaagccatcaacaaggcgttcggttccttcgacaagttcaaggaagagttcagcaagacttctatcggcactttcggctccggctggggctggctggtgaagaaggctgacggctccctggcactggccagcaccatcggtgccggcaacccgttgaccagcggcgacaccccgctgctgacctgcgatgtctgggaacacgcctactacatcgactatcgcaacctgcgtccgaagtacgtggaagcgttctggaacctggtgaactgggacttcgtggccaagcaattcgcctcctga

SEQ ID NO: 105934 - protein, 193 aa, Pseudomonas syringae pv. syringae B728a
MAFELPPLPYEKTALAPHISAETLEYHHDKHHNTYVVNLNNLVPGTEFEGKTLEEIVKTSSGGIFNNAAQVWNHTFYWNCLAPNAGGEPTGALAEAINKAFGSFDKFKEEFSKTSIGTFGSGWGWLVKKADGSLALASTIGAGNPLTSGDTPLLTCDVWEHAYYIDYRNLRPKYVEAFWNLVNWDFVAKQFAS

SEQ ID NO: 105935 - DNA, 612 bp, Pseudomonas syringae pv. syringae B728a
  CDS (1)..(612): transl_table=11
atgccatacaccttgcctgcactgccttacgcatacgatgcccttgaaccacatatcgatgcgcaaaccatggaaatccactacaccaagcatcaccagacgtacatcaataacctcaatgccgcggtcgaagggacggagttcgccgactggtcggtggagaagctggtggccagtgtccagcagttgcctgaaaacctgcgtccagcggtgatcaatcagggtggcggccatgccaatcactcgttgttctgggaagtcatggtgccgggcggcggcggcttgcccacgggcgctgtcgcgtctgccatcaatgagcaactgggtggctacgaaagcttcaaggaggcattcaccaaggccgcattgacccgtttcggcagtggctgggcatggctgagcgtcacgcctgacaaaaagctggtggtggaaagcagtggtaaccaggacagcccgctgatgaacggcaacacgccgattctggggctggacgtgtgggagcacgcttactacctgcgctatcagaaccgtcgtcccgaatacatcaatgcgttctacaacgtgatcaattgggatgaggtgtcccgccgttatcaggccgctctggcctga

SEQ ID NO: 105936 - protein, 203 aa, Pseudomonas syringae pv. syringae B728a
MPYTLPALPYAYDALEPHIDAQTMEIHYTKHHQTYINNLNAAVEGTEFADWSVEKLVASVQQLPENLRPAVINQGGGHANHSLFWEVMVPGGGGLPTGAVASAINEQLGGYESFKEAFTKAALTRFGSGWAWLSVTPDKKLVVESSGNQDSPLMNGNTPILGLDVWEHAYYLRYQNRRPEYINAFYNVINWDEVSRRYQAALA

SEQ ID NO: 105937 - DNA, 630 bp, Psychrobacter arcticus 273-4
  CDS (1)..(630): transl_table=11
atgtcaaagattaccttaccagaactaccatatgcaaaagatgcacttgagccacatatcagtgctgaaactttagagtttcatcatgataagcatcatgctgcttatgtgaataagttgaacgaattgctaccgggttctggtctagaagataaaaccttgtcagaaatcatcgtagcaacggccaaagatgacagcaaacaaggtatgtttaaccaagcagctcaagtatggaaccacacgttctattggaactgcatgacgccagacaacggcggcggtgaacctactggcgatctaaaagctaaaatcgaagaagatttcggtagctatgacaaattccgtgaagagttcaaaaacgcagcattgactcaattcggttcaggttgggcatggctagtcgctgataaagtcggtggcaaattgtcaatcgctaaaacggctaacgctgacacgccacttgcacatgaccaaatcgcggtattgacttgtgatgtgtgggaacatgcttattacgtcgattatcgtaaccgtcgtcctgagtatgttgacaccttcctagacaagctagtgaactgggactacgcaaacgcaaaatataaaggtcaagatgctggtgttgaagcgtaa

SEQ ID NO: 105938 - protein, 209 aa, Psychrobacter arcticus 273-4
MSKITLPELPYAKDALEPHISAETLEFHHDKHHAAYVNKLNELLPGSGLEDKTLSEIIVATAKDDSKQGMFNQAAQVWNHTFYWNCMTPDNGGGEPTGDLKAKIEEDFGSYDKFREEFKNAALTQFGSGWAWLVADKVGGKLSIAKTANADTPLAHDQIAVLTCDVWEHAYYVDYRNRRPEYVDTFLDKLVNWDYANAKYKGQDAGVEA

SEQ ID NO: 105939 - DNA, 612 bp, Pseudomonas syringae pv. phaseolicola 1448A
  CDS (1)..(612): transl_table=11
atgccttataccttgcctgcactgccttacgcatacgatgccctggagccgcacatcgatgcgcaaaccatggagatccattacaccaagcatcaccagacctacatcaacaaccttaatgctgcgatcgaaggcaccgagtttgctgactggtccgtcgagaagctggtggccagcatcaagcagttgcctgaaaacctgcgtccggcggtcatcaaccagggtggcggtcacgcgaatcattcgttgttctgggaggtgatggtgccaggcggaggcggtttgcccaaaggccctgtcgctttggccatcgaccagcagctgggtggctatgacagcttcaagggagcgtttaccaaagccgcattgacccgtttcggcagcggctgggcatggctgagcgtcacccccgacaaaaagctggtggttgaaagcagcggtaatcaggacagcccgttgatgaatggcaatacgccgattctgggtctggatgtatgggagcacgcttactacctgcgctatcagaaccgtcgccccgaatacatcaacgcgttctacaacgtgatcaattgggatgaagtgtctcgacgttatcaggccgctttggcctga

SEQ ID NO: 105940 - protein, 203 aa, Pseudomonas syringae pv. phaseolicola 1448A
MPYTLPALPYAYDALEPHIDAQTMEIHYTKHHQTYINNLNAAIEGTEFADWSVEKLVASIKQLPENLRPAVINQGGGHANHSLFWEVMVPGGGGLPKGPVALAIDQQLGGYDSFKGAFTKAALTRFGSGWAWLSVTPDKKLVVESSGNQDSPLMNGNTPILGLDVWEHAYYLRYQNRRPEYINAFYNVINWDEVSRRYQAALA

SEQ ID NO: 105941 - DNA, 615 bp, Thermobifida fusca YX
  CDS (1)..(615): transl_table=11
atgtccgcgccgtacacgcttcctgaactgccctacgactactccgctctggagccgtggatctcgggcgagatcatggagctgcaccacgacaagcaccacgccgcctacgtcaagggcgccaacgacgctctggagcagctggcggaggcccgggagaagggcgacctgagcaaggtcaacctgctgcagaagaacctcgccttcaacctggccggccacgtcaaccacaccgtgttctggccgaacctgtcgccggacggcggcgacaagccggaaggcgagctcggcgctgccatcgacgacgccttcggatccttcgacgccttccgcgcccacttcagtgccgccgccaccggcatccagggctcgggctgggcgatcctcgcctgggacatcctcggccagcggctcatcatcgagcagctctacgaccaccagggcaacctggctgccggctcctacccgctgctcatgctcgacatgtgggagcacgccttctacctgcagtacaagaacgtcaaggccgactacgtgaaggcgttctggaacgtggtgaactgggccgacgtggccaagcggttcgaggacgcccgcaaggtcgccctcggctga

SEQ ID NO: 105942 - protein, 204 aa, Thermobifida fusca YX
MSAPYTLPELPYDYSALEPWISGEIMELHHDKHHAAYVKGANDALEQLAEAREKGDLSKVNLLQKNLAFNLAGHVNHTVFWPNLSPDGGDKPEGELGAAIDDAFGSFDAFRAHFSAAATGIQGSGWAILAWDILGQRLIIEQLYDHQGNLAAGSYPLLMLDMWEHAFYLQYKNVKADYVKAFWNVVNWADVAKRFEDARKVALG

SEQ ID NO: 105943 - DNA, 585 bp, Thiobacillus denitrificans ATCC 25259
  CDS (1)..(585): transl_table=11
atggaacataccttgcccgcactgccttttgctatggacgcgctcgagccgcacatgtcgaaggagaccttcgaataccactacgccaagcaccatcaggcctacgtcacgaatctcaacaacctgatcaagggtggcgaattcgagagcaagtccctcgaggacatcgtcaagaccgctccggccggcggcatctacaacaatgcggcgcaagtctggaaccacaccttcttctggaactgtctgacccccaacggtggcggtgccccgagcggcgcgctcgctgacgcgatcaacaagaagtggggttcgctcgacgaattcaagaaggccttccagaccagcgccgtcggcaacttcggctccggctggacctggctcgtcaagaaggccgacggctcggtcgacatcgtcaacatgggcgccgccggcaccccgctgaccaccggcgacaaggccctgttgtgcgtcgacgtgtgggagcacgcctactacatcgactaccgcaacctgcgtcccaagttcgtcgagaccttcctcaacaacatggtgaactggaagtttgccgaagcgaatttcgcttaa

SEQ ID NO: 105944 - protein, 194 aa, Thiobacillus denitrificans ATCC 25259
MEHTLPALPFAMDALEPHMSKETFEYHYAKHHQAYVTNLNNLIKGGEFESKSLEDIVKTAPAGGIYNNAAQVWNHTFFWNCLTPNGGGAPSGALADAINKKWGSLDEFKKAFQTSAVGNFGSGWTWLVKKADGSVDIVNMGAAGTPLTTGDKALLCVDVWEHAYYIDYRNLRPKFVETFLNNMVNWKFAEANFA

SEQ ID NO: 105945 - DNA, 603 bp, Anabaena variabilis ATCC 29413
  CDS (1)..(603): transl_table=11
atggcatttgtacaggaaccactaccctacgactttaatgctttagagcagtatggcatgaaaggtgagaccttcgagtatcactacggcaaacatcacaaagcttatgtagataacctgaacaagcttaccgatggtacagaattggctgataagtccttagaagaagtcatccaaattgcctttaaggatccctctaaagctggaatctttaacaacgctgctcaagtgtggaaccacactttcttctggaattctttaaagcccgcaggtggtggcgcacctacaggtgaatttgcagccaaaatcaaccaagactttggtagcttcgacaaattcaaagaagaattttccaacgctgctgcaactcagttcggtagcggatgggcttggctaattgatgataacggtacactgaaagtcactaaaactccaaacgccgaaaatcccctggctcatggacaaaaagcactcttaaccttggatgtttgggaacacgcttactacatcgacttcagaaatgctcgcccagcttttatcaagaactacttagataacttggttaactgggactttgctgctgcgaattatgctaaagcttag

SEQ ID NO: 105946 - protein, 200 aa, Anabaena variabilis ATCC 29413
MAFVQEPLPYDFNALEQYGMKGETFEYHYGKHHKAYVDNLNKLTDGTELADKSLEEVIQIAFKDPSKAGIFNNAAQVWNHTFFWNSLKPAGGGAPTGEFAAKINQDFGSFDKFKEEFSNAAATQFGSGWAWLIDDNGTLKVTKTPNAENPLAHGQKALLTLDVWEHAYYIDFRNARPAFIKNYLDNLVNWDFAAANYAKA

SEQ ID NO: 105947 - DNA, 813 bp, Anabaena variabilis ATCC 29413
  CDS (1)..(813): transl_table=11
atgaaatcatctctgtggcaacggtttattggctttttcatggtaattctagtgacatctatgctttatgcttgccaacctcaagaggcagcaaattccctcccaactaatgtagcaagtcctgtgcaaaccactgcgaccgcaacagataaacgttccataggttttctagaccgcccactggggacaaatccagccgagttaccgccattaccttatggttatgatgcactagagaaagcgatcgatgcagaaactatgaaactgcatcacgataaacatcatgccgcttacgttaataaccttaataatgcgttgaaaaagcatccagaactgcaaaatagtagtgtagaagctttactgcgggatttgaatagtgtgcctgaagatattcgcaacacagtacgtaataatggtggcggacatctcaaccatacaattttctggcaaattatgagtcccaatggcggtggacaaccaacaggagacatcgcccaagaaatcaaccaaacctttggcaattttgaagagttcaaaaaacagtttaacaaagcaggaggcgatcgctttggtagtggttgggtttggttagtgcgaaatccccaaggacagttacagattgtcagcactcctaatcaggatagccctatcgcagaaggttcatacccaatcatggggaatgatgtctgggaacacgcctattatctcagatatcaaaatcgtcgtcctgaatatttaaataactggtggaatgtagttaattggtcagaaattaacaaacgcgcccaagcttcacggcaaagtaattcgtaa

SEQ ID NO: 105948 - protein, 270 aa, Anabaena variabilis ATCC 29413
MKSSLWQRFIGFFMVILVTSMLYACQPQEAANSLPTNVASPVQTTATATDKRSIGFLDRPLGTNPAELPPLPYGYDALEKAIDAETMKLHHDKHHAAYVNNLNNALKKHPELQNSSVEALLRDLNSVPEDIRNTVRNNGGGHLNHTIFWQIMSPNGGGQPTGDIAQEINQTFGNFEEFKKQFNKAGGDRFGSGWVWLVRNPQGQLQIVSTPNQDSPIAEGSYPIMGNDVWEHAYYLRYQNRRPEYLNNWWNVVNWSEINKRAQASRQSNS

SEQ ID NO: 105949 - DNA, 597 bp, Pseudomonas fluorescens PfO-1
  CDS (1)..(597): transl_table=11
atggctttcgaattgccgccgctgccttacgcacacgatgccctgcagccgcacatttccaaggaaaccctggaattccaccacgacaagcaccacaacacctatgtcgtgaacctgaacaacctggtgccaggcaccgagttcgaaggcaagaccctggaagaaatcgtcaagacttcctcgggcggcatcttcaacaacgccgctcaggtctggaaccacaccttctactggaactgcctggcgccaaacgctggcggtcaaccaaccggcgcactggctgaagccatcaacgcggctttcggttcgttcgacaagttcaaggaagaattcagcaaaacctcgatcggcaccttcggttccggctggggctggctggtgaaaaaggctgacggctccctggctctggccagcaccatcggcgccggcaacccgctgaccagcggcgacaccccgctgctgacctgcgacgtgtgggaacacgcttactacatcgactaccgtaacctgcgtccaaaatacgtcgaggcgttctggaacctggtcaactggaagttcgtggccgagcagttcgaaggcaagaccttcaccgcttaa

SEQ ID NO: 105950 - protein, 198 aa, Pseudomonas fluorescens PfO-1
MAFELPPLPYAHDALQPHISKETLEFHHDKHHNTYVVNLNNLVPGTEFEGKTLEEIVKTSSGGIFNNAAQVWNHTFYWNCLAPNAGGQPTGALAEAINAAFGSFDKFKEEFSKTSIGTFGSGWGWLVKKADGSLALASTIGAGNPLTSGDTPLLTCDVWEHAYYIDYRNLRPKYVEAFWNLVNWKFVAEQFEGKTFTA

SEQ ID NO: 105951 - DNA, 600 bp, Rhodobacter sphaeroides 2.4.1
  CDS (1)..(600): transl_table=11
atggccttcacccttcctgaccttccctatgcccacgacgcgctggccgcgctcggcatgtcgaaggaaacgatggaatatcaccacgacatccaccacaaggcctatgtcgacaatggcaacaagctgatcgccggcaccgagtgggagggcaagtcggtcgaggagatcgtcaagggcacctaccagtcgggcgccgtggcgcagaacggcatcttcaacaacgccagccagcactggaaccacacgcagttctgggaaatgatgggaccgggcgagaagaagatgccgggcgagctggaaaaggcgctggtcgacagcttcggctcggtcgagaagttcaaggaagacttctcggcggcgggcgcgggccagttcggctcgggctgggcctggctcgtgaaggatcaggacggcagcctcaaggtcaccaagaccgagaacggcgtgaacccgctctgcttcggccagaccgcacttctgggctgcgacgtctgggagcacagctattacatcgacttccgcaacaagcgcccggcctacctctcgaacttcctcgagaagctggtgaactgggaaaacgtggcctcgcgcctctga

SEQ ID NO: 105952 - protein, 199 aa, Rhodobacter sphaeroides 2.4.1
MAFTLPDLPYAHDALAALGMSKETMEYHHDIHHKAYVDNGNKLIAGTEWEGKSVEEIVKGTYQSGAVAQNGIFNNASQHWNHTQFWEMMGPGEKKMPGELEKALVDSFGSVEKFKEDFSAAGAGQFGSGWAWLVKDQDGSLKVTKTENGVNPLCFGQTALLGCDVWEHSYYIDFRNKRPAYLSNFLEKLVNWENVASRL

SEQ ID NO: 105953 - DNA, 579 bp, Burkholderia sp. 383
  CDS (1)..(579): transl_table=11
atggctcatacgctcccgccgctcccgtacgctgaagacgcactcgcgccgaccatctcgctcgagacgatccagtaccactacggcaagcaccatcaggcttatgtgacgaacctgaacaatctgatcccgggcacggaattcgaaaacctgtcgctggaagagatcgtgaagaagtcgtcgggcggcatcttcaacaacgccgcgcaaatctggaaccacacgttcttctggaacagcctgtcgccgaacggcggcggcgcaccgacgggcgcgctgggcgacgcgatcaacgcgaagtggggttcgtacgacgcattcaaggaagcgttcacgaaggccgcagtcggcacgttcggttcgggctgggcatggctcgtgaagaaggctgacggttcgctcgacatcgtgtcgacgagcaacgcagccacgccgctgacgaccgccgacaaggcactgctgacgatcgacgtgtgggaacacgcgtactacatcgactaccgcaacgcacgtccgaagttcgtcgaagcgttctggaacatcgtgaactgggacttcgcagcgaagaacttcgcgtaa

SEQ ID NO: 105954 - protein, 192 aa, Burkholderia sp. 383
MAHTLPPLPYAEDALAPTISLETIQYHYGKHHQAYVTNLNNLIPGTEFENLSLEEIVKKSSGGIFNNAAQIWNHTFFWNSLSPNGGGAPTGALGDAINAKWGSYDAFKEAFTKAAVGTFGSGWAWLVKKADGSLDIVSTSNAATPLTTADKALLTIDVWEHAYYIDYRNARPKFVEAFWNIVNWDFAAKNFA

SEQ ID NO: 105955 - DNA, 690 bp, Synechococcus elongatus PCC 7942
  CDS (1)..(690): transl_table=11
atgctgcaggagacgctcagacgagggaagcgtccggtttttattaatctaggtaaagacaacctgctcaagagaacacactgcatgtcctacgaattgccagcattgccctttgactacacggcactggcgccttacatcaccaaggaaacgctggagttccaccacgataagcaccacgcggcctacgtcaataactacaacaacgccgtcaaagacaccgacctcgatggccagccgatcgaagccgtgatcaaagcgatcgcgggtgacgctagcaaagccggtctgttcaacaatgcggctcaagcttggaaccacagcttttactggaactcgatcaagcccaatggcggtggcgctcccaccggcgcgttggccgacaaaatcgccgctgacttcggcagtttcgagaacttcgtgaccgagttcaaacaagccgcagcaacccagttcggcagcggctgggcttggttggtgctggacaatggcaccctcaaaatcaccaaaaccggcaacgccgacaccccgattgcccatggtcaaaccccgctactgaccatcgatgtctgggaacacgcttactacctcgactaccaaaaccgtcgtcccgactacatcagcaccttcgttgagaagctggcgaactgggacttcgcctctgccaactacgcagctgcgatcgcttag

SEQ ID NO: 105956 - protein, 229 aa, Synechococcus elongatus PCC 7942
MLQETLRRGKRPVFINLGKDNLLKRTHCMSYELPALPFDYTALAPYITKETLEFHHDKHHAAYVNNYNNAVKDTDLDGQPIEAVIKAIAGDASKAGLFNNAAQAWNHSFYWNSIKPNGGGAPTGALADKIAADFGSFENFVTEFKQAAATQFGSGWAWLVLDNGTLKITKTGNADTPIAHGQTPLLTIDVWEHAYYLDYQNRRPDYISTFVEKLANWDFASANYAAAIA

SEQ ID NO: 105957 - DNA, 684 bp, Rhodospirillum rubrum ATCC 11170
  CDS (1)..(684): transl_table=11
atggcgtatatcgcctgcgaacccgccatcggttttcccgacgatcgggagagcggcgacacaaacaatctaggagagatcgacatggctttcgaactgccgcccctgcccttcgccaaggaggccctggagccgcatatttcagccaagactttcgaatttcatcatggcaagcatcataacgcctatgtcaccaccctcaattcgttgatcaaagatacccccctggccgataagtcgcttgaggatatcattaccaccgtggccggcgacgccgccaagaccccggtcttcaacaatgccgcccaggtgtggaaccacacgtttttctggaacagcctgtcgccgaccggcggcggccagccgaccggcgcggccaaagaggcgatcgacggcgccttcggctcgctcgacgccttcaaggagcagttcaagcaggccggcgtcacccaattcggcagtggctgggcttggctggtggtggacggcggcaagctgtcgatcgccaagacgcccaatgccgaattgcccctgaccaagggccagaccgccgttctgacctgcgatgtctgggagcatgcctattatctggattaccagaatcgccgccccgacttcctgcagaccttcctggatcacctcgtgaactgggacttcctggcggccaatctggccaaggcctga

SEQ ID NO: 105958 - protein, 227 aa, Rhodospirillum rubrum ATCC 11170
MAYIACEPAIGFPDDRESGDTNNLGEIDMAFELPPLPFAKEALEPHISAKTFEFHHGKHHNAYVTTLNSLIKDTPLADKSLEDIITTVAGDAAKTPVFNNAAQVWNHTFFWNSLSPTGGGQPTGAAKEAIDGAFGSLDAFKEQFKQAGVTQFGSGWAWLVVDGGKLSIAKTPNAELPLTKGQTAVLTCDVWEHAYYLDYQNRRPDFLQTFLDHLVNWDFLAANLAKA

SEQ ID NO: 105959 - DNA, 666 bp, Burkholderia thailandensis E264
  CDS (1)..(666): transl_table=11
ttgcggggttattcggactcgcctacaatcgggcgttccgcggcatccaacactgccctccctacatacacatcgaaggaaccgatcatggctcatacgctcccgccgttgccgtacgctgaagacgccctcgctccgcacatctcgcaggagacgatccagtatcactacggcaagcatcaccaggcttatgtgacgaacctgaacaacctgatccccggcaccgagttcgagaacctgtcgctggaagagatcgtgaagaagtcgtcgggcggcatcttcaacaacgccgcgcaaatctggaatcacacgttcttctggaacagcctgtctccgaacggcggcggcgcgccgactggcgcgctcggcgacgcgatcaacgcgaagtggggctcgttcgacgcgttcaaggaagcgttcacgaaggcggcggtcggcacgttcggctcgggctgggcgtggctcgtgaagaaggcggacggctcgctcgacatcgtgtcgacgagcaacgcggccacgccgctcacgacggccgacaagccgctcgtcacgatcgacgtgtgggagcacgcttactacatcgattaccgcaacgcgcgtccgaagttcgtcgaagcgttctggaacatcgtgaactgggatttcgccgcgaagaacttcgcataa

SEQ ID NO: 105960 - protein, 221 aa, Burkholderia thailandensis E264
MRGYSDSPTIGRSAASNTALPTYTSKEPIMAHTLPPLPYAEDALAPHISQETIQYHYGKHHQAYVTNLNNLIPGTEFENLSLEEIVKKSSGGIFNNAAQIWNHTFFWNSLSPNGGGAPTGALGDAINAKWGSFDAFKEAFTKAAVGTFGSGWAWLVKKADGSLDIVSTSNAATPLTTADKPLVTIDVWEHAYYIDYRNARPKFVEAFWNIVNWDFAAKNFA

SEQ ID NO: 105961 - DNA, 579 bp, Francisella tularensis subsp. holarctica
  CDS (1)..(579): transl_table=11
atgaaatttgaattaccaaaactaccttacgctgttgatgcattagagtcaacaatatcaaaagaaacaatagagtatcactatggtaaacatcatcaaacatatgtaactaatctaaataatttagttgagggtacagagcacgatggcagaaacctagaagaaatcgtaaaaacttctaatggcggaatatttaataacgctgctcaagtttttaatcatactttttactggaattgtttaactccaaacaaaacagaagcttcaagtcagttaaaagcagcattgatcgagacatttggttctgtagaaaattttaaagaacaattctctaaggcagctattgcaacatttggttctggttgggcttggttagtaaaaaatactgaaggtaaacttgaaatagtaactacaagtaacgctggttgcccattaacagagaacaaaaagccattgctaacttttgatgtttgggagcacgcatactatattgattatcgtaatgctagacctaaatatgttgaagcattatgggatatcgtaaactggcaatttgtttctgagcaattcgctgattag

SEQ ID NO: 105962 - protein, 192 aa, Francisella tularensis subsp. holarctica
MKFELPKLPYAVDALESTISKETIEYHYGKHHQTYVTNLNNLVEGTEHDGRNLEEIVKTSNGGIFNNAAQVFNHTFYWNCLTPNKTEASSQLKAALIETFGSVENFKEQFSKAAIATFGSGWAWLVKNTEGKLEIVTTSNAGCPLTENKKPLLTFDVWEHAYYIDYRNARPKYVEALWDIVNWQFVSEQFAD

SEQ ID NO: 105963 - DNA, 582 bp, Saccharophagus degradans 2-40
  CDS (1)..(582): transl_table=11
atggcttttgaacttcctgcattgccttatgcaaaagacgctctagctccacacatttccgaagaaactttagagtttcactacggcaaacatcatcaaacctacgtagataagctaaacggtttggtgccaggctcagaatttgaaggcaaaaccttagaagaaattatcaaaacttcttctggtggtgtatttaataacgctgcacaaatttggaaccacaccttttactggaactgcttaagccctaacggcggcggcgaagcgactggcgcagttggtgaagcaattgttgctgcttttggttctttcgaaaagtttaaagaagagttcactaactctgcaattaacaactttggttctgcatggacgtggttggtgaaaaaagcagatggcactgttgctattgtaaacacctctaacgccgctacgccattaactgatagcagtgttacgccactgttgactgttgatgtttgggagcacgcttactacatcgattaccgcaacagccgtcctaactacttaggtgcgttctggaaattggttaactgggactttgctaaccaaaacttcgcataa

SEQ ID NO: 105964 - protein, 193 aa, Saccharophagus degradans 2-40
MAFELPALPYAKDALAPHISEETLEFHYGKHHQTYVDKLNGLVPGSEFEGKTLEEIIKTSSGGVFNNAAQIWNHTFYWNCLSPNGGGEATGAVGEAIVAAFGSFEKFKEEFTNSAINNFGSAWTWLVKKADGTVAIVNTSNAATPLTDSSVTPLLTVDVWEHAYYIDYRNSRPNYLGAFWKLVNWDFANQNFA

SEQ ID NO: 105965 - DNA, 615 bp, Methylobacillus flagellatus KT
  CDS (1)..(615): transl_table=11
atggcatatacattaccccccctcgattatgcatatacggacctggaaccccatattgatgcacaaaccatggaaatccatcataccaagcatcaccagacttatatcaataatgtaaatgctgccctggagggcacgccatttgccgacgagcctatcgaagcgcttgtggccaaactcgacagcttgccggagaatctgcgcggcccggtgcgcaacaatggtggtggtcatgccaaccatagcctgttctggaaagtcatgtccccgaatggtggcggggaacctactggagccctggcagatgcgatcaagtctgacattggcggatttgatacattcaaggaagcctttaccaaggctgcactgacgcgtttcggcagcggttgggcatggctgtcggtgacgccagagaagaagctgatcgttgaaagcagtgccaaccaggacagccccttgtcgcatggcaatacgcctatcctgggtctggatgtctgggagcatgcgtactacctgcgctaccagaaccgccgtccggaatatatcggggcattcttcaatgtcatcaactgggacgaagttgcacgtcgctaccaggaagctatctctaaataa

SEQ ID NO: 105966 - protein, 204 aa, Methylobacillus flagellatus KT
MAYTLPPLDYAYTDLEPHIDAQTMEIHHTKHHQTYINNVNAALEGTPFADEPIEALVAKLDSLPENLRGPVRNNGGGHANHSLFWKVMSPNGGGEPTGALADAIKSDIGGFDTFKEAFTKAALTRFGSGWAWLSVTPEKKLIVESSANQDSPLSHGNTPILGLDVWEHAYYLRYQNRRPEYIGAFFNVINWDEVARRYQEAISK

SEQ ID NO: 105967 - DNA, 579 bp, Burkholderia xenovorans LB400
  CDS (1)..(579): transl_table=11
atggaacatacgctcccaccgctgccgttcgcgaaaaacgcactcgttccgcacatgtcggaagagacgctcgagtttcactacggcaagcatcaccagacctatgtgaccaacctgaacaatctgatcaagggcacggagttcgagaatctgtcgctcgaggaaatcgtcaagaaggcatcgggcggcgtattcaacaacgcggctcaagtgtggaatcacacgttcttctggaacagcctgtcgccgcaaggtggtggtgctccgagcggcgcgctcgccgacgcgatcaacgccaggtggggttcgttcgacaagttcaaggaagaattcgccaagaccgcagtcggcacgttcggctcgggttgggcatggctggtgaagaagcccgacggttcgctcgacctcgtgtcgacgagcaacgccgccacgccgctgaccaccgacgcgaaagcgctgctgaccatcgacgtctgggaacacgcttactacatcgattaccgcaatgcgcgtccgaagttcgtcgaagcgtactggaacatcgtcaactgggaattcgcgtcgaagaatttcgcgtga

SEQ ID NO: 105968 - protein, 192 aa, Burkholderia xenovorans LB400
MEHTLPPLPFAKNALVPHMSEETLEFHYGKHHQTYVTNLNNLIKGTEFENLSLEEIVKKASGGVFNNAAQVWNHTFFWNSLSPQGGGAPSGALADAINARWGSFDKFKEEFAKTAVGTFGSGWAWLVKKPDGSLDLVSTSNAATPLTTDAKALLTIDVWEHAYYIDYRNARPKFVEAYWNIVNWEFASKNFA

SEQ ID NO: 105969 - DNA, 579 bp, Ralstonia metallidurans CH34
  CDS (1)..(579): transl_table=11
atggaacacaagctcccttctctcccgtacgcgcatgatgccctcgctccgcatatctccaaggagaccctggagttccatcatgacaagcatcaccagacctacgtcacgaacctgaacaacctgatcaagggcaccgagttcgagagcgcatcgctggaagagatcgtcaagaagtcgtccggcggcatcttcaacaacgccgcccaagtgtggaaccacacgttctactgggaatcgatgaagccgaacggcggtggccagccgaccggcgccctggctgacgcgatcaacgccaagtggggttcgttcgacaagttcaaggaagaattcacgaaggtggcagtgggcacgttcggttcgggctgggcctggctggtcaagaaggccgacggctcgctggacctggtgtcgacctccaacgccgccaccccgctgaccaccgacgccaagccgctgctgacctgcgacgtgtgggaacacgcctactacatcgactaccgcaatgctcgtccgaagtacgtcgaggcattctggaacgtcgtgagctgggacttcgcgtcgaagaacttcgcctga

SEQ ID NO: 105970 - protein, 192 aa, Ralstonia metallidurans CH34
MEHKLPSLPYAHDALAPHISKETLEFHHDKHHQTYVTNLNNLIKGTEFESASLEEIVKKSSGGIFNNAAQVWNHTFYWESMKPNGGGQPTGALADAINAKWGSFDKFKEEFTKVAVGTFGSGWAWLVKKADGSLDLVSTSNAATPLTTDAKPLLTCDVWEHAYYIDYRNARPKYVEAFWNVVSWDFASKNFA

SEQ ID NO: 105971 - DNA, 612 bp, Acidobacteria bacterium Ellin345
  CDS (1)..(612): transl_table=11
atggcccacgaagtcccaccgttgccgtatgactattcggcgctggagcccacgatcgacacgcagacgatgcatttgcaccatgacaaacatcacctggcgtatgtaacgaatttgaacgccgcgctggaaaaggcgcctgaactgcaaagcaagagcgcggaagatctgttgaaggaccttaattccgttcctgaagccattcggacagcggtccgtaacaatggcggcggacatgtgaaccactcgatgttctgggcgatcatgggcccgaacgcgggcggcgagccgaccggcgagattgccgacgcgatcaactccacgttcggcagcttcgcgacactcaaagaaaagttcaacgaagccggcgtgaagcagttcggcagcggttgggcgtggcttgtgaagggagccgacggcaagttggcggtcaccagctcaccgaaccaggacaatccgatctctcagggacagttcccgatcctcggcaacgacgtctgggagcacgcctattatttgaagtaccagaaccgccgcgcagattacctgaaggaatggtggaacgtggtgaactggacggaagtgaatcgtcggctgaaacaagccaagtag

SEQ ID NO: 105972 - protein, 203 aa, Acidobacteria bacterium Ellin345
MAHEVPPLPYDYSALEPTIDTQTMHLHHDKHHLAYVTNLNAALEKAPELQSKSAEDLLKDLNSVPEAIRTAVRNNGGGHVNHSMFWAIMGPNAGGEPTGEIADAINSTFGSFATLKEKFNEAGVKQFGSGWAWLVKGADGKLAVTSSPNQDNPISQGQFPILGNDVWEHAYYLKYQNRRADYLKEWWNVVNWTEVNRRLKQAK

SEQ ID NO: 105973 - DNA, 582 bp, Myxococcus xanthus DK 1622
  CDS (1)..(582): transl_table=11
atgtcgttcacgttgcctgatctgccttacaagaaggacgccctcgcgccgcacatgagcgcggagacgctcgagttccaccacgacaagcaccacgccgcctacgtcaacaacctgaacaagctcctggacggcaagccggaggcgaacaagtcgctggaggaggtcatcctcagcagcgacggtggcgtgttcaacaacgccgcgcaggtgtggaaccacaccttcttctggcagtgcatgaagcccgctggcggcggcaagccgacgggtgagctcgcggcggccatcgaccgtgacttcggctccttcgagaagttcaaggaggagttctccacggccgcggccacgcagttcggctcgggctgggcctggctggtgctggagggcggcaagctcaaggtcaccaagacgggcaacgcggacctgccgatgaagcacggccagaaggccctgctgaccatcgacgtgtgggagcacgcgtattacatcgacttccggaacgcgcgtccgaagttcatcgagacgttcctgacgcacctggtgaactgggacttcgtggcccagaacttcaagggctag

SEQ ID NO: 105974 - protein, 193 aa, Myxococcus xanthus DK 1622
MSFTLPDLPYKKDALAPHMSAETLEFHHDKHHAAYVNNLNKLLDGKPEANKSLEEVILSSDGGVFNNAAQVWNHTFFWQCMKPAGGGKPTGELAAAIDRDFGSFEKFKEEFSTAAATQFGSGWAWLVLEGGKLKVTKTGNADLPMKHGQKALLTIDVWEHAYYIDFRNARPKFIETFLTHLVNWDFVAQNFKG

SEQ ID NO: 105975 - DNA, 624 bp, Mycobacterium sp. MCS
  CDS (1)..(624): transl_table=11
atggctgaatacaccttgcccgatcttgattacgattacggcgccctcgaaccgcacatctcggggcagatcaacgagcttcaccacagcaaacaccacgcgacgtatgtgaagggcgccaacgacgcgctgtccaagctggccgaggcgcgggagtccggagaccactccgcgatcttcctcaacgagaagaacctcgccttccatttgggtggacacgtcaaccacacgatctggtggaagaacctctctcccaacggtggcgacaagccgaccggtgagctggccgccgcgctcgacgacgcattcggctcgttcgacaacttccgcgcccagttcaccgccgcggccaacgggctgcagggctccgggtgggcggttctcggatacgacacgctgggccagcggctgctgaccttccagctgttcgaccagcaggcaaacgtgccgctgggcatcatcccgctgctgcaggtcgacatgtgggagcacgcctactacctgcagtacaagaacgtgaaggccgactacgtgaaggcgttctggaacgtcgtcaactgggaggacgtgcagaaccggttcgccaaggcaacgagttcggccagcggcatcatcgtcggctga

SEQ ID NO: 105976 - protein, 207 aa, Mycobacterium sp. MCS
MAEYTLPDLDYDYGALEPHISGQINELHHSKHHATYVKGANDALSKLAEARESGDHSAIFLNEKNLAFHLGGHVNHTIWWKNLSPNGGDKPTGELAAALDDAFGSFDNFRAQFTAAANGLQGSGWAVLGYDTLGQRLLTFQLFDQQANVPLGIIPLLQVDMWEHAYYLQYKNVKADYVKAFWNVVNWEDVQNRFAKATSSASGIIVG

SEQ ID NO: 105977 - DNA, 633 bp, Rubrobacter xylanophilus DSM 9941
  CDS (1)..(633): transl_table=11
atggcctacgaacttccgccactgccctacgactacaacgcgctggagccctacatagacgaggccaccatgcgcttccaccacgacaaccaccacaacacctacgtgaccaacctcaacgctgcgctcgagaagcacccggacgtggacccgggcaacgtggacgagctcatcgccgacctcaacgccatcccggaggacatccgccgggcggtgaggaacaacggcggccagcactccaaccactccatcttctggcagatcatggccccctccggcgccgggggcggcggggagccgaccggcgagctgggcgaggccataaacggcaccttcggctcctttgacgccttcaaggagcagttcgccgccgcggcggccccgggggcgctgttcggctcgggctggtgctggctggtggtgacctccggcggccagctggcgatcaagaccacccccaacggcgactcgccgtacatggagggcgagatccccgttatcgggctggactgctgggagcactcctactacctgaagtaccagtaccggcggccggagtacgtccagaactggtggaacgtggtgaactgggaggaggcgaaccgccgctaccaggcggcccgctcctcctga

SEQ ID NO: 105978 - protein, 210 aa, Rubrobacter xylanophilus DSM 9941
MAYELPPLPYDYNALEPYIDEATMRFHHDNHHNTYVTNLNAALEKHPDVDPGNVDELIADLNAIPEDIRRAVRNNGGQHSNHSIFWQIMAPSGAGGGGEPTGELGEAINGTFGSFDAFKEQFAAAAAPGALFGSGWCWLVVTSGGQLAIKTTPNGDSPYMEGEIPVIGLDCWEHSYYLKYQYRRPEYVQNWWNVVNWEEANRRYQAARSS

SEQ ID NO: 105979 - DNA, 603 bp, Mesorhizobium sp. BNC1
  CDS (1)..(603): transl_table=11
atggcctttgaactgccggacctgccctacgactatgaagctttgcagccttacatgtcgaaggaaacgctggaattccatcacgacaagcatcacaaggcctatgtggacacaggcaacaagcttgcggccgaagccgggctcgacaacctctcggtggaggaaatcgtcaagcagtcctatggcaagaatcagccgctcttcaacaatgccggccagcatttcaaccacgttcatttctggaaatggatgaagaagggtggcggcggcaagagcctgcccggcgcgctgcagacggcgatcgacagcgatctcggcggctatgacaagttccgcaacgatttcgtgcaggccggcatgacgcagttcggctctggctgggcatggattgcggtcaagaacggcaagctcgaaatcatgaagacgccgaatggcgagaacccgctggtccatggcggcgcgccgattctcggtgtcgatgtctgggagcactcctattacatcgattaccgcaacgcccggcagaaatatctggaagccttcgtcgataatctcgtcaactgggactacgtcctggagctttacgaaaaggcgcgcggctga

SEQ ID NO: 105980 - protein, 200 aa, Mesorhizobium sp. BNC1
MAFELPDLPYDYEALQPYMSKETLEFHHDKHHKAYVDTGNKLAAEAGLDNLSVEEIVKQSYGKNQPLFNNAGQHFNHVHFWKWMKKGGGGKSLPGALQTAIDSDLGGYDKFRNDFVQAGMTQFGSGWAWIAVKNGKLEIMKTPNGENPLVHGGAPILGVDVWEHSYYIDYRNARQKYLEAFVDNLVNWDYVLELYEKARG

SEQ ID NO: 105981 - DNA, 630 bp, Cytophaga hutchinsonii ATCC 33406
  CDS (1)..(630): transl_table=11
atggcttttgaattacctgcattaccgtatgctactaacgctttagaaccaaacattgatcaggctactatggaaattcaccatggcaagcaccacaatgcttatgtaacaaacttaaacaacgctattaaaggtacagatgctgagtctttatctattgaggagatctgcaaaaatatcagcaaatatactccggctatccgtaacaacggcggcggacatttcaatcactctttattctggactgtaatcgggcctaacgcaggcggaacaccaacaggtgagttagcaactgcaattgataaagcatttggttcttttgatgcatttaaagaacagtttgctgctgctggtgcaacacgtttcggatcaggatgggcttggttggttgttgctaatggtgaattaaaaatcacatcaactccaaatcaggataatccgttaatggatattgctgaagtaaaaggcacaccaattcttggccttgatgtttgggaacatgcgtattatttaaaatatcaaaacagaagacctgattatattgcagcattctggaatgttgtaaactggtcaaaagtttctgcgctttacagtgcagaaaaaaataatctgaacgtttctaatcaataa

SEQ ID NO: 105982 - protein, 209 aa, Cytophaga hutchinsonii ATCC 33406
MAFELPALPYATNALEPNIDQATMEIHHGKHHNAYVTNLNNAIKGTDAESLSIEEICKNISKYTPAIRNNGGGHFNHSLFWTVIGPNAGGTPTGELATAIDKAFGSFDAFKEQFAAAGATRFGSGWAWLVVANGELKITSTPNQDNPLMDIAEVKGTPILGLDVWEHAYYLKYQNRRPDYIAAFWNVVNWSKVSALYSAEKNNLNVSNQ

SEQ ID NO: 105983 - DNA, 624 bp, Rhodococcus sp. RHA1
  CDS (1)..(624): transl_table=11
atgtctgtttacacgctgccggaactcccgtacgactacgcagctctcgagccgcacatctccggcaagatcatggaactgcatcacgacaagcatcacgccgcgtacgtgaccggtgccaacacggccctcgacaagctggccgagctccgcgagtcggacaccctgcccgccgtggtcaacctgcacgagaagaacctcgccttccacttgggcggccacaccaaccactccgtcttctggaacaacctctcgcccgacggtggcgacaagccgaccggtgagctcgctgccgcgatcgacgaccagttcggcggcttcgacgcgttccgcaaccacttctcggccaacgccaacgccatccagggctccggctggtccatcctggcctgggactccatcggccagcgcctgctcatcgtccagctgtacgaccagcagggcaacatcccgatcggcctcacgccgctgctgctcctcgacatgtgggagcacgccttctacctcgactaccagaacgtcaagggcgactacgtcaaggccttctggaacatcgtgaactgggcggacgtcgccgctcgtttcgagaaggcacgcacgcagaccgcgggcctgatcgtctag

SEQ ID NO: 105984 - protein, 207 aa, Rhodococcus sp. RHA1
MSVYTLPELPYDYAALEPHISGKIMELHHDKHHAAYVTGANTALDKLAELRESDTLPAVVNLHEKNLAFHLGGHTNHSVFWNNLSPDGGDKPTGELAAAIDDQFGGFDAFRNHFSANANAIQGSGWSILAWDSIGQRLLIVQLYDQQGNIPIGLTPLLLLDMWEHAFYLDYQNVKGDYVKAFWNIVNWADVAARFEKARTQTAGLIV

SEQ ID NO: 105985 - DNA, 765 bp, Trichodesmium erythraeum IMS101
  CDS (1)..(765): transl_table=11
atgaatattaatcgtcgtcatttcttgcttttactaagtacaactttagggtttatgactgtaagtagttgtaagatatcactagataattcttctggatctgtaatagaatctactttaccgaatgatactaagttttcagaaaatttaggggtatttcaactaacacctttaccttatggatatgatgcattggaaccttatattgataaggaaactatggggtttcactatggtaaacattatgctggttatattaaaaagttaaatggggcgatcgctcaataccctaaacttaaggagtttactgctgaggagctattgcttggtttgaatagtttgcctcaggatattcgtactgctgtcagaaataatggtggtggttatgttaatcataaaatgttttgggaaattatggctcctaatggtgggggtaaacctgaaggaaaaatagctgttgctattgatgagagttttggtaattttgatggttttaaggaaaggtttaatgctgctggtgctgctcgttttggtagtggttgggtatggttggttttgggtaatgatggaaagttgaaggttattagcactcttaaccaagatagcccttttttgactgggaactatcccattatgggtaatgatgtttgggaacatgcttattatttgaggtatcaaaatcgtcgccgtgattatttgaatgcttggtggaatattgttaattggccggaggttaatcgtaggtatgagttggctcttcgttaa

SEQ ID NO: 105986 - protein, 254 aa, Trichodesmium erythraeum IMS101
MNINRRHFLLLLSTTLGFMTVSSCKISLDNSSGSVIESTLPNDTKFSENLGVFQLTPLPYGYDALEPYIDKETMGFHYGKHYAGYIKKLNGAIAQYPKLKEFTAEELLLGLNSLPQDIRTAVRNNGGGYVNHKMFWEIMAPNGGGKPEGKIAVAIDESFGNFDGFKERFNAAGAARFGSGWVWLVLGNDGKLKVISTLNQDSPFLTGNYPIMGNDVWEHAYYLRYQNRRRDYLNAWWNIVNWPEVNRRYELALR

SEQ ID NO: 105987 - DNA, 609 bp, Alkalilimnicola ehrlichei MLHE-1
  CDS (1)..(609): transl_table=11
atggctttcaagctgcccgatctggcttacgactataacgcgctggatcgcgccatcgacgcccagacgatggaaatccaccacaccaagcaccacaacacctacgtcaccaagctgaacgacgccatcgcgggcaagccggaggccgatctgtctctggaagacctcctgaagaaggccggccaactgggtgccccggtgcgtaacaacggcggtggccactggaaccataccgccttctggcagtggctgtcccccaacggtggcggtcaaccgcagggtgaggtggcccagcagatcgaccaggccttcggctcctacgagaagttccgtgaggagttcaccaacgccgccctgggccgcttcggctccggctgggcctggctgatcgtcaacggccagggccagctgcaggtcacctccacccccaaccaggacaacccgctgatggacgtggccgaggtcaagggcacccccatcctgggcctggatgtctgggagcacgcctactacctgcgctaccagaaccgccgtccggactacgtcgaggccttctgggacgtggtcaactgggacgaggtggcaaagcgcctggccgaggccaagtaa

SEQ ID NO: 105988 - protein, 202 aa, Alkalilimnicola ehrlichei MLHE-1
MAFKLPDLAYDYNALDRAIDAQTMEIHHTKHHNTYVTKLNDAIAGKPEADLSLEDLLKKAGQLGAPVRNNGGGHWNHTAFWQWLSPNGGGQPQGEVAQQIDQAFGSYEKFREEFTNAALGRFGSGWAWLIVNGQGQLQVTSTPNQDNPLMDVAEVKGTPILGLDVWEHAYYLRYQNRRPDYVEAFWDVVNWDEVAKRLAEAK

SEQ ID NO: 105989 - DNA, 738 bp, Hyphomonas neptunium ATCC 15444
  CDS (1)..(738)
atgtacagaacactcgctattgctacagccgcgctcggcgcagccgcctgcacgaccgtaacctccaccgcgcttgccagtgaacccgcagcgcctgtcgccactgaaacatccgccgccgctatcacatacaccctgccggacctgccctacgcgtatgacgcgctcgtgggctccattgatgcgcagaccatggaaattcaccacagcaagcaccacgcaggctatgtgaataacctcaacgccgcactggccgatgatgcggcgctcgcgtcgcaaccgcttgaagacctgctggcgaatgtatccacacattccaccgccatccgcaacaatggcggcggccactacaatcacaccctgttctggacgctcatggcgcccgcgggtgaaggtggcgcgccgtcaactgagctgcttgccgatattgatgcgaccttcggatcgctggacgctttcaagaccgaattcaacaaagccgccaccagccagttcggctccgggtgggcgtggcttgtcgttaccgatgacgggctgaaaatcacgtccacgcccaaccaggacaacccattgatggatgtcgccgctgtgcaaggcgagccgctcctggctgtcgatgtctgggagcacgcatattatctgagctaccagaatcgccgtgccgattatctcaagacatggtggaacgtcgtgaactggaacgaggtgaacagcctttacgaagcggctaagtcgtaa

SEQ ID NO: 105990 - protein, 245 aa, Hyphomonas neptunium ATCC 15444
MYRTLAIATAALGAAACTTVTSTALASEPAAPVATETSAAAITYTLPDLPYAYDALVGSIDAQTMEIHHSKHHAGYVNNLNAALADDAALASQPLEDLLANVSTHSTAIRNNGGGHYNHTLFWTLMAPAGEGGAPSTELLADIDATFGSLDAFKTEFNKAATSQFGSGWAWLVVTDDGLKITSTPNQDNPLMDVAAVQGEPLLAVDVWEHAYYLSYQNRRADYLKTWWNVVNWNEVNSLYEAAKS

SEQ ID NO: 105991 - DNA, 603 bp, Rhizobium leguminosarum bv. viciae 3841
  CDS (1)..(603): transl_table=11
atggctttcgaattgcctgaacttccctatgattacgaagcgcttgctcccttcatgtcgaaggaaacgctggagttccaccacgacaagcaccacaaggcctatgtcgacaacggcaacaagctcgccgccgaagccggtctttcggacctgtcgctcgaagacgtcgtcaagaagtccttcggcaccaatgccggcctcttcaacaacgcggcccagcactacaaccacatccatttctggaagtggatgaagaagggcggcggcggcaacaagctgccgggcaagctcgaagcggcctttacctccgatctcggcggctacgacaagttcaaggccgatttcgccactgccggcgccacccagttcggctccggctgggcctgggtttccgtcaagaacggcaagctcgaaatctccaagaccccgaacggcgaaaacccgctcgttcacggcgccaccccgatcctcggcgtcgacgtctgggaacactcctattacatcgactatcgcaacgcccgcccgaaatatctcgaggccttcgtcgacagcctgatcaactgggactacgtcctggaacgctacgaagcagccacgaagtaa

SEQ ID NO: 105992 - protein, 200 aa, Rhizobium leguminosarum bv. viciae 3841
MAFELPELPYDYEALAPFMSKETLEFHHDKHHKAYVDNGNKLAAEAGLSDLSLEDVVKKSFGTNAGLFNNAAQHYNHIHFWKWMKKGGGGNKLPGKLEAAFTSDLGGYDKFKADFATAGATQFGSGWAWVSVKNGKLEISKTPNGENPLVHGATPILGVDVWEHSYYIDYRNARPKYLEAFVDSLINWDYVLERYEAATK

SEQ ID NO: 105993 - DNA, 609 bp, Solibacter usitatus Ellin6076
  CDS (1)..(609): transl_table=11
atgccattcacacttcccccgctgccctacgcccccgacgcgttggagcctcacattgacaagatgactatggagattcatcacggcaagcatcacaacgcttacgtgaccaacctcaataaggctctggaatccgcccccgaactggccgataagaacatcgaggaactcctggccaacaattgcgccatcgtgccggagaagatccggaccgcggtgcgcaacaacggcggcgggcacatcaaccactccatgttctggaagatcatgggtcccaatggcggcggcgcgccggtgggcaacgtggcgcaggccatcacgggcgcgttcggcagcttcgacgcgttcaaggaaaagttcaacgccgccggggtgggtcgctttggatcgggttgggcctggcttctgaagacttcgagcggtgtggaaatcacctcgaccgccaaccaggatagcccgattatggagggcaaggtcccggtgttcggctgcgatgtctgggagcacgcgtattacctgaaatatcagaaccggcgtccggattatctggccgcatggtggaacgtggtcaactggaaggaaatcgaagaccgcttcaacgccaggtaa

SEQ ID NO: 105994 - protein, 202 aa, Solibacter usitatus Ellin6076
MPFTLPPLPYAPDALEPHIDKMTMEIHHGKHHNAYVTNLNKALESAPELADKNIEELLANNCAIVPEKIRTAVRNNGGGHINHSMFWKIMGPNGGGAPVGNVAQAITGAFGSFDAFKEKFNAAGVGRFGSGWAWLLKTSSGVEITSTANQDSPIMEGKVPVFGCDVWEHAYYLKYQNRRPDYLAAWWNVVNWKEIEDRFNAR

SEQ ID NO: 105995 - DNA, 621 bp, Mycobacterium smegmatis str. MC2 155
  CDS (1)..(621): transl_table=11
atggctgagtacaccctgcccgagctcgattacgactatgcggccctggaaccgcatatctccggacagatcaacgagattcaccacagcaagcaccacgccacctacgtcaagggcgtcaacgacgcgatcgccaagcttgaagaagcgcgcgccaacggcgatcacggcgcgatcttcctgcacgagaagaaccttgcgttccacctcggcgggcacgtcaaccacacgatctggtggaagaacctgtccccgcacggtggcgacaagccgaccggggatctcgcggctgcgatcgacgaccagttcggctcgttcgacaactttcgcgcgcagttcaccgcggccgccaacggtttgcaggggtccggctgggcggtgttgggctacgacaccctcggtgaccggctgctgaccttccagttgtacgaccagcaagcaaatgtcccactgggaatcatcccgctgttgctggtcgacatgtgggaacacgcgtactacctgcagtacaagaacgtcaaggccgactatgtgaaggcgatctggaacgtcgtcaactggcaagacgtacaggtgcgcttcgccgctgccaccggcaaggggccggacccgatcgtctga

SEQ ID NO: 105996 - protein, 206 aa, Mycobacterium smegmatis str. MC2 155
MAEYTLPELDYDYAALEPHISGQINEIHHSKHHATYVKGVNDAIAKLEEARANGDHGAIFLHEKNLAFHLGGHVNHTIWWKNLSPHGGDKPTGDLAAAIDDQFGSFDNFRAQFTAAANGLQGSGWAVLGYDTLGDRLLTFQLYDQQANVPLGIIPLLLVDMWEHAYYLQYKNVKADYVKAIWNVVNWQDVQVRFAAATGKGPDPIV

SEQ ID NO: 105997 - DNA, 597 bp, Magnetospirillum magnetotacticum MS-1
  CDS (1)..(597): transl_table=11
atggcttttgagcttccgccgctccccttcgccaacgacgcgctggagccccacatttccgcccgcaccttcgaattccatcacggcaagcatcacgcggcctatgtgaccaacctcaataacctgaccaaggacaccgacctggcgtccaagtccctggaagaggtgatcaaggtggccgcggccgatctgcctgccaagcagggcattttcaacaatgccgcccaggtgtggaaccacactttcttctggaactgcctgaagaagggtggcggcggcaagcctgggcctaagctgctggccaagatcgagtccgatctgggcggtttcgacaagttcaaggaagacttcaaggccgccgccgttggccagttcggctcgggctgggcctggctggtgctggacgggggcaagctgaagatcaccaagaccgccaatgccgacctgcccctggcccatggtcagaaggccctgctcaccgtcgatgtgtgggagcacgcctattacctggactggcagaaccgccgccccgatttcgtccagtgcttcctggacaatctggtgaactgggacttcgtggaagccaatctgggctga

SEQ ID NO: 105998 - protein, 198 aa, Magnetospirillum magnetotacticum MS-1
MAFELPPLPFANDALEPHISARTFEFHHGKHHAAYVTNLNNLTKDTDLASKSLEEVIKVAAADLPAKQGIFNNAAQVWNHTFFWNCLKKGGGGKPGPKLLAKIESDLGGFDKFKEDFKAAAVGQFGSGWAWLVLDGGKLKITKTANADLPLAHGQKALLTVDVWEHAYYLDWQNRRPDFVQCFLDNLVNWDFVEANLG

SEQ ID NO: 105999 - DNA, 780 bp, Nostoc punctiforme PCC 73102
  CDS (1)..(780): transl_table=11
atggctattaatcgacgcaatttcttgtttttacttacagcaggtgcgggtgcttttgcattagatgcttgtgcatcggcagagaaatctccaaatggaaatactgcaactcctgaaacaacaccaaatacaagactaaataaaacatcagataaaccaggtgctatccaactaccgcctttagcttacgcttacgaagcacttgaaccacacatcgatgctaaaacgatgcagtttcaccatgataaacaccacgcaacttatgttaaaaacttgaatgcagcgttagataaacacccagaacttaaaggcaaaactattgaagaactgttgcagaaacttgacagtgtaccacaagatattcgcagaacagtacgcaataatggtggtggccatgtgaaccactcaatgttctgggaaattatgaagccaaaaggtgggggagaaccaacaggaaatatagcttccgcaattaatcaaagttttggcagttttgcagctttcaaaaaacagtttaatgaagctggtgctagtcgttttggtagtggttgggtttggctagtgcgtaataaaggtggcaagttagaagtgacaactacagctaaccaagatagtcccttaagtacaggtaaatatcccattttaggtaatgacgtatgggaacatgcatactatctaaattaccagaatcgtcgcgccgattatttagatgcttggtggaacgtggttaattgggatgagattaacaagcggtttgcagcagcaaataaatttgcctga

SEQ ID NO: 106000 - protein, 259 aa, Nostoc punctiforme PCC 73102
MAINRRNFLFLLTAGAGAFALDACASAEKSPNGNTATPETTPNTRLNKTSDKPGAIQLPPLAYAYEALEPHIDAKTMQFHHDKHHATYVKNLNAALDKHPELKGKTIEELLQKLDSVPQDIRRTVRNNGGGHVNHSMFWEIMKPKGGGEPTGNIASAINQSFGSFAAFKKQFNEAGASRFGSGWVWLVRNKGGKLEVTTTANQDSPLSTGKYPILGNDVWEHAYYLNYQNRRADYLDAWWNVVNWDEINKRFAAANKFA

SEQ ID NO: 106001 - DNA, 630 bp, Haemophilus somnus 2336
  CDS (1)..(630): transl_table=11
atggcttatactttacctgaattaggttatgcttatgatgctttagaaccgcactttgatgcacaaactatggaactccatcatagtaaacaccatcaaacttacgttaataatgcaaatgcagcactagaaactttacctgagtttacagatctttgtccgggtcaattaattaccaaattagtcgaagttcctgctgataaacgtactgctattcgcaataatgttggtgggcatgtaaatcacagtttattttggaaaggtttaaaaacaggtacaactttacaaggcccattaaaagacgctattgagcgtgattttggttcagtagagagtttccaagctgagtttgagaaagccgctgcaactcgctttggttccggttgggcttggctagtattaaatcaaggcaaattagaagttgtttctaccgcaaaccaagatagtccattaatgggaaaagaaattgccggttgcgaaggtttccctattttggtattggatgtttgggaacatgcttactacttaaaattccaaaatcgtcgtccagattatatcaaggcattttggaatgtggtgaattgggatgctgctgctgaacgctttgagaaaaaaattaacaatgcttga

SEQ ID NO: 106002 - protein, 209 aa, Haemophilus somnus 2336
MAYTLPELGYAYDALEPHFDAQTMELHHSKHHQTYVNNANAALETLPEFTDLCPGQLITKLVEVPADKRTAIRNNVGGHVNHSLFWKGLKTGTTLQGPLKDAIERDFGSVESFQAEFEKAAATRFGSGWAWLVLNQGKLEVVSTANQDSPLMGKEIAGCEGFPILVLDVWEHAYYLKFQNRRPDYIKAFWNVVNWDAAAERFEKKINNA

SEQ ID NO: 106003 - DNA, 630 bp, Rickettsia sibirica 246
  CDS (1)..(630): transl_table=11
atgacctattgcaacaaatctaatcaaacctcatatccttttatcttacctgatttaccttatgagaaagaaagttttaaaccacattttactctcgagacttttgattatcatcatggtaagcatcataatacttatgtacaaaatctaaacaatttactcaaagataaagaagaattacaaaaaaaagatttagaagaaataatagaatggtcatcacaaaactcaaatgcagctatttttaataacgcagcccaaatatggaatcatacctttttttggcattcaataaagccgcagagcggaggtaagccaagcggtaaaatattagaacaaattaataaagatttcggtagttttgaagagttttgcgaacagtttaagcaagaggcagtagggcaattcggtagcggctgggcatggcttatatatcacgataataggttacaaattataaaaaccgctaatgccggtacacctatagcacacggtatgaagccgcttcttgcatgtgatgtatgggaacatgcttattatattgattatcgtaacaaacgacctgattatgttgacatatttattaagcatatgatcaactggaagtttgtagaagataacttaataaaataa

SEQ ID NO: 106004 - protein, 209 aa, Rickettsia sibirica 246
MTYCNKSNQTSYPFILPDLPYEKESFKPHFTLETFDYHHGKHHNTYVQNLNNLLKDKEELQKKDLEEIIEWSSQNSNAAIFNNAAQIWNHTFFWHSIKPQSGGKPSGKILEQINKDFGSFEEFCEQFKQEAVGQFGSGWAWLIYHDNRLQIIKTANAGTPIAHGMKPLLACDVWEHAYYIDYRNKRPDYVDIFIKHMINWKFVEDNLIK

SEQ ID NO: 106005 - DNA, 636 bp, Haemophilus influenzae R2866
  CDS (1)..(636): transl_table=11
atgtcttacactctccctgaattaggctatgcctacaatgcgttagaaccacattttgatgcgcaaacaatggaaatccatcatagtaaacaccaccaagcttacgtaaacaatgcaaatgctgcattagaaggtttacccgctgaattagtagaaatgtatccgggtcatttaatttctaaccttgataaaattcctgcagaaaaacgtggagcattacgtaataatgctggtggccacacaaaccacagtttattttggaaaagcttgaaaaaaggtactactttacaaggcgcattaaaagatgcgattgaacgcgatttcggttctgtagatgcatttaaagcagagtttgaaaaagcagcagcaactcgtttcggttcaggctgggcatggttagtattaaccgctgaaggtaaattagccgttgtatcaacagcaaaccaagataacccattaatgggtaaagaagtggcaggttgtgagggtttcccacttttaggtttagacgtttgggaacacgcttactacttaaaattccaaaaccgtcgtccagactacattaaagaattctggaatgtggtaaactgggatttcgttgcagaacgttttgaacaaaaaaacagcacactgtaa

SEQ ID NO: 106006 - protein, 211 aa, Haemophilus influenzae R2866
MSYTLPELGYAYNALEPHFDAQTMEIHHSKHHQAYVNNANAALEGLPAELVEMYPGHLISNLDKIPAEKRGALRNNAGGHTNHSLFWKSLKKGTTLQGALKDAIERDFGSVDAFKAEFEKAAATRFGSGWAWLVLTAEGKLAVVSTANQDNPLMGKEVAGCEGFPLLGLDVWEHAYYLKFQNRRPDYIKEFWNVVNWDFVAERFEQKNSTL

SEQ ID NO: 106007 - DNA, 915 bp, Bacillus cereus G9241
  CDS (1)..(915): transl_table=11
atgagtcagcaaggtgtatttacagattactttcatgaagtagaaagctggtgtgaaagtgttcttcacgtattagatagccgtgcaatggaagtgtatgatgtccatatgcttgcttataaaattcaaacgttattagaccgtatgaaagagcatgagtatgatacagatgcagagtttatgtatgaaataagtgatgatgtagaacatattcagcatcatttgcaggaagtatttatgcagggagaagaggaatatgaactatatgaaagaggggatagtgaacgagctgttccaattggagggcatacactcccgccattaccatatccgtataatgcgttagaaccgcatatatctagagaaattatgatgttacaccatgataaacaccatcgcagttacgtggaaggattaaataaggcagagaagatgatggaagaagcgagaaaaacaaatcaatttgatttaattaagcattgggaaagagaagcggcctttcatggatcaggtcattacttacacacgatattttggaataacatgaaaaaaggtggcggcggaagtccaaggggggcactttcacaccggattgaacaagattttggaagtttcttgcgttttcaaaaacatttcacagaagcagcctccaaagtggaaggttcaggatgggcgattctcgtttgggttccacgatcaggaagattagaaattttgcagagtacacttcatcaattatttacacaatgggatacgataccgctccttgtactagatgtgtgggaacatgcgtattatttacaatatcaaaatcgaaaagatgaatatattaaaaattggtggaatgttgtaaattggcctgatgtagaaaaaagatttgaaagtgcaaaacaaatagaatggacaccgtattag

SEQ ID NO: 106008 - protein, 304 aa, Bacillus cereus G9241
MSQQGVFTDYFHEVESWCESVLHVLDSRAMEVYDVHMLAYKIQTLLDRMKEHEYDTDAEFMYEISDDVEHIQHHLQEVFMQGEEEYELYERGDSERAVPIGGHTLPPLPYPYNALEPHISREIMMLHHDKHHRSYVEGLNKAEKMMEEARKTNQFDLIKHWEREAAFHGSGHYLHTIFWNNMKKGGGGSPRGALSHRIEQDFGSFLRFQKHFTEAASKVEGSGWAILVWVPRSGRLEILQSTLHQLFTQWDTIPLLVLDVWEHAYYLQYQNRKDEYIKNWWNVVNWPDVEKRFESAKQIEWTPY

SEQ ID NO: 106009 - DNA, 765 bp, Crocosphaera watsonii WH 8501
  CDS (1)..(765): transl_table=11
atgaaaatttccaatcgggctaatttcttatttttcgggattgttcttctaatttgctgtctctggggtaacttaaataacgcccccatttactcagcagttccatcttatactactagagttagtcaaatagcccaaactagcaatggtgattttgttcaagctcctttaccttatgattacaatgctttagagccttttatagacgctaaaactatggaaattcactatactgggcatcatggaggctatctcaaaaagtttaagaaaaccctggaaaaacacccagaattaaagggaaaaacccttgagcaaatactaggaaatattgacaacattccctcagatattcgtacttcaattcgtaataacggtggtggtcattacaatcatactgtattctgggcgattatgactcctaatggtggtggtgaacccaatggtgagtttgctacagctattaataattcttttggtagttttgaagagtttaaggcgcaatttaaggctgaatcttttaaacgttttggtagtggttgggtttggttagttagagataaaaatggtcgtctagaaattaccagttcaccaggacaagataaccctatcatggaaggaaaatatcccattttaggtactgatgtttgggaacacgcttattatctcaattataaaaattctcgaggaagctatgtcgatgcttggtggaataccatcaattgggatgaggtaaacgcgcgatttaaagaatcacaaaccgtttaa

SEQ ID NO: 106010 - protein, 254 aa, Crocosphaera watsonii WH 8501
MKISNRANFLFFGIVLLICCLWGNLNNAPIYSAVPSYTTRVSQIAQTSNGDFVQAPLPYDYNALEPFIDAKTMEIHYTGHHGGYLKKFKKTLEKHPELKGKTLEQILGNIDNIPSDIRTSIRNNGGGHYNHTVFWAIMTPNGGGEPNGEFATAINNSFGSFEEFKAQFKAESFKRFGSGWVWLVRDKNGRLEITSSPGQDNPIMEGKYPILGTDVWEHAYYLNYKNSRGSYVDAWWNTINWDEVNARFKESQTV

SEQ ID NO: 106011 - DNA, 609 bp, Exiguobacterium sibiricum 255-15
  CDS (1)..(609)
atgtcaaaatttgaattaccagaactcggctacgcttatgatgcgctagagccacatatcgatgctcgtacgatggagattcaccactctaaacaccacaatacgtatgtcacgaacgtgaatgcagcacttgaagggtcagagcacgaagggaaatcacttgaagaattacttcaaaaccttgattcacttcctgcaaacattcaaacagctgtccgtaacaatggtggcggtcactggaaccactcgttcttctggaaactcttgaaaaagaacgacggagcagctccaactggagaactcgctacagcaatcgatgaagcattcggttcatttgatgcatttaaagatgagtttacaaaagcagcaacaacacgtttcggttctggttgggcatggctcatcgttgacggcggcaaattagcagtcgtttcaacaccaaaccaagacacaccagtcatggaagggaaaacgccgattcttggacttgatgtttgggaacatgcgtattacctcaactatcaaaaccgtcgtccggattacatcaacgcattctttaatgtcgttgactgggatcacgtggcaaaactttacgctgacgcaaaataa

SEQ ID NO: 106012 - protein, 202 aa, Exiguobacterium sibiricum 255-15
MSKFELPELGYAYDALEPHIDARTMEIHHSKHHNTYVTNVNAALEGSEHEGKSLEELLQNLDSLPANIQTAVRNNGGGHWNHSFFWKLLKKNDGAAPTGELATAIDEAFGSFDAFKDEFTKAATTRFGSGWAWLIVDGGKLAVVSTPNQDTPVMEGKTPILGLDVWEHAYYLNYQNRRPDYINAFFNVVDWDHVAKLYADAK

SEQ ID NO: 106013 - DNA, 606 bp, Prosthecochloris aestuarii DSM 271
  CDS (1)..(606): transl_table=11
atggcataccaacaaccttcgctaccatacgctgaaaacgctcttgaaccctatatttcagccaacaccatcagcttccactacggaaagcatcatgcaacatatgtcaagaagttcaatgaaatggttgcaggcacaccattagaccagcaaagtatagaagaggtcgttaaaactgttgccggagatgcctccaaggccggtattttcaataacggcgcacaggcatggaaccacagcttttactggaactgtctctctcccgacggcggaggaaaaccatcgggaagcctcgccgacaagatcgaccaggatttcggcagttatgacacgttccgtgaagaactcgccaatgcagctgcgactcagtttggaagcggatgggcctggcttgtcctcgataacggaacgctcaaagtgaccaaaaccgccaatgcacagacccctgtcactgaaggcatgacccccatcctcactattgatgtgtgggagcacgcctactaccttgactaccagaacaggcgccctgattatgtggccagtctgattgacaatcttgtcaactgggacttcgcaaccagcaacttcgaagctgccggtgcgtaa

SEQ ID NO: 106014 - protein, 201 aa, Prosthecochloris aestuarii DSM 271
MAYQQPSLPYAENALEPYISANTISFHYGKHHATYVKKFNEMVAGTPLDQQSIEEVVKTVAGDASKAGIFNNGAQAWNHSFYWNCLSPDGGGKPSGSLADKIDQDFGSYDTFREELANAAATQFGSGWAWLVLDNGTLKVTKTANAQTPVTEGMTPILTIDVWEHAYYLDYQNRRPDYVASLIDNLVNWDFATSNFEAAGA

SEQ ID NO: 106015 - DNA, 612 bp, Xylella fastidiosa Ann-1
  CDS (1)..(612): transl_table=11
atggcttacacccttcccatcctgccttacgcttacgatgcgttggaaccacacattgatgcccagacaatggaaatccattacaccaagcaccatgccacctatatcaataatcttaatgctgcgttggaaggaacggagtacgcggatttgcccattgaagaattgctccgtagattgaaaagtttgccggaaagcttgcagggggcagtacgaaacaacggcggtggtcacgccaatcattccctgttctggacggtgatggctcaggatggcggcggcaagccgaaaggagaggttgctaaagcgattgaccagcagctgggtggttttgagacattaaaagatgcttttaccaaagctgcactcagtcgtttcggctccggttggtcattgctaaacgtcactccgagcaaaactttggtggttgaaagcagcgctaatcaggacagccctctatgcgatggtaagacgcctattttgtgcttggatgtgtgggaacatgcatattacttgcactatcagaatcgtcgtgccgattacgttaatgcgttctacaacgtgattaactgggatgaggttgagcgacgctatgtggctgcgatgagctga

SEQ ID NO: 106016 - protein, 203 aa, Xylella fastidiosa Ann-1
MAYTLPILPYAYDALEPHIDAQTMEIHYTKHHATYINNLNAALEGTEYADLPIEELLRRLKSLPESLQGAVRNNGGGHANHSLFWTVMAQDGGGKPKGEVAKAIDQQLGGFETLKDAFTKAALSRFGSGWSLLNVTPSKTLVVESSANQDSPLCDGKTPILCLDVWEHAYYLHYQNRRADYVNAFYNVINWDEVERRYVAAMS

SEQ ID NO: 106017 - DNA, 741 bp, Xylella fastidiosa Ann-1
  CDS (1)..(741): transl_table=11
atgttttttttgagacaaggtcacttaacactctgcttgattgctgcattgcttgcttcgtccccatcttttgcttcgacacaaccacaaaccgcgccgttcacactgccgccactcccctacgctgtcagcgcgctggagccggcgattgatacgcagaccatgacgttacatcacgacttccatcacaaggcctacgtagataacctcaatgctgcaatcaaggatataccgacactctccggaaaaacgctggagcaacttctggccatcacatccacgttgccgccagtggtacgaaacaacgccggcggccactggaatcacagcgagttctggaagatgatggctccggttggcaagggagggaaaccatcggcagcgctggaagcacaaattaaaaaggactttggttcactagacgctttcaaggagcgcttcaacaaagccgcaacaggtcgtttcggctcgggctgggcttggatgatattgaccagtagcggactgcagatcacatcaacacccaatcaggataacccactgatggatgtggcagaggtacgcggtcagccattgctagccttagatgtttgggagcatgcgtactatctcaagtacaagtacaaacgtgctgattatctgaacgcttggtggacagttgtgaactggaatgaggtcaatcatttattcgaagtggcaaaaaaggatcaacataagcgaatcattaatccccagcattaa

SEQ ID NO: 106018 - protein, 246 aa, Xylella fastidiosa Ann-1
MFFLRQGHLTLCLIAALLASSPSFASTQPQTAPFTLPPLPYAVSALEPAIDTQTMTLHHDFHHKAYVDNLNAAIKDIPTLSGKTLEQLLAITSTLPPVVRNNAGGHWNHSEFWKMMAPVGKGGKPSAALEAQIKKDFGSLDAFKERFNKAATGRFGSGWAWMILTSSGLQITSTPNQDNPLMDVAEVRGQPLLALDVWEHAYYLKYKYKRADYLNAWWTVVNWNEVNHLFEVAKKDQHKRIINPQH

SEQ ID NO: 106019 - DNA, 741 bp, Xylella fastidiosa Ann-1
  CDS (1)..(741): transl_table=11
atgttttttttgagacaaggtcacttaacactctgcttgattgctgcattgcttgcttcgtccccatcttttgcttcgacacaaccacaaaccgcgccgttcacactaccgccactcccctacgctgtcagcgcgctggagccggcgattgatacacagaccatgacgttacatcacgacttccatcacaaggcctacgtagataacctcaatgctgcaatcaaggatataccgacactctccggaaaaacgctggagcaacttcttgccatcacatccacgttgccgccagtggtacgaaacaacgccggcggccactggaatcacagcgagttctggaagatgatggctccggttggcaagggagggaaaccatcggcagcactggaagcacaaattaaaaaggactttggttcactagacgctttcaaggagcgcttcaacaaagccgcaacaggtcgtttcggttcaggttgggtttggatgatattgaccagtagcggactgcagatcacatcaacacccaatcaggataacccactgatggatgtggcagaggtacgcggtcaaccattgctagccttagatgtttgggagcatgcgtactatctcaagtacaagtacaaacgtgctgattatctgaacgcttggtggacagttgtgaactggaatgaggtcaaccatttattcgaagtggcaaaaaaggatcaacataagcgaatcattaatccccagcattaa

SEQ ID NO: 106020 - protein, 246 aa, Xylella fastidiosa Ann-1
MFFLRQGHLTLCLIAALLASSPSFASTQPQTAPFTLPPLPYAVSALEPAIDTQTMTLHHDFHHKAYVDNLNAAIKDIPTLSGKTLEQLLAITSTLPPVVRNNAGGHWNHSEFWKMMAPVGKGGKPSAALEAQIKKDFGSLDAFKERFNKAATGRFGSGWVWMILTSSGLQITSTPNQDNPLMDVAEVRGQPLLALDVWEHAYYLKYKYKRADYLNAWWTVVNWNEVNHLFEVAKKDQHKRIINPQH

SEQ ID NO: 106021 - DNA, 609 bp, Croceibacter atlanticus HTCC2559
  CDS (1)..(609): transl_table=11
atgtctttcgaattaccgaaactaaaatacgcgcatgacgcactagagccacatattgatgaaaagaccatgactatacaccatggaaagcatcaccaaggttatacaaataaattaaacgcagcaattgagggaacagatcttgaaggcaagactattgaaaatatcttgacaaatttagagatgagcaatacagccgttagaaataatggtggtggtttctttaatcacagactattttgggaagtgatgtctccagatggtggcggaaagcctaccggagaacttgctgaagccattgatgctaagtttggttcttttgaagcttttaaagacgaattttcaagtcaagctggaggccagtttggttctggttgggcttggctttgtgtacaagaaggtggtaaagtagaagtgtgttctacagctaatcaagataacccacttatgccaggaattggttgtggtggttaccctatcttagggttagatgtttgggaacatgcatattacttaaactatcaaaaccgtcgtccagattacgtaaatgcattttttaatgtgattgattggacagaggtttctaagcgttatgcagagaataaataa

SEQ ID NO: 106022 - protein, 202 aa, Croceibacter atlanticus HTCC2559
MSFELPKLKYAHDALEPHIDEKTMTIHHGKHHQGYTNKLNAAIEGTDLEGKTIENILTNLEMSNTAVRNNGGGFFNHRLFWEVMSPDGGGKPTGELAEAIDAKFGSFEAFKDEFSSQAGGQFGSGWAWLCVQEGGKVEVCSTANQDNPLMPGIGCGGYPILGLDVWEHAYYLNYQNRRPDYVNAFFNVIDWTEVSKRYAENK

SEQ ID NO: 106023 - DNA, 600 bp, Oceanicola batsensis HTCC2597
  CDS (1)..(600): transl_table=11
atggccttcgaacttcccgatctcccctatgcccacgacgcgctcgccgatctcggcatgtccaaggaaacgatggaatatcatcatgatatccaccacaaggcctatgtcgacaacggcaacaaggcgattgccgggaccgagtgggaaggcaagtccgccgaagagatcatcaagggcacctacgatccgaacgccgtcgcgcagaacggcatcttcaacaacgcctcgcaatactggaaccacaaccagttctgggaaatgatggcgccaggcgagaagaagatgccgggcgagctggagaaggccctgaccgaggccttcgggtcggtcgacaagttcaaggaagaattctccgccgccggtgccggccagttcggctcgggctgggcctggctggtcaaggaccaggacggctcgctcaaggtcaccaagaccgagaacggcgtgaacccgctctgcttcaaccagaccgcgcttctgggctgcgacgtgtgggagcactcctactacatcgacttccgcaacaagcgcccggcctatctgtcgaacttcctcgacaagctggtgaactgggaaaacgtcgcctcgcggatgtga

SEQ ID NO: 106024 - protein, 199 aa, Oceanicola batsensis HTCC2597
MAFELPDLPYAHDALADLGMSKETMEYHHDIHHKAYVDNGNKAIAGTEWEGKSAEEIIKGTYDPNAVAQNGIFNNASQYWNHNQFWEMMAPGEKKMPGELEKALTEAFGSVDKFKEEFSAAGAGQFGSGWAWLVKDQDGSLKVTKTENGVNPLCFNQTALLGCDVWEHSYYIDFRNKRPAYLSNFLDKLVNWENVASRM

SEQ ID NO: 106025 - DNA, 690 bp, Synechococcus sp. RS9917
  CDS (1)..(690): transl_table=11
atgttgcgcctgattcgcacctgctgcgcagcacttctggtgttggttgccgctgcggcaccggcctgggcccagttcagcttgccaccgttgccctacccagtggaagccctggaaccggcgatcgacgccagcaccatgacgctccatcacgatcgccatcacgccgcttacgtgagcaacctgaatggccagatcagggccaaccctgccttgcaatccctggatctcgagacactccaggggcagatctcccgcttcccgctcgcagtgcgtaacaacggcggtggacattggaatcacagccaattctgggcagtgatggcaccgccaggcgagggcgggatgccctcagacgatctgttggcagcaatcacctcgagctttggatcgctggacgccatgaaaaaggaattctcgcaagctgccgccagccgattcggttctggctgggcctggctgatccgcaccgacgacggaaacctggcgatcaccagcacagccaaccaagacaatcccttgatggacctcccggggatcgagagcggtacgccgctgctcggcctcgatgtctgggagcatgcttactacctcaagtatcaaaatcgcagggttgactacatcagttcttggtgggatctggtgaactggactgaggtgaaccgacgctataaccaggcactcgcatga

SEQ ID NO: 106026 - protein, 229 aa, Synechococcus sp. RS9917
MLRLIRTCCAALLVLVAAAAPAWAQFSLPPLPYPVEALEPAIDASTMTLHHDRHHAAYVSNLNGQIRANPALQSLDLETLQGQISRFPLAVRNNGGGHWNHSQFWAVMAPPGEGGMPSDDLLAAITSSFGSLDAMKKEFSQAAASRFGSGWAWLIRTDDGNLAITSTANQDNPLMDLPGIESGTPLLGLDVWEHAYYLKYQNRRVDYISSWWDLVNWTEVNRRYNQALA

SEQ ID NO: 106027 - DNA, 600 bp, Synechococcus sp. RS9917
  CDS (1)..(600): transl_table=11
atggcccatacccttcctgctctgccctacgccctcgatgcgctcgagccgcacatttcccgctccaccctggagtttcaccacggcaaacaccacaacgcctacgtcgccaatctgaacaaggcgattgaaggcaccgatcttgacggcaagagcctggaggaggtcatcaccgccgtggctggcgatgccagcaaggccggtgtgttcaacaatgccgcccaagtgtggaaccacagcttctattggcagtgcatgaagcccggtggcggtggccagcccagcggcgccctgctggagaagatcaacgccgacttcggtagctacgacgcgtttgtggagcagttcaaggcggctggtgccacgcagttcggcagcggctgggcctggctggtgctcgacaacggcagcctgaagatcaccaaaaccgccaacgccgacctgcccctggcccatggtcagaaggccctgctcaccatggatgtttgggagcacgcttactacctcgactaccagaatcgccgccccgattacatcagcacctacctcgacaagttggtgaactgggatttcgtggccgccaatctggccgccgcctga

SEQ ID NO: 106028 - protein, 199 aa, Synechococcus sp. RS9917
MAHTLPALPYALDALEPHISRSTLEFHHGKHHNAYVANLNKAIEGTDLDGKSLEEVITAVAGDASKAGVFNNAAQVWNHSFYWQCMKPGGGGQPSGALLEKINADFGSYDAFVEQFKAAGATQFGSGWAWLVLDNGSLKITKTANADLPLAHGQKALLTMDVWEHAYYLDYQNRRPDYISTYLDKLVNWDFVAANLAAA

SEQ ID NO: 106029 - DNA, 600 bp, Synechococcus sp. WH 5701
  CDS (1)..(600): transl_table=11
atggctcacacgctgcccgctctcccttacgacatcaacgcgctcgagccccatatctctcagaccaccctcgagtttcaccacggcaagcaccacgccgcctacgtcgccaacctcaacaaacttctggacggcaccgatctcgacggcaagagccttgaggacgtgatcaccagcgtggcgggtgatgcctccaaggccggagtgttcaacaacgctgcccaggtgtggaaccacagcttctactggcagtgcatgaagcccgggggcggcggccagcccagcggtgcccttgccgagaagatcaacgccgatttcggtagcttcgaagccttcgtggagcagttcaagactgccggcgccacccagttcggtagtggctgggcctggctgatcctcgatggcgggacgctcaagatcaccaagaccgccaacgcggatctgcccctggcccacggtcagaaggctctcctcacgatggatgtttgggagcacgcctactacctcgattaccagaacaagcgcccggattacatgaccaccttcctggagaagctggtgaactgggacttcgtggccgccaacctggccgccgcctga

SEQ ID NO: 106030 - protein, 199 aa, Synechococcus sp. WH 5701
MAHTLPALPYDINALEPHISQTTLEFHHGKHHAAYVANLNKLLDGTDLDGKSLEDVITSVAGDASKAGVFNNAAQVWNHSFYWQCMKPGGGGQPSGALAEKINADFGSFEAFVEQFKTAGATQFGSGWAWLILDGGTLKITKTANADLPLAHGQKALLTMDVWEHAYYLDYQNKRPDYMTTFLEKLVNWDFVAANLAAA

SEQ ID NO: 106031 - DNA, 696 bp, Synechococcus sp. WH 5701
  CDS (1)..(696): transl_table=11
atgcgacggatccttgccgctctggtggccctgccgctgctggtgctgctgctctggcccggccatggggcctgggcggcggcgccagccttcacgctcccggcgcttccctatgccgccaatgccctggagccggcgatcgatgccaccacgatgacgatccaccacgaccgtcatcaccaggcctacgtggacaacctcaacgctgccttggccagggatccggccctgaggggccttgatctcgaagagctgctggcgcgggcttctggagccccggaggctgtgcgcaacaacgccggcggccactggaaccattcgtttttctgggcctcgctcacccggcccggacagggaggtgagcccagctcagccttgcaagaggccctggtccgcgacttcggctcgatcgagcagttccgtgctgccttccgggctgcgggtctggctcgcttcggctcgggctgggtgtggctgatcactgattcggagggcaagcttcaggtggtctccaccccaaaccaggacaatcccctgatggacctggctccggtgggcggcacgcccctgctggccaacgacgtctgggagcacgcctactacctcaagtaccagaaccgccgcgccgactacctcgacgcctggtggtccgtggtcgattggtcggtggtgtccgatcgctatgccacccgctag

SEQ ID NO: 106032 - protein, 231 aa, Synechococcus sp. WH 5701
MRRILAALVALPLLVLLLWPGHGAWAAAPAFTLPALPYAANALEPAIDATTMTIHHDRHHQAYVDNLNAALARDPALRGLDLEELLARASGAPEAVRNNAGGHWNHSFFWASLTRPGQGGEPSSALQEALVRDFGSIEQFRAAFRAAGLARFGSGWVWLITDSEGKLQVVSTPNQDNPLMDLAPVGGTPLLANDVWEHAYYLKYQNRRADYLDAWWSVVDWSVVSDRYATR

SEQ ID NO: 106033 - DNA, 582 bp, Pseudoalteromonas tunicata D2
  CDS (1)..(582): transl_table=11
atggcatttgaactaccgtctttaccttatgcaattgatgcacttgtaccacatatttcacaagaaactttagagtttcaccacggtaaacaccacaacacgtatgttgttaaattaaacggtttaatcgctggtactgattttgaaaacaaatctttagaagaaatcgttcgtacttctgaaggcggtgtttttaataatgcagctcaaatctggaatcatactttctactggcacagtttatcaccaaatggtggtggcgagcctactggcgcagtagcagctgcaattgatgcaaaatggggctcattcgctgcatttaaagaagcatttaacgacaaagctgtaaacaactttggctcaagctggacatggttagtccaactagctgatggctctttagatatcgtcaatacatcaaatgctgcaacaccgcttacacaagaaggtgttacaccattaatgactgtagatttatgggaacatgcatattacatagattaccgtaatgtgcgtccagaatacctaaatggtttttgggcattagtaaactgggaatttgcaaacgcaaacctagcttaa

SEQ ID NO: 106034 - protein, 193 aa, Pseudoalteromonas tunicata D2
MAFELPSLPYAIDALVPHISQETLEFHHGKHHNTYVVKLNGLIAGTDFENKSLEEIVRTSEGGVFNNAAQIWNHTFYWHSLSPNGGGEPTGAVAAAIDAKWGSFAAFKEAFNDKAVNNFGSSWTWLVQLADGSLDIVNTSNAATPLTQEGVTPLMTVDLWEHAYYIDYRNVRPEYLNGFWALVNWEFANANLA

SEQ ID NO: 106035 - DNA, 585 bp, Photobacterium sp. SKA34
  CDS (1)..(585): transl_table=11
atggcatttgaattaccagctctacctttcgcaatgaacgctcttgagccacacatttctcaagaaactcttgaataccactacggtaagcaccacaacacttacgttgtaaagctaaacggtcttgttgaaggtacagagcttgctgaaaagtcacttgaagatatcatcaaatcttcaactggcggcgtatttaacaatgcagctcaagtgtggaaccacacgttctactggaactgtctagcaccaaatgctggcggtgaaccaacaggtgaagtagctgaagctatcgtaaaagcattcggttctttcgctgatttcaaagcaaaattcacagattcagcaattaacaacttcggttcttcatggacttggttagttaagaaagctgacggctctctagagatcgttaacacttctaacgctggctgcccaatcacagaagaaggtgttacacctctactaactgttgacctatgggaacacgcttactacatcgactaccgcaacctacgtccaagctacatggatggtttctggtcactagtaaactgggatttcgttgctaaaaatctagctgcttaa

SEQ ID NO: 106036 - protein, 194 aa, Photobacterium sp. SKA34
MAFELPALPFAMNALEPHISQETLEYHYGKHHNTYVVKLNGLVEGTELAEKSLEDIIKSSTGGVFNNAAQVWNHTFYWNCLAPNAGGEPTGEVAEAIVKAFGSFADFKAKFTDSAINNFGSSWTWLVKKADGSLEIVNTSNAGCPITEEGVTPLLTVDLWEHAYYIDYRNLRPSYMDGFWSLVNWDFVAKNLAA

SEQ ID NO: 106037 - DNA, 615 bp, Photobacterium sp. SKA34
  CDS (1)..(615): transl_table=11
atgaaacatttattcccaaaactaccttatgactttaatgcattagaaccttatcttgatgcaagaactgttgagatccactatagcaaacaccatagaggttattttgataagtttatggctgcgattaaaaatacagatctcaatgaccagaccattgaaactattttaagcaatatatctcaataccctgcagcagttcgtaataatggcggtggtttctataatcacaacctttactggcaatgtatgtcacccgaaggcgttcgtcatccatcaggtttacttgcagaagcaattaatgcccattttgaaagttttgctaagttcaaagagtcattttcaacattagctgccaatcattttggtgccggatttatttggctctctgttgtagatggacgacttgagatctcatcaacgccgaatcaagacaacccgttaatggatacggtaacagtacaaggttctccaattctggcgcttgatgtatgggaacatgcttactacttgagttatcaaaacgttcgtcctgattacattgatgcatggtggcatttaatcgattgggaacaagttgaaataaactaccttagcgcgttacaggctttctaa

SEQ ID NO: 106038 - protein, 204 aa, Photobacterium sp. SKA34
MKHLFPKLPYDFNALEPYLDARTVEIHYSKHHRGYFDKFMAAIKNTDLNDQTIETILSNISQYPAAVRNNGGGFYNHNLYWQCMSPEGVRHPSGLLAEAINAHFESFAKFKESFSTLAANHFGAGFIWLSVVDGRLEISSTPNQDNPLMDTVTVQGSPILALDVWEHAYYLSYQNVRPDYIDAWWHLIDWEQVEINYLSALQAF

SEQ ID NO: 106039 - DNA, 582 bp, Oceanospirillum sp. MED92
  CDS (1)..(582): transl_table=11
atgagctttgaacttccgccgctaccttatgcaaaggacgctctggaaccacacatctccgctgaaactctggacttccaccacggcaaacaccacaacacttacgttgttaagctgaacggtctggttcctggtactgagtacgaaggtaaaactctggaagagatcatcacttctgcgccagctggcggcgttttcaacaacgcagctcagatctggaaccacactttctactggaactgcctgtctccaaacggtggcggtgagccaacaggtgcgatcgctgatgctatcaatgctaaatggggctcttttgctgcattccaggaagaactgaacgacaaagctgtaaacaactttggttctagctggacatggttggttaaaaacgctgacggttctatcgagatcgttaacactagcaacgctggctgcccactgactgaaggtcagactccactgctaaccgttgacctgtgggaacacgcttactacatcgattaccgtaacgttcgtcctgattacctgaaaggtttctgggcgctggtaaactgggactttgttaacgaaaacttcgcataa

SEQ ID NO: 106040 - protein, 193 aa, Oceanospirillum sp. MED92
MSFELPPLPYAKDALEPHISAETLDFHHGKHHNTYVVKLNGLVPGTEYEGKTLEEIITSAPAGGVFNNAAQIWNHTFYWNCLSPNGGGEPTGAIADAINAKWGSFAAFQEELNDKAVNNFGSSWTWLVKNADGSIEIVNTSNAGCPLTEGQTPLLTVDLWEHAYYIDYRNVRPDYLKGFWALVNWDFVNENFA

SEQ ID NO: 106041 - DNA, 606 bp, Flavobacteria bacterium BBFL7
  CDS (1)..(606): transl_table=11
atggcttttgaattacctaaattaaactatgcgtatgatgcgctagaaccacatattgatgcaagaacaatggagattcaccattcaaaacatcacaatggttatactactaaattaaataatgccattgaaggtactgacctagaaggaaagtctattgaagacattcttgcaaatctagacatggacaataaggcggtaagaaataatggtggtggattttataaccacagattattctgggaagtaatgtcacctaatggaggtggaaaacctactggagatcttgctgctgcaattgatagtgcttttggttcatatgatgcatttcaagataaatttgctacagctgcaaaaacacaattcggttcaggatgggcctttttatgtgttaaagatggtgctctagaagtgtgtggaactcctaatcaagataatccattaatgccaggtgtaggttgtggtggaacacctatcctaggattagatgtatgggaacacgcatattacttaaattatcaaaaccgcagaccagattatgtaagtgcattttttaatgtaattgattgggatgctgtatcagagaaatacaacgctgctaagtaa

SEQ ID NO: 106042 - protein, 201 aa, Flavobacteria bacterium BBFL7
MAFELPKLNYAYDALEPHIDARTMEIHHSKHHNGYTTKLNNAIEGTDLEGKSIEDILANLDMDNKAVRNNGGGFYNHRLFWEVMSPNGGGKPTGDLAAAIDSAFGSYDAFQDKFATAAKTQFGSGWAFLCVKDGALEVCGTPNQDNPLMPGVGCGGTPILGLDVWEHAYYLNYQNRRPDYVSAFFNVIDWDAVSEKYNAAK

SEQ ID NO: 106043 - DNA, 588 bp, Rickettsiella grylli
  CDS (1)..(588): transl_table=11
atgaaacatcaattacctccgttaccttatagtttagaagccttggcacctattatttcaaaggaaaccctcgaatatcactatgggaaacaccataaggcttatgtcaataaactgaatgaattaattcccaatacaacattcgaaacattatctttggaaaatattataaaaaaagctcccaaaggccctatttttaataatgctgcacagacttggaatcatactttttattggcattgtatgacacctttggcggctaaaaacaaattaaaaggcgctttagaagagagtatctgcaaatccttcggctctttttctcaatttaaagaagcatttactaacgcggctatcgctcaattcggttcaggatgggcctggctaataaaagatgcccacggtttaaagatagaaaccacaagcaatgccctcaccccattgagcgaagataaaatctgtttattaacctgtgacgtctgggaacatgcttactatatcgactatcggaatgcacgtcctcactatctagaaaaattttgggatattgtcaattgggacttcgttgctgaaaattttgaaaaacaatga

SEQ ID NO: 106044 - protein, 195 aa, Rickettsiella grylli
MKHQLPPLPYSLEALAPIISKETLEYHYGKHHKAYVNKLNELIPNTTFETLSLENIIKKAPKGPIFNNAAQTWNHTFYWHCMTPLAAKNKLKGALEESICKSFGSFSQFKEAFTNAAIAQFGSGWAWLIKDAHGLKIETTSNALTPLSEDKICLLTCDVWEHAYYIDYRNARPHYLEKFWDIVNWDFVAENFEKQ

SEQ ID NO: 106045 - DNA, 585 bp, Oceanobacter sp. RED65
  CDS (1)..(585): transl_table=11
atggcattcgaacttccagcacttccttatgcgaaagacgcactcgagccacatatttctacagagacactagagtatcaccacggtaaacaccacaatacttacgtgaccaagctaaacggtttgattcctggtactgagtttgaaggcaaatctctagaagatatcatcaaaacttcttcaggtggtgtattcaacaacgcagcacaaatttggaaccacactttctattggaacagcctaagccctaatggtggtggtgagccaacaggtgcagttgcagacgctatcaataaagaattcggttcttttgatgcattcaaagaaaaatttaacgacaaagcggttaacaactttggatctagctggacttggttagttaaaaaagctgacggcagcctagacatcgttaatacgtctaacgctggcaccccaatcacagaagaaggcgtgacgcctctaatcactgtggacctatgggaacacgcttattacatcgactaccgcaatctacgccctgaatacctaaaaggtttctgggcacttgttaactgggacttcgcgaacgagaacttcgccaagtaa

SEQ ID NO: 106046 - protein, 194 aa, Oceanobacter sp. RED65
MAFELPALPYAKDALEPHISTETLEYHHGKHHNTYVTKLNGLIPGTEFEGKSLEDIIKTSSGGVFNNAAQIWNHTFYWNSLSPNGGGEPTGAVADAINKEFGSFDAFKEKFNDKAVNNFGSSWTWLVKKADGSLDIVNTSNAGTPITEEGVTPLITVDLWEHAYYIDYRNLRPEYLKGFWALVNWDFANENFAK

SEQ ID NO: 106047 - DNA, 609 bp, Vibrio sp. Ex25
  CDS (1)..(609): transl_table=11
atgtcacatacatttcccgctctgccttacccgtacgattcactagagccttacatcgacgcgaaaacgatggaagtgcattacagcaaacatcacaagacttatttcgataagttcgtaagtgccgttgaagggagcgagctcgaaactcagtcgctagacgagatctttgacaatatctctaagctcagccctgcagtgcgtaataatggcggcggctactacaaccacatcatttattggaattgcatgtctccaaacggtggcggtgagcctcaaggcgcacttgctcaggcaattaacgacaaatttggtagctttgcgcaatttaaagaagcgtttgcccaagccgcgattaatacttttgggtctggctttgcatggctgatcgtaaaagatggtgagattcacattacgtccaccagcaatcaagataaccctctgatggacgtagtagatgtacgcggtgaaccaatcctcgcattagacgtgtgggagcatgcgtattacatcagctaccaaaaccgtcgcccagaatacattgatgcatggtggaacgtcgttaattggcgagcggttgaagaaaattacgctcacgctctattataa

SEQ ID NO: 106048 - protein, 202 aa, Vibrio sp. Ex25
MSHTFPALPYPYDSLEPYIDAKTMEVHYSKHHKTYFDKFVSAVEGSELETQSLDEIFDNISKLSPAVRNNGGGYYNHIIYWNCMSPNGGGEPQGALAQAINDKFGSFAQFKEAFAQAAINTFGSGFAWLIVKDGEIHITSTSNQDNPLMDVVDVRGEPILALDVWEHAYYISYQNRRPEYIDAWWNVVNWRAVEENYAHALL

SEQ ID NO: 106049 - DNA, 582 bp, Alteromonadales bacterium TW-7
  CDS (1)..(582)
atggcatttgaactaccgtcactaccatatgcaatcgacgcacttgagccacatatttcaaaagaaacattagagtttcaccacggtaagcaccacaacacttacgttgttaagcttaacggtttgatccctggtacagagtttgaaaacaaatctctagaagaaatcgtatgttcatcagaaggcggtgtatttaacaacgcagcgcaaatctggaatcacacgttttactggaacagcctatctccaaatggcggcggcgagcctactggcgcaattgcagatgcaattaacgctaaatggggttcttttgatgcgtttaaagatgcattaaacgacaaagcagtaaataacttcggttcaagctggacttggttagtaaaacttgccgatggctctttagacatcgttaacacatctaacgctgctacaccacttactgacgaaggcgttacacctgttcttactgtagatttatgggaacacgcatactacattgattaccgtaacgtgcgtccagattaccttaaaggtttttggtcacttgttaactgggaatttgcaaacgcaaacttcgcttaa

SEQ ID NO: 106050 - protein, 193 aa, Alteromonadales bacterium TW-7
MAFELPSLPYAIDALEPHISKETLEFHHGKHHNTYVVKLNGLIPGTEFENKSLEEIVCSSEGGVFNNAAQIWNHTFYWNSLSPNGGGEPTGAIADAINAKWGSFDAFKDALNDKAVNNFGSSWTWLVKLADGSLDIVNTSNAATPLTDEGVTPVLTVDLWEHAYYIDYRNVRPDYLKGFWSLVNWEFANANFA

SEQ ID NO: 106051 - DNA, 633 bp, Pseudomonas putida GB-1
  CDS (1)..(633): transl_table=11
atgcctacggaattcactgacatgccacataccctgcctgcattgccatacgcctatgacgcgctggagccgcacatcgacgcccagaccatggaaatccaccacaccaagcatcatcagacctacgtgaatggtctcaacgccgctatcgaaggcaccgagtgggccgaatggccggttgagaagctggttggcgccgtcaagcaacttccggaaaacctgcgtggcgcagttacaaaccacggcggcggccacgccaaccacagcctgttctggaccgtcatgtcgccacagggtggcggtgagcctgtgggccagctggcgcaagctgtcaccgcgcaactgggcggcttcgaggctttcaaggaggctttcaccaaggctgcgctgacgcgcttcggcagcggctgggcctggctaagcgtgacaccgcagaaaaccctggtggtagagagcagtggcaaccaagacagcccgttgatgcacggcaatacgccaatcctcggcctggacgtgtgggagcacgcgtattacctcaagtaccagaaccgtcgtccggaatacatcggcgccttctacaacgtcattgactgggcgcaagtggagcgccgttacctcgaagccctgaagtga

SEQ ID NO: 106052 - protein, 210 aa, Pseudomonas putida GB-1
MPTEFTDMPHTLPALPYAYDALEPHIDAQTMEIHHTKHHQTYVNGLNAAIEGTEWAEWPVEKLVGAVKQLPENLRGAVTNHGGGHANHSLFWTVMSPQGGGEPVGQLAQAVTAQLGGFEAFKEAFTKAALTRFGSGWAWLSVTPQKTLVVESSGNQDSPLMHGNTPILGLDVWEHAYYLKYQNRRPEYIGAFYNVIDWAQVERRYLEALK

SEQ ID NO: 106053 - DNA, 579 bp, Marinobacter sp. ELB17
  CDS (1)..(579): transl_table=11
atggcctttgaactacctgcactgccgtacgaaaaaaatgctctggaaccgcacatttccgcggaaactctggattatcactacggcaagcatcacaacacctatgtcaccaagctgaacggcctggttgacggtaccgacgacgccaacaagtcgctggaagacatcattaaaagcgccagcggcccgctgttcaataacgcagcccaggtgtggaaccacactttctactggcattgcctgagccccaacggtggcaacgagccaaccggcgcagcgaaagacgccattgaaaaagccttcggttctttcgatgacttcaaaaaagaattcaacgacaaagccgccaacaacttcggctctggctggacctggctggttaagaaatccgacggcagcgttgccattacaaacaccagcaacgcagagacgccactgactggcgcagacaagcctgtgctgacggtcgacgtttgggaacacgcctactacgtggattaccgcaactcacgtccagattacctagccgctttctggaagctggtaaactgggacttcgtgaacaaaaatctggcttaa

SEQ ID NO: 106054 - protein, 192 aa, Marinobacter sp. ELB17
MAFELPALPYEKNALEPHISAETLDYHYGKHHNTYVTKLNGLVDGTDDANKSLEDIIKSASGPLFNNAAQVWNHTFYWHCLSPNGGNEPTGAAKDAIEKAFGSFDDFKKEFNDKAANNFGSGWTWLVKKSDGSVAITNTSNAETPLTGADKPVLTVDVWEHAYYVDYRNSRPDYLAAFWKLVNWDFVNKNLA

SEQ ID NO: 106055 - DNA, 666 bp, Bacillus sp. SG-1
  CDS (1)..(666): transl_table=11
atgaaaagaccggaatcgttaaaggattctaaatattacatagggaggaattttatcatggcatttgaattaccgcaattaccgtatgcttacgatgcattagaacctcatatcgacaaggaaacaatgaacattcaccatacgaagcaccataatgcttacgtaactaaattaaacgacgctcttcaaggaaacgaagaacttctaagcaagtctgtggaagaagttgttgccaaccttgatgctgtaccagaaggtgcacgcacagcagtccgcaataacggcggcggccatgcaaaccactctttattctggacaatcctttctccaaatggcggcggaaaccctgaaggtgaacttgcaagcgctattgaaagcaagttcggcagctttgaaaagttcaaagaagaattcgctgctgcagctgcaggccgtttcggttctggctgggcttggctagttgtaaacaatggagagcttgaagtaacaagcactcttaaccaggattctcctctaatggacggcaaaacgcctgtccttggtttggatgtttgggagcatgcttactaccttaactaccaaaaccgtcgtccggactacatcaacgcattctggaatgtagtaaactgggatgaagtttcaaagcgtttcagcgctgcaaaataa

SEQ ID NO: 106056 - protein, 221 aa, Bacillus sp. SG-1
MKRPESLKDSKYYIGRNFIMAFELPQLPYAYDALEPHIDKETMNIHHTKHHNAYVTKLNDALQGNEELLSKSVEEVVANLDAVPEGARTAVRNNGGGHANHSLFWTILSPNGGGNPEGELASAIESKFGSFEKFKEEFAAAAAGRFGSGWAWLVVNNGELEVTSTLNQDSPLMDGKTPVLGLDVWEHAYYLNYQNRRPDYINAFWNVVNWDEVSKRFSAAK

SEQ ID NO: 106057 - DNA, 609 bp, unidentified eubacterium SCB49
  CDS (1)..(609): transl_table=11
atggcttttgaattaccaaaattaccgtacgcacacgacgcattagctccacatatagatgaacaaaccatgcaaatacaccatgggaagcatcatcaaggatataccaacaacctaaacgctgctattgaaggcacggatctagaggggaaaacgattgaaaatattttgatcaatcttgatatggacaataaagcagtccgtaacaatggtggaggtttttacaaccacagccttttttgggaagtaatgtctccaaatggaggaggagagcctactggtgaaataatgagtgcaattaagagttcgtttggttcttttgcagattttaaagaaaagttttctacagctgcaaaaacacagtttggatctggatgggcatttttatgtgttaaagaagatgggtctttagatatttgtggatgccctaatcaagataatccattaatgccaggagttggttgtggtggtcaacctattttaggtttagatgtgtgggaacacgcttattaccttaattaccaaaacaagcgccctgattatgtatctgcattttttaatgtgattaactgggatgaagtgaatgctcgttttttaaagagtaaataa

SEQ ID NO: 106058 - protein, 202 aa, unidentified eubacterium SCB49
MAFELPKLPYAHDALAPHIDEQTMQIHHGKHHQGYTNNLNAAIEGTDLEGKTIENILINLDMDNKAVRNNGGGFYNHSLFWEVMSPNGGGEPTGEIMSAIKSSFGSFADFKEKFSTAAKTQFGSGWAFLCVKEDGSLDICGCPNQDNPLMPGVGCGGQPILGLDVWEHAYYLNYQNKRPDYVSAFFNVINWDEVNARFLKSK

SEQ ID NO: 106059 - DNA, 870 bp, Opitutaceae bacterium TAV2
  CDS (1)..(870): transl_table=11
atgccgtttgcagatatcattgcccgcatgtctcccaataccgcccaacggatgtcccgtcgcagtgccctcaaaaccttgggcgccactctcctcgccgccagttcggtgggcggcctgtcgcggctcgccgccgcccccgatgccaaggcgccttccagccccgccgccatcgatcctcacaagtggggggctccgtccacgggtgatgcaacgacgctcacccagcccttcgtcctgccgccgctgccctttgcgcccgatgcactggaaccctccattggtgcgcgcacgatgagcatccaccacggaaagcaccaccaggcttacatcaccaacgccaacaccgcccttaaatcgcatccgcaactcctctcgctctccgcggcgcaactgctccagaaccttgactccatcccggaggaaatccgcacagcggtgcgcaacaacgtcggcggccacgccaaccactcgtttttctggcccctcctcaccgcctcgtctccatcccccggccatgcgcatggcgccttgcgcaccgccatcgtggagaccttcggcagcctcgatgccttcatcgccgggttcaatcaggccgccgcgtcgtgttttggcagcggctgggcctggctggtctggcaggatggccggcttgccatcatctcgaccgccaaccaagactcgccgctcagcctcggcgcccgtcccgtcatcggcctcgatgtgtgggaacacgcctactacctcgattatcagaaccgccgcgccgactataccaaagccttctgggccgtgctcaattggagccaggccgaggccaactacaccgccgctatcggagggcaagacactggagggcgggtctcctga

SEQ ID NO: 106060 - protein, 289 aa, Opitutaceae bacterium TAV2
MPFADIIARMSPNTAQRMSRRSALKTLGATLLAASSVGGLSRLAAAPDAKAPSSPAAIDPHKWGAPSTGDATTLTQPFVLPPLPFAPDALEPSIGARTMSIHHGKHHQAYITNANTALKSHPQLLSLSAAQLLQNLDSIPEEIRTAVRNNVGGHANHSFFWPLLTASSPSPGHAHGALRTAIVETFGSLDAFIAGFNQAAASCFGSGWAWLVWQDGRLAIISTANQDSPLSLGARPVIGLDVWEHAYYLDYQNRRADYTKAFWAVLNWSQAEANYTAAIGGQDTGGRVS

SEQ ID NO: 106061 - DNA, 645 bp, Opitutaceae bacterium TAV2
  CDS (1)..(645): transl_table=11
atggcttacgaacttcccaaactcgcctacgcgaacgacgccctcgcgcctcacattgatgcccggacgatggaaatccaccacaccaagcatcaccaagcctacatcaccaatctcaacaacgccctcgcctctgccaacatcaccggtcccgactgcgtttgcgaactgatctccgacctgaccaaagtccccgaagccatccgcaccgccgtgcgcaacaatggcggcggacacgccaaccacagcttcttctggaagatcatcggccccggcaagggcggcgctcccaagggcaagctcgccgaggccatcgtgaccacctttggcagctttgataaattcaaggaagaattcgccaaggccgccgccacgcgcttcggctccggctgggcctggctctatgtcacggcggatggagatcgtcctcaaaaactcgccgttggctccaccgccaaccaagacagcccgctcatgggcaaggccgtggccggcatcgaaggcaaacccatcatcggcctcgatgtgtgggagcacgcctactacctgaattaccaaaaccgccgtcccgactacatcgccgccttctggaacgtggtggattgggacgccgccgaagcgaaattcgtcaaagccaccgcctga

SEQ ID NO: 106062 - protein, 214 aa, Opitutaceae bacterium TAV2
MAYELPKLAYANDALAPHIDARTMEIHHTKHHQAYITNLNNALASANITGPDCVCELISDLTKVPEAIRTAVRNNGGGHANHSFFWKIIGPGKGGAPKGKLAEAIVTTFGSFDKFKEEFAKAAATRFGSGWAWLYVTADGDRPQKLAVGSTANQDSPLMGKAVAGIEGKPIIGLDVWEHAYYLNYQNRRPDYIAAFWNVVDWDAAEAKFVKATA

SEQ ID NO: 106063 - DNA, 621 bp, Cenarchaeum symbiosum
  CDS (1)..(621): transl_table=11
atgggagaatacacacttccggagatgccatatgcatacgacgcactggagccgcacatagacgcgcgcaccatggagatacaccatacaaagcaccaccagacgtatactaccaagctcaacgcggcgctaaaggactgccccgcggatatacagggcaaggacgtcaccgagatcctggccaacataggccaggtgcccgaggcgcagcgcaaggcaatcaacttcaatgcaggcggttacgacaaccacaggctattctggaacaacatgaagccaaacgggggcggggaacccggcggggctgttgccgacgccatcaactcgtcctttggaagctttgcagactttaaggaaaagttctcgtccaccactgccgtgatacagggcagcgggtgggggtggctcgtatacaacccgtcaagcagcaaggtagagtacaaggccatgcccaaccagaccagccccaggactgaaaagctggttccgctgcttggctgcgacgtgtgggagcatgcatactatctcaagtaccagaacaagaggcccgattatatatcggcctggtggaacgtaataaactgggacgaggtcgagagcaggctttccaaggcaaaatag

SEQ ID NO: 106064 - protein, 206 aa, Cenarchaeum symbiosum
MGEYTLPEMPYAYDALEPHIDARTMEIHHTKHHQTYTTKLNAALKDCPADIQGKDVTEILANIGQVPEAQRKAINFNAGGYDNHRLFWNNMKPNGGGEPGGAVADAINSSFGSFADFKEKFSSTTAVIQGSGWGWLVYNPSSSKVEYKAMPNQTSPRTEKLVPLLGCDVWEHAYYLKYQNKRPDYISAWWNVINWDEVESRLSKAK

SEQ ID NO: 106065 - DNA, 648 bp, Hyphantria cunea
  CDS (1)..(648)
atgttaatggcccggagacttggatcacttttcgctaccagtgctcggcagaagcacaccctaccagagctaccttatgagtataatgccttggagccggtgattagccgggagattatgactttgcatcacactaagcatcatgcgacctatgttaacaacttgaatgcagctgaagaagcgctgaagctggctcaggcaaaaggtgatgtgactgcagccatcactatcgccccagctctcaggttcaacggtggtggtcacatcaaccacgccatcttttggcagaccctgtcacctaaaagcaccaaagcttccgaacaactctgcaaagccattgagacagattttggctcatgggaaaacatgaaaaatcaactggccgctgcttccgttgcaatccaggggtctggatggggttggcttggatacaacaaacagatgaaaagaacacaaattgccacatgtcagaaccaagatcctctgcaggcaaccactggtctaattccgctgtttggcattgacgtctgggaacacgcttactaccttcagtacaagaatgtacgagctgattatgtcaaagccatcttcgaggtggctaattgggaggatatctctcaaagatacgccaaagctattgcaaattaa

SEQ ID NO: 106066 - protein, 215 aa, Hyphantria cunea
MLMARRLGSLFATSARQKHTLPELPYEYNALEPVISREIMTLHHTKHHATYVNNLNAAEEALKLAQAKGDVTAAITIAPALRFNGGGHINHAIFWQTLSPKSTKASEQLCKAIETDFGSWENMKNQLAAASVAIQGSGWGWLGYNKQMKRTQIATCQNQDPLQATTGLIPLFGIDVWEHAYYLQYKNVRADYVKAIFEVANWEDISQRYAKAIAN

SEQ ID NO: 106067 - DNA, 702 bp, Taiwanofungus camphoratus
  CDS (1)..(702)
atgtccatgctcagtactgctcgcaccgctgctcgcacagcgcgcgcgtcgcgcgctctcccctttgcctcgttctcgctcgccgcgagggccaagtcgctgcacacgctccctgagcttgactacgcgtacgatgcactcgagccgcacatctctggccagatcatgaagctgcaccatacaaagcaccaccagacgtacgtcaccggcctcaacgcggcggaggagagctacgccaaggcgccctcgcccaaggagcggattctccttcagcccgcgctcaaattcaatggcggaggtcacatcaatcactcgctcttctggaagaaccttgcgccccagtcgcagggtggcggccagctcgctgcgggtcccttcaaagatgcagtagatgctgacttcggcggtgtcgatggcttgaagaagaaattgaacgcggcgacagctgccatccagggctccggttggggctggcttggatacaatccgaccactaaaaagcttgaggttgtcacaaccgcaaaccaggatcctctcctctctcacattcccataattggcatcgacatctgggagcactcatactatcttcaataccagaatgtgaaagccgactacctccaagccatctggagcgtcatcaatttcaaggaggctgagcgccgctacgtcgaactgcacagaaataaagtgacgatataa

SEQ ID NO: 106068 - protein, 233 aa, Taiwanofungus camphoratus
MSMLSTARTAARTARASRALPFASFSLAARAKSLHTLPELDYAYDALEPHISGQIMKLHHTKHHQTYVTGLNAAEESYAKAPSPKERILLQPALKFNGGGHINHSLFWKNLAPQSQGGGQLAAGPFKDAVDADFGGVDGLKKKLNAATAAIQGSGWGWLGYNPTTKKLEVVTTANQDPLLSHIPIIGIDIWEHSYYLQYQNVKADYLQAIWSVINFKEAERRYVELHRNKVTI

SEQ ID NO: 106069 - DNA, 624 bp, Nocardia brasiliensis
  CDS (1)..(624): transl_table=11
gtggctgagtacacgctgccagatctggattacgactacagcgccctggagccccacatctccgggcagatcaacgagctgcatcattccaagcaccacgccgcatacgtcgcaggcgcgaacaccgcgctggagaagctggaagccgcgcgcgaaagcggcgaccacggcgccattttcctgtacgagaagaacctggccttccacctcggcggccacgtcaaccactccatctggtggaagaacctctcccccaacggtggcgacaagccggtcggcgagctcgctgccgcgatcgacgaccagttcggttcgttcgacaagttccgtggtcagttcaccgcggccgccaacggcctgcagggctcgggctgggcggtgctcggctacgacaccctcggccagaagctgctgaccttccagctctacgaccagcaggccaacgttccgctgggcatcatcccgctgctccaggtcgacatgtgggagcacgccttctacctgcagtacaagaacgtcaaggcggactacgtcaccgcgttctggaacgtcgtcaactgggaagacgtgcaggagcgcttcgcccgcgccgtctcgcagggcaagggcctcttcttcggctga

SEQ ID NO: 106070 - protein, 207 aa, Nocardia brasiliensis
MAEYTLPDLDYDYSALEPHISGQINELHHSKHHAAYVAGANTALEKLEAARESGDHGAIFLYEKNLAFHLGGHVNHSIWWKNLSPNGGDKPVGELAAAIDDQFGSFDKFRGQFTAAANGLQGSGWAVLGYDTLGQKLLTFQLYDQQANVPLGIIPLLQVDMWEHAFYLQYKNVKADYVTAFWNVVNWEDVQERFARAVSQGKGLFFG

SEQ ID NO: 106071 - DNA, 678 bp, Mayetiola destructor
  CDS (1)..(678)
atgttcttggcaaaacgagcactttttggatcggttgcaagatgcaatgcttatgtagccggcatacagccagcagctgcaaagcatacattacccgaattgggctatgattacaaagccttggaaccgataatttctggtgaaattatggaattacaccattcaaaacatcatcaaacctatataaccaattttaatgcggccgaaacttcaattacaagaagcattacaaaaaatgatacatcaaaagtgattgctttgcaaggtgcattaaaattcaatggtggcggtcacataaatcattcgattttttggaaaaatttaacacccgccaaaacaaatctatcgaatgatttgaaaagtgaaatttccacagcattcggtgattttgataaatttaaaaaggaattcacaactgcaactgtagccgtacaaggttcaggatggggatggttaggttttaataaaaaaacaaaacgaatcgaaattgccgcttgtccaaatcaagatccattggaagctacaactggtttggtaccattgttgggcattgacgtttgggaacatgcatactatttgcaatacaaaaatgttcgactcaattatgttgaggctatttttgatgtcgtcaattgggatgatgtttcagcacgtttggcagccgctaaaggcaattag

SEQ ID NO: 106072 - protein, 225 aa, Mayetiola destructor
MFLAKRALFGSVARCNAYVAGIQPAAAKHTLPELGYDYKALEPIISGEIMELHHSKHHQTYITNFNAAETSITRSITKNDTSKVIALQGALKFNGGGHINHSIFWKNLTPAKTNLSNDLKSEISTAFGDFDKFKKEFTTATVAVQGSGWGWLGFNKKTKRIEIAACPNQDPLEATTGLVPLLGIDVWEHAYYLQYKNVRLNYVEAIFDVVNWDDVSARLAAAKGN

SEQ ID NO: 106073 - DNA, 702 bp, Volvox carteri f
  CDS (1)..(702)
atggctctttctatgaaggtccaggcctcgagccttattgcgggccagcgtcgcgggcgccctgtcccgggccgccgcgccatggtcaccaaggccgcgctggagctgaaggcccctccttatccactggatgcccttgagcctcacatgagcaagcagactttggagttccactggggcaagcaccatcgcgcttatgtggataacatgaacaagcagatcgccggcaccccgcttgacggcaagagtctggaggagatcgtcctggctagctggaatggcggcaaccctacgccggtctttaacaacgctgctcaagtctggaaccacacatttttctgggaaagcatgaaggcaaatggtggtggtgcacctactggcaagctggctgaggcaattgcgcgcgatttcggcagctttgacaagttcaaggaggagtttaagactgcaggcatgacccaattcggctcgggctgggcctggcttaatgccgacaagtcgggcaagctcagcatcagcaagtcgccgaacgccgtgacccctgtggttgaaggcaagacgcctatccttactgtggacgtgtgggagcatgcctactacatcgacgtccagaaccgtcggccagactacctaaccacctttatcgagaagttgatcgactgggacgtcgtggcccagcgttacgcagctgctcagcagtga

SEQ ID NO: 106074 - protein, 233 aa, Volvox carteri f
MALSMKVQASSLIAGQRRGRPVPGRRAMVTKAALELKAPPYPLDALEPHMSKQTLEFHWGKHHRAYVDNMNKQIAGTPLDGKSLEEIVLASWNGGNPTPVFNNAAQVWNHTFFWESMKANGGGAPTGKLAEAIARDFGSFDKFKEEFKTAGMTQFGSGWAWLNADKSGKLSISKSPNAVTPVVEGKTPILTVDVWEHAYYIDVQNRRPDYLTTFIEKLIDWDVVAQRYAAAQQ

SEQ ID NO: 106075 - DNA, 696 bp, Thellungiella halophila
  CDS (1)..(696)
atggcgattcgttctgtagcgactagaaaaaccctagccggattgaaggagacatcttcgaggctcctgggattccgtggaattcagacctttacgcttcctgatcttccctatgattatagcgctctggagccggcgattagcggcgagattatgcagcttcatcaccagaagcaccaccagacgtatgttactaattacaacaatgccctcgagcagctggatcaggccgtgaacaagggagacgcttccactgtcgtcaagttgcagagcgccatcaagttcaacggcggaggtcatgtgaaccactcgattttctggaagaaccttgctcctgtcaatcaaggtggtggagagccaccaaagggagctcttggcggagcaattgacactcactttggctccctcgaaggtttggtgaaaaaaatgaacgctgaaggtgctgctttgcaaggctcaggatgggtgtggcttggtttagacaaagagcttaagaagcttgtggttgacacaactgccaatcaggatccactggtgacaaaaggagcaagtttggttcctctggtgggtatagatgtttgggagcacgcctattacttgcagtacaagaatgtgaggccggattatcttaagaacgtgtggaaagtgatcaactggaagtatgcaagcgaggtttatgagaaggaatgcaactga

SEQ ID NO: 106076 - protein, 231 aa, Thellungiella halophila
MAIRSVATRKTLAGLKETSSRLLGFRGIQTFTLPDLPYDYSALEPAISGEIMQLHHQKHHQTYVTNYNNALEQLDQAVNKGDASTVVKLQSAIKFNGGGHVNHSIFWKNLAPVNQGGGEPPKGALGGAIDTHFGSLEGLVKKMNAEGAALQGSGWVWLGLDKELKKLVVDTTANQDPLVTKGASLVPLVGIDVWEHAYYLQYKNVRPDYLKNVWKVINWKYASEVYEKECN

SEQ ID NO: 106077 - DNA, 579 bp, Herbaspirillum seropedicae
  CDS (1)..(579): transl_table=11
atggcacatacccttccggcactgccttacgatctggacgcgctggcgcccacgatttccaaggaaaccctggaatatcactatggcaagcaccaccagacctatgtgaccaacctgaacaacctgattccgggtaccgaattcgaaaacctgtccctggaagagatcatcaagaaatcctccggcggcatcttcaacaacgctgcccaggtgtggaaccacaccttctactggaacggcctgaccccgaagggccaaggcgctccgagcggcgcgctggctgacgccatcaacgccaagtggggctccttcgacgccttcaaggccgagttcaccaagcaaggcctggccaacttcggttccggctggacctggctggtcaagaaggctgacggcaccctggacatcgtcaacaccaccggcgccggcaccccgctgaccaccgacagcaagccgctgttgaccgtggacgtgtgggaacacgcctactacatcgactaccgcaacgcacgcgccaagtatgtcgagaactactggggcatcatcaactgggacttcgtggccaagaacttcgcctga

SEQ ID NO: 106078 - protein, 192 aa, Herbaspirillum seropedicae
MAHTLPALPYDLDALAPTISKETLEYHYGKHHQTYVTNLNNLIPGTEFENLSLEEIIKKSSGGIFNNAAQVWNHTFYWNGLTPKGQGAPSGALADAINAKWGSFDAFKAEFTKQGLANFGSGWTWLVKKADGTLDIVNTTGAGTPLTTDSKPLLTVDVWEHAYYIDYRNARAKYVENYWGIINWDFVAKNFA

SEQ ID NO: 106079 - DNA, 663 bp, Fenneropenaeus chinensis
  CDS (1)..(663)
atgctcgccgccactagactcttctcggcccggggactggctgcccttggagtgagaagtcagcagaagcacaccctgccggacttagcctatgattacaatgccttggaacctgtcatctgtgccgagatcatgcaactccatcactcaaagcatcaccagacttatgtcaacaacttgaatgtggctgaggaaaaattggccgaagcccaggctaaaggtgatgtgaacacagtcatcagcttggccccagcactcaagttcaatggaggtggtcacatcaatcacaccatcttttggcaaaacctctccccagatggtggagaacctgcgggtgacctgttggctgccattaacaaagactttggcagtgtagatgccatgaaggctcagttgtcagcagcaacagtggctgtgcaaggctcaggttggggatggcttggatttaacaagcagaaaggttctctccagattgctacttgtgcaaatcaggatccacttgaagcaacaacaggcctcgtccccctctttggaatcgatgtgtgggagcatgcctactacctgcagtacaagaacgtgaggcctgattacgtgaatgccatctggaaagtagccaattggaaagatatttctgcaagattttctaaagctgcttctaaatag

SEQ ID NO: 106080 - protein, 220 aa, Fenneropenaeus chinensis
MLAATRLFSARGLAALGVRSQQKHTLPDLAYDYNALEPVICAEIMQLHHSKHHQTYVNNLNVAEEKLAEAQAKGDVNTVISLAPALKFNGGGHINHTIFWQNLSPDGGEPAGDLLAAINKDFGSVDAMKAQLSAATVAVQGSGWGWLGFNKQKGSLQIATCANQDPLEATTGLVPLFGIDVWEHAYYLQYKNVRPDYVNAIWKVANWKDISARFSKAASK

SEQ ID NO: 106081 - DNA, 609 bp, Bacillus subtilis subsp
  CDS (1)..(609): transl_table=11
atggcttacgaacttccagaattaccttatgcgtacgatgctttagaaccgcatatcgacaaggaaactatgactattcaccatacgaaacaccacaacacatacgtgacaaatttaaacaaagcggttgaaggaaacactgctcttgccaacaaatcagttgaagagcttgttgcagatcttgattctgttcctgaaaacatccgcactgcggtccgcaacaacggcggcggacacgcgaaccacaaattattctggacacttttatctccaaacggcggaggcgaaccgactggcgcgcttgctgaagagatcagcagtgtatttggaagctttgacaaattcaaagagcaattcgcagcagcagcagctggacgcttcggttctggctgggcatggcttgttgtgaacaacgggaaacttgaaatcacaagcacgccaaaccaagattctccgctttcagaaggcaaaacgcctatcttaggtcttgacgtttgggagcatgcttactaccttaactatcaaaaccgccgtcctgattacatttcagctttctggaatgttgtaaactgggacgaagtggctcgtctatacagcgaacgaaaataa

SEQ ID NO: 106082 - protein, 202 aa, Bacillus subtilis subsp
MAYELPELPYAYDALEPHIDKETMTIHHTKHHNTYVTNLNKAVEGNTALANKSVEELVADLDSVPENIRTAVRNNGGGHANHKLFWTLLSPNGGGEPTGALAEEISSVFGSFDKFKEQFAAAAAGRFGSGWAWLVVNNGKLEITSTPNQDSPLSEGKTPILGLDVWEHAYYLNYQNRRPDYISAFWNVVNWDEVARLYSERK

SEQ ID NO: 106083 - DNA, 597 bp, Magnetospirillum gryphiswaldense
  CDS (1)..(597): transl_table=11
atggctttcgagcttcccccgcttccctatgacaagaccgctctggaaccccatatctcggcccagacgctggacttccaccatggcaagcatcacaacgcctatgtgaccaacctgaacaatctggtgaaggacaccgatctggcggccaagtcgctggaagagatcatcgccatcgccgccaaggatctgccggccaagcagggcgtgttcaacaacgccgcccaggtgtggaaccataccttcttctggaactgcatgaagcagggcggcggcggcaagcccaccggcaccgtgctggccaagatcgaggccgctttcggttcctacgaaaagttcgccgaggaattcaagaacgccgccgtgacccagttcggctcgggctgggcctggctggtggaagaaaacggcgcgctcaagatcaccaagaccgccaatgccgatctgcccctggcccacggccagaaggcgctgttgacggtggacgtgtgggaacacgcctattacctggatttccagaaccgccgccccgatttcgtccagaccttcctggacaagctggtgaactgggatttcgtcgccaagaacctgggctga

SEQ ID NO: 106084 - protein, 198 aa, Magnetospirillum gryphiswaldense
MAFELPPLPYDKTALEPHISAQTLDFHHGKHHNAYVTNLNNLVKDTDLAAKSLEEIIAIAAKDLPAKQGVFNNAAQVWNHTFFWNCMKQGGGGKPTGTVLAKIEAAFGSYEKFAEEFKNAAVTQFGSGWAWLVEENGALKITKTANADLPLAHGQKALLTVDVWEHAYYLDFQNRRPDFVQTFLDKLVNWDFVAKNLG

SEQ ID NO: 106085 - DNA, 687 bp, Vitis vinifera
  CDS (1)..(687)
atggctcttcgaacgctaatcaccagaaaatcgctagggttagggctaggggtttcgcagtccgttcgtggcctgcagaccgtctctcttcccgatctcccgtacgactatggggctctggagcccgctattagcggcgagattatgaagctccaccaccagaagcaccaccagacctacataaccaactacaacaaagccctagagcagctccatgaagccatggaaaagggcgattcatctacggttgtcaagttgcagggcgccatcaagttcaacggcggaggtcatgtcaaccactcaattttctggaagaatctcacccctgttcatgaaggaggtggtgaacccccaaaaggttcactgggttgggctatagacacacattttggttccatggaagcattggtagcaaaaattaattcagaaggtgctgctgtacagggctctggatgggtttggcttggtctggacaaagatttgaagaagctggtggttgaaactactgcaaatcaggatccactggtaactaaaggaccaaacttggttccattgctgggtatagatgtttgggagcatgcatactacttacagtacaagaatgtgaggccggattacctgaagaacgtatggaaagtgatagactggaaatatgccagtgaagtgtatgagaaagagtgcccttga

SEQ ID NO: 106086 - protein, 228 aa, Vitis vinifera
MALRTLITRKSLGLGLGVSQSVRGLQTVSLPDLPYDYGALEPAISGEIMKLHHQKHHQTYITNYNKALEQLHEAMEKGDSSTVVKLQGAIKFNGGGHVNHSIFWKNLTPVHEGGGEPPKGSLGWAIDTHFGSMEALVAKINSEGAAVQGSGWVWLGLDKDLKKLVVETTANQDPLVTKGPNLVPLLGIDVWEHAYYLQYKNVRPDYLKNVWKVIDWKYASEVYEKECP

SEQ ID NO: 106087 - DNA, 678 bp, Ginkgo biloba
  CDS (1)..(678)
atgctatcaacgcagagtacgcgggggagcggcatcgcagcaaagaagaggcttcaatgtaggggaattcagagcttcagcttgcccgagcttccctatgattatagcgcgctggagccgatcatcagtggcgagatcatgacgctacaccaccaaaaacaccatcagacgtacgtcaccaactacaacaaagctttggagcaactcgaggaggccactgctaagcgcaacgtggaagctatcgtctttctccagagcgccatcaagttcaatggcggaggtcatatcaatcattccgtcttctggaaaaatttggctccaatgaaagaaggaggtggcgagccaccaaaaggtggcttggcaaaggcaatagatacccagtttggctcattaagtgcactgactgagaagatcaatgctgtgggtgctgcattgcagggatcgggttgggtgtggctgggcttaaataaagatttgaagaggcttgtggtcgagacaacacaaaaccaggatccattggttacaaaaggattgctgccgttgctagggatagatgtatgggagcatgcgtactacttgcagtataaaaatgttcgaccagattatttgaagaacatttggaaggtgatgaattggaaatatgcggaggaagtgtacgagaatgaaatgaagccctaa

SEQ ID NO: 106088 - protein, 225 aa, Ginkgo biloba
MLSTQSTRGSGIAAKKRLQCRGIQSFSLPELPYDYSALEPIISGEIMTLHHQKHHQTYVTNYNKALEQLEEATAKRNVEAIVFLQSAIKFNGGGHINHSVFWKNLAPMKEGGGEPPKGGLAKAIDTQFGSLSALTEKINAVGAALQGSGWVWLGLNKDLKRLVVETTQNQDPLVTKGLLPLLGIDVWEHAYYLQYKNVRPDYLKNIWKVMNWKYAEEVYENEMKP

SEQ ID NO: 106089 - DNA, 726 bp, Glycine max
  CDS (1)..(726)
atggccgcgcgagctctgttgaccagaaaaaccctagccaccgtgctccgcaacgacgcgaagcccataatcggagttggcataacagcagcggctactcattcacgcgggttgcacgtgtacacgctacccgatctggattacgactatggcgcactggagccagccatcagcggcgacatcatgcagctgcaccaccagaagcaccaccagacttacatcaccaactacaacaaggccctcgagcagctccaagacgccatcgccaagaaagattcctccgccgtcgttaagctccagggcgccatcaagttcaacggcggaggtcatgtcaaccattctattttctggaaaaatctagctcctgttcgtgaaggaggtggtgaaccacccaagggttcactgggatgggctattgacacacattttggttcttttgaagcattaatacaaaaagttaacgcagaaggtgctgcactacaggggtctggatgggtgtggcttggtctggacaaagagttgaagaggcttgtagttgaaaccactgccaaccaggacccactggttactaagggaccaaatttggttccattgattggtattgatgtttgggagcatgcgtactacttacagtacaagaatgttagaccagactatctgaagaacatttggaaagttattaattggaaatatgccagtgaagtgtatgagaaagagagctcttag

SEQ ID NO: 106090 - protein, 241 aa, Glycine max
MAARALLTRKTLATVLRNDAKPIIGVGITAAATHSRGLHVYTLPDLDYDYGALEPAISGDIMQLHHQKHHQTYITNYNKALEQLQDAIAKKDSSAVVKLQGAIKFNGGGHVNHSIFWKNLAPVREGGGEPPKGSLGWAIDTHFGSFEALIQKVNAEGAALQGSGWVWLGLDKELKRLVVETTANQDPLVTKGPNLVPLIGIDVWEHAYYLQYKNVRPDYLKNIWKVINWKYASEVYEKESS

SEQ ID NO: 106091 - DNA, 663 bp, Haematococcus pluvialis
  CDS (1)..(663)
atggttctccaactgatcgccgggcgcgcttccgcaacctttctcgcttctggagtgcgggggctggccacagccaagcttccggacctcacatacgactatggcgcgctgcagcctgccatttcaggccaaatcatggagttgcaccacaagaagcaccaccaagcatacatcaccaactacaacgccgcaatagagaaatacgcagaggctgaagggaagggtgacgtcgctgcaatgatagccctgcaaggggccatcaagttcaatgggggaggccatgtgaaccacagcatcttctggaccaaccttgtgccgtcaaaggatgccgcgccagcctctggcgagctgttgcagctgattgaggccaggtacaagagcatggacgctttcaaagccgccttcagtgccgcagctgccggtgtgcaggggtctggctggggctggctgggctacaacaaggccacagggggggtggagatcgccaccactgccaaccaggacccactgagcacgctgggtctagtgcccctgctgggcgtggatgtgtgggagcatgcctattacctggattacaagaacgtgcggccagactatctcaaggccatctggcaggtggtgaactggaagaatgtggcggagaggctggctgcggccaagtag

SEQ ID NO: 106092 - protein, 220 aa, Haematococcus pluvialis
MVLQLIAGRASATFLASGVRGLATAKLPDLTYDYGALQPAISGQIMELHHKKHHQAYITNYNAAIEKYAEAEGKGDVAAMIALQGAIKFNGGGHVNHSIFWTNLVPSKDAAPASGELLQLIEARYKSMDAFKAAFSAAAAGVQGSGWGWLGYNKATGGVEIATTANQDPLSTLGLVPLLGVDVWEHAYYLDYKNVRPDYLKAIWQVVNWKNVAERLAAAK

SEQ ID NO: 106093 - DNA, 603 bp, Nostoc flagelliforme
  CDS (1)..(603): transl_table=11
atggcatttgtacaagacccattacccttcgatattaatgctctagagccacatggcatgaaagctgaaacttttgagtatcactatggcaagcatcacaaagcttatgtagacaacctcaacaagctcactgaaggtacagaacttgctaataagtctctggaagaggtgatcaaaacttccttcaacgactcctctaaagcgggaatcttcaacaacgctgcccaagtttggaaccacaccttcttttggaattccttgaaaccagcaggtggcggcgcacccactggtgatctcgcagccaaaattgataaagattttggtagcttcgacaaattcaaggaagagttctcgaacgcagccgcaacccaattcggtagtggctggtcttggctcattgatgatggtggtacgctgaaggtgatcaaaacaccaaatgcagaaaaccctctagctcatggtaagaaagcactcctaaccttagatgtttgggaacacgcctactacattgactttagaaacgcccgtccggcgttcatcaagaatttcctagataacttggtcaactgggactttgctgctgaaaacttggccaaagcttaa

SEQ ID NO: 106094 - protein, 200 aa, Nostoc flagelliforme
MAFVQDPLPFDINALEPHGMKAETFEYHYGKHHKAYVDNLNKLTEGTELANKSLEEVIKTSFNDSSKAGIFNNAAQVWNHTFFWNSLKPAGGGAPTGDLAAKIDKDFGSFDKFKEEFSNAAATQFGSGWSWLIDDGGTLKVIKTPNAENPLAHGKKALLTLDVWEHAYYIDFRNARPAFIKNFLDNLVNWDFAAENLAKA

SEQ ID NO: 106095 - DNA, 651 bp, Galleria mellonella
  CDS (1)..(651)
atgttcacgtctcgtaacattggttccgtaatccgtgtagtcaatgcttcgcgacaaaagcacactcttcctcaattgccatacgagtataatgctctggagccagtgatcagccgtgaaattatgagcctgcatcacagcaagcaccacgccacatacgtcaataatctaaacgctgcagaggagaaacttgcacaagcccaagctaaaggtgacatccaaacagtgatcagtttagccccagccctgaaattcaacgggggtgggcacatcaaccacacaattttctggcagattctctccgctaatggtggacagccttctggtgctctcctcaaagctattgaacaggattttggatcattggagaatatgaagaatcagctggctgcttcttccgtggctgtacaaggctccggctggggttggctgggttataataagcaactgaagaaactccaaatagccacttgtcagaaccaggaccctttgcaggcaacaacaggtctaattcctctgtttggtatcgatgtctgggaacacgcgtactacttgcaatacaagaatgtacgagctgattacgtaaaagccatctttgatgtcgccaactggcaagatatttcctccagatacgaaaatgcattgaagtga

SEQ ID NO: 106096 - protein, 216 aa, Galleria mellonella
MFTSRNIGSVIRVVNASRQKHTLPQLPYEYNALEPVISREIMSLHHSKHHATYVNNLNAAEEKLAQAQAKGDIQTVISLAPALKFNGGGHINHTIFWQILSANGGQPSGALLKAIEQDFGSLENMKNQLAASSVAVQGSGWGWLGYNKQLKKLQIATCQNQDPLQATTGLIPLFGIDVWEHAYYLQYKNVRADYVKAIFDVANWQDISSRYENALK

SEQ ID NO: 106097 - DNA, 681 bp, Ginkgo biloba
  CDS (1)..(681)
atggctttgtcaatgctgagatggaagttgagcggcatcgcagcaaagaagaggcttcaatgtaggggaattcagagcttcagcttgcccgagcttccctatgattatagtgcgctggagccgatcatcagtggcgagatcatgacgctacaccaccaaaaacaccatcagacgtacgtcaccaactacaacaaagctttggagcaactcgaggaggccactgctaagcgcaacgtggaagctatcgtctttctccagagcgccatcaaattcaacggaggaggtcatatcaatcattccgtcttctggaaaaatttggctccaatgaaagaaggaggtggcgagccaccaaaaggtggcttggcaaaggcaatagatacccagtttggctcattaagtgcactgactgagaagatcaatgctgtgggtgctgcattgcagggatcgggttgggtgtggctgggcttaaataaagatttgaagaggcttgtggtcgagacaacacaaaaccaggatccattggttacaaaaggattgctgccgttgctagggatagatgtatgggagcatgcgtactacttgcagtataaaaatgttcgaccagattatttgaagaacatttggaaggtgatgaattggaaatatgcggaggaagtatacgagaatgaaatgaagccctaa

SEQ ID NO: 106098 - protein, 226 aa, Ginkgo biloba
MALSMLRWKLSGIAAKKRLQCRGIQSFSLPELPYDYSALEPIISGEIMTLHHQKHHQTYVTNYNKALEQLEEATAKRNVEAIVFLQSAIKFNGGGHINHSVFWKNLAPMKEGGGEPPKGGLAKAIDTQFGSLSALTEKINAVGAALQGSGWVWLGLNKDLKRLVVETTQNQDPLVTKGLLPLLGIDVWEHAYYLQYKNVRPDYLKNIWKVMNWKYAEEVYENEMKP

SEQ ID NO: 106099 - DNA, 792 bp, Brassica napus
  CDS (1)..(792)
atggcttcttgttttgtgacgaccagcagtttctgtactgtttcagattctagtatacgtttgaaatcctccaagcttgtccatctgagtaatcagcagagaagacgctctcttgggtcacgtggtggtttaaaggttgaagcttactatggtctcaagacccctccttatcctcttgatgctttggaaccgtatatgagtcaaagaacactagaagtgcattggggtaaacaccaccgaggctacgtggacaatctaaacaaacagttagggaaagatgataaactctatggatacaccatggaagagcttatcaaggccacatacaacaacgggaatcctttgcctgagttcaacaacgctgctcaggtctataaccatgatttcttctgggagtcgatgcaacctggtggtggagacatgcctcaaaagggtgttcttgagcagattgagaaagattttgggtcatttacgaatttcagagagaagttcactaatgctgctcttactcagtttggttctggctgggtttggcttgttttgaagagggaagagagaagacttgaagtggtgaaaacctcaaacgccattaacccactagtgtgggacgatattccaatcatcagcttggatgtatgggagcactcttattacatagactacaagaacgagaggggaaagtacataaacacgtttctgaaccatttggtgtcgtggaacgctgcaatgagtaggatggcacgtgctgaggcgtttgtgaatcttggtgaacccaacatcccaattgcctaa

SEQ ID NO: 106100 - protein, 263 aa, Brassica napus
MASCFVTTSSFCTVSDSSIRLKSSKLVHLSNQQRRRSLGSRGGLKVEAYYGLKTPPYPLDALEPYMSQRTLEVHWGKHHRGYVDNLNKQLGKDDKLYGYTMEELIKATYNNGNPLPEFNNAAQVYNHDFFWESMQPGGGDMPQKGVLEQIEKDFGSFTNFREKFTNAALTQFGSGWVWLVLKREERRLEVVKTSNAINPLVWDDIPIISLDVWEHSYYIDYKNERGKYINTFLNHLVSWNAAMSRMARAEAFVNLGEPNIPIA

SEQ ID NO: 106101 - DNA, 792 bp, Brassica napus
  CDS (1)..(792)
atggcttcttgttttgtgacgaccagcagtttctgtactgtttcagattctagtatacgtttgaaatcctccaagcttgtccatctgagtaatcagcagagaagacgctctcttgggtcacgtggtggtttaaaggttgaagcttactatggtcccaagacccctccttatcctcttgatgctttggaaccgtatatgagtcaaagaacactagaagtgcattggggaaaacaccaccgaggctacgtggacaatctaaacaaacagttagggaaagatgatagactctatggatacaccatggaagagcttatcaaggccacatacaacaacgggaatcctttgcctgagttcaactacgctgctcaggtctataaccatgatttcttctgggagtcgatgcaacctggtggtggagacatgcctcaaaagggtgttcttgagcagattgagaaagattttgggtcatttacgaatttcagagagaagtacactaatgctgctcttactcagtttggttctggctgggtttggcttgttttgaagagggaagagagaagacttgaagtggtgaaaacctcaaacgccattaacccactagtgtgggacgatattccaatcatcagcttggatgtatgggagcactcttattacatagactacaagaacgagaggggaaagtacataaacacgtttctgaaccatttggtgtcgtggaacgctgcaatgagtaggatggcgcgtgctgaggcgtttgtgaatcttggtgaacccaacatcccaattgcctaa

SEQ ID NO: 106102 - protein, 263 aa, Brassica napus
MASCFVTTSSFCTVSDSSIRLKSSKLVHLSNQQRRRSLGSRGGLKVEAYYGPKTPPYPLDALEPYMSQRTLEVHWGKHHRGYVDNLNKQLGKDDRLYGYTMEELIKATYNNGNPLPEFNYAAQVYNHDFFWESMQPGGGDMPQKGVLEQIEKDFGSFTNFREKYTNAALTQFGSGWVWLVLKREERRLEVVKTSNAINPLVWDDIPIISLDVWEHSYYIDYKNERGKYINTFLNHLVSWNAAMSRMARAEAFVNLGEPNIPIA

SEQ ID NO: 106103 - DNA, 687 bp, Vitis vinifera
  CDS (1)..(687)
atgaccatgagtcctctcacactcgacagaaactccctgggccggggccagagactgggtcaagtgcaggcgctgaaaactttctctcttccggatcttccctacgactatagggctctggagccgctggtcagcggagagattatggagctacaccacctgaagcaccacctcacttatatcaccaactactacaaagcactccaccagctggacgaagccatctctaaaggcgactcttcttccatccttcggctccagagctccatcaagttcaatggcggaggtcatataaaccattcaattttccggaagaatctcgctcctgtaattgaaggcggtggtgagcctccaaatggcctcttgggtgtggcctttcactcttcctatggttccttagaagcattgatgcagaagatcaacgcagaaggtgctgctttgcagggctctggttgggtgtggcttgccctggataaagaaatgaagaggcttcagatagaaaccactcagaatcaggatcccctcgtaactaaaggaccaaacctagtccccttacttggtatagatgtttgggagcatgcatacaacttacagtacaaaaatgtaaaagctgactacctgaagaacatatggaaggttatgaactggaaatatgcaagtgagttgtatgagaaagagagtgcctga

SEQ ID NO: 106104 - protein, 228 aa, Vitis vinifera
MTMSPLTLDRNSLGRGQRLGQVQALKTFSLPDLPYDYRALEPLVSGEIMELHHLKHHLTYITNYYKALHQLDEAISKGDSSSILRLQSSIKFNGGGHINHSIFRKNLAPVIEGGGEPPNGLLGVAFHSSYGSLEALMQKINAEGAALQGSGWVWLALDKEMKRLQIETTQNQDPLVTKGPNLVPLLGIDVWEHAYNLQYKNVKADYLKNIWKVMNWKYASELYEKESA

SEQ ID NO: 106105 - DNA, 930 bp, Vitis vinifera
  CDS (1)..(930)
atgacaataacaataataataataataataattaataataataataataataataataataatgggtggaaatcatctcgcagcttgctatggaggggcaaacggagaacatgttcaaggaagggcaattcctctttaattattgcaaaatttgagctcaagcctcctccatatcctcttagtgctttggagccacacatgagccgtgagacgttggaataccattggggaaagcaccatagaggttatgtggacaatttgaataggcaaatagtgggaacagagctagatggaatgacattggaggatattataaccattacatacaacaagggtgatctccttccagccttcaataatgctgcacaggtttggaaccacacctccttctgggaaagcatgaaaccaggtggtggaggagagccatctggtgatcttctagaactcattaaaagagatttcggttcttttgaacgttttgttgaagagttcaaattagctgcatccacacagtttggttctggttgggcctggcttgcgtacaaagcaaatagacttgatgtgggaaatgcagtaaatcctcgcccatcagaagaggacaaaaagctggttgtggtgaagagtcctaatgccataaaccccctgctttgggattgcaatccactcctaactattgatgtgtgggagcatgcatactaccttgactttcagaatcaccggcctgactacatatcaatctttatggagaagctcgtatcatgggaagcagtcagttccagacttgagatggcaaaggctcaggtggctaatagagaaagagaagaagagaggaggaaaagagcagaggaagaggaacaaatgccatacagtgaagctgtgaagatgtatttggaaagcgatggtgatggtgatgactcggaggctgaatga

SEQ ID NO: 106106 - protein, 309 aa, Vitis vinifera
MTITIIIIIIINNNNNNNNNNGWKSSRSLLWRGKRRTCSRKGNSSLIIAKFELKPPPYPLSALEPHMSRETLEYHWGKHHRGYVDNLNRQIVGTELDGMTLEDIITITYNKGDLLPAFNNAAQVWNHTSFWESMKPGGGGEPSGDLLELIKRDFGSFERFVEEFKLAASTQFGSGWAWLAYKANRLDVGNAVNPRPSEEDKKLVVVKSPNAINPLLWDCNPLLTIDVWEHAYYLDFQNHRPDYISIFMEKLVSWEAVSSRLEMAKAQVANREREEERRKRAEEEEQMPYSEAVKMYLESDGDGDDSEAE

SEQ ID NO: 106107 - DNA, 795 bp, Vitis vinifera
  CDS (1)..(795)
atgggctactgttgtaataattctttcccagctagctctcatgttcttttaaccgacttatctcagagatggaagtgccccaagctccaaaatctgcggcacaaaggacagtttcatggatcacaaaaagcttcaaaagttcttgccttctatggtctgaaagcccctccatataaacttgatgctttagaaccacatatgagtcggaggacactggagatgcattggggagaccatcaccgaggttatgtggaaggtttgaacaaacaacttgagaaggatgacatactatatggccacacattggatgagcttgtcaaagtaacatataacaatgggaaccccttacctgaatttaataatgctgctcaggtttggaatcatgacttcttttgggaatccatgcaaccaggaggcggggacatgcctagactaggtcttcttgagcagattgaaaaggattttggttccttcactaatttcaaggagaagtttttagaagcagccctcacattatttggctctggatgggtttggctcgttttgaagagaaatgagagatgtcttgcagtggtaaaaacatccaatgccataaaccccattgtgtgggacgacattcccatcatcagcttggacgtgtgggagcatgcttattatctggattacaagaacgacaaagggaagtacgcgactgtgttcatgaaccaccttgtgtcttggaatgctgcagccgcgcgcatggccagggctgaggcctttgtgaacctaggcgaaccaaaaatccccatagcctaa

SEQ ID NO: 106108 - protein, 264 aa, Vitis vinifera
MGYCCNNSFPASSHVLLTDLSQRWKCPKLQNLRHKGQFHGSQKASKVLAFYGLKAPPYKLDALEPHMSRRTLEMHWGDHHRGYVEGLNKQLEKDDILYGHTLDELVKVTYNNGNPLPEFNNAAQVWNHDFFWESMQPGGGDMPRLGLLEQIEKDFGSFTNFKEKFLEAALTLFGSGWVWLVLKRNERCLAVVKTSNAINPIVWDDIPIISLDVWEHAYYLDYKNDKGKYATVFMNHLVSWNAAAARMARAEAFVNLGEPKIPIA

SEQ ID NO: 106109 - DNA, 657 bp, Macrobrachium rosenbergii
  CDS (1)..(657)
atgctcagtttcagccgtctgttcgcttcccgagggttggtggccgcaggtgtacgaagctgccagaaacacacgttgcccgatcttccttatgactacaatgctttagaacccgtaatttgcgctgagattatgcagcttcatcactcaaagcatcaccagacctatgtcaataatcttaatgtagctgaggaaaagttggctgaagctcatgccaagggtgatgtaagcactgtgatatccttggcacctgccctgaagttcaatggaggaggtcacattaatcacacaattttctggcagaatttatccccagatggtggtgaaccatcaggagaactgctagctgccattaacagagattttggcagtcttgatgcaatgaaaagtcagctctcagcagccactatagcagtccagggttcaggatggggttggttaggatataacaaacagaagggggcactacaaattgctacttgtcccagtcaggaccctctgcaagcatcaacaggtcttgtacctttgtttggaattgatgtgtgggagcatgcttactacttacaatacaagaatgttagaccagattatgtcaatgcgatatggaatgtagccaattggaatgacatttcggcaagatttgctgctgcaaagtga

SEQ ID NO: 106110 - protein, 218 aa, Macrobrachium rosenbergii
MLSFSRLFASRGLVAAGVRSCQKHTLPDLPYDYNALEPVICAEIMQLHHSKHHQTYVNNLNVAEEKLAEAHAKGDVSTVISLAPALKFNGGGHINHTIFWQNLSPDGGEPSGELLAAINRDFGSLDAMKSQLSAATIAVQGSGWGWLGYNKQKGALQIATCPSQDPLQASTGLVPLFGIDVWEHAYYLQYKNVRPDYVNAIWNVANWNDISARFAAAK

SEQ ID NO: 106111 - DNA, 861 bp, Macrobrachium rosenbergii
  CDS (1)..(861)
atggctgacaaggatgcatacatcagtgccttggagcagaaattggccgaactgtcttgcattgaagtagatcagatcaaaaagaatcagcttgcaaatgcagctgatgaggctcgggtcatcggcgagatggccgcttacgtggccagcatcacggttcagcgagccgctgaagcccaagtaggacttgtcagcccccagattgctgacatttactcctatatcaatgctgaactgagcgaggcccgtggtgctcatgttcttcctcccatgaagtacgactacaatgcattggagcctcacatttctggtaccatcatggaaatccatcacaccaagcatcaccaagcatatatcaacaaccttaaagcagcaacagataagttgatagaggccgaacaaaacaatgatgtaaatgccatgaatgcgttgttacctgccatcaagttcaacggaggtggtcacctgaaccacaccatcttctggaccaacatgagcccaaatggaggtggagaaccaagtggttcagttgctgatgccattaatgctgaatttggttcattccaggcatttaaggataagttttctgctgctagcgtgggcgtgaaagggtcaggttggggctggcttggctactgtcctaagaacgacaaagttgccgttgccacgtgccaaaaccaggatcctcttcagcttacacatggattggtaccactacttggactggacgtatgggaacatgcctactatctgcagtacaagaaccttagggctgactatgtcaaagctttctttaatgtgatcgactggtctaatgtaaacgagcggtacgaaaacgcccgcaaggctgctggacattga

SEQ ID NO: 106112 - protein, 286 aa, Macrobrachium rosenbergii
MADKDAYISALEQKLAELSCIEVDQIKKNQLANAADEARVIGEMAAYVASITVQRAAEAQVGLVSPQIADIYSYINAELSEARGAHVLPPMKYDYNALEPHISGTIMEIHHTKHHQAYINNLKAATDKLIEAEQNNDVNAMNALLPAIKFNGGGHLNHTIFWTNMSPNGGGEPSGSVADAINAEFGSFQAFKDKFSAASVGVKGSGWGWLGYCPKNDKVAVATCQNQDPLQLTHGLVPLLGLDVWEHAYYLQYKNLRADYVKAFFNVIDWSNVNERYENARKAAGH

SEQ ID NO: 106113 - DNA, 702 bp, Kluyveromyces delphensis
  CDS (1)..(702)
atgttggcttccaagtttagacctgcgcaattgagaaccgcgtccactgtgctaagacgtaccaaggtcacgcttccagacctagagtgggacttcggcgctttggagcctcacatttctggccagatcaacgagctgcactactcgaaacaccaccagacctacgtcaatggtctgaacactgctaccgaccagttccaagagctgagccacaagctcgagaaggatccaaacgacttgcagactgcgcgtgacctgatccaggtgcagcagaacatcaagtttcacggtggcgggtacacgaaccactgtttgttctggaagaaccttactcccgagaagaacggcggcgggcagccacctgccggctcctcggctttggccaagcagatcgaagcgcagtacggctcgctcgagaagctgcagcaggccaccaacgccaaactggccggcatccagggctccggctgggcgttcatcgtcaagaacctagagaacggcggcgccatcgatgtcgtgcaaacgtacaaccaggacaccgtcggcaaccagttcgtgccacttgtcgcgatcgacgcctgggagcacgcgtactacctgcagtaccagaacaagaaggtcgactacttcaaggccatctggaacgtcatcaactggcaggaggctgcgaagagatacgagtcctccgccgtcaccaaatga

SEQ ID NO: 106114 - protein, 233 aa, Kluyveromyces delphensis
MLASKFRPAQLRTASTVLRRTKVTLPDLEWDFGALEPHISGQINELHYSKHHQTYVNGLNTATDQFQELSHKLEKDPNDLQTARDLIQVQQNIKFHGGGYTNHCLFWKNLTPEKNGGGQPPAGSSALAKQIEAQYGSLEKLQQATNAKLAGIQGSGWAFIVKNLENGGAIDVVQTYNQDTVGNQFVPLVAIDAWEHAYYLQYQNKKVDYFKAIWNVINWQEAAKRYESSAVTK

SEQ ID NO: 106115 - DNA, 615 bp, Aeromonas veronii
  CDS (1)..(615): transl_table=11
atgagccataccctgccagccctgaactatgcctacgacgcactggaaccccatatcgatgccttgaccatggagatccaccatagccgtcatcaccagacctatatcaacaacctcaacgccgcgttggaaggggcgccagagctggctgcaatgccggtagaggagttgctgcgccgtttcgatactctgcctgccaccttgcagggggcggtacgcaaccatggcggcggccatgccaaccactccctgttctggctggtgatgagcccgcaggggggcggtgagccgggtggtgaactggctctggccatcgagcgggaattggggggattcgatgccttcaagcaggctttcactcaggcggctctgagccgctttggtagtggctgggcctggctggtggtggacaaggcgggcagattgcaggtggagagcagtgccaatcaggatagtcccttgatgcatggccataccccgatcctggggctggatgtgtgggagcacgcctactatctcaagtaccagaacaagcgtcctgactatatcgctgccttctatcaggtggtggagtgggccgaagtggcccgccgctatcaggcggcgcgaggctga

SEQ ID NO: 106116 - protein, 204 aa, Aeromonas veronii
MSHTLPALNYAYDALEPHIDALTMEIHHSRHHQTYINNLNAALEGAPELAAMPVEELLRRFDTLPATLQGAVRNHGGGHANHSLFWLVMSPQGGGEPGGELALAIERELGGFDAFKQAFTQAALSRFGSGWAWLVVDKAGRLQVESSANQDSPLMHGHTPILGLDVWEHAYYLKYQNKRPDYIAAFYQVVEWAEVARRYQAARG

SEQ ID NO: 106117 - DNA, 585 bp, Aeromonas veronii
  CDS (1)..(585): transl_table=11
atggcattcgaacttcccgctctgccctatgcaatcaacgctctggaaccgcacatctcccaggaaactctggaatatcaccacggcaagcaccacaacacctacgtggtcaacctgaacaatctggtgccgggtaccgagtttgaaggcaagtctctggaagagatcatcaagacctccaacggcggcatcttcaacaacgccgcccagatctggaaccacaccttctactggcactgcctctccccgaatggcggtggcgagccgactggcgccctggctgatgccatcaacaaggcattcggctccttcgccgagttcaaagatgccttcaccaaatcagccatcggcaacttcggttccagctggacttggctggtgaagaaagctgacggctctctggctatcgtcaacacctccaacgccggctgcccgctgactgaagccggtaccaccccgctgctgaccgttgacctgtgggagcacgcctactatatcgacttccgcaacctgcgtccgaagtacatggaaaccttctgggctctggttaactgggaattcgtggccaagaatctggctgcttaa

SEQ ID NO: 106118 - protein, 194 aa, Aeromonas veronii
MAFELPALPYAINALEPHISQETLEYHHGKHHNTYVVNLNNLVPGTEFEGKSLEEIIKTSNGGIFNNAAQIWNHTFYWHCLSPNGGGEPTGALADAINKAFGSFAEFKDAFTKSAIGNFGSSWTWLVKKADGSLAIVNTSNAGCPLTEAGTTPLLTVDLWEHAYYIDFRNLRPKYMETFWALVNWEFVAKNLAA

SEQ ID NO: 106119 - DNA, 696 bp, Raphanus sativus
  CDS (1)..(696)
atggcgattcgttccgtagccagcagaagaaccctagccggcctcaaggagacatcttcgaggcttcttggttcccgatctatccagactttcacgcttcctgatctcccctatgattacagcgcgttggagccggcgataagcggcgagatcatgcagatccatcaccagaagcaccaccaggcttacgtcactaattacaacaatgccctcgagcagctggatcaggccgtcaacaagggagacgcttccgctgtcgttaagctgcagagcgccatcaagttcaacggcggaggtcatgtgaaccattctattttctggaagaaccttgctcctgtaaaggaaggtggtggagagccaccgaagggatctcttggaggagctattgatacttcatttggctctctcgaaggtttggtgaagaagatgagtgcggaaggtgctgctgtgcaaggctcaggatgggtgtggctcggtttagacaaagagcttaagaagcttgtggttgacacaaccgcaaatcaggatccacttgtgacgaaaggaggaagcttggttcctctggtgggtatagatgtttgggagcacgcctactacttgcagtacaagaatgtgaggccggattatctgaagaacgtgtggaaagtcatcaactggaaatatgcaagcgaagtttatgagaaggaatgcaagtga

SEQ ID NO: 106120 - protein, 231 aa, Raphanus sativus
MAIRSVASRRTLAGLKETSSRLLGSRSIQTFTLPDLPYDYSALEPAISGEIMQIHHQKHHQAYVTNYNNALEQLDQAVNKGDASAVVKLQSAIKFNGGGHVNHSIFWKNLAPVKEGGGEPPKGSLGGAIDTSFGSLEGLVKKMSAEGAAVQGSGWVWLGLDKELKKLVVDTTANQDPLVTKGGSLVPLVGIDVWEHAYYLQYKNVRPDYLKNVWKVINWKYASEVYEKECK

SEQ ID NO: 106121 - DNA, 639 bp, Raphanus sativus
  CDS (1)..(639)
atggccgcttcagctgctgtaaccgcaaactacgtcctcaagccacctccataccctctggatgctttggagccgcatatgagcaagcaaactctagagtttcactggggaaaacaccacagggcttacgtggacaacctcaagaaacaggttcttggatccgagcttgaaggcaaggccttagagcatatcatccaaaacacttacaacaatggcgacctcctccctcctttcaacaacgctgctcaggcgtggaaccacgagtttttctgggaatcaatgaaaccaggtggtggaggaaagccatcaggagagcttcttgctctgcttgaaagagatttcacttcttatgagaagttttatgatgagttcaatgctgctgctgccactcagtttggagctggctgggcctggcttgcttacgcagataacaaactcaaagttgtgaaaactccaaatgctgtaaacccccttgtgctcggctctttcccattgcttaccattgatgtctgggagcatgcatactatctcgacttccagaaccggagacccgattacataaagacattcatgaacaatcttgtgtcttgggaggctgttagttccagacttgaggctgccaaggctgcttctgcttaa

SEQ ID NO: 106122 - protein, 212 aa, Raphanus sativus
MAASAAVTANYVLKPPPYPLDALEPHMSKQTLEFHWGKHHRAYVDNLKKQVLGSELEGKALEHIIQNTYNNGDLLPPFNNAAQAWNHEFFWESMKPGGGGKPSGELLALLERDFTSYEKFYDEFNAAAATQFGAGWAWLAYADNKLKVVKTPNAVNPLVLGSFPLLTIDVWEHAYYLDFQNRRPDYIKTFMNNLVSWEAVSSRLEAAKAASA

SEQ ID NO: 106123 - DNA, 663 bp, Pneumocystis carinii
  CDS (1)..(663)
atgttaaagtcatttagagatttggttttcaaaaaaactattaaaaactctcgttttttttctcattcaaaacatgttttaccaagtcttccttatgattatcaggcattagaaccatatctttcagcagatttaattgagcttcattataatcaacatcatcgggcatatgttacaaatttaaataagacgatagagaaatattatgagggaaatgaatcatcattagattcgtttattaaccggttaaatcttttaacatctataaaattttttgcaggtggtcatattaatcattcattatattgggaaaatcttcttcctaataaacaaggaggcggggaaataattaatggacctttagtagaagctattaagaaagaatggaaaagtgtcgatgaatttattcgtatatttaatatgcaattggcaggaattcaaggaagtggatgggcatggcttgtaaaatcgccttttagtcaacgtctaagtattcaaataacaatgaatcaagatgttgtgacacagggtaaagttattcttggaatcgatgcatgggaacattcatattatgttcaatatttaaataataaaacaaaatattttgaaaatatatggaatgtgatcaattggaaagttatgaatcaacgatttgagcaatag

SEQ ID NO: 106124 - protein, 220 aa, Pneumocystis carinii
MLKSFRDLVFKKTIKNSRFFSHSKHVLPSLPYDYQALEPYLSADLIELHYNQHHRAYVTNLNKTIEKYYEGNESSLDSFINRLNLLTSIKFFAGGHINHSLYWENLLPNKQGGGEIINGPLVEAIKKEWKSVDEFIRIFNMQLAGIQGSGWAWLVKSPFSQRLSIQITMNQDVVTQGKVILGIDAWEHSYYVQYLNNKTKYFENIWNVINWKVMNQRFEQ

SEQ ID NO: 106125 - DNA, 675 bp, Triticum aestivum
  CDS (1)..(675)
atggcgctccgcacgttggccgcgaagaaaaccctaggcctggcgctcggcggcgccaggggcgtggcgacgttcacgctccccgacctcccctacgactacggtgcgctggagccggccgtctccggcgagatcatgcgcctgcaccaccagaagcaccacgccacctacgtcgcccactacaacaaggcgctcgagcagctcgacgccgccgtcagcaagggggacgcgtccgccgtcgtccacctccagagcgccatcaagttcaacggcggcggtcatgttaaccattccatcttctggaagaacctcaagcctatcagcgagggtggtggtgaggcacctcatggcaaacttggctgggccattgatgaagattttggttctattgagaaacttataaagaagatgaatgcagagggtgctttacaaggatctggatgggtgtggctagctttggataaagaggccaaagggctttcagttgaaactactcctaatcaggaccctcttgtgaccaaagggtcaaacctgcatcctttgttgggaattgatgtctgggagcatgcgtactacctgcagtacaagaacgtgaggccggactacctgaccaacatctggaaggtggtgaactggaaatatgctggagaagagtatgaaaaagtgcttgcgtga

SEQ ID NO: 106126 - protein, 224 aa, Triticum aestivum
MALRTLAAKKTLGLALGGARGVATFTLPDLPYDYGALEPAVSGEIMRLHHQKHHATYVAHYNKALEQLDAAVSKGDASAVVHLQSAIKFNGGGHVNHSIFWKNLKPISEGGGEAPHGKLGWAIDEDFGSIEKLIKKMNAEGALQGSGWVWLALDKEAKGLSVETTPNQDPLVTKGSNLHPLLGIDVWEHAYYLQYKNVRPDYLTNIWKVVNWKYAGEEYEKVLA

SEQ ID NO: 106127 - DNA, 930 bp, Zantedeschia aethiopica
  CDS (1)..(930)
  misc_feature (618)..(618): r is g or a
atggctgggttggcagttcttccctcgacctctgcactaccccttccattcccaggttgcagcaggcgcgccggttccctacgtcgcatagcgcccaaggtgggtagaagcggtcccctgaccattgttgcccagttggaactgaagccccctccatactcactgaacgcactggagccgtacatgagccaggagacgctggaattccactgggggaagcatcacagggggtatgtggacggcctcaaccggcagatattggggaccgagctagcaggtctctcgctcgaggaaattgtcatcaaatcctacaacgagggggatctgttgcccaccttcaacaatgctgctcagatctggaatcatgatttcttctggcaatccatgaagccagacggtggtggaaagccatttggagtcctcatggaactgatcgagagggactttggttcctttgaaggaatgatggcgcaattcaagaatgctgctttgacacagtttggttccggctgggcttggcttgtgtataaggcaaataggcttgatgtgggaaatgcagtaaatccttgtccgacagaaaaggactataaacttattattgagaagactcccaatgcrgtcaatcccctcatttgggactacaatccaatccttgtcgttgatgtatgggagcatgcttactacctggactatcagaatagaaggcccgattttgtctccacatttatggacaagctcatctcgtgggaagcagctagcgctaggcttgaggctgcaatggctcaagcagccgaggcgcaagcagccgagagagcgagagaagaagaggagcgaagaaaagaggaagaggaagatgaggagacgagggatgacggcggagacatgaagatgtatgtggacagtgacgacgatggtttagaagacgagtga

SEQ ID NO: 106128 - protein, 309 aa, Zantedeschia aethiopica
MAGLAVLPSTSALPLPFPGCSRRAGSLRRIAPKVGRSGPLTIVAQLELKPPPYSLNALEPYMSQETLEFHWGKHHRGYVDGLNRQILGTELAGLSLEEIVIKSYNEGDLLPTFNNAAQIWNHDFFWQSMKPDGGGKPFGVLMELIERDFGSFEGMMAQFKNAALTQFGSGWAWLVYKANRLDVGNAVNPCPTEKDYKLIIEKTPNAVNPLIWDYNPILVVDVWEHAYYLDYQNRRPDFVSTFMDKLISWEAASARLEAAMAQAAEAQAAERAREEEERRKEEEEDEETRDDGGDMKMYVDSDDDGLEDE

SEQ ID NO: 106129 - DNA, 723 bp, Zantedeschia aethiopica
  CDS (1)..(723)
atggccttccaaaccctcctcgccaagaaggccctcggcacggcgctccgcaatggcgcggctgagctagggctggcgccagccctgggcctctgccaggccaggaagctgcagaccttctcgctgcccgacctgccgtacgactatggctccctggagccggccatcagcggggagatcatgcggatccatcaccagaagcaccaccaggcctacatcaccaactacaacaaggcgctggagcagctcgacgaggccatcgccaagggggatgcctccaaggtcgtggggctacagagcgccatcaagtttaatggcggcggtcatgttaaccattcaatcttttggaaaaatcttgctcctaccaaggaaggaggtggtgaacctccaaagggtgcacttggctgggctattgatacggatttgggttcctttgaagcactgattcaaaagatcagtgccgaaggtgctgctcttcagggttctggatgggtgtggcttgctctggataaggagttgaagaaagttacagtcgaaaccactgcaaatcaggaccccctggtaaccaagggactacatctggttcccttgttgggaatagatgtatgggagcatgcctactatttgcagtacaaaaatgtgaggccagactatttgaagaacatttggggtgttatcaactggaaatatgccagtgaggtttatgagaaagagtcggcttga

SEQ ID NO: 106130 - protein, 240 aa, Zantedeschia aethiopica
MAFQTLLAKKALGTALRNGAAELGLAPALGLCQARKLQTFSLPDLPYDYGSLEPAISGEIMRIHHQKHHQAYITNYNKALEQLDEAIAKGDASKVVGLQSAIKFNGGGHVNHSIFWKNLAPTKEGGGEPPKGALGWAIDTDLGSFEALIQKISAEGAALQGSGWVWLALDKELKKVTVETTANQDPLVTKGLHLVPLLGIDVWEHAYYLQYKNVRPDYLKNIWGVINWKYASEVYEKESA

SEQ ID NO: 106131 - DNA, 606 bp, Vibrio alginolyticus
  CDS (1)..(606): transl_table=11
atgacttacacattaccagatttaccttacgcatacgatgcattggaaccatatattgatgaagaaacgatgcatttgcatcatgataaacaccacaacacttatgtaacaaacttaaatgcagcgattgaaaaacatcctgaattaggtgaaaaaacagttgaagaattattagcagacttttcttctgtacctgaagatattcaaacagcggttcgcaacaatggcggcggccatgctaaccacacgttcttctgggaaatcttaggcccaaatgccggtggcgaacctactggggcaatcaaagaggcaattgaagaaacttttggcagctttgaagactttaaagaagaatttaaaactgctgcaactggacgttttggttcaggttgggcatggttagttgttaaagacggtaaactagcaatcacttcaaccgcgaatcaagattcaccattgatggatggtcaaacacctgtattaggtttagatgtttgggaacatgcgtattacttaaaatacaaaaatgttcgtccagattacatcaatgctttctggagtgttgttaactgggacaaagtaaacgaatatttcgcaaaagcttaa

SEQ ID NO: 106132 - protein, 201 aa, Vibrio alginolyticus
MTYTLPDLPYAYDALEPYIDEETMHLHHDKHHNTYVTNLNAAIEKHPELGEKTVEELLADFSSVPEDIQTAVRNNGGGHANHTFFWEILGPNAGGEPTGAIKEAIEETFGSFEDFKEEFKTAATGRFGSGWAWLVVKDGKLAITSTANQDSPLMDGQTPVLGLDVWEHAYYLKYKNVRPDYINAFWSVVNWDKVNEYFAKA

SEQ ID NO: 106133 - DNA, 609 bp, Bacillus subtilis
  CDS (1)..(609): transl_table=11
atggcttacgaacttccagaattaccttatgcgtacgatgctttagaaccgcatatcgacaaggaaactatgactattcaccatacgaaacaccacaacacatacgtgacaaatttaaacaaagcggttgaaggaaacactgctcttgccaacaaatcagttgaagagcttgttgcagatcttgattctgttcctgaaaacatccgcactgcagtccgcaacaacggcggcggacacgcgaaccacaaattattctggacacttttatctccaaacggcggaggcgaaccgactggcgcgcttgctgaagagattaacagtgtatttggaagctttgacaaattcaaagagcaattcgcagcagcagcagctggacgcttcggttctggctgggcatggcttgttgtgaacaacggtaaacttgaaatcacaagcacgccaaaccaagattctccgctttcagaaggcaaaacgcctatcttaggtcttgacgtttgggagcatgcttactaccttaactatcaaaaccgccgtcctgattacatttcagctttctggaatgttgtaaactgggacgaagtggctcgtctatacagcgaagcaaaataa

SEQ ID NO: 106134 - protein, 202 aa, Bacillus subtilis
MAYELPELPYAYDALEPHIDKETMTIHHTKHHNTYVTNLNKAVEGNTALANKSVEELVADLDSVPENIRTAVRNNGGGHANHKLFWTLLSPNGGGEPTGALAEEINSVFGSFDKFKEQFAAAAAGRFGSGWAWLVVNNGKLEITSTPNQDSPLSEGKTPILGLDVWEHAYYLNYQNRRPDYISAFWNVVNWDEVARLYSEAK

SEQ ID NO: 106135 - DNA, 684 bp, Candida sp
  CDS (1)..(684)
atgctttcttctgctatcaagagatccgccgtcggtattgctagacgttccgtcgtgtcttcttccgttggagccgtcagaaccaaagtatcgttaccagacttggattgggacttcggagccttggagcctcacatttcgggacagatcaacgaaatccactacaccaagcaccaccaaacttacgttaacggttacaaccaagccattgagcaagcagccaggccaaggcaaggggaggtcaagaagaccattgaattgcaaaaggccatcaacttccacggtggtggatacaccaaccactgtttgttctggaagaacttggctccagagaagcaaggaggtggtgagccacctgctgaagactctgagtttgccaagagaatcgttgagcaatacggctccctcgacaacttgaaggctatcaccaacggtaagttggccggtatccaaggttctggttgggctttcattgtcaagaacaaggaaaacggtggtgctttagatgttatcactactgcaaaccaagatactgttcttggaccatttgttccattggttgctattgatgcttgggaacatgcctactacttgcaataccagaacgtcaaggctgactacttcaaggccatctggaacgttatcaactggaaggaagccgagaagagatacttgatcaactaa

SEQ ID NO: 106136 - protein, 227 aa, Candida sp
MLSSAIKRSAVGIARRSVVSSSVGAVRTKVSLPDLDWDFGALEPHISGQINEIHYTKHHQTYVNGYNQAIEQAARPRQGEVKKTIELQKAINFHGGGYTNHCLFWKNLAPEKQGGGEPPAEDSEFAKRIVEQYGSLDNLKAITNGKLAGIQGSGWAFIVKNKENGGALDVITTANQDTVLGPFVPLVAIDAWEHAYYLQYQNVKADYFKAIWNVINWKEAEKRYLIN

SEQ ID NO: 106137 - DNA, 696 bp, Triticum aestivum
  CDS (1)..(696)
atggcgctccgcacgttggccgcgaagaaaaccctaggcctggcgctcggcggcgcgcggccgctggccgccgccaggggcgtggcgacgttcacgctccccgacctcccctacgacttcggtgcgctggagccggccgtctccggcgagatcatgcgcctgcaccaccagaagcaccacgccacctacgtcgccaactacaacaaggcgctcgagcagctcgacgccgccgtcagcaagggggacgcgtccgccgtcgtccacctccagagcgccatcaaattcaacggcggcggtcatgttaaccattcaatcttctggaagaacctcaagcctattagcgagggtggtggtgagccacctcatggcaaacttggctgggccattgatgaggattttggttctattgagaaacttataaagaagatgaatgcagagggtgctgctttacaaggatctggatgggtgtggctagctttggataaagaggccaaaaagctttcagttgaaactactcctaatcaggaccctcttgtgaccaaagggtcaaacctgtatcctttgttgggaattgatgtctgggagcatgcgtactacctgcagtacaagaacgtgaggccggactacctgaccaacatctggaaggtggtgaactggaaatatgccggagaagagtatgaaaaagtgcttgcatga

SEQ ID NO: 106138 - protein, 231 aa, Triticum aestivum
MALRTLAAKKTLGLALGGARPLAAARGVATFTLPDLPYDFGALEPAVSGEIMRLHHQKHHATYVANYNKALEQLDAAVSKGDASAVVHLQSAIKFNGGGHVNHSIFWKNLKPISEGGGEPPHGKLGWAIDEDFGSIEKLIKKMNAEGAALQGSGWVWLALDKEAKKLSVETTPNQDPLVTKGSNLYPLLGIDVWEHAYYLQYKNVRPDYLTNIWKVVNWKYAGEEYEKVLA

SEQ ID NO: 106139 - DNA, 702 bp, Rheum australe
  CDS (1)..(702)
atggcgctccgagttgcatctaggaaaaccctagctcatgctcgtctagggttagggtttctccaatctcgatctctccagacactcaccttacctgacatctcctacgactatggcgctctggagccggcgatcagtggcgagatcatgcagctgcaccaccagaagcatcatcagacctacgttaccaacgacaacaaggccttggaacagctccaggacgccataaccaaaggcgatgctccttccgttgccaaattgcagagcgcgcttaagttcaacggcggaggtcacataaaccactcaattttctggaagaatcttactccagttagccatggaggtggtgaacctccccatggttctttaggctgggctattgatgccaactttggttccatggaagcactgatcaagaagatgaatgctgaaggtgctgccttacagggatcaggctgggtgtggcttgggctggataaggagttcaagaggcttgtgattgaaaccactccaaatcaagacccattagtaacaaaaggagcgagtttgcttcccttgcttggtatagatgtttgggagcatgcatactacctgcagtacaagaacgtgaagcctgactatttaaacaacatatggaaagtggtgaactggaagtatgccagtgaactgtatgaaaaggaatgcccgactgagcgcgactaa

SEQ ID NO: 106140 - protein, 233 aa, Rheum australe
MALRVASRKTLAHARLGLGFLQSRSLQTLTLPDISYDYGALEPAISGEIMQLHHQKHHQTYVTNDNKALEQLQDAITKGDAPSVAKLQSALKFNGGGHINHSIFWKNLTPVSHGGGEPPHGSLGWAIDANFGSMEALIKKMNAEGAALQGSGWVWLGLDKEFKRLVIETTPNQDPLVTKGASLLPLLGIDVWEHAYYLQYKNVKPDYLNNIWKVVNWKYASELYEKECPTERD

SEQ ID NO: 106141 - DNA, 612 bp, Chlorella pyrenoidosa
  CDS (1)..(612)
atgccattccagctgccccctcttccgtatgctataaatgctttggagccccacatgtctcagaagtcgctggagtttcattatggcaagcaccatcagacatacttggataatatgaacaagcggattgctggcagtaaccttgagagcaagacccttgaggaggttatcaaggagagttggaacaatggcagccctacagcagtgttcaacaatgctgctcaggtctggaaccacacattcttttgggagagcatgaaacccaatggtggtggtgcacccagcggcaaactagcagaggccatcaatgcagcttctggcagtctggatgactttaaggcacagttcaagaatgcaggtgctactcagtttggctctggctgggcatggcttgtgactgacaagtctggcaagttgtctattgagaagacccccaatgccgtgacacccctggtggaggagagcaagacacccattctgacgatggatgtctgggagcatgcatactacctggatgtgcagaacaggaggcctgactacatgacgacatttgttgacagcctcattgactgggacaacgtgggcaagcgctatgaggctgcaactgcctga

SEQ ID NO: 106142 - protein, 203 aa, Chlorella pyrenoidosa
MPFQLPPLPYAINALEPHMSQKSLEFHYGKHHQTYLDNMNKRIAGSNLESKTLEEVIKESWNNGSPTAVFNNAAQVWNHTFFWESMKPNGGGAPSGKLAEAINAASGSLDDFKAQFKNAGATQFGSGWAWLVTDKSGKLSIEKTPNAVTPLVEESKTPILTMDVWEHAYYLDVQNRRPDYMTTFVDSLIDWDNVGKRYEAATA

SEQ ID NO: 106143 - DNA, 681 bp, Haliotis discus discus
  CDS (1)..(681)
atgttgtctgctacgctctctgctgtaaaaagggcagtgccttctccagcatggcttgctacagcagccgtgaggatgaagcacacactgccagacctcccctacgactataatgctctcgagccctacatctcggctgacatcatgaagcttcaccacaagaagcatcacaacgcctacgtcacaaacctcaatgtggctcaggagaaactgtctgaagcagaggcaaaaaacgatattaacagcatcatttcactccagccatccctcaggttcaatggcggaggacatatcaaccactccatcttctgggaggtgcttagcccaaatggtggcggggaaccggatggggacctcatgcactgcatcaaacgtgactttggttcatacgatgaaatgaagaaagagcttactgcttcagctgtgacagtccagggctcagggtgggcgtggcttgggtttaacccggtcagtggccgtttgagagtgtctgcctgtgctaaccaagatcccctggaggctacaacaggactggttcccctctttggcatcgatgtctgggaacacgcatactatctccaatacaagaatgtgaggccagattatgttggtgctattttcagtgttgccaactgggaaaatgtggcccgaagactatcagaagccaaacttgcggcctga

SEQ ID NO: 106144 - protein, 226 aa, Haliotis discus discus
MLSATLSAVKRAVPSPAWLATAAVRMKHTLPDLPYDYNALEPYISADIMKLHHKKHHNAYVTNLNVAQEKLSEAEAKNDINSIISLQPSLRFNGGGHINHSIFWEVLSPNGGGEPDGDLMHCIKRDFGSYDEMKKELTASAVTVQGSGWAWLGFNPVSGRLRVSACANQDPLEATTGLVPLFGIDVWEHAYYLQYKNVRPDYVGAIFSVANWENVARRLSEAKLAA

SEQ ID NO: 106145 - DNA, 651 bp, Arthrobacter pascens
  CDS (1)..(651): transl_table=11
atgtccacgatattggaggattttgtgaccgagtacgtattgcccgaactcagctacgattacgccgccctggagccgcatatttccgcgcggatcatggagctgcaccacagcaagcaccacgcagcctacgtggccggcgccaacaacgccctggcccagctggccgaagcccgggagaagggcgacttcgccaacatcaaccggctctccaaggacctcgccttccacaccggcggccacgtcaaccactccgtcttctggaacaacctctccccggacggcggcgacaagcccgagggtgaactcgctgcggccatcgatgacgcgttcggctcgttcgacgcgttccgcgcgcagttctccgctgcggcactgggcctgcagggctccggctggggtttcctcgcctacgagcccatcggcggcaacctggtcatcgagcagctgtacgaccagcagggcaacgttgcgctcggcaccaccccgctgctgatgctggacatgtgggagcacgccttctacctggactacgtcaacgtaaaggccgactacgtcaaggcgttctggaacatcgtgaactgggccgacgtcgccaagcggtttgaggctgcgcgcaccaacgccacggggctcatcaccctcccgtag

SEQ ID NO: 106146 - protein, 216 aa, Arthrobacter pascens
MSTILEDFVTEYVLPELSYDYAALEPHISARIMELHHSKHHAAYVAGANNALAQLAEAREKGDFANINRLSKDLAFHTGGHVNHSVFWNNLSPDGGDKPEGELAAAIDDAFGSFDAFRAQFSAAALGLQGSGWGFLAYEPIGGNLVIEQLYDQQGNVALGTTPLLMLDMWEHAFYLDYVNVKADYVKAFWNIVNWADVAKRFEAARTNATGLITLP

SEQ ID NO: 106147 - DNA, 693 bp, Phaeosphaeria nodorum
  CDS (1)..(693)
atgaacaccacactcctccgcacatctgccctgcgctctgccgccagggctaccgcacccgccgtctctcgagctggcctcgcaggcaccacattcgtccgcggaaaggccactcttcccgacctttcatacgactacggcgccctcgagcccgccatctcgggcaaaatcatggaactccaccacaagaaccaccacaacacctacgtaacctcgttcaacaacttcagcgagcaaatcgccgaggccaagcagaagcaggacatcgccgcgcaaatcgcgctccagccattgatcaactttcacggcggcggccatctcaaccacaccctgttctgggagaacttggcgcccaccagccagggcggcggcgagcccccaacgggcgccctgagcaaggcgattaacgacagctacggcagcttggacgcgttcaaggagaagttcaacaccgcgctggcgggcatccagggcagtgggtgggcgtggttggtccaggatacccagacgggcagtgtgcagatcaggacgtacgcgaaccaggaccctgtagtggggcagttcaggccgattttgggtgttgatgcttgggagcatgcgtactacctccagtaccagaaccgcaaggcggagtacttcaaggctatctgggacgtcatcaattggaaggcggcggagaagcgcttcaagtga

SEQ ID NO: 106148 - protein, 230 aa, Phaeosphaeria nodorum
MNTTLLRTSALRSAARATAPAVSRAGLAGTTFVRGKATLPDLSYDYGALEPAISGKIMELHHKNHHNTYVTSFNNFSEQIAEAKQKQDIAAQIALQPLINFHGGGHLNHTLFWENLAPTSQGGGEPPTGALSKAINDSYGSLDAFKEKFNTALAGIQGSGWAWLVQDTQTGSVQIRTYANQDPVVGQFRPILGVDAWEHAYYLQYQNRKAEYFKAIWDVINWKAAEKRFK

SEQ ID NO: 106149 - DNA, 681 bp, Haliotis discus discus
  CDS (1)..(681)
atgttgtctgctacgctctctgctgtaaaaagggcagtgccttctccagcatggcttgctacagcagccgtgaggatgaagcacacactgccagacctcccctacgactataatgctctcgagccctacatctcggctgacatcatgaagcttcaccacaagaagcatcacaacgcctacgtcacaaacctcaatgtggctcaggagaaactgtctgaagcagaggcaaaaaacgatattaacagcatcatttcactccagccatccctcaggttcaatggcggaggacatatcaaccactccatcttctgggaggtgcttagcccaaatggtggcggggaaccggatggggacctcatgcactgcatcaaacgcgactttggttcatacgatgaaatgaagaaagagcttactgcatcagctgtgacagtccagggctcagggtgggcgtggcttgggtttaacccggtcagtggccgtttgagagtgtctgcctgtgctaaccaagatcccctggaggctacaacaggactggttcccctctttggcatcgatgtctgggaacacgcatactatctccaatacaagaatgtgaggccagattatgttggtgctattttcaatgttgccaactgggaaaatgtggcccaaagactatcagaagccaaacttgcggcctga

SEQ ID NO: 106150 - protein, 226 aa, Haliotis discus discus
MLSATLSAVKRAVPSPAWLATAAVRMKHTLPDLPYDYNALEPYISADIMKLHHKKHHNAYVTNLNVAQEKLSEAEAKNDINSIISLQPSLRFNGGGHINHSIFWEVLSPNGGGEPDGDLMHCIKRDFGSYDEMKKELTASAVTVQGSGWAWLGFNPVSGRLRVSACANQDPLEATTGLVPLFGIDVWEHAYYLQYKNVRPDYVGAIFNVANWENVAQRLSEAKLAA

SEQ ID NO: 106151 - DNA, 816 bp, Gymnadenia conopsea
  CDS (1)..(816)
atgaggtctgtgccggcgccgacatcgcttctttttagcccgtgccacttccactcggctcctgctcccttgctatccagtggcctgaagcttaagccacttaagcttccaaagtgtctaataaagaaaaggcagttgtgcgattctaaaaagtcatccagagttctgagctactatggccttacacctcctccctatagattagatgctttggaaccatacataagcaaaaggacattggaactgcattggggagggcatcaccatgattatgttgagagcttgaataagcagctcaaggacagtccattgtatggatacaccttggaggaacttataaaaacaacctacaataatgggaatccattgccagagttcaataatgctgcacaggtatggaatcatgactttttttgggaatcaatgcatcctgatggtggtaaacttccttggggaggcttgcttcaacagattgaaaaggattttgactctttctccaattttagggatgaatttatgaagtcagcaatgaaactttttggctctggttgggtgtggctagtcctgaagagagaggagaaaaggcttgcagtggttagaacatcaaatgctgtttgtccactagtttttgatgatattccaattctatctcttgatatgtgggagcatgcttattatctggattacaaggatgacagggaaagatatataagcaatttcatgaaccatctagtgtcctggcattcagccacactgcgtattgcaagagctgaggcttttgtaaatctcggagagccaaagatccccgtggcatga

SEQ ID NO: 106152 - protein, 271 aa, Gymnadenia conopsea
MRSVPAPTSLLFSPCHFHSAPAPLLSSGLKLKPLKLPKCLIKKRQLCDSKKSSRVLSYYGLTPPPYRLDALEPYISKRTLELHWGGHHHDYVESLNKQLKDSPLYGYTLEELIKTTYNNGNPLPEFNNAAQVWNHDFFWESMHPDGGKLPWGGLLQQIEKDFDSFSNFRDEFMKSAMKLFGSGWVWLVLKREEKRLAVVRTSNAVCPLVFDDIPILSLDMWEHAYYLDYKDDRERYISNFMNHLVSWHSATLRIARAEAFVNLGEPKIPVA

SEQ ID NO: 106153 - DNA, 864 bp, Penaeus vannamei
  CDS (1)..(864)
atggctgaggcaaaggaagcttacatctccatcctggagaagaagttagctgagctgactggaattgaggtggatcagatcaagaagaatcagttcgcaaatgcagcagatgaggctgtcgccatccgtgagatggcttcatacgtagagggtattgtcgtacagcaggctggtgttgctcaggctggcacagtcagtcctcagattgcacagatgtttgcccatatcaatgctgaattgggtgaggaacgaggtgctcatgctttgccacctctcaagtatgatttcaacgcccttgaacctcacatctccggcatgatcatggagatccaccacacaaagcatcaccagggctacattaacaacctaattgccgctacgaagaagttggttgaggcggaggcagccaatgacgtaagcgcaatgaatgcccttctaccagctatcaagttcaatggaggcggccacttgaaccacaccatcttctggaccaacatggctcccgatgctggtggcgagccgcaaggagctgttgcacaagccattgacgagagctttggatcattccagtccttcaaggacaaattttctgctgccagcgttggagtgaaaggctctggctggggatggctcggctattgccccaatcagaacaagcttgagatcgccacttgccagaaccaggatcccttgcaaatcactcacggactggttccgttgcttggccttgacgtctgggagcatgcttactaccttcagtacaagaacctccgtgcagattacgtgaaggccttcttcaatgtcattaactgggggaacgtgaatgagcgttatgagaatgctcgtaagaatgcaggtcattga

SEQ ID NO: 106154 - protein, 287 aa, Penaeus vannamei
MAEAKEAYISILEKKLAELTGIEVDQIKKNQFANAADEAVAIREMASYVEGIVVQQAGVAQAGTVSPQIAQMFAHINAELGEERGAHALPPLKYDFNALEPHISGMIMEIHHTKHHQGYINNLIAATKKLVEAEAANDVSAMNALLPAIKFNGGGHLNHTIFWTNMAPDAGGEPQGAVAQAIDESFGSFQSFKDKFSAASVGVKGSGWGWLGYCPNQNKLEIATCQNQDPLQITHGLVPLLGLDVWEHAYYLQYKNLRADYVKAFFNVINWGNVNERYENARKNAGH

SEQ ID NO: 106155 - DNA, 864 bp, Penaeus vannamei
  CDS (1)..(864)
atggctgaggcaaaggaagcttacatctccatcctggagaagaagttagctgagctgactggaattgaggtggatcagatcaagaagaatcagttcgcaaatgcagcagatgaggctgtcgccatccgtgagatggcttcatacgtagagggtattgtcgtacagcaggctggtgttgctcaggctggcacagtcagtcctcagattgcacagatgtttgcccatatcaatgctgaattgggtgaggaacgaggtgctcatgctttgccacctctcaagtatgatttcaacgcccttgaacctcacatctccggcatgatcatggagatccaccacacaaagcatcaccagggctacattaacaacctaattgccgctacaaagaagttggttgaggcggaggcagccaacgacgtaagcgcaatgaatgcccttctaccagctatcaagttcaatggaggcggccacttgaaccacaccatcttctggaccaacatggctcccgatgctggtggcgagctgcaaggagctgttgcacaagccattgacgagagctttggatcattccagtccttcaaggacaaattttctgctgccagcgttggagtgaaaggctctggctggggatggctcggctattgccccaatcagaacaagcttgagatcgccacttgccagaaccaggatcccttgcaaatcactcacggactggttccgttgcttggcctcgacgtctgggagcatgcttactaccttcagtacaagaacctccgtgcagattacgtgaaggccttcttcaatgtcattaactgggagaacgtgaatgagcgttatgagaatgctcgtaagaatgcaggtcattga

SEQ ID NO: 106156 - protein, 287 aa, Penaeus vannamei
MAEAKEAYISILEKKLAELTGIEVDQIKKNQFANAADEAVAIREMASYVEGIVVQQAGVAQAGTVSPQIAQMFAHINAELGEERGAHALPPLKYDFNALEPHISGMIMEIHHTKHHQGYINNLIAATKKLVEAEAANDVSAMNALLPAIKFNGGGHLNHTIFWTNMAPDAGGELQGAVAQAIDESFGSFQSFKDKFSAASVGVKGSGWGWLGYCPNQNKLEIATCQNQDPLQITHGLVPLLGLDVWEHAYYLQYKNLRADYVKAFFNVINWENVNERYENARKNAGH

SEQ ID NO: 106157 - DNA, 864 bp, Penaeus vannamei
  CDS (1)..(864)
atggctgaggcaaaggaagcttacatctccatcctggagaagaagttagctgagctgactggaattgaggtggatcagatcaagaagaatcagttcgcaaatgcagcagatgaggctgtcgccatccgtgagatggcttcatacgtagagggtattgtcgtacagcaggctggtgttgctcaggctggcacagtcagtcctcagattgcacagatgtttgcccatatcaatgctgaattgggtgaggaacgaggtgctcatgctttgccacccctcaagtatgatttcaacgcccttgaacctcacatctccggcatgatcatggagatccaccacacaaagcatcaccagggctacattaacaacctaattgccgctacgaagaagttggttgaggcggaggcagccaatgacgtaagcgcaatgaatgcccttctaccagctatcaagttcaatggaggcggccacttgaaccacaccatcttctggaccaacatggctcccgatgctggtggcgagccgcaaggagctgttgcacaagccattgacgagagctttggatcattccagtccttcaaggacaaattttctgctgccagcgttggagtgaaaggctctggctggggatggctcggctattgccccaatcagaacaagcttgagatcgccacttgccagaaccaggatcccttgcaaatcactcacggactggttccgttgcttggccttgacgtctgggagcatgcttactaccttcagtacaagaacctccgtgcagattacgtgaaggccttcttcaatgtcattaactgggagaacgtgaatgagcgtcatgagaatgctcgtaagaatgcaggtcattga

SEQ ID NO: 106158 - protein, 287 aa, Penaeus vannamei
MAEAKEAYISILEKKLAELTGIEVDQIKKNQFANAADEAVAIREMASYVEGIVVQQAGVAQAGTVSPQIAQMFAHINAELGEERGAHALPPLKYDFNALEPHISGMIMEIHHTKHHQGYINNLIAATKKLVEAEAANDVSAMNALLPAIKFNGGGHLNHTIFWTNMAPDAGGEPQGAVAQAIDESFGSFQSFKDKFSAASVGVKGSGWGWLGYCPNQNKLEIATCQNQDPLQITHGLVPLLGLDVWEHAYYLQYKNLRADYVKAFFNVINWENVNERHENARKNAGH

SEQ ID NO: 106159 - DNA, 681 bp, Patinopecten yessoensis
  CDS (1)..(681)
atgctgtctgctacggccaccgtaatcaaaagtgtgcccaaacatgtaggggctttgggtacattggcgagccgcctgaagcatactttgccagaccttccctatgacttcaatgcgttggaacctgccatttctgcagaaatcatgcaaatccactacacaaaacatcatgctacctatgtcaacaatctcaacattgcagaagagaaattagcagaggcaatggagacaaacaacgtcaatcaggtgattcagttgcagccagctctaaagttcaatggtggtggccacataaatcactccatcttctggcaggtccttagccccaatgggggagggcaaccatctggggatctcatggaagttatcaagcgggattttggctcatttgaagctatgaagactgaattgagcaatgcatctgttgctgtgcaaggatctggctggggatggttaggtttcaaccctgtcagtaaaagactaagggtggcaacttgtgccaaccaggacccactacaaccaacaacaggactggttcctctgtttggcattgatgtctgggagcatgcttactatctacagtataaaaacgtccgaccagattacctgaaggctatttggaatattgtaaactgggacaaagttgcacagaacttgcataatgccaccatggcatgctaa

SEQ ID NO: 106160 - protein, 226 aa, Patinopecten yessoensis
MLSATATVIKSVPKHVGALGTLASRLKHTLPDLPYDFNALEPAISAEIMQIHYTKHHATYVNNLNIAEEKLAEAMETNNVNQVIQLQPALKFNGGGHINHSIFWQVLSPNGGGQPSGDLMEVIKRDFGSFEAMKTELSNASVAVQGSGWGWLGFNPVSKRLRVATCANQDPLQPTTGLVPLFGIDVWEHAYYLQYKNVRPDYLKAIWNIVNWDKVAQNLHNATMAC

SEQ ID NO: 106161 - DNA, 684 bp, Dunaliella salina
  CDS (1)..(684)
  misc_feature (576)..(576): y is t or c
atggccgcacttctgagcagcaagctgaacatgactgcccgccctgcccctgcccagcgcccttccgtgcgcaccaatgcggtggcactgaagcccttgccttatgcacccgacgcactggaaccccacatgtccaaggccacctttgagttccaccacggcaagcaccaccgcgcgtacgccgacaacctgaacaagcagatcgccggcaaggagtgggatcagaaggacttggacaccatcgtcatggcgtcttggaacaacggcaaccccacccccgagttcaacaacgccgcgcaggtgtggaaccacgagttcttctgggagagcatgaagcccaacggtggcggtgagcccactggtgctttgatggaggccatcaagcgcgactttggctcctttgatgagttcaagaaccagttcaaggctgctggcatgacccagtttggatctggctgggcatggctggtgactgacaagtctggcaagctgtccatcgccaagacccccaatgccgtggtgcctgtggtggagggcaagtcccccatcctgactgtggatgtctgggaacacgcytactaccttgactaccagaaccgccgccctgacttcatccagaccttcttggacaagctggtcagctgggatgccgtgtccaaccgatatgccaaggcccctgcttaa

SEQ ID NO: 106162 - protein, 227 aa, Dunaliella salina
MAALLSSKLNMTARPAPAQRPSVRTNAVALKPLPYAPDALEPHMSKATFEFHHGKHHRAYADNLNKQIAGKEWDQKDLDTIVMASWNNGNPTPEFNNAAQVWNHEFFWESMKPNGGGEPTGALMEAIKRDFGSFDEFKNQFKAAGMTQFGSGWAWLVTDKSGKLSIAKTPNAVVPVVEGKSPILTVDVWEHAYYLDYQNRRPDFIQTFLDKLVSWDAVSNRYAKAPA

SEQ ID NO: 106163 - DNA, 693 bp, Aspergillus oryzae
  CDS (1)..(693)
atggctgcctctcttatccgtacctctgcccgtaccgctcttcgcgctggagcttcggctactcctaaagctgcgggtgttgcgggtttgacctttgcccgtggcaaggccactctgcctgacctggcttatgactatggcgcccttgagccctctatctccggaaagatcatggagcttcaccacaagaaccaccaccagacctatgtcaacagctacaacaccgccatcgaacagctccaggaggccgtcgccaaggaggacatcaccactcagatcaacctcaagcccctgatcaacttccacggtggtggccacatcaaccacactcttttctgggagaaccttgcccctaagagccagggcggtggtgagcccccatctggagctttggccaaggccatcgacgaaagcttcggcagcttgggagagttccagagcaagatgaacgccgccctcgctggtattcagggaagcggatgggcttggctcgtcaaggacaagcagaccggaaacatcggcatcaagacctatgccaaccaggaccctgtcgttggtcagttccagcctcttctcggtattgatgcttgggagcacgcctactaccttcaataccagaaccgcaaggctgagtacttcagcgccatctgggacgtcatcaactggaaggcggttgagaagcgcttctcgtaa

SEQ ID NO: 106164 - protein, 230 aa, Aspergillus oryzae
MAASLIRTSARTALRAGASATPKAAGVAGLTFARGKATLPDLAYDYGALEPSISGKIMELHHKNHHQTYVNSYNTAIEQLQEAVAKEDITTQINLKPLINFHGGGHINHTLFWENLAPKSQGGGEPPSGALAKAIDESFGSLGEFQSKMNAALAGIQGSGWAWLVKDKQTGNIGIKTYANQDPVVGQFQPLLGIDAWEHAYYLQYQNRKAEYFSAIWDVINWKAVEKRFS

SEQ ID NO: 106165 - DNA, 864 bp, Penaeus vannamei
  CDS (1)..(864)
atggctgaggcaaaggaagcttacatctccatcctggagaagaagttagctgagctgactggaattgaggtggatcagatcaagaagaatcagttcgcaaatgcagcagatgaggctgtcgccatccgtgagatggcttcatacgtagagggtattgtcgtacagcaggctggtgttgctcaggctggcacagtcagtcctcagattgcacagatgtttgcccatatcaatgctgaattgggtgaggaacgaggtgctcatgctttgccacccctcaagtatgatttcaacgcccttgaacctcacatctccggcatgatcatggagatccaccacacaaagcatcaccagggctacattaacaacctaattgccgctacgaagaagttggttgaggcggaggcagccaatgacgtaagcgcaatgaatgcccttctaccagctatcaagttcaatggaggcggccacttgaaccacaccatcttctggaccaacatggctcccgatgctggtggcgagccgcaaggagctgttgcacaagccattgacgagagctttggatcattccagtccttcaaggacaaattttctgctgccagcgttggagtgaaaggctctggctggggatggctcggctattgccccaatcagaacaagcttgagatcgccacttgccagaaccaggatcccttgcaaatcactcacggactggttccgttgcttggccttgacgtctgggagcatgcttactaccttcagtacaagaacctccgtgcagattacgtgaaggccttcttcaatgtcattaactgggagaacgtgaatgagcgttatgagaatgctcgtaagaatgcaggtcattga

SEQ ID NO: 106166 - protein, 287 aa, Penaeus vannamei
MAEAKEAYISILEKKLAELTGIEVDQIKKNQFANAADEAVAIREMASYVEGIVVQQAGVAQAGTVSPQIAQMFAHINAELGEERGAHALPPLKYDFNALEPHISGMIMEIHHTKHHQGYINNLIAATKKLVEAEAANDVSAMNALLPAIKFNGGGHLNHTIFWTNMAPDAGGEPQGAVAQAIDESFGSFQSFKDKFSAASVGVKGSGWGWLGYCPNQNKLEIATCQNQDPLQITHGLVPLLGLDVWEHAYYLQYKNLRADYVKAFFNVINWENVNERYENARKNAGH

SEQ ID NO: 106167 - DNA, 654 bp, Haematococcus pluvialis
  CDS (1)..(654)
atggcattcaccctgcccgcgctgccctacgccttcgacgctcttgagccttttgtggatgccaccacgatgcagatccaccacggcaagcatcaccaggcctacgtcacaaacctgaacaacgcgctggacaagttccctgagctgaaagacttgggcatcgtggacataaacaagaaggtgggcacggacgccattcccaaggacatcgcgaccgtggtgcgcaacaatggcgggggccactggaaccacagctttttctggaagattatgaccgcacccaccaactcgaacggcccgtccgacgagctcaaggccgcggtcgatgcgtcgttcggcagcatggacgtgatgaaggagaagtttaacgcggcagcagccgggcgatttggctctgggtgggcgtggctgggtgtgaaggcggacggcagcctgggcatcacctccacccccaaccaggacaacccgctgcagggcgtggccgacgaggcgctgctgcctgtgctgggcctcgatgtgtgggagcatgcatactacctgaaataccagaaccgccgccccgagtacatcgccgcgttctggaatattgtgaactgggagcaagtgtcggagaacttcacggcggcgaaggcgggcagcccgcccgcgctgtga

SEQ ID NO: 106168 - protein, 217 aa, Haematococcus pluvialis
MAFTLPALPYAFDALEPFVDATTMQIHHGKHHQAYVTNLNNALDKFPELKDLGIVDINKKVGTDAIPKDIATVVRNNGGGHWNHSFFWKIMTAPTNSNGPSDELKAAVDASFGSMDVMKEKFNAAAAGRFGSGWAWLGVKADGSLGITSTPNQDNPLQGVADEALLPVLGLDVWEHAYYLKYQNRRPEYIAAFWNIVNWEQVSENFTAAKAGSPPAL

SEQ ID NO: 106169 - DNA, 615 bp, Pholiota adiposa
  CDS (1)..(615)
atgtccaacactcttcctcccctcccctacgcttatgatgcccttgtgccttatatctctgaggagatcatgactctccatcataccaagcaccatcagacatatgtcaacgccttgaatgcggctgaggcttcgtacgcgaaggcttccacccccaaggagcgcattgctctccaggctgctctcaagtttaacggaggagggcacatcaaccattctctttttggaagaagcctcgctccctccgctgctgtcaacaagggtactggtggtgtcctcaaggacggtcctctcaagtccgctatcgaaaagtacttcggaactctcgaaaatctgcagaagcaattcaacgccaccaccgctgctatccaggggtctggatggggatggctcggagttaaccccagcaccaaggcgctcgaaattacgaccactgctaaccaggatcccctcctgtcccacgccccagttattggcgttgatgtctgggagcgcgccttctacctccaatacaagaacgtcaaggctgactatctcactgcgatttggaacgtcatcaacttcgaggaagcggaggcgcgctaccttgaggctgttggcggctctaagctctga

SEQ ID NO: 106170 - protein, 204 aa, Pholiota adiposa
MSNTLPPLPYAYDALVPYISEEIMTLHHTKHHQTYVNALNAAEASYAKASTPKERIALQAALKFNGGGHINHSLFGRSLAPSAAVNKGTGGVLKDGPLKSAIEKYFGTLENLQKQFNATTAAIQGSGWGWLGVNPSTKALEITTTANQDPLLSHAPVIGVDVWERAFYLQYKNVKADYLTAIWNVINFEEAEARYLEAVGGSKL

SEQ ID NO: 106171 - DNA, 702 bp, Nelumbo nucifera
  CDS (1)..(702)
atggccttgcgatctgtcatcagtcggaaaaccctcggaagtctagggttagggtttagtcatgctcgggggttgcagaccttcacgcttcctgatcttccttacgattacagtgctcttgaacccgccataagtgtggaaattatgcggctccatcaccagaagcaccatcagacttacattaccaactacaataaggctcttgagcagctcgaggaagccatggccaagggcgattcgtccgcagtggttaaattgcaggccgccatcaaatttaacgggggagggcatatcaatcactctattttctggaaaaatctcattcctactagtgaaggaggtggagagcccccccatggtgcccttggttgggctattgacacacattttggttcatttgaagcattggtgaaaaaggtaaatgcagaaggtgctgctctgcaaggttctggttgggtgtggctaggcgtggataaagaatcacaaaaacttgtggttgaaacaacagcaaatcaggatccattggttaccaaggggccaaatttagttcctttgcttgggatagatgtgtgggagcatgcatactacttgcagtacaagaatgtcagacctgactatctcaataatatatggaaggttattaactggaaatatgctggtgaagtatatgacaaagaatgcccgcaccccgaatcaaggtaa

SEQ ID NO: 106172 - protein, 233 aa, Nelumbo nucifera
MALRSVISRKTLGSLGLGFSHARGLQTFTLPDLPYDYSALEPAISVEIMRLHHQKHHQTYITNYNKALEQLEEAMAKGDSSAVVKLQAAIKFNGGGHINHSIFWKNLIPTSEGGGEPPHGALGWAIDTHFGSFEALVKKVNAEGAALQGSGWVWLGVDKESQKLVVETTANQDPLVTKGPNLVPLLGIDVWEHAYYLQYKNVRPDYLNNIWKVINWKYAGEVYDKECPHPESR

SEQ ID NO: 106173 - DNA, 819 bp, Gossypium hirsutum
  CDS (1)..(819)
atgggcgggggagcaagaaaacccacagagaaaggcaaaaaagaaatggcttgtcagctcctgctaaccgacttcactctccctctcaaaagcctcaagctttctcactcgggtctgcggctaaaaggaaggtccattggcttacaaaaagcttccacgactgttgcttactatggcctaaagacccctccttataaccttgatgatttagaaccatatatgagtaagagggcattggaagtgcattggggtgtgcatcatcgtgattttgtggacaacctgaataaacagcttgggaaaagtgatatactgtatggctacaccatggatgaacttgtcaaagcaacatacaacaatgggaaccccttacctgagttcaacaatgcagcagcagaggtgtggaaccatgacttcttttgggagtcaatgcaacctggaggtggggacatgcccaaccttggtttacttgagcagattgaaaaggattttgggtcattcacaaactttagagagatgtttgtggaagcagctctttcactttttggttctggatgggtttggctcgttttgaagaggcaagaaaaacggcttgtagtagtaaaaacgtcgaattcaatcaatccgattgtgtgggatgacattcctatccttaatttggatatgtgggagcattcatattatttggactacaagaacgacaaagcgagatacgtaagcacatttatgaaccaccttgtgtcttggaacgctgcaatgatacacatggcacgagcagaggcatttgtgaatttaggcgagcctaaaatgcccatcgcttga

SEQ ID NO: 106174 - protein, 272 aa, Gossypium hirsutum
MGGGARKPTEKGKKEMACQLLLTDFTLPLKSLKLSHSGLRLKGRSIGLQKASTTVAYYGLKTPPYNLDDLEPYMSKRALEVHWGVHHRDFVDNLNKQLGKSDILYGYTMDELVKATYNNGNPLPEFNNAAAEVWNHDFFWESMQPGGGDMPNLGLLEQIEKDFGSFTNFREMFVEAALSLFGSGWVWLVLKRQEKRLVVVKTSNSINPIVWDDIPILNLDMWEHSYYLDYKNDKARYVSTFMNHLVSWNAAMIHMARAEAFVNLGEPKMPIA

SEQ ID NO: 106175 - DNA, 696 bp, Gossypium hirsutum
  CDS (1)..(696)
atggctcttcgttcgtcaatcaccagaagaaccctaacattgggcctaaattccacgatgctgctgcctctgtctcgatcattgcagactttctccctccccgatcttccttacgactatggcgctcttgagcccgccattagtggagagatcatgcaactccatcaccaaaaacaccatcaaacttacatcactaactataacaaggctttagagcagctccatgaggctattcagaaaggtgattcttccaccgtcgttaagttgcaaagcgccatcaagttcaacggcggaggtcacgtcaaccactccattttttggaagaaccttgcccctattcgtgaaggaggaggtgaacctccaaaagcttccttgggttgggctattgacacacactttggttcattggaatcattgattcagaagatgaatgctgagggtgctggtttgcagggctctggttgggtgtgggttggagtgaacaaggaattaaagaaactcgttatagaaacaactccaaatcaggatccactcgtgactaaagggccacatttagttcctttgcttggcatagatgtttgggagcatgcgtactatttacagtacaagaatgttagaccagattacctgaagaacatatggaaagtcatcaattggaaatatgccagtgaagtgtacgagaaagaatgtgcttga

SEQ ID NO: 106176 - protein, 231 aa, Gossypium hirsutum
MALRSSITRRTLTLGLNSTMLLPLSRSLQTFSLPDLPYDYGALEPAISGEIMQLHHQKHHQTYITNYNKALEQLHEAIQKGDSSTVVKLQSAIKFNGGGHVNHSIFWKNLAPIREGGGEPPKASLGWAIDTHFGSLESLIQKMNAEGAGLQGSGWVWVGVNKELKKLVIETTPNQDPLVTKGPHLVPLLGIDVWEHAYYLQYKNVRPDYLKNIWKVINWKYASEVYEKECA

SEQ ID NO: 106177 - DNA, 657 bp, Macrobrachium rosenbergii
  CDS (1)..(657)
atgctcagtttcagccgtctgttcgcttcccgagggttggtggccgcaggtgtacgaagctgccagaaacacacgttgcccgatcttccttatgactacaatgctttagaacccgtaatttgcgctgagattatgcagcttcatcactcaaagcatcaccagacctatgtcaataatcttaatgtagctgaggaaaagttggctgaagctcatgccaagggtgatgtaagcactgtgatatccttggcacctgccctgaagttcaatggaggaggtcacattaatcacacaattttctggcagaatttatccccagatggtggtgaaccatcaggagaactgctagctgccattaacagagattttggcagtcttgatgcaatgaaaagtcagctctcagcagccactatagcagtccagggttcaggatggggttggttaggatataacaaacagaagggggcactacaaattgctacttgtcccaatcaggaccctctgcaagcatcaacaggtcttgtacctttgtttggaattgatgtgtgggagcatgcttactacttacaatacaagaatgttagaccagattatgtcaatgcgatatggaaggtagccaattggaaggacatttcggcaagatttgctgctgcaaagtga

SEQ ID NO: 106178 - protein, 218 aa, Macrobrachium rosenbergii
MLSFSRLFASRGLVAAGVRSCQKHTLPDLPYDYNALEPVICAEIMQLHHSKHHQTYVNNLNVAEEKLAEAHAKGDVSTVISLAPALKFNGGGHINHTIFWQNLSPDGGEPSGELLAAINRDFGSLDAMKSQLSAATIAVQGSGWGWLGYNKQKGALQIATCPNQDPLQASTGLVPLFGIDVWEHAYYLQYKNVRPDYVNAIWKVANWKDISARFAAAK

SEQ ID NO: 106179 - DNA, 864 bp, Penaeus monodon
  CDS (1)..(864)
atggctgaggcaaaggaagcttacatctccatcctggagaagaagttagctgagctgactggaattgaggtggatcagatcaagaagaatcagttcgcaaatgcagcagatgaggctgtcgccatccgtgagatggcttcatatgtagaggggattgttgtacagcaggctggtgttgctgaggctggtacagtcagtcctcagattgcacagatgtttgcccatatcaatgctgaattgggtgaggaacgaggtgctcatgctttgccgcctctcaagtatgattttaatgcccttgaaccccacatctccggcatgatcatggagatccaccacacaaagcatcaccagggctacattaacaacctaattgctgctacaaagaagttggtggaggcagaggctgccaatgatgtgaatgcaatgaatgcccttctaccagctatcaagttcaatggaggtggccacttgaaccataccatcttctggaccaacatggctcctgatgctggtggtgagccagaaggagcagttgcacaagccattgatgatagctttggatcattccagtcctttaaggacaaattttctgctgccagcgttggagtgaaaggctcaggctggggatggctcgggtattgcgccaataacaacaagcttgagatcgccacttgccagaaccaggatcccttgcagatcactcatggcctggttccattgctcggtcttgatgtctgggagcatgcttactaccttcagtacaagaacctccgtgcagattacgtgaaggccttcttcaatgtcatcaactggccgaatgtgaacgagcgttatgagaaagcttgtaaggatgcaggtcattga

SEQ ID NO: 106180 - protein, 287 aa, Penaeus monodon
MAEAKEAYISILEKKLAELTGIEVDQIKKNQFANAADEAVAIREMASYVEGIVVQQAGVAEAGTVSPQIAQMFAHINAELGEERGAHALPPLKYDFNALEPHISGMIMEIHHTKHHQGYINNLIAATKKLVEAEAANDVNAMNALLPAIKFNGGGHLNHTIFWTNMAPDAGGEPEGAVAQAIDDSFGSFQSFKDKFSAASVGVKGSGWGWLGYCANNNKLEIATCQNQDPLQITHGLVPLLGLDVWEHAYYLQYKNLRADYVKAFFNVINWPNVNERYEKACKDAGH

SEQ ID NO: 106181 - DNA, 702 bp, Carica papaya
  CDS (1)..(702)
atggcacttcgaaacctagccacccgaaaaaccctttccgccaccggcaagcgttccggcagcacgtgccggcttgcagacgccacgcttcctgatcttccctatgactacgcgccctggagcgccattagcggagagatcatgcagctccatcaccagaagcaccaccaggcctacgtcaccaactacaacaaggctctcgagcagctccacgaggccatcagcaagggcgatgcttccgccgccgtcaaattgcagagcgccatcaagttcaacggcggaggccatataaaccactcaattttctggaagaaccttgcccctactcgggaaggaggtggcgagcctccgaagagttctttgggctgggagattgacaatcactttggctctttagatgctctgatacaaaagatgtctgcagaaggtgctgctgtacaaggttctggctgggtgtggctgggtttggacaaagagctgaagcaccttgtggttgaaaccaccccaaatcaggaccctttggttactaaaaatccaaacaaggttcctctactgggcatagatgtttgggaacatgcgtactacttacagtacaagaatgtgaggccggattacttgaagaatatatggaaagttgtgaactggaaatatgcatgtgaagtttaccaacaatttacaccattgcctgcaagcagagactga

SEQ ID NO: 106182 - protein, 233 aa, Carica papaya
MALRNLATRKTLSATGKRSGSTCRLADATLPDLPYDYAPWSAISGEIMQLHHQKHHQAYVTNYNKALEQLHEAISKGDASAAVKLQSAIKFNGGGHINHSIFWKNLAPTREGGGEPPKSSLGWEIDNHFGSLDALIQKMSAEGAAVQGSGWVWLGLDKELKHLVVETTPNQDPLVTKNPNKVPLLGIDVWEHAYYLQYKNVRPDYLKNIWKVVNWKYACEVYQQFTPLPASRD

SEQ ID NO: 106183 - DNA, 705 bp, Chlamydomonas reinhardtii
  CDS (1)..(705)
atggccctcgcgatgaaggctcaggcttccagcctggtggctggccagcgccgcgctgtgcgccccgcttcgggccgtcgcgctgtgatcactcgcgctgctctggagctgaagtctcccccctacgctctggatgctctggagccccacatgagcaagcagaccctggagttccactggggcaagcaccaccgcgcctacgtggataacatgaacaagcaggtcgctggcactcccctggacggcaagtcgctggaggagatcgtcctggccagctggaacaatggccagcccaccccggtgttcaacaacgccgctcaggtctggaaccacactttcttctgggagagcatgaagcccaacggtggcggtgcccccaccggcgcgctggctgaggccatcacccgcgacttcggcagcctggacaagttcaaggaggagttcaagcaggctggcatgacccagttcggctctggctgggcctggctgaacgccgacaagaccggcaagctgtcgatcagcaagtcgcccaacgccgtgaaccccgtggtggagggcaagacccccatcctgactgtcgatgtgtgggagcacgcctactacattgacgtgcagaaccgccgccccgactacatcaccaccttcatggagaagctgatcaactgggacgccgttgctcagcgctacgcccgtgccaccaagtaa

SEQ ID NO: 106184 - protein, 234 aa, Chlamydomonas reinhardtii
MALAMKAQASSLVAGQRRAVRPASGRRAVITRAALELKSPPYALDALEPHMSKQTLEFHWGKHHRAYVDNMNKQVAGTPLDGKSLEEIVLASWNNGQPTPVFNNAAQVWNHTFFWESMKPNGGGAPTGALAEAITRDFGSLDKFKEEFKQAGMTQFGSGWAWLNADKTGKLSISKSPNAVNPVVEGKTPILTVDVWEHAYYIDVQNRRPDYITTFMEKLINWDAVAQRYARATK

SEQ ID NO: 106185 - DNA, 708 bp, Zea mays
  CDS (1)..(708)
atggctctccgcaccctggcatcgaagaaggtcctatccttcccgttcggcggcgcgggccggccgttggcggcggcggcgtctgcgaggggggtgacgacggtcacactccccgacctctcctacgacttcggcgcgctggaaccggccatctcgggggagatcatgcgcttgcaccaccaaaagcaccacgccacctacgtcgccaactacaacaaggcgctggagcagcttgaaactgccgtctccaagggcgacgcctccgctgtcgtccagctgcaggcggcgatcaagttcaacggcggcggtcatgtgaaccattcaatcttctggaagaacctcaagcccattagcgaaggtggcggggagccgcctcatgggaaacttggctgggccatcgatgaggattttggttcgtttgaggcacttgtaaagaagatgaatgcagaaggcgctgctttccaagggtctggatgggtgtggttagctttggataaagaggcaaaaaaggtttcagttgaaacaacagctaatcaggatcctctggtgactaaaggtgcaagcttggttccgctgttggggattgatgtctgggaacatgcatactacctgcagtacaagaatgttaggccggattacctgaacaacatctggaaggtgatgaactggaaatatgctggagaggtgtacgaaaatgttcttgcttga

SEQ ID NO: 106186 - protein, 235 aa, Zea mays
MALRTLASKKVLSFPFGGAGRPLAAAASARGVTTVTLPDLSYDFGALEPAISGEIMRLHHQKHHATYVANYNKALEQLETAVSKGDASAVVQLQAAIKFNGGGHVNHSIFWKNLKPISEGGGEPPHGKLGWAIDEDFGSFEALVKKMNAEGAAFQGSGWVWLALDKEAKKVSVETTANQDPLVTKGASLVPLLGIDVWEHAYYLQYKNVRPDYLNNIWKVMNWKYAGEVYENVLA

SEQ ID NO: 106187 - DNA, 696 bp, Oryza sativa
  CDS (1)..(696)
atggcgctccgctgcgtggcctcgaggaaaaccctagccgccgcggcgctgccgctggctgcggcggcggcggcgaggggtgtgacgaccgtcgcgctcccggacctcccctacgactacggcgcgctggagccggccatctccggggagatcatgcgcctgcaccaccagaagcaccacgccacctacgtcgccaactacaacaaggccctcgagcagctcgacgctgccgtcgccaagggcgacgcccccgccatcgtgcacctccagagcgccatcaagttcaacggcggaggccatgtcaatcattcgatcttctggaataacctcaagcctatcagcgagggtggtggtgagccaccacatgcaaaacttggctgggccattgatgaggattttggttcatttgaggcacttgtaaagaagatgagtgcagaaggtgctgctttacaaggatccggatgggtgtggctagctttggataaagaggcaaagaagctttcagtggaaacaactgctaaccaggaccctctggtaacgaagggggccaacttggttcctttgttgggaattgatgtctgggagcatgcgtactacctgcagtacaagaatgtcaggccagactacctgagcaacatctggaaggtgatgaactggaaatacgcaggggaggtgtacgaaaatgcgactgcttga

SEQ ID NO: 106188 - protein, 231 aa, Oryza sativa
MALRCVASRKTLAAAALPLAAAAAARGVTTVALPDLPYDYGALEPAISGEIMRLHHQKHHATYVANYNKALEQLDAAVAKGDAPAIVHLQSAIKFNGGGHVNHSIFWNNLKPISEGGGEPPHAKLGWAIDEDFGSFEALVKKMSAEGAALQGSGWVWLALDKEAKKLSVETTANQDPLVTKGANLVPLLGIDVWEHAYYLQYKNVRPDYLSNIWKVMNWKYAGEVYENATA

SEQ ID NO: 106189 - DNA, 672 bp, Biomphalaria glabrata
  CDS (1)..(672)
atgagcaaaatgttgtcaacaacctctagttctcttaaaagatgctttggagtatcattgctccgtttaaagcacacattgccagatctgaagtatgacttcaatgccttggaaccatacatctcagctgatattatgaaactccactatcagaagcatcatcaagcctatgtcaacaatctcaatgttgctgaagagaaattaaaggccgctgtagataagggtgatgtcaatactatcatcagtctacagccagctttgaaattcaatggaggtggacacatcaatcacaccatcttctggtcaaatctcagccctaaaggtgggggtgagcccacaggagatttgctgcagctgatcaaagaagagttctccacatttgagaacatgaagaagttgttggctgagaaaagtgttgctattcaaggctctggttggggctggcttgggttcaatccagctacaggcaaggtccaggtagctacttgtagtaaccaagatcccctggaagcaacaacaggtctgattcctttgtttggtattgatgtgtgggagcatgcctactaccttcagtacaagaatgtcagagcagattacgtcaatgcaatattcaacattgctaactggcaagatgtctctgataggttagccaaggctcgactcagaagctaa

SEQ ID NO: 106190 - protein, 223 aa, Biomphalaria glabrata
MSKMLSTTSSSLKRCFGVSLLRLKHTLPDLKYDFNALEPYISADIMKLHYQKHHQAYVNNLNVAEEKLKAAVDKGDVNTIISLQPALKFNGGGHINHTIFWSNLSPKGGGEPTGDLLQLIKEEFSTFENMKKLLAEKSVAIQGSGWGWLGFNPATGKVQVATCSNQDPLEATTGLIPLFGIDVWEHAYYLQYKNVRADYVNAIFNIANWQDVSDRLAKARLRS

SEQ ID NO: 106191 - DNA, 861 bp, Macrobrachium rosenbergii
  CDS (1)..(861)
atggctgacaaggatgcatacatcagtgccttggagcagaaattggccgaactgtctggcactgaagtagatcaggttaaaaagaatcagcttgcaaatgcagctgatgaggctcgtgtcatcggcgagatggccgcttatgttgccagcatcaccgttcagcgagccgctgaagcccaagtaggacttgtcagcccccagattgctgacatttactcctatatcaatgctgaactgagcgaggcccgtggtgctcatgttcttcctcccctgaagtacgactacgatgcattggagcctcacatttctggtaccatcatggaaatccatcacaccaagcatcaccaagcatatatcaacaaccttaaagcagcaacagataagttgatagaggccgaacaaaacaatgatgtaaatgccatgaatgcgttgttacctgccatcaagttcaacggaggtggtcacctgaaccacaccatcttctggaccaacatgagcccaaatggaggtggagaaccaagtggttcagttgctgatgccattaatgctgaatttggttcattccaggcatttaaggataagttttctgctgctagcgtgggcgtgaaagggtcaggttggggctggcttggctactgtcctaagaacgacaaagttgccgttgccacgtgccaaaaccaggatcctcttcagcttacacatggattggtaccactacttggactggacgtatgggaacatgcctactatctgcagtacaagaaccttagggctgactatgtcaaagctttctttaatgtgatcgactggtctaatgtaaacgagcggtacgaaaacgctcgcaaggctgctggacattga

SEQ ID NO: 106192 - protein, 286 aa, Macrobrachium rosenbergii
MADKDAYISALEQKLAELSGTEVDQVKKNQLANAADEARVIGEMAAYVASITVQRAAEAQVGLVSPQIADIYSYINAELSEARGAHVLPPLKYDYDALEPHISGTIMEIHHTKHHQAYINNLKAATDKLIEAEQNNDVNAMNALLPAIKFNGGGHLNHTIFWTNMSPNGGGEPSGSVADAINAEFGSFQAFKDKFSAASVGVKGSGWGWLGYCPKNDKVAVATCQNQDPLQLTHGLVPLLGLDVWEHAYYLQYKNLRADYVKAFFNVIDWSNVNERYENARKAAGH

SEQ ID NO: 106193 - DNA, 753 bp, Lotus japonicus
  CDS (1)..(753)
atggcatcatcagggttgcaaaatctcagcttgctctacaacgagggtccaaaagtcactccagcatttcagctgaagccgccaccatatccactgaatgcgttggagccaattatgagcgagaagacacttgagtttcattgggggaagcaccacagaagttatgtggaaaatctgaagaaacaaattgtagggacagagcatgaggggaagtcactagaagccattatagtcacatcatacaataagggtgacactcttccagctttcaacaatgcagcacaggtttggaaccatgacttcttctgggagtgcatgaaaccaggtggtggtggaaagccatcaggggaactcctagaactgattgaaagggactttggttcatttgaaaaattccttgatgagttcaagactgctgctgcaacacaatttggttctggttgggcttggcttgcctatcagtcaagcaaatttgatactggaaatggagcaaatcttccttcatctgatgaggacaagaagctagtagtgctcaagagtcccaatgctgtgaacccccttgtttggggtggttattacccactcatgaccattgatgtttgggagcatgcttactaccttgactttcagaaccggcgccctgattatatatcggtgtttgtcgataagcttgtttcttgggatgcagcaagctctagacttgaacgagctaaggctttccttgccagtgctgacattcatcctgctatatga

SEQ ID NO: 106194 - protein, 250 aa, Lotus japonicus
MASSGLQNLSLLYNEGPKVTPAFQLKPPPYPLNALEPIMSEKTLEFHWGKHHRSYVENLKKQIVGTEHEGKSLEAIIVTSYNKGDTLPAFNNAAQVWNHDFFWECMKPGGGGKPSGELLELIERDFGSFEKFLDEFKTAAATQFGSGWAWLAYQSSKFDTGNGANLPSSDEDKKLVVLKSPNAVNPLVWGGYYPLMTIDVWEHAYYLDFQNRRPDYISVFVDKLVSWDAASSRLERAKAFLASADIHPAI

SEQ ID NO: 106195 - DNA, 936 bp, Lotus japonicus
  CDS (1)..(936)
atgaagttgctatcgccatccacttccactacttgttacctttcatcatcaccttccgcgtttcttccccgccactctcatgggttccagaatttgggttctgctggcaccttcaaattctctaagaaacagagaagatgcgtaaggaaagctggacctactgaaatcagtgcaaagtttgagctgaagccaccaccatatccaatgaatgctttggagccaattatgagccaggagacatttaattaccattgggggaaacaccacagggcttatgtagataatctgaacaaacaaattgagggaacagatctagatgggaagtcactggaggaacttatagttattgcatacaataagggtgacatgcttccatctttcaacaatgctgcacaggcatggaaccatgaattcttctgggactccatgaaacctggcggtggtggaaagccatctggggatcttctaaaactgattgaaagagacttcggttcatttgaaaaatttgttgatgagttcaagactgctgctgcaactcaatttggttcaggatgggcttggcttgcatataaagaaaacagacttgatgttggaaatgcaataaatcctcttgcttctgatgaggacaaaaagcttgttgtggtgaagactcccaatgctgtaaacccccttgtttggggctactatccactccttaccattgatgtctgggagcatgcttactaccttgactatcagaatcggcgccctgattttatatcagtgttcatagataagcttgtgtcttgggaagcagtgagctcaagacttgagcaagctaaggctatagttgcagagaaggagagagaggatgagaggagaagaacagaggaagaagagaaatcgacaataagggaaactcctcatgagatatttccagataatgattctgactag

SEQ ID NO: 106196 - protein, 311 aa, Lotus japonicus
MKLLSPSTSTTCYLSSSPSAFLPRHSHGFQNLGSAGTFKFSKKQRRCVRKAGPTEISAKFELKPPPYPMNALEPIMSQETFNYHWGKHHRAYVDNLNKQIEGTDLDGKSLEELIVIAYNKGDMLPSFNNAAQAWNHEFFWDSMKPGGGGKPSGDLLKLIERDFGSFEKFVDEFKTAAATQFGSGWAWLAYKENRLDVGNAINPLASDEDKKLVVVKTPNAVNPLVWGYYPLLTIDVWEHAYYLDYQNRRPDFISVFIDKLVSWEAVSSRLEQAKAIVAEKEREDERRRTEEEEKSTIRETPHEIFPDNDSD

SEQ ID NO: 106197 - DNA, 696 bp, Triticum aestivum
  CDS (1)..(696)
atggcgctccgcacattggccgcgaagaaaaccctaggcctggcgctcggcggcgcgcggccgctggccgccgccaggggcgtggcgacgttcacgctccccgacctcccctacgacttcggtgcgctggagccggccgtctccggcgagatcatgcgcctgcaccaccagaagcaccacgccacctacgtcgccaactacaacaaggcgctcgagcagctcgacgccgccgtcagcaagggggacgcgtccgccgtcgtccacctccagagcgccatcaaattcaacggcggcggtcatgttaaccattcaatcttctggaagaacctcaagcctattagcgagggtggtggtgagccacctcatggcaaacttggctgggccattgatgaggattttggttctattgagaaacttataaagaagatgaatgcagagggtgctgctttacaaggatctggatgggtgtggctagctttggataaagaggccaaaaagctttcagttgaaactactcctaatcaggaccctcttgtgaccaaagggtcaaacctgtatcctttgttgggaattgatgtctgggagcatgcgtactacctgcagtacaagaacgtgaggccggactacctgaccaacatccggaaggtggtgaacaggaaatatgccggagaagagtatgaaaaagtgcttgcgtga

SEQ ID NO: 106198 - protein, 231 aa, Triticum aestivum
MALRTLAAKKTLGLALGGARPLAAARGVATFTLPDLPYDFGALEPAVSGEIMRLHHQKHHATYVANYNKALEQLDAAVSKGDASAVVHLQSAIKFNGGGHVNHSIFWKNLKPISEGGGEPPHGKLGWAIDEDFGSIEKLIKKMNAEGAALQGSGWVWLALDKEAKKLSVETTPNQDPLVTKGSNLYPLLGIDVWEHAYYLQYKNVRPDYLTNIRKVVNRKYAGEEYEKVLA

SEQ ID NO: 106199 - DNA, 741 bp, Lotus japonicus
  CDS (1)..(741)
atggctgtgcgaaccctgttgagcagaaaaaccctagcctccgtgctcctccgcaatgacatcggagcgggaggcatggcggcggcagcagcagcaggagctgctcaaactcattcccgtggcatccatgccctcacgcttcccgatctcggttacgattatggcgccttggagcctgtcatcagcggcgaaatcatgcaaatccatcaccagaagcatcaccagacttacatcaccaactacaacaaggctctcgagcagcttcaagatgccatcgccaagtccgattcctcagccgtcgttaagctccagagtgcaatcaaattcaatggcggaggtcatgtcaaccattccattttctggaaaaatctagctccccctcgtgaaggaggtggagaatcaccccatggctccttgggatgggccattgacacacattttggttcttttgaagcattgataaaaaaggtcaacgcagaaggtgcggcactacaggggtctggatgggtctggcttggtctggacaaagagttcaacaagcttgttgttgaaaccaccgcaaaccaggatccactggttactaagggatcaagcttggttccattgtttggtatagatgtttgggaacatgcatactacttacagtacaagaatgttagaccagactatttgaagaacatttggaaagttatcaactggaaatatgtcagtgaagtgtacgagaaagagagttctgcttga

SEQ ID NO: 106200 - protein, 246 aa, Lotus japonicus
MAVRTLLSRKTLASVLLRNDIGAGGMAAAAAAGAAQTHSRGIHALTLPDLGYDYGALEPVISGEIMQIHHQKHHQTYITNYNKALEQLQDAIAKSDSSAVVKLQSAIKFNGGGHVNHSIFWKNLAPPREGGGESPHGSLGWAIDTHFGSFEALIKKVNAEGAALQGSGWVWLGLDKEFNKLVVETTANQDPLVTKGSSLVPLFGIDVWEHAYYLQYKNVRPDYLKNIWKVINWKYVSEVYEKESSA

SEQ ID NO: 106201 - DNA, 684 bp, Paracoccidioides brasiliensis
  CDS (1)..(684)
atgaccacctctcttttccggtcaactgtcggcggcatccttagagttggtgctgctagaatgtcaggggctgcaggagcccgcttgatcacgactaaagcaaccctccctgacttatcatacgattacggtgccctcgaaccctccatctctggcaagatcatggaactccaccacaaaaagcaccaccaaacctacgtaaactcctacaatgatgccgtcgagaagctggccgccgcgcaggagaaggccgatatcaaatcccaggtggcttttcaagccctgaccaatttccacggcggtggccacgtcaatcacaccctcttctgggagaacttggctcccaagagcgctggaggcggcgagccgcctgccggttccctggggaaggccgttgatgatgcctttggcagctatgataggttcaagtctacgtttaacaccgcgctggcggggatccaggggagcgggtgggcgtggttggttgaagataagcagactgggaagattgcaattaagacttatgctaaccaagaccccgtcattggtcaattcaagcccctcttgggcattgatgcttgggaacatgcctactatctccaatacgaaaaccgcaaagcagaatacttcaatgccatctggaacgttgtgaactggaaggctgctgagaagcgattcgcttaa

SEQ ID NO: 106202 - protein, 227 aa, Paracoccidioides brasiliensis
MTTSLFRSTVGGILRVGAARMSGAAGARLITTKATLPDLSYDYGALEPSISGKIMELHHKKHHQTYVNSYNDAVEKLAAAQEKADIKSQVAFQALTNFHGGGHVNHTLFWENLAPKSAGGGEPPAGSLGKAVDDAFGSYDRFKSTFNTALAGIQGSGWAWLVEDKQTGKIAIKTYANQDPVIGQFKPLLGIDAWEHAYYLQYENRKAEYFNAIWNVVNWKAAEKRFA

SEQ ID NO: 106203 - DNA, 777 bp, Zea mays
  CDS (1)..(777)
atggcggcttccgctctccacctccgcctccacccctcgccgccggcgggtgtgaagcttcagcagcggaaactgcgctcgaaaatacagaggcatggtggcctatctcgaagattttcaaaagttgtgtcctattacggtctcacaaccccgccatataaactggatgctctggaaccttatatgagcaagaggacagttgaacttcactggggtaagcaccatcaagattacgtggatggcttgaataatcaactggctaccagccctctgtatggatacactctggaggatctgataaaagaagcttataacaatggcaatccattaccagagtataacaacgcagcacaggtctggaaccatcacttcttctgggaatcaatgcaaccagaaggtggtggcttacctgagggaggtgtgctgcagcagattgaaaaggattttggctcgtttactaattttagggaagagtttatccgctcagccttacagctgttagggtctggttgggtttggcttgtcttgaagagaaatgagagaaagctttcggttgttcatacacgaaatgctatctccccacttgcttttggtgacattccaatcatcagcctagacttgtgggagcacgcttactacttagactacaaggatgataagctaacatatgtcacaaactttatggaccatcttgtctcttggcatactgtcactctacgcatgatgcgtgcagagtcttttgtgaaccttggtgagccaaatatcccagaggcttga

SEQ ID NO: 106204 - protein, 258 aa, Zea mays
MAASALHLRLHPSPPAGVKLQQRKLRSKIQRHGGLSRRFSKVVSYYGLTTPPYKLDALEPYMSKRTVELHWGKHHQDYVDGLNNQLATSPLYGYTLEDLIKEAYNNGNPLPEYNNAAQVWNHHFFWESMQPEGGGLPEGGVLQQIEKDFGSFTNFREEFIRSALQLLGSGWVWLVLKRNERKLSVVHTRNAISPLAFGDIPIISLDLWEHAYYLDYKDDKLTYVTNFMDHLVSWHTVTLRMMRAESFVNLGEPNIPEA

SEQ ID NO: 106205 - DNA, 618 bp, Heterobasidion annosum
  CDS (1)..(618)
atgtccggcgcacacacccttcccgacctcccttacacctatgatggcctcgagccttacatctcccgccaaatcatggagcttcatcacaaaaagcaccatcagacctatgtcaacgctctcaacgctgccgagcaggcgtacgcaaagacctccactcccaaggagcgtattgctcttcaggctgcgttgaagttcaatggcggtggtcatatcaaccattctctgttctggaagaaccttgcgccttccgctgctgagggcaaaggacacggcggcgagctcaaggctggcccgctcaagtctgccatcgagcagaagtggggctccttggacactctcaagaaggagttcaacactgctaccgccggcattaagggctctggttggggttggcttggatacagtcctacgagcaagtcgcttgagattgtcaccactgctaaccaggacccgctcctcactcatgtccctatcattggcgttgacatttgggagcatgcgttctacctgcagtacttgaacgtcaaagtcgattacctaaacgctatttggaacgtcattgacttccaggaggctgagaagcgcttcgtcgaggtttccggcgctaagctgtaa

SEQ ID NO: 106206 - protein, 205 aa, Heterobasidion annosum
MSGAHTLPDLPYTYDGLEPYISRQIMELHHKKHHQTYVNALNAAEQAYAKTSTPKERIALQAALKFNGGGHINHSLFWKNLAPSAAEGKGHGGELKAGPLKSAIEQKWGSLDTLKKEFNTATAGIKGSGWGWLGYSPTSKSLEIVTTANQDPLLTHVPIIGVDIWEHAFYLQYLNVKVDYLNAIWNVIDFQEAEKRFVEVSGAKL

SEQ ID NO: 106207 - DNA, 705 bp, Cryptococcus neoformans var
  CDS (1)..(705): transl_table=4
atgatcactgccatcactcgtaccgctcttcctcgagctactctccgcacttctctcgctaccatgtccaccattagggccaagcacaccctccctcctctcccatacgcctacgatgcgttggagccttccatctcagctgagattatgaacctccatcacaccaagcatcaccagacctacgtcaacggtctcaacgccgctgaggagtctctccagaaggcatctgctgatggcgacttcaagactgctatttcccttcagcctgccctcaagttcaacggtggtggtcatattaaccactctctcttctggaagaaccttgctcccaccggctctgctcaagtcaaggttcccacctctggtgtcttctacgaccaggtccaggctgactttggtggcttcgagaacctcaagaaggagatgaatgccaagactgctgccattcaaggctctggctggggttggctcggttacaacaaggccaccaagaagctcgagatcgtcactactcccaaccaggaccctcttttgtctcacgttcccatcatcggcattgacatctgggagcacgcgttctacctccagtacaagaacgttaagcccgactacctcaatgccatttggaatgttattaactacgaggaggctgagagtcgtctcaaggctgctcaagaagaagcagaagaagcaaaaatcaagtaa

SEQ ID NO: 106208 - protein, 234 aa, Cryptococcus neoformans var
MITAITRTALPRATLRTSLATMSTIRAKHTLPPLPYAYDALEPSISAEIMNLHHTKHHQTYVNGLNAAEESLQKASADGDFKTAISLQPALKFNGGGHINHSLFWKNLAPTGSAQVKVPTSGVFYDQVQADFGGFENLKKEMNAKTAAIQGSGWGWLGYNKATKKLEIVTTPNQDPLLSHVPIIGIDIWEHAFYLQYKNVKPDYLNAIWNVINYEEAESRLKAAQEEAEEAKIK

SEQ ID NO: 106209 - DNA, 660 bp, Aedes albopictus
  CDS (1)..(660)
atgttggctcttcgaagtgctgttctgggatcttccagaaatgttgcggccgttctgggatgccgcaacaagcacaccctgccagatctgccatatgacttcggcgctctggagccggtcatctgccgcgaaattatggaggttcaccaccagaagcaccacaatgcctacgttacgaatctgaacgccgccgaggagcagctgaaggaagccgtcgccaagaatgacgcttccaagatcattcagctgggtagtgccctcaagttcaacggcggtggccacatcaaccattccattttctggaagaatctctcgccggatcggtcggatccgtcggccgagttgaagaaactgctggatcgcgacttgcagggattggacaacttcaagaaggaaatgaaagcggctgctgtggccgtacagggatcgggttgggcttggttgggctataacaagaagaccaaagctctgcaggttgctgcctgtccgaaccaggaccctctggaggccactaccggcctggtcccgctgttcggaatcgacgtttgggagcatgcgtactatttgcaatacaaaaatctgagaccgaactacgtcgatgctatttgggatgtcgtcaactggaaggatgtctccgagcgtttggccaaggcacagtaa

SEQ ID NO: 106210 - protein, 219 aa, Aedes albopictus
MLALRSAVLGSSRNVAAVLGCRNKHTLPDLPYDFGALEPVICREIMEVHHQKHHNAYVTNLNAAEEQLKEAVAKNDASKIIQLGSALKFNGGGHINHSIFWKNLSPDRSDPSAELKKLLDRDLQGLDNFKKEMKAAAVAVQGSGWAWLGYNKKTKALQVAACPNQDPLEATTGLVPLFGIDVWEHAYYLQYKNLRPNYVDAIWDVVNWKDVSERLAKAQ

SEQ ID NO: 106211 - DNA, 819 bp, Oikopleura dioica
  CDS (1)..(819)
atggatagctacgtcgccgctcttgaagccaagctggccgaagccactggtattaaaatcaaccagatggcaaatgctgcatccgaaggagcagcgatttccgagcagactgacttcatcaagaacatcgtcattagcgatggcaaagctcagtctggcgttcgaaatcctctcatcgctaaggtcctcaacaacattaagactgaaactagccaagacctcaagtatgagctaccaaagctcggctacgagtatggacagctcgagccaactatctgcgaagagatcatgcgaatccatcactccaagcaccacaacggctacgtcaccaacctcaacgctgctgttgagaagcttgctgctgccgaacgagcgggcgatgtcaatgccatgaatcaactctccgaggctatcaacttcaacggtggtgggcatatcaatcacaccattttctggacgaacatggcgccaaatggaggtggccagccaactggtgagctcgctgaccagatcaacaacgacttcggatcgtttgacgcgttcaagaaggaaatgtgtgccaagtcggcggctgtcaagggatctggctggggctggctcggatggaataaggaagcttccaagctgcaggtcgctacttgccagaaccaggacccccttgaagctacaactggattgattcctcttcttggtatcgatgtttgggaacatgcctactacatccagtacaagaaccttcgtgctcagtacgtcgagaagattttcgacgttttcaactggactaatgttgctgagcgattcgccaaagccaaaaagtaa

SEQ ID NO: 106212 - protein, 272 aa, Oikopleura dioica
MDSYVAALEAKLAEATGIKINQMANAASEGAAISEQTDFIKNIVISDGKAQSGVRNPLIAKVLNNIKTETSQDLKYELPKLGYEYGQLEPTICEEIMRIHHSKHHNGYVTNLNAAVEKLAAAERAGDVNAMNQLSEAINFNGGGHINHTIFWTNMAPNGGGQPTGELADQINNDFGSFDAFKKEMCAKSAAVKGSGWGWLGWNKEASKLQVATCQNQDPLEATTGLIPLLGIDVWEHAYYIQYKNLRAQYVEKIFDVFNWTNVAERFAKAKK

SEQ ID NO: 106213 - DNA, 669 bp, Lepeophtheirus salmonis
  CDS (1)..(669)
atgtctgtggcttcactttgcttgagaaatgtctccaagagacttgcgtcttcctcgttgattcagagaggaaaacacactttgccagatctttcatatgattatggagcattggagcctgtcatttgcgcagagatcatgcagcttcatcattccaagcatcatcaaacctatgtcaacaattataacgtagctgaggaaaaattatctgatgccgttgctaaaggtgatgcatctaccattatttcccttcaaggagcactcaaattcaacggaggcggccaccttaatcactccatcttttggaccaacctgacaccaggtggttccggtgaacccgaaggagaactcctcaatttaattaaacgggattttggttcccttgacgccatgaaagacaatttatttgcatcaacagttgctgttcaaggctctggatggggttggttggcttattgtaaaaatgaaaagaaattaaaggttgccacttgtcctaaccaagatcctcttgaggccacaacaggccttgttccactctttggaatcgatgtttgggagcatgcatactacttacaatacaaaaatgttcgccctgattatgttaaagccatatttaatattgctaactggaaaaatgttgcggagaggctggctgctgcatccaaatga

SEQ ID NO: 106214 - protein, 222 aa, Lepeophtheirus salmonis
MSVASLCLRNVSKRLASSSLIQRGKHTLPDLSYDYGALEPVICAEIMQLHHSKHHQTYVNNYNVAEEKLSDAVAKGDASTIISLQGALKFNGGGHLNHSIFWTNLTPGGSGEPEGELLNLIKRDFGSLDAMKDNLFASTVAVQGSGWGWLAYCKNEKKLKVATCPNQDPLEATTGLVPLFGIDVWEHAYYLQYKNVRPDYVKAIFNIANWKNVAERLAAASK

SEQ ID NO: 106215 - DNA, 693 bp, Camellia sinensis
  CDS (1)..(693)
atggctcttcggactctgttgaccagaaaagcccttacaggaagtgggctagggttagggtttcagagcatccggggatttcagaccttctcccttccggatctcccttacgactatagcgctctcgagccggccatcagcggtgagatcatgcagctccatcaccagaagcatcacaagacttacgtcaccaactacaacaaggctctcgagcagctcgacgacgccatggccaagggcgatgcaccgacaaccgtcaaattgcagagcgccatcaagttcaacggcggagggcatatcaaccactcacttttctggcagaatcttgctccagttcgtgaagatggtggtgagcctccaaagggttctttaggttgggctattgacacaaattttggttcattggaagcattgatacagaagatgaatgctgaaggtgcagctttacgaggctctggatgggtgtggcttggtgtggacaaagaactgaagaagcttgtggttgaaaccacggcaaatcaggatccactggtaactaaaggaccaagtttagttcctctgcttggcttagatgtttgggagcacgcatactacttacagtacaagaatgtaagaccagattacctgaagaacatatggaaagttgtgagctggaaatatgccagtgaagtgtatgaaaaggtatgcccttga

SEQ ID NO: 106216 - protein, 230 aa, Camellia sinensis
MALRTLLTRKALTGSGLGLGFQSIRGFQTFSLPDLPYDYSALEPAISGEIMQLHHQKHHKTYVTNYNKALEQLDDAMAKGDAPTTVKLQSAIKFNGGGHINHSLFWQNLAPVREDGGEPPKGSLGWAIDTNFGSLEALIQKMNAEGAALRGSGWVWLGVDKELKKLVVETTANQDPLVTKGPSLVPLLGLDVWEHAYYLQYKNVRPDYLKNIWKVVSWKYASEVYEKVCP

SEQ ID NO: 106217 - DNA, 699 bp, Tamarix androssowii
  CDS (1)..(699)
atggcgcttcgcacattggcggccaagaaaaccctaactaccgctcgccaagggctggcgttaattcaatctaggtctcttcagaccttctccctccctgacctttcttacgactatggagctctcgagccggcgatcagcggcgagatcatgcagcttcatcaccagaaacatcatcagacttatgtaactaattacgataaagctttggagcagctcgatggtgcgatgtcaaaaggcgatgcgcctacagttgtcaaattgcagagtgctattaagttcaacggcggaggccatataaatcactcaattttctggaagaaccttgctcctgtctatcaaggaggaggtgagcctccgaagggtaacttgggttggagaattgatgaagattttggttctttggaaacgttggtccaaaagatgaatgcagaaggtgctgctttacagggatcaggctgggtgtggcttggtgtggataaagagtctaagaaacttgtcattgagacaacagcaaatcaggatcctctcatgactaaaggacctaatctggttcctttacttggtattgatgtttgggagcatgcctactacctacagtacaagaatgtcaggcctgattatctgaagaacgtctggaaagttatgcactggaaatacgcgggtgaagtgtatgacaaggagtgcccacaactgtaa

SEQ ID NO: 106218 - protein, 232 aa, Tamarix androssowii
MALRTLAAKKTLTTARQGLALIQSRSLQTFSLPDLSYDYGALEPAISGEIMQLHHQKHHQTYVTNYDKALEQLDGAMSKGDAPTVVKLQSAIKFNGGGHINHSIFWKNLAPVYQGGGEPPKGNLGWRIDEDFGSLETLVQKMNAEGAALQGSGWVWLGVDKESKKLVIETTANQDPLMTKGPNLVPLLGIDVWEHAYYLQYKNVRPDYLKNVWKVMHWKYAGEVYDKECPQL

SEQ ID NO: 106219 - DNA, 750 bp, Pinus pinaster
  CDS (1)..(750)
atggcgctgctgcaccgtccaatttcacttccgctacttccattggctgcacctgcaagtttcatttctcatccaaaacatatacatttgcgaaaagtagcagttcccaagtttcgaagtgctccaccaacagttgcacttcttaatttgaatcctcctccctatgattttgatgcattagaaccacatatgagcaaacagactttgtctttccactggggcaagcatcatcgagcttatgttgataactgtaacaatcagattaaggatacagagctggaagagtgtaccttagaagacattattaagaaaacatataacaacggtgatcctcgtccagtatttaacaatgctgctcaggcctggaatcatgagttcttttgggaatgtatgaaacccgggggtgggaaagagcccaaaggagagatccttgaacttataaaaagggactttggtgcttatgatgaatttctaaaggaattcaagcaagcatcagcaacacaatttggctctggttgggcctggcttgttttaaaagacaataaacttgtaattgaaaaaactccaaatgctctgaatcctcttatctggggtcataagccgcttctgaccatagatgtttgggagcatgcgtattaccttgactatcagaatcgacggccagattacatatcgacatttatgaatgagcttgtttcctgggacgctgtcaatgctcggcttgatcgtgccaaggcttctgcaacatga

SEQ ID NO: 106220 - protein, 249 aa, Pinus pinaster
MALLHRPISLPLLPLAAPASFISHPKHIHLRKVAVPKFRSAPPTVALLNLNPPPYDFDALEPHMSKQTLSFHWGKHHRAYVDNCNNQIKDTELEECTLEDIIKKTYNNGDPRPVFNNAAQAWNHEFFWECMKPGGGKEPKGEILELIKRDFGAYDEFLKEFKQASATQFGSGWAWLVLKDNKLVIEKTPNALNPLIWGHKPLLTIDVWEHAYYLDYQNRRPDYISTFMNELVSWDAVNARLDRAKASAT

SEQ ID NO: 106221 - DNA, 627 bp, Bacillus cereus
  CDS (1)..(627): transl_table=11
atgtcttcatttcaattgccaaagctttcatatgactatgatgaaccagagccacatattgatagcaatacactttccattcatcatggaaagcaccatgcgacatacgtaaacaatttaaatgctactttagaaaattatactgaattacataataaatctttagaagaattgctatgtaatttagatgctttaccgaaggaaattgttacagctgtacgaaataacggtggtggtcactattgtcatagtcttttttgggaagtgatgagcccacgaggtggcgatgagcctaatggagacgttgcaaaagtaattgattattatttcaatacctttgacaacttaaaagatcaactttccaaagcagctattagtcgttttggaagtggctatggatggcttgttcttgacggtgaggaactctctgttatgggtacaccaaatcaagatacacctttgcaagaagggaaaatccccttactcgtaattgatgtatgggaacatgcttattatttaaagtatcaaaataggcgcccagagtttgttaccaactggtggcatacagtaaactgggaccaagtaaacgagaagtatttacaagcaattcaatcacaaaaacattag

SEQ ID NO: 106222 - protein, 208 aa, Bacillus cereus
MSSFQLPKLSYDYDEPEPHIDSNTLSIHHGKHHATYVNNLNATLENYTELHNKSLEELLCNLDALPKEIVTAVRNNGGGHYCHSLFWEVMSPRGGDEPNGDVAKVIDYYFNTFDNLKDQLSKAAISRFGSGYGWLVLDGEELSVMGTPNQDTPLQEGKIPLLVIDVWEHAYYLKYQNRRPEFVTNWWHTVNWDQVNEKYLQAIQSQKH

SEQ ID NO: 106223 - DNA, 678 bp, Cryptococcus bacillisporus
  CDS (1)..(678)
atgatcactgctatcactcgaaccgcccttccccgaactactctccgcacttctctcgctaccatgtccaccattagggccaagcacacccttccccctctcccttatgcctacgacgcgttggagccttccatctcttctgagattatgaacctccatcacaccaagcatcaccagacttacgttaacggtcttaacgctgctgaggagtctctccagaaggcctctgcagctggtgacgttaaggctgctattgcccttcagcccgccctcaaattcaacggtggtggtcacattaatcactctctcttctggaagaaccttgctcccaccggctctgctcaggtcaaggttccgacctccggtgtcttccatgaccacgtccaggctgactttggtggcttcgaaaacctcaagaaggagatgaatgccaagactgctgccatccaaggctctggttggggctggctcggttacaacaagggcaccaagaagctcgagattgtcaccactcccaatcaggaccctctcttgtcccacgtccctatcattggcattgacatctgggagcatgctttctaccttcagtacaagaacgtcaagcccgattacctcaacgccatctgggacgttatcaactacgaggaggccgagaaccgtctgaaggctgccctgtga

SEQ ID NO: 106224 - protein, 225 aa, Cryptococcus bacillisporus
MITAITRTALPRTTLRTSLATMSTIRAKHTLPPLPYAYDALEPSISSEIMNLHHTKHHQTYVNGLNAAEESLQKASAAGDVKAAIALQPALKFNGGGHINHSLFWKNLAPTGSAQVKVPTSGVFHDHVQADFGGFENLKKEMNAKTAAIQGSGWGWLGYNKGTKKLEIVTTPNQDPLLSHVPIIGIDIWEHAFYLQYKNVKPDYLNAIWDVINYEEAENRLKAAL

SEQ ID NO: 106225 - DNA, 750 bp, Solanum lycopersicum
  CDS (1)..(750)
atggccgccactgcctctgctaattcactcacatctgcttttcttcctcctcaaggatttaatggatcatctaagagcttacaatggagaactcaaaagaaacaatttggaagaaaagctggctctgctacaataacagctaaatttgacctcatccctcctccttatccaatggatgctttggagcctcatatgagtagtagaacatttgaattccactgggggaagtatcacagggcgtatgtcgacaacttaaacaagcaaattgatggaacagaattagatggaaagacactagaagatataatacttgttacatataacaatggtgctccccttccagcattcaacaatgctgctcaggcctggaatcatcagttcttctgggaatctatgaagcccaacggaggaggagagccatccggtgaattattagaactaataaatagagactttggttcctatgatacatttgttaaagaatttaaggcagctgcagcaacacaatttggctccggatgggcctggcttgcatacaaacctgaagacaaaaagcttgctctagtgaaaactcctaatgctgaaaatcctcttgttttgggatacacaccactcctcaccatcgacgtttgggagcatgcttactatctggactttcagaatcggcgacctgactacatatctatctttatggagaagttggtgtcatgggaagcagtcagtattaggcttaaagcagcatcagcttga

SEQ ID NO: 106226 - protein, 249 aa, Solanum lycopersicum
MAATASANSLTSAFLPPQGFNGSSKSLQWRTQKKQFGRKAGSATITAKFDLIPPPYPMDALEPHMSSRTFEFHWGKYHRAYVDNLNKQIDGTELDGKTLEDIILVTYNNGAPLPAFNNAAQAWNHQFFWESMKPNGGGEPSGELLELINRDFGSYDTFVKEFKAAAATQFGSGWAWLAYKPEDKKLALVKTPNAENPLVLGYTPLLTIDVWEHAYYLDFQNRRPDYISIFMEKLVSWEAVSIRLKAASA

SEQ ID NO: 106227 - DNA, 624 bp, Podospora anserina
  CDS (1)..(624)
atggctgttcaagagtacaccctgccggcattgccatatgcttacaatgctttggaaccgcacatttcagcccagatcatggagctgcaccacagcaagcaccaccaggcctatgtgacaaacttgaacaacgctctcaggttgcacgttgctgctgttggcgcaggcgatattgccagtcagatcgagatgcagcaggtcatcaagttcaacggtggtgggcatatcaaccactcgctgttctggaagaaccttgcccccgccgagagcgaagagacaaagcccgaggctgcaaaagagctggtggctgctgttgagaagacctggggcagtctggacgacttcaagaacgctttctctagcaccttgctggggattcaaggaagtggctggggctggctggtcaaggacagtgcgaatgggctgcggatcgtgaccaccaaggatcaagatccggtggttggacgagatgttcccgtgtttggtgtcgatatgtgggagcatgcttactatcttcagtatctcaacggaaaggctgcgtatgtcgagaatatctggaacgtcatcaactggaagacggccgaggagcgcttcttgggcaccagcgaagctacaaaattgtaa

SEQ ID NO: 106228 - protein, 207 aa, Podospora anserina
MAVQEYTLPALPYAYNALEPHISAQIMELHHSKHHQAYVTNLNNALRLHVAAVGAGDIASQIEMQQVIKFNGGGHINHSLFWKNLAPAESEETKPEAAKELVAAVEKTWGSLDDFKNAFSSTLLGIQGSGWGWLVKDSANGLRIVTTKDQDPVVGRDVPVFGVDMWEHAYYLQYLNGKAAYVENIWNVINWKTAEERFLGTSEATKL

SEQ ID NO: 106229 - DNA, 618 bp, Tatumella ptyseos
  CDS (1)..(618): transl_table=11
atgagttattcactgccatccctgccttacgcttatgatgcgcttgagccgcatttcgataaggaaacgatggaaatccatcacactaaacatcaccaggcttacgtcaacaacgccaacgcggcgctggaaggaactgaatttgcctcactgccggttgaagagctgatcactaaactggaccaggtgcctgcagataagaaaaccgcactgcgtaacaacgcgggtggtcacgctaaccatagcctgttctggaaaggtctgaaaaccggaacgactctgcagggcgaactgaaagcggctattgagaaagatttcggtagcgttgaaaacttccaggctgaatttgaaaaagcagccgcgacccgcttcggttccggctgggcatggctggtaaaacagggtgataaactggccgtagtttctactgcgaaccaggatagcccgctgatgggtgaagcggtttccgggacttccggtttcccaatcctgggtctggacgtttgggaacacgcctattacctgaagttccagaataaacgccctgactacatcaaagcgttctggaacgtggttaactgggatgaggctgcggcccgttttgcttctgcaaaataa

SEQ ID NO: 106230 - protein, 205 aa, Tatumella ptyseos
MSYSLPSLPYAYDALEPHFDKETMEIHHTKHHQAYVNNANAALEGTEFASLPVEELITKLDQVPADKKTALRNNAGGHANHSLFWKGLKTGTTLQGELKAAIEKDFGSVENFQAEFEKAAATRFGSGWAWLVKQGDKLAVVSTANQDSPLMGEAVSGTSGFPILGLDVWEHAYYLKFQNKRPDYIKAFWNVVNWDEAAARFASAK

SEQ ID NO: 106231 - DNA, 735 bp, Glycine max
  CDS (1)..(735)
atggcctcattgggtgggttacaaaatctaagcggcatcaattttcttatcaaaaaagagggtccaaaagtcaatgcgaagttcgagctgaagccgccaccatatccactgaatggtttggagccggtgatgagccagcagacacttgagtttcattgggggaaacaccacaagacatatgtggaaaatctgaaaaaacaaattgttgggacagagcttgatgggaaatcactagaagagattatagtgacatcatataataagggtgacattcttccagctttcaacaatgcagcacaggtatggaaccatgacttcttctgggagtgcatgaaaccaggtggaggtggaaagccatccggggagcttctagaactgattgaaagagactttggctcatttgaaaaattccttgatgagtttaaggctgctgctgcaacacaatttggttcaggatgggcttggcttgcatatagagcaagcaaatttgatggggaaaatgcagcaaatcctccttcaccagatgaggacaacaagctagtggtgctcaagagtcccaatgctgtgaacccccttgtttggggaggctattatccacttcttaccattgatgtttgggagcatgcttacaaccttgattttcagaaccggcgccctgattatatatcagtgttcatggataagcttgtttcctgggatgcagtgagttctagacttgaacaagcaaggctttaa

SEQ ID NO: 106232 - protein, 244 aa, Glycine max
MASLGGLQNLSGINFLIKKEGPKVNAKFELKPPPYPLNGLEPVMSQQTLEFHWGKHHKTYVENLKKQIVGTELDGKSLEEIIVTSYNKGDILPAFNNAAQVWNHDFFWECMKPGGGGKPSGELLELIERDFGSFEKFLDEFKAAAATQFGSGWAWLAYRASKFDGENAANPPSPDEDNKLVVLKSPNAVNPLVWGGYYPLLTIDVWEHAYNLDFQNRRPDYISVFMDKLVSWDAVSSRLEQARL

SEQ ID NO: 106233 - DNA, 693 bp, Marchantia paleacea var
  CDS (1)..(693)
atggcggcaatgcaggcgtcgatggctctcaaaagaggcacctcgaacttgttgggtttgcagagagggtttagtacatcgtacaaggaacacggttacactctaccagatctgccttatgggtatggggagttagagcctgcaatcagtggagacatcatgcaattgcaccactcaaagcatcaccaggcttacatcaccggcttcaatcaggcgctcgaaaagcttgacgcagctcattctaatcgcgatccacaaaccattgtccagctccaggctgctcttaagttcaacggtggaggccatgttaaccacagcatcttttggaagaatctagcaccaataaaggaaggaggaggtgttcctcctgaaggatcgttggcatctgctattgaggctgagtttggttctctcgaaactctgaaagcgaagatggttgctggaggtgtaggagttcaaggatcaggctgggtgtggctgggtctaaacaaagacctaaaaaagctcgttgtggagaccacagcaaatcaggatcctttggttaccaaaggactcattccactgttggggatcgatgtttgggaacatgcttactacctacagtacaaaaatgttcgccctgactacttgaaaaatatctggaaagtggtgaactggaaggatgtctcatctcgatacgaagaaaatgtttga

SEQ ID NO: 106234 - protein, 230 aa, Marchantia paleacea var
MAAMQASMALKRGTSNLLGLQRGFSTSYKEHGYTLPDLPYGYGELEPAISGDIMQLHHSKHHQAYITGFNQALEKLDAAHSNRDPQTIVQLQAALKFNGGGHVNHSIFWKNLAPIKEGGGVPPEGSLASAIEAEFGSLETLKAKMVAGGVGVQGSGWVWLGLNKDLKKLVVETTANQDPLVTKGLIPLLGIDVWEHAYYLQYKNVRPDYLKNIWKVVNWKDVSSRYEENV

SEQ ID NO: 106235 - DNA, 789 bp, Matteuccia struthiopteris
  CDS (1)..(789)
atgggattagggagagagatggagaaacttattgaccgcttaccttccttctcacctccttcatcttctagaagaaaatttgcgtcatcctacagacctatcgtcatggagtcctacttgaagccgttgccttttgagatggatgcccttgaccctcacatgagcaaacaaaccctggaaatccattgggggaagcaccaccgttcttatgtggacaaccttaacaaacaaattgtagggacagaacttgaaagcatgcagctagatgagctgttgaagtttggctacaataatgcaaaccctacggcgtactttaacaatgcaggccaggtatggaatcatgacttttttggcaattccatcaaaccagaagggggcaagcagccaagcggagaggtgctttacctgatcaagagagattttgggtcatttgaggcttttgtggatgagttcaaacaagctgctgctgcacaatttggctctggttgggcatggctttttgccaagaagacagaccctcttgttgaaaagaactttgccaagcttgcgattgaaaagacacacaatgcagtaaatcctctcattttgggccatattccacttctgaccatcgacgtctgggagcatgcctactatcttgattttcaaaaccgacgggcggattacatttccactttcattgacgagcttatatcatgggagacggttattgcaaggctggcgagggctaaaaaatttctaaatttttatgatgttgttgttcctctagatcagtatgaatacctctga

SEQ ID NO: 106236 - protein, 262 aa, Matteuccia struthiopteris
MGLGREMEKLIDRLPSFSPPSSSRRKFASSYRPIVMESYLKPLPFEMDALDPHMSKQTLEIHWGKHHRSYVDNLNKQIVGTELESMQLDELLKFGYNNANPTAYFNNAGQVWNHDFFGNSIKPEGGKQPSGEVLYLIKRDFGSFEAFVDEFKQAAAAQFGSGWAWLFAKKTDPLVEKNFAKLAIEKTHNAVNPLILGHIPLLTIDVWEHAYYLDFQNRRADYISTFIDELISWETVIARLARAKKFLNFYDVVVPLDQYEYL

SEQ ID NO: 106237 - DNA, 615 bp, Chloroflexus aurantiacus
  CDS (1)..(615): transl_table=11
atggcctttgaagttccgccgttgccttacgactacaatgcccttgaaccgtatatcgatgaagccacgatgcactatcatcacgacaatcaccatcagacgtatgttaccaatctgaataatgcgctggcgaattacccggagttgcagagcaagacgattgaagagctgctgggtaatcttgacgccataccagaagcgattcggacggcggtgcgcaacaatggtggtgggcactggaaccataccttcttctgggagattatggctcccaatgccggcggtgcgcctaccggtgatctggcggcggcgattgatgcggccttcggcagcttcgacgctttcaaagagaagttcaaggcggcggctctgggccggttcggttcgggatgggcatggttggtggcggcaaaggatggtagcctcagcattatgagcactcccaaccaggacaacccgctgatggaggggaagacggccatccttgggctggatgtatgggagcacgcctattacctcaagtaccagtacaagcggcccgcctacgttgatgcctggtggaacgtggtgaattgggccaaagttgccgatcactacgcagcggcgaaaggttaa

SEQ ID NO: 106238 - protein, 204 aa, Chloroflexus aurantiacus
MAFEVPPLPYDYNALEPYIDEATMHYHHDNHHQTYVTNLNNALANYPELQSKTIEELLGNLDAIPEAIRTAVRNNGGGHWNHTFFWEIMAPNAGGAPTGDLAAAIDAAFGSFDAFKEKFKAAALGRFGSGWAWLVAAKDGSLSIMSTPNQDNPLMEGKTAILGLDVWEHAYYLKYQYKRPAYVDAWWNVVNWAKVADHYAAAKG

SEQ ID NO: 106239 - DNA, 750 bp, Solanum lycopersicum
  CDS (1)..(750): transl_table=11
atggccgccactgcctctgctaattcactcacatctgcttttcttcctcctcaaggatttaatggatcatctaagagcttacaatggagaacccaaaagaaacaatttggaagaaaagctggctctgctacaataacagctaaatttgacctcatccctcctccttatccaatggatgctttggagcctcatatgagtagtagaacatttgaattccactgggggaagcatcacagggcgtatgtcgacaacttaaacaagcaaattgatggaacagaattagatggaaagacactagaagatataatacttgttacatataacaatggtgctccccttccagcattcaacaatgctgctcaggcctggaatcatcagttcttctgggaatctatgaagcccaacggaggaggagagccatccggtgaattattagaactaataaatagagactttggttcctatgatacatttgttaaagaatttaaggcagctgcagcaacacaatttggctccggatgggcctggcttgcatacaaacctgaagacaaaaagcttgctctagtgaaaactcctaatgctgaaaatcctcttgttttgggatacacaccactcctcaccatcgacgtttgggagcatgcttactatctggactttcagaatcggcgacctgactacatatctatctttatggagaagttggtgtcatgggaagcagtcagtattaggcttaaagcagcatcagcttga

SEQ ID NO: 106240 - protein, 249 aa, Solanum lycopersicum
MAATASANSLTSAFLPPQGFNGSSKSLQWRTQKKQFGRKAGSATITAKFDLIPPPYPMDALEPHMSSRTFEFHWGKHHRAYVDNLNKQIDGTELDGKTLEDIILVTYNNGAPLPAFNNAAQAWNHQFFWESMKPNGGGEPSGELLELINRDFGSYDTFVKEFKAAAATQFGSGWAWLAYKPEDKKLALVKTPNAENPLVLGYTPLLTIDVWEHAYYLDFQNRRPDYISIFMEKLVSWEAVSIRLKAASA

SEQ ID NO: 106241 - DNA, 765 bp, Marchantia paleacea var
  CDS (1)..(765)
atggcaatggcagcagttactggggctcgttgcctcctgcctgttccttcgcttcggttttccaaggcccgaccctctaatgccaactttttgaagttgaagcttccgcttggtgctcccgttgccaagtttgacctgaaggacccaccttaccctctggatgctttggagccgcacatgagcaaggagacccttgaatttcactggggaaagcaccaccgagcttacgtcaacaacttgaacggacagatcgagaactctgacttggagagaaacacccttgaggagattgttcagagttcttacaacaatggcaaccctaccccagctttcaacaacgctgggcagatttggaaccacgactttttctggcagtcaatgaagccaggaggaggtggcccgcccaccggtgaggtcgcagagctcatcaacagagacttcggaagctacgataacttcgtcaaggaattcaaggctgcaggagccacccaattcggttctggatgggcgtggcttgtcttgaagaatggcaagctcgccatcgaaaagactccaaatgcagttacccctatcctctggggcagcattccccttcttgttgtggacgtctgggagcacgcatactacctcgacttccagaaccgaaggccagattacctcagcacctttgtgaacgatctgatcagctgggatgcagtcaacgaacgtcttgcccgagctaaggctagcgtaaatctcagcacaccttccatccctgaatcgtaa

SEQ ID NO: 106242 - protein, 254 aa, Marchantia paleacea var
MAMAAVTGARCLLPVPSLRFSKARPSNANFLKLKLPLGAPVAKFDLKDPPYPLDALEPHMSKETLEFHWGKHHRAYVNNLNGQIENSDLERNTLEEIVQSSYNNGNPTPAFNNAGQIWNHDFFWQSMKPGGGGPPTGEVAELINRDFGSYDNFVKEFKAAGATQFGSGWAWLVLKNGKLAIEKTPNAVTPILWGSIPLLVVDVWEHAYYLDFQNRRPDYLSTFVNDLISWDAVNERLARAKASVNLSTPSIPES

SEQ ID NO: 106243 - DNA, 636 bp, Barbula unguiculata
  CDS (1)..(636)
atggctgccgttccgttgcctttgacgaccgtggacttgaggccacctccttacgctttggatgcgttggagccgcacatgagcaaggagacgttggagtatcactggggaaagcaccatcgcgcgtatgtcgacaatctgaagaagcagatcgaggggacggagctcgccagccagactctggaggatattgtcagggcaacgtacaacaacggagagcccaccgctccattcaacaacgctgcccaggcatggaaccacgagtttttctggttgtcgatgtccccacatggagggaagcagcctgacggcgagctgatgagcctcctcaaacgtgactttggatcgtatgataattttgtgaaggagttcaagcaagctggtgctacccagtttggatcggggtgggcttggttgacggtcgccgatggcaagttgatggtggagaagtctcccaatgctattaaccctctcgttttcggccatgttcccattctggttgccgacgtttgggagcatgcgtactacctcgactatcagaaccgacgaccggattatttgacaaccttcatgaacgagctggtgtcttgggatgctgtggccaaacgtctgcagctggcattgcaagaaagctag

SEQ ID NO: 106244 - protein, 211 aa, Barbula unguiculata
MAAVPLPLTTVDLRPPPYALDALEPHMSKETLEYHWGKHHRAYVDNLKKQIEGTELASQTLEDIVRATYNNGEPTAPFNNAAQAWNHEFFWLSMSPHGGKQPDGELMSLLKRDFGSYDNFVKEFKQAGATQFGSGWAWLTVADGKLMVEKSPNAINPLVFGHVPILVADVWEHAYYLDYQNRRPDYLTTFMNELVSWDAVAKRLQLALQES

SEQ ID NO: 106245 - DNA, 681 bp, Avicennia marina
  CDS (1)..(681)
atggctctccgagccctagttaccagaaacccccttagggctccatctctaacgtgtcgcggtctgcagactttctcgctgcccgatcttccctacgactatggcgccctcgagcccgccatcagcggcgagatcatgcaactccaccaccagaagcaccaccagacttacataaccaattacaataaagctctggagcagctcgatggcgccattgccaagggcgacgcctcaactgttgtcaagttgcagagcgcgattaagttcaacggtggaggtcatgttaatcactcaattttctggaagaatcttgctcctgtccgtgaaggtggaggtgagcctcccaaaggttctctaggttgggccattgaccatgactttggctccttggaagctttaatacagaatatgaacgcagaaggtgctgctttacaggggtcaggatgggtgtggcttgcagtggacaaagaattcaagcgtctggtggtggagaccactgcaaaccaggatccacttgttactaaaggacctagtttggtgcctttgcttggtattgatgtctgggagcatgcatactatttacagtacaagaatgtcagaccagactacctgaagaacatatggaaggtcataaactggaaatacgccagtgaagtttatgattcattgggcattaagtga

SEQ ID NO: 106246 - protein, 226 aa, Avicennia marina
MALRALVTRNPLRAPSLTCRGLQTFSLPDLPYDYGALEPAISGEIMQLHHQKHHQTYITNYNKALEQLDGAIAKGDASTVVKLQSAIKFNGGGHVNHSIFWKNLAPVREGGGEPPKGSLGWAIDHDFGSLEALIQNMNAEGAALQGSGWVWLAVDKEFKRLVVETTANQDPLVTKGPSLVPLLGIDVWEHAYYLQYKNVRPDYLKNIWKVINWKYASEVYDSLGIK

SEQ ID NO: 106247 - DNA, 693 bp, Cordyceps militaris
  CDS (1)..(693)
atggcctcgtctctcctccgcaccacccccgccgttcgcgccggcctgcgcgccgtctccaagcctgctgtcgccatggcttcgacaagcttcgtccgcggcaaggctaccctgcccgatctgccatatgactatggcgctctcgagcccgccatctcgggcaagatcatggagcttcaccactccaagcaccaccagacctacgtcaacggcttcaacgcggccgtcgaggctctttccgaggcccaagccaagaacgactccaaggctgccgcggcccaggcccctgccctcaacttccacggtggtggccacatcaaccactccctcttctgggagaacctcgcccccaacggcaagggtggtggcggcgagcccgctggcaagctttccactgccattaccgaggactttggttcctttgacaatctcaagaagcagaccaacgccgcgctcgctggtatccagggctccggctgggcttggctggtcaaggacaagacctctggcaccctcagcgtcgtcactcgcccgaaccaagaccccattaccggcaacctcgagcctctactgggtatcgacgcctgggagcacgcgtactacctgcaatacgagaaccgcaaggtcgaatactttagcgcaatctgggacgttatcaactggggaaccgttgccaagcgcttcgagaaatag

SEQ ID NO: 106248 - protein, 230 aa, Cordyceps militaris
MASSLLRTTPAVRAGLRAVSKPAVAMASTSFVRGKATLPDLPYDYGALEPAISGKIMELHHSKHHQTYVNGFNAAVEALSEAQAKNDSKAAAAQAPALNFHGGGHINHSLFWENLAPNGKGGGGEPAGKLSTAITEDFGSFDNLKKQTNAALAGIQGSGWAWLVKDKTSGTLSVVTRPNQDPITGNLEPLLGIDAWEHAYYLQYENRKVEYFSAIWDVINWGTVAKRFEK

SEQ ID NO: 106249 - DNA, 630 bp, Gordonia sp
  CDS (1)..(630): transl_table=11
gtggctgaatacacgcttgccgatctggattacgactacgcggcactggagccgcacatctccggcaggatcatggagctccaccacagcaagcaccacgcgacctacgtcaagggcgccaacgacaccctggagaagctggccgcggcccgcgaggacgacagcatcgccggcaaggtctacggactctccgccaccctgtccttccacctgggcggccacaccaaccactcgatcttctggaagaacctgtcccccaacggcggtggcgagcccgagggtgacctcgccgctgcgatcaccgagcagttcggtggcttcgacaagttcaaggcccacttcaccgccgccgccaccaccctccagggttcgggctgggcgatcctgggctacgacaccatcggcggcaagctggtcatcctgcagctgaccgaccagagcggcaacatccccgccgcgatcatcccggtcgtcatgctcgacatgtgggagcacgccttctacctcgactaccagaacgtcaagccggactacgtcaaggcttggtggaacgtggtcaactgggccgacgccggtgagcgtttcggtcgcgcgaagacccagggcagcggcctcatcgagcctgcctga

SEQ ID NO: 106250 - protein, 209 aa, Gordonia sp
MAEYTLADLDYDYAALEPHISGRIMELHHSKHHATYVKGANDTLEKLAAAREDDSIAGKVYGLSATLSFHLGGHTNHSIFWKNLSPNGGGEPEGDLAAAITEQFGGFDKFKAHFTAAATTLQGSGWAILGYDTIGGKLVILQLTDQSGNIPAAIIPVVMLDMWEHAFYLDYQNVKPDYVKAWWNVVNWADAGERFGRAKTQGSGLIEPA

SEQ ID NO: 106251 - DNA, 792 bp, Arabidopsis thaliana
  CDS (1)..(792)
atgagttcttgtgttgtgacgacaagctgtttctatacaatttcagattctagtatacgtttgaaatcccccaagctcctcaatctgagtaaccagcagagaagacgctctcttaggtctcgaggtggtttaaaggttgaagcttactacggtctaaagacacctccttatccacttgatgctttggagccgtatatgagtagaagaacactagaagtgcattggggaaaacaccatcgaggttatgtagataatctgaataaacagttagggaaagatgatagactctatggatacaccatggaagagcttatcaaggctacatacaacaacgggaatcctttacccgagttcaacaacgctgcacaggtctataaccatgatttcttctgggagtcgatgcaacctggtggtggagacacgcctcaaaagggtgttcttgagcagattgataaggattttggttctttcacaaattttagagaaaagttcactaatgcagctcttactcagtttggttctggatgggtctggcttgtcttaaagagggaagagagaaggcttgaggtggtcaaaacctcaaacgccattaacccactcgtgtgggacgatattccaatcatctgcgtggatgtgtgggagcactcttattatctggactacaagaacgacagggctaactatataaacacatttctgaaccacttggtgtcgtggaacgctgccatgagtcggatggcccgtgcagaagcgtttgtgaatcttggtgaacccaacatcccaatcgcttaa

SEQ ID NO: 106252 - protein, 263 aa, Arabidopsis thaliana
MSSCVVTTSCFYTISDSSIRLKSPKLLNLSNQQRRRSLRSRGGLKVEAYYGLKTPPYPLDALEPYMSRRTLEVHWGKHHRGYVDNLNKQLGKDDRLYGYTMEELIKATYNNGNPLPEFNNAAQVYNHDFFWESMQPGGGDTPQKGVLEQIDKDFGSFTNFREKFTNAALTQFGSGWVWLVLKREERRLEVVKTSNAINPLVWDDIPIICVDVWEHSYYLDYKNDRANYINTFLNHLVSWNAAMSRMARAEAFVNLGEPNIPIA

SEQ ID NO: 106253 - DNA, 696 bp, Arabidopsis thaliana
  CDS (1)..(696)
atggcgattcgttgtgtagcgagtagaaaaaccctagccggcttgaaggagacatcatcgaggctattgaggatcagagggattcagacttttacgcttcctgatcttccttacgattatggcgcattggaaccggccattagtggagagatcatgcagattcatcaccagaagcatcaccaggcttatgttactaattacaataatgctcttgagcagcttgatcaagctgtgaacaagggagatgcttccactgttgttaagttgcagagcgccatcaaattcaacggcggaggtcatgtcaaccattcgattttctggaagaaccttgctccttccagtgaaggtggtggagagccaccaaaaggatctcttggtagtgccattgacgctcactttggctcccttgaaggtctggtgaaaaagatgagtgctgagggtgctgcagtgcaaggctcaggatgggtgtggctcggactagacaaagaactgaagaagctagttgttgacacaactgccaatcaggatccattagtgacaaaaggaggaagcttggtacctctggtgggtatagatgtttgggagcacgcctactacttgcagtacaaaaatgtgaggcctgagtatctgaagaatgtatggaaagtgatcaactggaaatatgcaagcgaggtttatgagaaggaaagcaactga

SEQ ID NO: 106254 - protein, 231 aa, Arabidopsis thaliana
MAIRCVASRKTLAGLKETSSRLLRIRGIQTFTLPDLPYDYGALEPAISGEIMQIHHQKHHQAYVTNYNNALEQLDQAVNKGDASTVVKLQSAIKFNGGGHVNHSIFWKNLAPSSEGGGEPPKGSLGSAIDAHFGSLEGLVKKMSAEGAAVQGSGWVWLGLDKELKKLVVDTTANQDPLVTKGGSLVPLVGIDVWEHAYYLQYKNVRPEYLKNVWKVINWKYASEVYEKESN

SEQ ID NO: 106255 - DNA, 618 bp, Moraxella catarrhalis
  CDS (1)..(618): transl_table=11
atggcattcactctaccagagttgggctacagctacgatgcactagagccacattttgacaaagaaacgatggaaattcaccattcacgccaccatcaagcttatgttaataacgccaatggtctgcttgaaggtactcagtgggcggataaatctgctgaagaggttatcgcaaatcttgaccaaatcccagcagacaaaagaacaggcgtcagaaataatgctggtggtcatgccaaccatagcctattttggaccattttaaaaacaggcacgactttgggcggatcattaaaagatgccatcgtgagagattttggttctgttgaagcattccaagaacagtttgaaaaagcagccgccagccgttttggttcaggttgggcgtggttggtacttgatgaaggttcgctaaaagttgtctcgaccgccaaccaagatagcccattgatgggtgaagcggtcgcaggctgcaagggatatcctatcattgttttggatgtgtgggagcatgcttattatctaaaataccaaaataaacgcccagattatatcaaagctttttgggaagtggttaactgggacgaagcacaaaagcgttttgactcagcaaactaa

SEQ ID NO: 106256 - protein, 205 aa, Moraxella catarrhalis
MAFTLPELGYSYDALEPHFDKETMEIHHSRHHQAYVNNANGLLEGTQWADKSAEEVIANLDQIPADKRTGVRNNAGGHANHSLFWTILKTGTTLGGSLKDAIVRDFGSVEAFQEQFEKAAASRFGSGWAWLVLDEGSLKVVSTANQDSPLMGEAVAGCKGYPIIVLDVWEHAYYLKYQNKRPDYIKAFWEVVNWDEAQKRFDSAN

SEQ ID NO: 106257 - DNA, 603 bp, Streptococcus suis
  CDS (1)..(603): transl_table=11
  misc_feature (245)..(245): y is t or c
atgacaattattttaccagaccttccatacgcatacgatgccttggaaccacatattgatgcagaaacaatgacccttcaccacgataagcaccatgcgacttatgttgcaaatgctaatgcagcacttgaaaaacatcctgaaattggcgaaaacttggtagctcttttgtcagatgtggagcaaattccttcagacatccgccaagctttgatcaacaacggtggtggtcatttgaaccatgytcttttctggaattgctttcacctgaaaaaacagaaatttcagcagaattggcagcagatattgatgcactttggttcatttgatgctttcaaagaagccttcactgcagcagcaacaactcgtttcggttcaggttgggctttcttggttgttaataaagaaggcaagttggaagttatctcaactgctaaccaagacacaccaatcatgcaaggtttgaaaccaatcttggcattggacgtttgggaacatgcttactaccttaactaccgcaatgtccgtccaaactacatcaaagccttctttgaagtaatcaactgggacaaggttaacgaactttataaagcagctaaataa

SEQ ID NO: 106258 - protein, 200 aa, Streptococcus suis
  misc_feature (82)..(82): The Xaa at location 82 stands for Ala, or Val.
MTIILPDLPYAYDALEPHIDAETMTLHHDKHHATYVANANAALEKHPEIGENLVALLSDVEQIPSDIRQALINNGGGHLNHXLFWNCFHLKKQKFQQNWQQILMHFGSFDAFKEAFTAAATTRFGSGWAFLVVNKEGKLEVISTANQDTPIMQGLKPILALDVWEHAYYLNYRNVRPNYIKAFFEVINWDKVNELYKAAK

SEQ ID NO: 106259 - DNA, 942 bp, Medicago sativa
  CDS (1)..(942)
atgaaattgttatcgccttccgcaacctcttctacccacgtatcatcttcagcttttcttcccaatgttgcaggcttccaaaatcttggttcttcttctgtcaccaccttcaaattctctaaaaaacagggaagatgcataaggagagctggaggcactcaaatcactgcaaagtttgagctgaagccaccgccatatccgttgaatgcttcggagccaattatgagccagaatacatttgagtaccattggggaaagcaccacagagcttatgtagataacttgaacaagcaaattgaaggaacagatcttgatgggaagtcactagaagaaaccataattatgtcgtacaataatggtgacattcttccagctttcaacaatgcagcacaggtatggaaccatgatttcttctgggagtctatgaaacctggtggtggtggaaagccatctggggaacttctaaaactgattgaaagagacttcggttcatttgaaaaattcgttgaacagttcaagcttgctgcttcaacacaatttggttcaggatgggcatggctcgcatataaggaaagcagacttgatgttggaaatgcagtaaatcctcttgcaactgaggaggacaaaaagctagtcgtgctgaagagtcctaatgctgtgaacccccttgtttggaaccatcatcatccactccttaccattgatgtatgggagcatgcttactaccttgactatcagaatcggcgtcctgagtatatatcagtgttcatggataaacttgtgtcttgggaagcagtcagctcaagacttgagaaggctaaggctgtaattgcggagagggagaaagaggaggagaggaaaagaagggaggaagaagaaaaatcaacaaccggagaagatacgcctgctccggagatatttgcagatagtgatactgactag

SEQ ID NO: 106260 - protein, 313 aa, Medicago sativa
MKLLSPSATSSTHVSSSAFLPNVAGFQNLGSSSVTTFKFSKKQGRCIRRAGGTQITAKFELKPPPYPLNASEPIMSQNTFEYHWGKHHRAYVDNLNKQIEGTDLDGKSLEETIIMSYNNGDILPAFNNAAQVWNHDFFWESMKPGGGGKPSGELLKLIERDFGSFEKFVEQFKLAASTQFGSGWAWLAYKESRLDVGNAVNPLATEEDKKLVVLKSPNAVNPLVWNHHHPLLTIDVWEHAYYLDYQNRRPEYISVFMDKLVSWEAVSSRLEKAKAVIAEREKEEERKRREEEEKSTTGEDTPAPEIFADSDTD

SEQ ID NO: 106261 - DNA, 651 bp, Blumeria graminis
  CDS (1)..(651)
atggtcctaaaatacaatattccaccactcccatatgcctatgatgcactggagccacatattagcagtcaaataatgaatattcatcatacaaagcatcatcaaacttacgtaaataacctcaacaatgcattggaaacccttgatgctttaacgaaatcctctgatattgtctctcatctacatctccaagcagctataagcttcaatgccggtgggcacataaatcatactctcttttgggaaaatctttcaccagccacatctactacggcgcagattagctcaggaccgaaaatatcagcggcacttgccgcacgctggggttctgtcgagcgttttcaagaaagctttaccactgtactgctaggacttaaaggaagtggttggggctggttagtgcaggacatagaaagtggtactctagaaatcattactactaaagatcaggagattgttcctggaaacaaaaaacctttattaggcattgatttttgggaacatgcatattatctgcagtatctaaacaacaaggccgcttatgctaaggaaatttggaaagtcattaactgggcaaaggtagaggagagatatgtgggaagccctgaaaatgtttttgggaacctaaaattattaaagggtgagctgtga

SEQ ID NO: 106262 - protein, 216 aa, Blumeria graminis
MVLKYNIPPLPYAYDALEPHISSQIMNIHHTKHHQTYVNNLNNALETLDALTKSSDIVSHLHLQAAISFNAGGHINHTLFWENLSPATSTTAQISSGPKISAALAARWGSVERFQESFTTVLLGLKGSGWGWLVQDIESGTLEIITTKDQEIVPGNKKPLLGIDFWEHAYYLQYLNNKAAYAKEIWKVINWAKVEERYVGSPENVFGNLKLLKGEL

SEQ ID NO: 106263 - DNA, 603 bp, Nostoc linckia
  CDS (1)..(603): transl_table=11
atggcatttgtacagcccgccctgcccttcgagattaatgctttagagccatatggcatgaaagctgaaactttcgagtaccactatggcaagcatcacaaagcttacgtagacaacctcaacaagctgactgaaggtactgatcttgctgataaatctctggaagacgtgatcaaaagtacctataaagactcctctaaagcgggaatctttaataacgctgcccaagtttggaaccatacgttcttttggaattccttgaaaccagcaggtggtggcaaacccaccggtgaactcggagccaagattgagaaagatttcgatagctttgacaaattcaaggaagagttctctagtgtagccgcaactcagttcggtagcggatgggcttgggtgattgatgatggtggtacgctgaaggtgattaagacgccaaatgcagagaaccctctagcttatggtcaaaaggcactcttaaccttggatgtttgggaacacgcctactacattgactacagaaacgcccgtccggcgttcatcaagaatttcctagataacttagccaactgggactttgctgctgaaaactttgctaaagcttaa

SEQ ID NO: 106264 - protein, 200 aa, Nostoc linckia
MAFVQPALPFEINALEPYGMKAETFEYHYGKHHKAYVDNLNKLTEGTDLADKSLEDVIKSTYKDSSKAGIFNNAAQVWNHTFFWNSLKPAGGGKPTGELGAKIEKDFDSFDKFKEEFSSVAATQFGSGWAWVIDDGGTLKVIKTPNAENPLAYGQKALLTLDVWEHAYYIDYRNARPAFIKNFLDNLANWDFAAENFAKA

SEQ ID NO: 106265 - DNA, 615 bp, Aeromonas hydrophila
  CDS (1)..(615): transl_table=11
atgagccataccctgccagcccttgcctatgcctatgacgcgctggaaccccacatcgatgcgctgaccatggagatccatcacagccgtcaccatcagacctatatcaacaacctcaatgccgccctggccgatctccccgagctggcggcgctgccggtggaggagctgcttgcccgcttcgacagcctgcctggcaaggtgcagggggcggtgcgcaatcacggcggcggtcatgccaaccacagcctgttctggcaggtgatgagtccgcaggggggtggcgagccgggcggcgagctggccgcggcgatcctgcgggacctaggcggactgggaggccttcaaacaggcctttacccaagcggcgctgagccgtttggcagcggctgggcctgctggtgggtcgatcggagcggcaagctgcaggtagtgagcagcgccaaccaagacagccccctgcaggatgggcaggtgcccatcttggggctggatgtgtgggagcacgcctattacctgaagtaccagaacaagcgtcccgactacatagccgcgttttacaacgttatcgactggagcgaggtagcgcggcgttacgtggcggcgctggcctga

SEQ ID NO: 106266 - protein, 204 aa, Aeromonas hydrophila
MSHTLPALAYAYDALEPHIDALTMEIHHSRHHQTYINNLNAALADLPELAALPVEELLARFDSLPGKVQGAVRNHGGGHANHSLFWQVMSPQGGGEPGGELAAAILRDLGGLGGLQTGLYPSGAEPFGSGWACWWVDRSGKLQVVSSANQDSPLQDGQVPILGLDVWEHAYYLKYQNKRPDYIAAFYNVIDWSEVARRYVAALA

SEQ ID NO: 106267 - DNA, 618 bp, Vibrio mimicus
  CDS (1)..(618): transl_table=11
atgccccatttatttcccgatctaccttacgcttacgatgcgatagaaccttatattgataccaagaccatggaggtgcattacagcaagcaccaccgcacttactacgataaatttctgtctgccatcaaggggactgagcatgaagataggccactgagcgagattttcgcgcacgtttcggccttacccgctgccgtgcgtaaccacggtggtggctactataaccacattgtgtattggaactgtacgaagcctagcgctggcggcgagccacaaggcgaattggccgcagagatcgaacgtcaatttggcagttttgcgcagttcaaagaagccttctcgcaagcggccgtgaacacctttggctctggttatgtctggcttatcgtgcaacaaggtcaactgagcattacttccaccagcaaccaagataacccattgatggatgtggttgccgtgcgtggcgagccgattcttgcccttgatgtgtgggaacacgcttactacattcgctaccaaaaccaccgccctgagtacattgatgcgtggtggaatgtggtgaactgggaagcggtcagtgaaaactacgccattgctctcacgcaagctgcgtaa

SEQ ID NO: 106268 - protein, 205 aa, Vibrio mimicus
MPHLFPDLPYAYDAIEPYIDTKTMEVHYSKHHRTYYDKFLSAIKGTEHEDRPLSEIFAHVSALPAAVRNHGGGYYNHIVYWNCTKPSAGGEPQGELAAEIERQFGSFAQFKEAFSQAAVNTFGSGYVWLIVQQGQLSITSTSNQDNPLMDVVAVRGEPILALDVWEHAYYIRYQNHRPEYIDAWWNVVNWEAVSENYAIALTQAA

SEQ ID NO: 106269 - DNA, 618 bp, Vibrio cholerae
  CDS (1)..(618): transl_table=11
atgccccatctatttcccgatctaccttacgcttacgatgcgttagaaccttatattgatgccaagaccatggaggtgcattacagcaagcaccaccgcacttactacgataaatttctgtctgccatcaaggggactgagcatgaagataggccactgagcgagattttcgcgcgcgtttcgaccttacccgcggccgtgcgtaaccacggtggtggctactataaccacattgtgtattggaactgtatgaagcctaacgctggcggcgagccacaaggcgaattggccgcagagatcgaacgtcaatttggcagttttgcgcagttcaaagaagccttctcgcaagcggccgtgaacacctttggctctggttttgtctggcttatcgtgcaacaaggtcaactgagcattacttccaccagcaaccaagataacccattgatggatgtggttgccgtgcgtggcgagccgattcttgcccttgatgtgtgggaacacgcttactacattcgctaccaaaaccgccgccctgagtacattgatgcgtggtggaatgtggtgaactgggaagcggtcagtgaaaactacgccatcgcactcacccaagctgcgtaa

SEQ ID NO: 106270 - protein, 205 aa, Vibrio cholerae
MPHLFPDLPYAYDALEPYIDAKTMEVHYSKHHRTYYDKFLSAIKGTEHEDRPLSEIFARVSTLPAAVRNHGGGYYNHIVYWNCMKPNAGGEPQGELAAEIERQFGSFAQFKEAFSQAAVNTFGSGFVWLIVQQGQLSITSTSNQDNPLMDVVAVRGEPILALDVWEHAYYIRYQNRRPEYIDAWWNVVNWEAVSENYAIALTQAA

SEQ ID NO: 106271 - DNA, 618 bp, Vibrio cholerae
  CDS (1)..(618): transl_table=11
atgccccatctatttcccgatctaccctacgcttacgatgcgttagaaccttatattgatgccaagaccatggaggtgcattacagcaagcaccaccgcacttactacgataaattcctgtctgccatcaaggggactgagcatgaagatagaccactgagcgagattttcgcgcgcgtttcgaccttacccgcggccgtgcgtaaccacggtggtggctactataaccacattgtgtattggaactgcatgaagcctaacagtggcggtgagccacaaggcgaactggccgcagagatagaacgtcaatttggcagttttgcgcagttcaaagaagccttctcgcaagcggccgtgaacacctttggctctggttttgtctggcttatcgtgcaacacggtcaactgagcattacttccaccagcaaccaagataacccattgatggatgtggttgccgtgcgtggcgagccgattcttgcccttgatgtgtgggaacacgcttactacattcgctaccaaaaccgccgccctgagtacattgatgcgtggtggaatgtggtgaactgggaagcggtcagtgaaaactacgccatcgcactcacccaagctgcgtaa

SEQ ID NO: 106272 - protein, 205 aa, Vibrio cholerae
MPHLFPDLPYAYDALEPYIDAKTMEVHYSKHHRTYYDKFLSAIKGTEHEDRPLSEIFARVSTLPAAVRNHGGGYYNHIVYWNCMKPNSGGEPQGELAAEIERQFGSFAQFKEAFSQAAVNTFGSGFVWLIVQHGQLSITSTSNQDNPLMDVVAVRGEPILALDVWEHAYYIRYQNRRPEYIDAWWNVVNWEAVSENYAIALTQAA

SEQ ID NO: 106273 - DNA, 696 bp, Raphanus sativus
  CDS (1)..(696)
atggcgattcgttccgtagccagcagaaaaaccctagccggcctaaaggagacatcttcgaggcttctaagattcagaggaatccagaccttcacgcttcctgatctcccctatgattacagcgcgctggagccggcgataagcggcgagatcatgcagatccatcaccagaagcaccaccaggcttacgtcactaactacaacaatgccctcgagcagctcgatcaggccgtcaacaagggagacgcttccgctgtcgttaagctgcagagcgccatcaagttcaacggcggaggtcatgtgaaccattctattttctggaagaatcttgctcctgtaaaggaaggtggtggagagccaccaaagggatctcttggtggagctattgatacttcatttggttcacttgaaggtttggtgaagaagatgagtgcggaaggtgctgctgtgcaaggatcaggatgggtgtggctcggtttagacaaagagcttaagaagcttgtggttgacacaaccgcaaatcaggatccacttgtgacgaaaggaggaagcttggttcctctggtgggtatagatgtttgggagcacgcctactacttgcagtacaagaatgtgaggccggattatcttaagaacgtgtggaaagtgatcaactggaaatatgcaagcgaagtttatgagaaggaatgcaagtga

SEQ ID NO: 106274 - protein, 231 aa, Raphanus sativus
MAIRSVASRKTLAGLKETSSRLLRFRGIQTFTLPDLPYDYSALEPAISGEIMQIHHQKHHQAYVTNYNNALEQLDQAVNKGDASAVVKLQSAIKFNGGGHVNHSIFWKNLAPVKEGGGEPPKGSLGGAIDTSFGSLEGLVKKMSAEGAAVQGSGWVWLGLDKELKKLVVDTTANQDPLVTKGGSLVPLVGIDVWEHAYYLQYKNVRPDYLKNVWKVINWKYASEVYEKECK

SEQ ID NO: 106275 - DNA, 696 bp, Triticum aestivum
  CDS (1)..(696)
atggcgctccgcacgttggccgcgaagaaaaccctaggcctggcgctcggcggcgcgcggccgccggccgccgccaggggcgtggcgacgttcacgctccccgacctcccctacgactacggcgcgctggagccggccgtctccggcgagatcatgcgcctgcaccaccagaagcaccacgccacctacgtcgccaactacaacaaggcgctcgagcagctcgacgccgccgtcagcaagggggacgcgtccgccgtcgtccacctccagagcgccatcaagttcaacggcggcggtcatgttaaccattcaatcttctggaagaacctcaagcccatcagcgagggtggtggtgaggcacctcatggcaaacttggctgggccattgatgaagattttggttctattgagaaacttataaagaagatgaatgcagagggtgctgctttacaaggatctggatgggtgtggctagctttggataaagaggccaaaaggctttcagttgaaactactcctaatcaggaccctcttgtgaccaaagggtcaaacctgcatcctttgttgggaattgatgtctgggagcatgcgtactacctgcagtacaagaacgtgaggccggactacctgaccaacatctggaaggtggtgaactggaaatatgccggagaagagtatgagaaagtgcttgcatga

SEQ ID NO: 106276 - protein, 231 aa, Triticum aestivum
MALRTLAAKKTLGLALGGARPPAAARGVATFTLPDLPYDYGALEPAVSGEIMRLHHQKHHATYVANYNKALEQLDAAVSKGDASAVVHLQSAIKFNGGGHVNHSIFWKNLKPISEGGGEAPHGKLGWAIDEDFGSIEKLIKKMNAEGAALQGSGWVWLALDKEAKRLSVETTPNQDPLVTKGSNLHPLLGIDVWEHAYYLQYKNVRPDYLTNIWKVVNWKYAGEEYEKVLA

SEQ ID NO: 106277 - DNA, 627 bp, Colletotrichum graminicola
  CDS (1)..(627)
atggctagcccacagtacatattgcctaagctcccatatgcgtacgacgccctcgagcctcacatctcagctcagatcatggagctgcaccacagcaaacaccatcaagcatacgttacaaatctgaacaaggccatcgagacttacaatgcaaacccgctccagaatcgcatcgccgtcctcgcggccctaaacttcaacggcggcggccacatcaaccattccctattctgggagaacctttccccagcctcgagcggtgatgcctcgcccgatgcggcgccaaagctcgtcgccgagatcacccgcgtctggggcgggctcgaccagttcaagcaggctttcaacaccacgctgctgggtatcaccggtagcggctgggggtggcttgttaaggatgacataacgggcctcagcattatcacgacgaaagaccaggaccctgtcaccaagggcgtgcccatctttggtattgacatgtgggagcacgcgtactaccttcagtatctcaacggaaaggctgcatatgtcgagaatatttggaacgtcctcaactggaagacggcggaatcgaggttttctggctcccgggatgacgccttcacggccctcaaggcggttctctag

SEQ ID NO: 106278 - protein, 208 aa, Colletotrichum graminicola
MASPQYILPKLPYAYDALEPHISAQIMELHHSKHHQAYVTNLNKAIETYNANPLQNRIAVLAALNFNGGGHINHSLFWENLSPASSGDASPDAAPKLVAEITRVWGGLDQFKQAFNTTLLGITGSGWGWLVKDDITGLSIITTKDQDPVTKGVPIFGIDMWEHAYYLQYLNGKAAYVENIWNVLNWKTAESRFSGSRDDAFTALKAVL

SEQ ID NO: 106279 - DNA, 621 bp, Phanerochaete chrysosporium
  CDS (1)..(621)
atgtccggccagcacaccctccccgacctcccctacgcctacgacgccctcgagcccttcatctccaggcagatcatggagctccaccacaagaagcaccaccagacctacgtcaacgccctcaacgccgccgagcaggcctacgccaaggcctccacccccaaggagcgcatcgccctccaggccgccctcaagttcaacggcggcggccacatcaaccactccctcttctggaagaacctcgcccccgccgcctccgagggcaagggcaacggcggcgtcctccacgacgggcccctcaagaaggccatcctcgagagcttcggctcctttgagaacttcaagaaggagttcaacaccaccaccgccgccatccagggctccggctggggctggctcggctacaacccgagctcgaagcgcgtcgagctcgcgaccaccgcgaaccaggacccgctcctcacccacgtcccgctcatcggcgtcgacatctgggagcacgccttctacctccagtacctcaacgtcaaggccgactacctcaacgccatctggaacgtcatcaactttgaggaggccgagaagcgctacctcgaggccgtcggcggcgccaagctctga

SEQ ID NO: 106280 - protein, 206 aa, Phanerochaete chrysosporium
MSGQHTLPDLPYAYDALEPFISRQIMELHHKKHHQTYVNALNAAEQAYAKASTPKERIALQAALKFNGGGHINHSLFWKNLAPAASEGKGNGGVLHDGPLKKAILESFGSFENFKKEFNTTTAAIQGSGWGWLGYNPSSKRVELATTANQDPLLTHVPLIGVDIWEHAFYLQYLNVKADYLNAIWNVINFEEAEKRYLEAVGGAKL

SEQ ID NO: 106281 - DNA, 606 bp, Streptococcus gordonii
  CDS (1)..(606): transl_table=11
atggcaattattttacctgatcttccttacgcttatgatgcattggagccatatatcgatgaagaaactatgcacttgcaccatgacaaacaccataatacttatgtaacaaatgtcaatgcagcacttgcaaaacacctcgaaattggcgaagatttagaaaaattattggctgatgtcgagtctattccagctgatatccgtcaagcagttatcaacaatggtggtggacaccttaaccacgctcttttctgggaattgatgacagcagaagagacagcaccttctgcagaattagcggctgacattgatgctacttttggatcctttgaagatttccaagcagctttcacaactgcagcaacaactcgttttgggtcaggctgggcttggttggtggtcaataaagaaggcaaattagaagtggtttcaactgcgaatcaagatactccaatctcagaaggtaaaactccaatcttgggcttggatgtttgggaacatgcttattatgttaaataccgtaatgttcgtcctgattacatcaaagctttcttctcagtgatcaactggaataaagttaacgaactttatgcagcagctaaataa

SEQ ID NO: 106282 - protein, 201 aa, Streptococcus gordonii
MAIILPDLPYAYDALEPYIDEETMHLHHDKHHNTYVTNVNAALAKHLEIGEDLEKLLADVESIPADIRQAVINNGGGHLNHALFWELMTAEETAPSAELAADIDATFGSFEDFQAAFTTAATTRFGSGWAWLVVNKEGKLEVVSTANQDTPISEGKTPILGLDVWEHAYYVKYRNVRPDYIKAFFSVINWNKVNELYAAAK

SEQ ID NO: 106283 - DNA, 582 bp, Neisseria gonorrhoeae
  CDS (1)..(582): transl_table=11
atggaacataagctgccgcaactgccttatgagccggacgcattgtccccgcatctgagcaaagagactttggaattccactacggcaaacaccatcaaacctacatcaccaacctgaacaatcaaatcaaaggcaccgaatttgaaaacctgcctttggaagagattgtgaaaaaatcttcgggcggcgtgttcaacaacgcggctcaaacttggaaccacaccttctactggctgggtttcacgcccaaaggccaaggcaagcctgccggcgaactggccgccgccatcgacgcgaagtggggcagcttcgaaaaattccaagaagcgttcaatgcctgcgcggccggtacgttcggctccggttgggcgtggctggtgaaaacccctgtcggcggattggatttgatttccacttccaacgccgctacgccgctgaccactgaaaacacgccgctcttgacttgcgacgtgtgggaacacgcctactacatcgactaccgcaacagccgccccaactacctgaaaggtttttgggaaatcgtcaactgggacgaagtcgccaaacgttttgccgcataa

SEQ ID NO: 106284 - protein, 193 aa, Neisseria gonorrhoeae
MEHKLPQLPYEPDALSPHLSKETLEFHYGKHHQTYITNLNNQIKGTEFENLPLEEIVKKSSGGVFNNAAQTWNHTFYWLGFTPKGQGKPAGELAAAIDAKWGSFEKFQEAFNACAAGTFGSGWAWLVKTPVGGLDLISTSNAATPLTTENTPLLTCDVWEHAYYIDYRNSRPNYLKGFWEIVNWDEVAKRFAA

SEQ ID NO: 106285 - DNA, 618 bp, Vibrio mimicus
  CDS (1)..(618): transl_table=11
atgccccatttatttcccgatctgccttacgcttacgatgcactagaaccgtacattgatgccaaaacgatggaagtgcattacagcaaacaccatcgcacttattacgataaatttctctccgccattaaaggcacagattaccaagatcagtcgcttagcgagatttttgcacgtgtttcaacgcttcccgcggctgtgcgtaatcatggtggaggttactacaaccatattttgtattggaactgcatgaaaccgaatggtggcggtgaaccacaaggcgaacttgcagcagccattgagcgccactttggcagctttgcccaatttaaagaggcgttttcacaagccgccgtcaatacttttggctcgggatttgtgtggctgattgtgcaagagggtcaactaagcatcagctcaaccagcaaccaagataatccactgatggatgtggttgcagtgcgtggtgagccgatcctagccttggatgtttgggagcacgcttactacattcgctaccaaaaccgccgtcctgagtacattgatgcgtggtggagtgtcgtgaactgggaagccgtcagcgaaaactacgccattgctctcacgcaagctgcgtaa

SEQ ID NO: 106286 - protein, 205 aa, Vibrio mimicus
MPHLFPDLPYAYDALEPYIDAKTMEVHYSKHHRTYYDKFLSAIKGTDYQDQSLSEIFARVSTLPAAVRNHGGGYYNHILYWNCMKPNGGGEPQGELAAAIERHFGSFAQFKEAFSQAAVNTFGSGFVWLIVQEGQLSISSTSNQDNPLMDVVAVRGEPILALDVWEHAYYIRYQNRRPEYIDAWWSVVNWEAVSENYAIALTQAA

SEQ ID NO: 106287 - DNA, 609 bp, Vibrio parahaemolyticus
  CDS (1)..(609): transl_table=11
atgtcgcatacatttcccgctctgccttacccatacgatgcgttagagccatacatcgacgcaaaaaccatggaagtgcattacagcaaacaccacaaaacttacttcgataaattcgtcaccgccgtgcaaggcagtgttcttgaaacacaatcgctagacgaaatcttcgcagctatttcgcaacatagcccagccattcgcaacaatggcggcggctactacaaccacatcctttactggaattgcatgtcaccagaaggcggcggtgaaccacaaggcgcacttgcacaagccatcaacgacaagtttggtcacttcgaaaagttcaaagacgaattcgctcaagcagccgttaatacgtttggatctggctttgcatggttagttgtgaaagatggcgacatccacatcacctccaccagcaatcaggataacccgttaatggacgtggccgatgtacgcggcgagcctatccttgcattagatgtgtgggagcacgcgtactacatcagttatcagaaccgtcgaccagaatacatcgacgcttggtggaatgtggtgaactggcgcgccgtcgaagagaactacgctcgcgcgctcgtgtaa

SEQ ID NO: 106288 - protein, 202 aa, Vibrio parahaemolyticus
MSHTFPALPYPYDALEPYIDAKTMEVHYSKHHKTYFDKFVTAVQGSVLETQSLDEIFAAISQHSPAIRNNGGGYYNHILYWNCMSPEGGGEPQGALAQAINDKFGHFEKFKDEFAQAAVNTFGSGFAWLVVKDGDIHITSTSNQDNPLMDVADVRGEPILALDVWEHAYYISYQNRRPEYIDAWWNVVNWRAVEENYARALV

SEQ ID NO: 106289 - DNA, 615 bp, Geobacillus thermoleovorans
  CDS (1)..(615): transl_table=11
atgccatttgaattgccagcattgccgtatccgtatgatgcgcttgagccgcacatcgacaaagaaacgatgaacattcaccacacgaagcaccataacacatacgttacaaatttgaatgcggcgcttgaagggcatccggatttgcaaaacaaatcgctcgaagaattgctcagcaatttggaagcccttccggaaagcattcgcacggcggtgcgcaacaacggcggcggtcatgcaaaccactcgcttttctggacgattttgtcgccaaatggcggcggtgagccgacgggtgagctggctgaggcgatcaacaaaaaattcggcagcttcaccgcgtttaaagacgagttttcgaaagcagcggctggccgtttcagtcctggctgggcatggcttgtcgtgaacaacggcgagctggaaattacgagcacgccgaaccaagactcgccgatcatggaaggcaaaacgccgattctcggcttggacgtttgggagcatgcgtactacttgaaataccaaaaccgccgtccggaatacattgccgcattctggaacattgtcaactgggacgaagtggcgaaacggtacagcgaagcgaaagcgaagtaa

SEQ ID NO: 106290 - protein, 204 aa, Geobacillus thermoleovorans
MPFELPALPYPYDALEPHIDKETMNIHHTKHHNTYVTNLNAALEGHPDLQNKSLEELLSNLEALPESIRTAVRNNGGGHANHSLFWTILSPNGGGEPTGELAEAINKKFGSFTAFKDEFSKAAAGRFSPGWAWLVVNNGELEITSTPNQDSPIMEGKTPILGLDVWEHAYYLKYQNRRPEYIAAFWNIVNWDEVAKRYSEAKAK

SEQ ID NO: 106291 - DNA, 714 bp, Euphorbia esula
  CDS (1)..(714)
atggctcttcgttctctcgtcaccagaaggaccttagggttagcatccaattccgctaagcttgtatcaggttcagctgttgctcaacttcgtggcttcaagaccttctcgctccccgatcttccttatgattatggtgctctggagcctgcgattagcggtgagattatgcaattgcatcaccagaagcatcaccagacttacataactaactataataaggctcttgagcaactccatgaggccactgaaaaaggcgactcttccactgttgtcaagttgcagagcgccatcaaattcaatggcggaggccacatcaaccactctatattctggaagaatcttgcccctgttggtgaaggaggtggtgagcttccacatggctcccttggttgggctatcgacaaagattttggttctttggagaagttgattcaaaaaatgaacacccaaggtgctgctgtccaaggttctggatgggtgtggcttggtctcgagaaagaatcaaagaggctggtggttgagaccacttcgaaccaggatcctttggttactaaaggacccttagttcctttggttggcattgatgtttgggaacatgcttactacttgcagtacaagaatgtgagaccggattatctaaagaacatatggaaggtagtaaattggaagtatgcaagtgacatttatgccaatgaatgcccttcggcataa

SEQ ID NO: 106292 - protein, 237 aa, Euphorbia esula
MALRSLVTRRTLGLASNSAKLVSGSAVAQLRGFKTFSLPDLPYDYGALEPAISGEIMQLHHQKHHQTYITNYNKALEQLHEATEKGDSSTVVKLQSAIKFNGGGHINHSIFWKNLAPVGEGGGELPHGSLGWAIDKDFGSLEKLIQKMNTQGAAVQGSGWVWLGLEKESKRLVVETTSNQDPLVTKGPLVPLVGIDVWEHAYYLQYKNVRPDYLKNIWKVVNWKYASDIYANECPSA

SEQ ID NO: 106293 - DNA, 738 bp, Vigna unguiculata
  CDS (1)..(738)
atggcttcattggggttacaaaatgtggctggcatcaatcttcttttcaaagagggtccaaaagtcaatgcaaagtttgagctgaagccgccaccatatccactgaatggtttggagcctgtgatgagccagcagacactcgagtttcactgggggaagcaccacaggacttatgtggaaaatctgaaaaaacaagttgttgggacagagcttgatgggaagtcactggaagagattatagtcactgcatacaataagggtgacattcttccagctttcaacaatgcagcacaggtatggaaccatgacttcttctgggagtgcatgaaaccaggtggaggtggaaaaccatctggggaacttctagaactcattgaaagagactttggttcatttgaaaaattccttgatgagtttaaggctgctgctgcaacacaattcggttcaggatgggcctggcttgcatataaagcaagcaaacttgatggggaaaatgctgcaaatcctccttcagctgatgaggataacaagctagtggtgatcaagagtcccaatgctgtgaacccccttgtttggggaggttattatccacttcttaccattgatgtttgggagcatgcttactaccttgattttcagaaccggcgtcctgattatatatcagtgttcatggataagcttgtttcctgggatgcagtgagttctagacttgaacaagctaaggctttaagtgcatga

SEQ ID NO: 106294 - protein, 245 aa, Vigna unguiculata
MASLGLQNVAGINLLFKEGPKVNAKFELKPPPYPLNGLEPVMSQQTLEFHWGKHHRTYVENLKKQVVGTELDGKSLEEIIVTAYNKGDILPAFNNAAQVWNHDFFWECMKPGGGGKPSGELLELIERDFGSFEKFLDEFKAAAATQFGSGWAWLAYKASKLDGENAANPPSADEDNKLVVIKSPNAVNPLVWGGYYPLLTIDVWEHAYYLDFQNRRPDYISVFMDKLVSWDAVSSRLEQAKALSA

SEQ ID NO: 106295 - DNA, 861 bp, Callinectes sapidus
  CDS (1)..(861)
atggcagagaaggatctatacattgctgcccttgagaagaagctggctgagctgtctggtattgaagttgatcagatcaagaaaaaccagctagccaatgcttcaagtgaggcacgttccattcgtgagatggctgagtacgtggagggcatccaggtaaagcaagctggacaggttattactggtcaggtgaatcctcaggtggctgccatgttttcccatattaaggcggagctaggtgaggagcgtggagtacattccctgccacctcttggatatgactatggtgccctggaaccccatatctgcaccaccatcatgcagatccatcacaccaaacaccatcaaggatacatcaacaacctgaaggcagctgtagaaaagcttacagaagcagagaaggctaatgatattggtgctatgaatgcactccttccggccatcaagttcaatggaggtggccatttgaaccatacaatcttctggactaacatggctccaggagctggaggagaaccctcaggatccattgctgagatgatcaacagggattttggctcattccagtccttcaaggaaaagttctcaggtgccagtgttgctgtgaaaggatctggctggggttggcttggctattgccctaaggatgacaagcttgctgttgccacctgccagaaccaggatcccctgcagatcacccatggtcttgtgccattgctgggtttggatgtgtgggagcatgcctattatctccagtataagaacctgcgtgccgattatgttaaagccttcttcaatgtgatcaactgggccaacgtgaatgagcgttttgaagcagctcgtaaggcagctggacactga

SEQ ID NO: 106296 - protein, 286 aa, Callinectes sapidus
MAEKDLYIAALEKKLAELSGIEVDQIKKNQLANASSEARSIREMAEYVEGIQVKQAGQVITGQVNPQVAAMFSHIKAELGEERGVHSLPPLGYDYGALEPHICTTIMQIHHTKHHQGYINNLKAAVEKLTEAEKANDIGAMNALLPAIKFNGGGHLNHTIFWTNMAPGAGGEPSGSIAEMINRDFGSFQSFKEKFSGASVAVKGSGWGWLGYCPKDDKLAVATCQNQDPLQITHGLVPLLGLDVWEHAYYLQYKNLRADYVKAFFNVINWANVNERFEAARKAAGH

SEQ ID NO: 106297 - DNA, 657 bp, Callinectes sapidus
  CDS (1)..(657)
atgctgcttgctcgtgcctttttgcctgccaggagcctggctgctgcagggctgtggtgcagacagaagcacacactgccagacctcccctacgactatggagcgctggagcctactattagtgctgagatcatgcaacttcaccactccaagcaccatcaaacctacgtcaacaacctcaatgttgccgaagagaagctagctgaagccaaagagaaaggtgatgtcagcacaataatttccttagctccggccctcaaattcaatggtggtggacacataaaccattccatcttctggcagaatttgtcagctgatggtggagaacctgaaggagaactgctggctgcaattaatcgtgattttggcagtgttgagaatatgaagaaccaactatctgcacaaactgttgctgttcaaggctctggctggggatggttaggttataataagcagaagggaaccctgcaaattgctacgtgtccaaaccaggatcctcttgaagctacaactggccttgtccctctctttggcattgatgtctgggagcatgcttactacctgcagtacaagaatgtccgtccagattatgtgaaggccatctggaatgttgctaactggaaggatatcactgcaaggttcaatgcagcaaagtag

SEQ ID NO: 106298 - protein, 218 aa, Callinectes sapidus
MLLARAFLPARSLAAAGLWCRQKHTLPDLPYDYGALEPTISAEIMQLHHSKHHQTYVNNLNVAEEKLAEAKEKGDVSTIISLAPALKFNGGGHINHSIFWQNLSADGGEPEGELLAAINRDFGSVENMKNQLSAQTVAVQGSGWGWLGYNKQKGTLQIATCPNQDPLEATTGLVPLFGIDVWEHAYYLQYKNVRPDYVKAIWNVANWKDITARFNAAK

SEQ ID NO: 106299 - DNA, 588 bp, Vibrio metschnikovii
  CDS (1)..(588): transl_table=11
atggcatttgaactacccgctcttccttacgcaaaagatgcactagaaccacatatctctgcagaaactcttgagtaccactacggtaagcaccacaacacttacgttgttaagctaaacggcctagtaccaggaactgaattcgaaggcaaaactctagaagagatcatcaaaacttctactggcggtatcttcaacaacgcagcacaagtttggaaccacactttctactggcactgccttgcgccaaacgcaggtggcgaaccaacaggtgccgttgctgatgcgatcaacgcagcatttggttcgttcgaagagttcaaagcaaaattcactgactcagctatcaacaacttcggttcttcttggacttggttagtgaagaaagctgacggttctctagctatcgttaacacttctaacgcagcaacaccgatcactgaagaaggtgtgacgccactgctaaccgttgacctgtgggaacacgcttactacatcgactaccgcaacctacgtccagattacatgaacggtttctgggctctggttaactgggaattcgtagctagagaaccgtcagctttctag

SEQ ID NO: 106300 - protein, 195 aa, Vibrio metschnikovii
MAFELPALPYAKDALEPHISAETLEYHYGKHHNTYVVKLNGLVPGTEFEGKTLEEIIKTSTGGIFNNAAQVWNHTFYWHCLAPNAGGEPTGAVADAINAAFGSFEEFKAKFTDSAINNFGSSWTWLVKKADGSLAIVNTSNAATPITEEGVTPLLTVDLWEHAYYIDYRNLRPDYMNGFWALVNWEFVAREPSAF

SEQ ID NO: 106301 - DNA, 603 bp, Nostoc commune
  CDS (1)..(603): transl_table=11
atggcatttgtacaagacccattacccttcgatattaatgctttagacccgtatgggatgaaggctgaaactttcgagtatcactatggcaagcatcacaaagcttatgtagacaacctcaacaagctcactgaaggtacagaacttgctaataagtctctggaagaggtgatcaaaacttccttcaacgactcctcgaaagcgggaatcttcaacaacgctgcccaagtttggaaccacaccttcttctggaattccttgaaaccagcaggtggcggcgcacccactggcgatctcgcagccagaatcgataaagattttggtagctttgacaaattcaaagaagagttctcgaacgcagccgcaacccaatttggcagtggctggtcttggctcattgatgatggtggtacgctgaaggtgatcaaaacaccaaacgcagaaaaccctctagctcatggtaagaaagcactcctaaccttagatgtttgggaacacgcctactacattgactttagaaacgcccgtccggcgttcatcaagaatttcctagataacttggtcaactgggactttgctgctgaaaacttggccaaagcttaa

SEQ ID NO: 106302 - protein, 200 aa, Nostoc commune
MAFVQDPLPFDINALDPYGMKAETFEYHYGKHHKAYVDNLNKLTEGTELANKSLEEVIKTSFNDSSKAGIFNNAAQVWNHTFFWNSLKPAGGGAPTGDLAARIDKDFGSFDKFKEEFSNAAATQFGSGWSWLIDDGGTLKVIKTPNAENPLAHGKKALLTLDVWEHAYYIDFRNARPAFIKNFLDNLVNWDFAAENLAKA

SEQ ID NO: 106303 - DNA, 603 bp, Vibrio parahaemolyticus
  CDS (1)..(603): transl_table=11
atggagaatcgagtaatggcatttgaactaccagctcttccttacgcgaaagacgcactagaaccacacatctcagcagagactctagactaccaccacggtaagcaccacaacacttacgttgttaagcttaacggtcttatccctggtactgagttcgaaggcaaaactctagaagagatcatcaagacttctactggtggcgtattcaacaacgcagcgcaaatctggaaccacacgttctactggcactgtcttgctccaaacgcgggcggcgaaccaactggcgcagttgcagacgcaatcaacgcagcattcggttctttcgaagaattcaaagcgaagttcactgacgcagcaatcaacaactttggttcttcatggacttggctagttaagaaagctgacggttctctagaaatcgttaacacttctaacgcagcaacgccactaacagaagaaggtactactccacttctaactgttgatctatgggaacacgcgtactacatcgattaccgcaacgtacgtcctgattacatgaacggcttctgggctcttgtaaactgggacttcgtagctgaggaccgtcagctttcttaa

SEQ ID NO: 106304 - protein, 200 aa, Vibrio parahaemolyticus
MENRVMAFELPALPYAKDALEPHISAETLDYHHGKHHNTYVVKLNGLIPGTEFEGKTLEEIIKTSTGGVFNNAAQIWNHTFYWHCLAPNAGGEPTGAVADAINAAFGSFEEFKAKFTDAAINNFGSSWTWLVKKADGSLEIVNTSNAATPLTEEGTTPLLTVDLWEHAYYIDYRNVRPDYMNGFWALVNWDFVAEDRQLS

SEQ ID NO: 106305 - DNA, 672 bp, Barbula unguiculata
  CDS (1)..(672)
atgattcgcttggggcgccatacggtaccttccatccgggggtgggcgctgccccccgccctggccacagccacactgcacacggagcgcctgccggacctggactacaactaccgtgcgctggagccctacttcaacgcccacatcatgcagctgcaccaccaaaagcaccaccagacgtacgtgacgaactacaacaaggcgctcgagcagctgcaggtgtgtaatgacgatccaaatgtggttgtttctttgcagtccgccatcaacttcaacggcggagggcacattaaccactccatcttctggaagaatttggctcccactagtgaaggaggaggttcacccccgcaaggaagcctcgccaaggccattgatgcgcagttcggaggtctggacaagttgactgccaagatgagcacggcgggcgctggcgtgcagggatccggctgggtgtggttgggttacaacaaggaactgaagcgtctgcaggtggaaacaacccagaaccaggatcccttgtcatcaaaggggctcattccgttgcttggaattgatgtttgggagcacgcttactacctccagtacaagaacgtgaggccggactacctgaagaacatttggaaagtggtgaactggaaggacgtggccaagcgatacgagagtgcttaa

SEQ ID NO: 106306 - protein, 223 aa, Barbula unguiculata
MIRLGRHTVPSIRGWALPPALATATLHTERLPDLDYNYRALEPYFNAHIMQLHHQKHHQTYVTNYNKALEQLQVCNDDPNVVVSLQSAINFNGGGHINHSIFWKNLAPTSEGGGSPPQGSLAKAIDAQFGGLDKLTAKMSTAGAGVQGSGWVWLGYNKELKRLQVETTQNQDPLSSKGLIPLLGIDVWEHAYYLQYKNVRPDYLKNIWKVVNWKDVAKRYESA

SEQ ID NO: 106307 - DNA, 642 bp, Streptomyces griseus
  CDS (1)..(642): transl_table=11
atggccacgtacacgctcccggaactcccgtacgactacgcggcgctcgaaccggtcatcaacccgcagatcatcgagctgcaccacgacaagcaccacgccgcgtacgtcaagggcgcgaacgacaccctggagcagctggaagaggcccgcgacaaggaggcctggggtgcgatcaacggcctccagaagaacctcgcgttccacctctccggccacatcctgcactcgatctactggcacaacatgaccggcgacggcggcggcgagcccctcgcggcggacggcgtcggcgacctcgccgacgcgatcaccgagtccttcggctcctacgcgggcttcaagtcccagctgacgaaggccgccgcgaccacccagggatccggctggggcgtgctcgcgtacgagcccgtgagcggcaagctgatcgtcgagcaggtctacgaccaccagggcaacgtcggccagggctccgtcccgatcctcgtcttcgacgcctgggagcacgccttctacctgcagtacaagaaccagaaggtggacttcatcgaggcgatgtggcaggtcgtcaactggcaggacgtggcgaagcgttacgccgccgccaaggagcgcgtgaacgtgctgctgctcgccccctga

SEQ ID NO: 106308 - protein, 213 aa, Streptomyces griseus
MATYTLPELPYDYAALEPVINPQIIELHHDKHHAAYVKGANDTLEQLEEARDKEAWGAINGLQKNLAFHLSGHILHSIYWHNMTGDGGGEPLAADGVGDLADAITESFGSYAGFKSQLTKAAATTQGSGWGVLAYEPVSGKLIVEQVYDHQGNVGQGSVPILVFDAWEHAFYLQYKNQKVDFIEAMWQVVNWQDVAKRYAAAKERVNVLLLAP

SEQ ID NO: 106309 - DNA, 621 bp, Paxillus involutus
  CDS (1)..(621)
atgtctggccaacacactctccccgacctcccgtactcctatgatgctctcgagccttacgtctcgcagcagatcatgacgcttcaccacaagaagcaccaccaaacctatgtcactgctctcaacgccgctgaagtcagttacgcgaagactgctactcccaaggagcgcatcgccctccaagctgccctccgcttcaacggtggtggtcatatcaaccactccctcttctggaagaaccttgcacctgctgctagcgagggcaagggcaagggtggagagctcaaacctggcccattgaaggatgccatcgactcgaactttggctcgctcgatagcctcaagaaggaattcaatgctgctactgctgccatccagggctctggctggggctggctcggattgaacccctcgaccaaacgtcttgagatcgccaccactcctaaccaggaccctctcctgacccacattcccatcatcggtgtcgatatctgggagcacgctttctacctccaatacctcaacgtcaaggttgattacctcaacgcaatctggagcgttatcaacttcaaggaggctgagaagaggttcactgagggtctctctggctccaagctgtaa

SEQ ID NO: 106310 - protein, 206 aa, Paxillus involutus
MSGQHTLPDLPYSYDALEPYVSQQIMTLHHKKHHQTYVTALNAAEVSYAKTATPKERIALQAALRFNGGGHINHSLFWKNLAPAASEGKGKGGELKPGPLKDAIDSNFGSLDSLKKEFNAATAAIQGSGWGWLGLNPSTKRLEIATTPNQDPLLTHIPIIGVDIWEHAFYLQYLNVKVDYLNAIWSVINFKEAEKRFTEGLSGSKL

SEQ ID NO: 106311 - DNA, 609 bp, Bacillus licheniformis
  CDS (1)..(609): transl_table=11
atggcttacaaacttccagaattaccttatgcttacgatgcgttagaacctcacatcgacaaagagacgatgaatattcaccatacgaagcaccataacacatatgttacaaaattgaacgaagcggtggcaggcaaacaggatcttgaaagcaaatctgttgaagagcttgttgcaaaccttgatgcagtaccggaaaacatccgtacagctgtccgcaacaatggcggagggcatgccaaccactcattgttctggaaacttctttctccaaacggaggaggcgctccaactggtgaattggcagaagccatcaacagcaaattcggcagcttcgatcaattcaaagaagactttgcggctgcagcagcagcgcgtttcggctccggctgggcatggcttgttgtcaataacggagagcttgaaatcacaagtacgccaaaccaagattctcctctttcagaaggcaagactcctatcttaggtcttgatgtatgggagcacgcatactacctgaattatcaaaaccgccgtccagattacattaaagcattctggaacgtcgttaactgggatgaagttgcacccctttacagcgaagcaaaataa

SEQ ID NO: 106312 - protein, 202 aa, Bacillus licheniformis
MAYKLPELPYAYDALEPHIDKETMNIHHTKHHNTYVTKLNEAVAGKQDLESKSVEELVANLDAVPENIRTAVRNNGGGHANHSLFWKLLSPNGGGAPTGELAEAINSKFGSFDQFKEDFAAAAAARFGSGWAWLVVNNGELEITSTPNQDSPLSEGKTPILGLDVWEHAYYLNYQNRRPDYIKAFWNVVNWDEVAPLYSEAK

SEQ ID NO: 106313 - DNA, 768 bp, Oryza sativa subsp
  CDS (1)..(768)
atggcggctttcgcctccgctctccgcgttctcccctcgccgccggctgcggtgcctcgtcggcttcgctcgagagaacaaaggcagggctgtagatctcgaaggtattcaaaagtcgtggcttactacgctctcactactccgccgtataaacttgatgccctggaaccttatattagcaagaggacagttgaacttcactggggtaagcatcagcaagactatgtggatagcttgaataagcagcttgctaccagcatgttctatgggtacactctggaggaactaataaaagaagcatacaacaacggcaacccattaccagaatataataatgcagcacaggtatggaaccatcacttcttctgggaatcaatgcagccagaaggtggtgggtcaccagggcgaggtgtcctgcagcagatagagaaggattttggctcttttactaattttagggaagagtttatacgctcagcattatcacttttggggtctggctgggttttgcttgtcttgaagagaaaagaacgaaaattatcggtagtccatacacaaaatgccatcagtccacttgcacttggtgatattccactcatcaatctagacttgtgggagcatgcttactacttggattacaaggatgacaggcgaatgtatgttacaaactttatcgaccatcttgtctcttgggatactgtcactctacgcatgatgcgcgctgaggcttttgtgaaccttggtgaaccaaatatcccagttgcatga

SEQ ID NO: 106314 - protein, 255 aa, Oryza sativa subsp
MAAFASALRVLPSPPAAVPRRLRSREQRQGCRSRRYSKVVAYYALTTPPYKLDALEPYISKRTVELHWGKHQQDYVDSLNKQLATSMFYGYTLEELIKEAYNNGNPLPEYNNAAQVWNHHFFWESMQPEGGGSPGRGVLQQIEKDFGSFTNFREEFIRSALSLLGSGWVLLVLKRKERKLSVVHTQNAISPLALGDIPLINLDLWEHAYYLDYKDDRRMYVTNFIDHLVSWDTVTLRMMRAEAFVNLGEPNIPVA

SEQ ID NO: 106315 - DNA, 633 bp, Aspergillus niger
  CDS (1)..(633)
atgacttccaaatgcaccctcccagatctaccctacgactacgatgccctcgaacccatcatctccaaacaaatcatggaactccaccacaaaaagcaccaccagacctatgtaaacaacctaaacgccgccctcgcttctcaagcctccgctctcgacagcaacgacatcacccagctcatcagcatccagcagaaactcaagttcaacggcggcggccacatcaaccattctctgttttggaagaacttggctcgctacgactccccggccactaacctggagagatccgccccgagcctcaaagacgccatcgagaagcagtggggatcagtcaaaaacttcacggatgcgtttgaggcggtgctgctgggcatccaaggcagcggatggggctggctggtgagttcgggtaagacgggattccttgagattgtcaccacgaaggatcaggatccagtgacgggaccgattccggtgttcggagtggatatgtgggaacatgcttattatctgcagtacttgaacaacaaagcctcctacgtgcagaacatctggaaggtgattaactgggaagaagcggagcatcggtatctgaatggtacggaggaactgggttcgttgaagttgtag

SEQ ID NO: 106316 - protein, 210 aa, Aspergillus niger
MTSKCTLPDLPYDYDALEPIISKQIMELHHKKHHQTYVNNLNAALASQASALDSNDITQLISIQQKLKFNGGGHINHSLFWKNLARYDSPATNLERSAPSLKDAIEKQWGSVKNFTDAFEAVLLGIQGSGWGWLVSSGKTGFLEIVTTKDQDPVTGPIPVFGVDMWEHAYYLQYLNNKASYVQNIWKVINWEEAEHRYLNGTEELGSLKL

SEQ ID NO: 106317 - DNA, 603 bp, Anabaena sp
  CDS (1)..(603): transl_table=11
atggcatttgtacaggaaccactaccctacgactttaatgctttagagcagtatggcatgaaaggtgaaaccttcgagtatcactacggcaaacatcacaaagcttatgtagataacctgaacaagctcaccgatggtacagaattggctgataaatccttagaagaagtcatccaaattgcctttaaggatgcctctaaagctggaatctttaacaacgctgctcaagtgtggaaccacaccttcttctggaattctttaaagcccgcaggtggcggcgcgcctacaggtgaattcgcagccaaaattaaccaagactttggtagcttcgacaaattgaaagaagaattttccaacgctgctgcaactcagttcggtagcggatgggcttggctaattgatgatggcggtacactgaaagtcactaaaactccaaacgccgaaaatcccctggctcatggacaaaaagcactcttaaccttggatgtctgggaacacgcctactacatcgacttcagaaatgctcgcccagcttttatcaagaactacttagataacttggttaactgggactttgctgctgcgaattatgctaaagcttag

SEQ ID NO: 106318 - protein, 200 aa, Anabaena sp
MAFVQEPLPYDFNALEQYGMKGETFEYHYGKHHKAYVDNLNKLTDGTELADKSLEEVIQIAFKDASKAGIFNNAAQVWNHTFFWNSLKPAGGGAPTGEFAAKINQDFGSFDKLKEEFSNAAATQFGSGWAWLIDDGGTLKVTKTPNAENPLAHGQKALLTLDVWEHAYYIDFRNARPAFIKNYLDNLVNWDFAAANYAKA

SEQ ID NO: 106319 - DNA, 639 bp, Arabidopsis thaliana
  CDS (1)..(639)
atggctgcttcaagtgctgtcaccgcaaactacgtcctcaagccacctccattcgcactggatgctttggagccgcatatgagcaaacaaactctggagtttcactggggaaaacatcacagagcttacgtggacaacctcaagaaacaggttcttggaaccgagcttgaaggcaagcccttagagcacattatccacagcacttacaacaatggtgatctcctccctgctttcaacaacgctgctcaggcgtggaaccacgagttcttctgggagtcaatgaaaccaggtggtggaggaaaaccatcaggagagcttcttgctttgcttgaaagagatttcacttcttatgagaagttctatgaagagttcaatgctgctgcagccactcagtttggagctggctgggcctggcttgcttattcaaatgaaaaactcaaagtagtgaaaactcccaatgctgtgaatccccttgtgctcggctctttcccattgcttaccattgatgtctgggagcatgcttactaccttgacttccagaaccgaagaccagattacataaagacattcatgaccaatcttgtgtcttgggaagctgtaagtgccagacttgaggccgccaaggctgcttctgcttaa

SEQ ID NO: 106320 - protein, 212 aa, Arabidopsis thaliana
MAASSAVTANYVLKPPPFALDALEPHMSKQTLEFHWGKHHRAYVDNLKKQVLGTELEGKPLEHIIHSTYNNGDLLPAFNNAAQAWNHEFFWESMKPGGGGKPSGELLALLERDFTSYEKFYEEFNAAAATQFGAGWAWLAYSNEKLKVVKTPNAVNPLVLGSFPLLTIDVWEHAYYLDFQNRRPDYIKTFMTNLVSWEAVSARLEAAKAASA

SEQ ID NO: 106321 - DNA, 582 bp, Bacteroides fragilis
  CDS (1)..(582): transl_table=11
atgacttacgaaatgcctaaacttccgtacgcaaacaatgcgctggaacctgtaatcagtcagcaaaccatcgattaccattatggtaaacatcttcaaacatatgtaaacaatctcaatagcctggttccgggcaccgaatatgaaggaaaaacagtagaagccatcgtagcctcggctcccgacggagctatcttcaataatgccggacaggtgctgaaccatactctgtacttcctgcaatttgcgccgaaaccggcaaagaacgaaccggcaggcaagttgggagaagccatcaaacgcgacttcggcagctttgaaaacttcaagaaagagttcaacgcagcttctgtaggattgttcggttcgggatgggcctggctgtccgttgacaaagacggaaagctgcacatcaccaaagagcccaacggaagcaatccggtacgcgcgggactgaaaccgttactgggatttgacgtatgggaacatgcttactacctcgactatcagaaccgtcgtgccgaccacgtaaacaaactgtgggagatcatcgactgggatgtcgtagaaaaacggctgtaa

SEQ ID NO: 106322 - protein, 193 aa, Bacteroides fragilis
MTYEMPKLPYANNALEPVISQQTIDYHYGKHLQTYVNNLNSLVPGTEYEGKTVEAIVASAPDGAIFNNAGQVLNHTLYFLQFAPKPAKNEPAGKLGEAIKRDFGSFENFKKEFNAASVGLFGSGWAWLSVDKDGKLHITKEPNGSNPVRAGLKPLLGFDVWEHAYYLDYQNRRADHVNKLWEIIDWDVVEKRL

SEQ ID NO: 106323 - DNA, 846 bp, Bacillus subtilis
  CDS (1)..(846): transl_table=11
atgaaacgtgaatcttatcaagcggagatgttcaattggtgtgaagccctgaaagatcagattcaaaagcgaggtcagcttgaccagtttgaagatcaaatcgacaagatgattgaggctctggaagatgaccaaacaacagaagaagattggtataaacaggccgctgccctttatcgggatattacagaatcagatgatacaagtgaaagacgcgcttatgtccctatagggaaacacgtgctgccaaagcttccttacaaatactccgccttagaaccttatatatcacgcgatattatgatccttcatcatacaaaacatcatcaaagctatgtcgatggcctgaacaaagcagaatcagagcttaaaaaagcgagagcgacaaagaattatgacttaatcactcattgggaaagagagcttgcgttccatggagcaggccattatttgcatagtattttttggttttctatgcatccaaacggaaaacggcgtcctacaggggcattgttccaaatgatagacctttcatttggaagctattccgcttttaaagaacattttacccaggcctctaaaaaagtggaaggcgtcggctgggccattctggtctgggcacctcgatcaggacggctggagattttaacggcagaaaaacaccagctctttagccaatgggatgtgatcccccttttaccgcttgacgtatgggagcatgcctactatttgcaatacaaaaatgaccgggccagctatgtcgatcactggtggaatgtcgtggattggcgcgaggctgaaaaacgttttgagcaggcaaaagaagtcgtttggaagctctattaa

SEQ ID NO: 106324 - protein, 281 aa, Bacillus subtilis
MKRESYQAEMFNWCEALKDQIQKRGQLDQFEDQIDKMIEALEDDQTTEEDWYKQAAALYRDITESDDTSERRAYVPIGKHVLPKLPYKYSALEPYISRDIMILHHTKHHQSYVDGLNKAESELKKARATKNYDLITHWERELAFHGAGHYLHSIFWFSMHPNGKRRPTGALFQMIDLSFGSYSAFKEHFTQASKKVEGVGWAILVWAPRSGRLEILTAEKHQLFSQWDVIPLLPLDVWEHAYYLQYKNDRASYVDHWWNVVDWREAEKRFEQAKEVVWKLY

SEQ ID NO: 106325 - DNA, 579 bp, Bordetella pertussis
  CDS (1)..(579): transl_table=11
atggcacacactcttccccccctgccttacgctctggatgcgctggctccgcgcatttccaaggaaacgctcgagtttcactacggcaagcaccaccagacgtacgtcaccaacctgaacaacctgatccccggcacggagttcgagaacctgtcgctggaagagatcgtcaagaagtcctcgggtggcgttttcaacaatgccgcccaagtctggaaccacacgttctactggaacagcctgtcgcccaacggcggcggcgagccctccggcgcgctggccgatgccatcaaggccaagtggggcagcgtggacgccttcaaggaagccttcaacaagtcggccgccggcaacttcggctcgggctggacctggctggtcaagaaggccgacggtacgctggacatcgtcaacaccagcaacgccgccacgccgctgacgaccgccgacaaggcgctgctgacctgtgacgtgtgggagcacgcgtactacatcgattaccgcaatgcccgtcccaagtacctggaaaatttctgggcgctggtgaactgggaattcgccgcgaagaatttcgcctaa

SEQ ID NO: 106326 - protein, 192 aa, Bordetella pertussis
MAHTLPPLPYALDALAPRISKETLEFHYGKHHQTYVTNLNNLIPGTEFENLSLEEIVKKSSGGVFNNAAQVWNHTFYWNSLSPNGGGEPSGALADAIKAKWGSVDAFKEAFNKSAAGNFGSGWTWLVKKADGTLDIVNTSNAATPLTTADKALLTCDVWEHAYYIDYRNARPKYLENFWALVNWEFAAKNFA

SEQ ID NO: 106327 - DNA, 582 bp, Coxiella burnetii
  CDS (1)..(582): transl_table=11
atggcttttgaattaccggatttgccctacaaactcaacgcactggaaccgcatatctctcaagaaacgctcgaatatcaccacggaaaacaccatagagcttatgtcaataaactcaacaaacttatcgaaggcaccccttttgaaaaggaacctctggaagaaattattcgaaaatccgacggcggaatcttcaacaatgcagcacaacattggaaccatacattttattggcactgcatgagccctgatggcggtggagatccttctggcgaattggcttcagctattgataaaacttttggatctttagagaaatttaaagcgctttttaccgactccgcaaataatcatttcggctcgggatgggcttggctcgttaaagataacaatggcaaattagaagtcttaagcactgtcaacgctcgtaatcccatgactgaaggcaaaaaacccctaatgacttgtgatgtttgggaacacgcctattacatcgatacccggaacgaccgccccaaatacgttaataacttttggcaagtggtcaattgggattttgtgatgaaaaacttcaaatcctaa

SEQ ID NO: 106328 - protein, 193 aa, Coxiella burnetii
MAFELPDLPYKLNALEPHISQETLEYHHGKHHRAYVNKLNKLIEGTPFEKEPLEEIIRKSDGGIFNNAAQHWNHTFYWHCMSPDGGGDPSGELASAIDKTFGSLEKFKALFTDSANNHFGSGWAWLVKDNNGKLEVLSTVNARNPMTEGKKPLMTCDVWEHAYYIDTRNDRPKYVNNFWQVVNWDFVMKNFKS

SEQ ID NO: 106329 - DNA, 582 bp, Escherichia coli O157
  CDS (1)..(582): transl_table=11
atgtcattcgaattacctgcactaccatatgctaaagatgctctggcaccgcacatttctgcggaaactatcgagtatcactacggcaagcatcatcagacttatgtcactaacctgaacaacctgattaaaggtaccgcgtttgaaggtaaatcactggaagagattattcgcagctctgaaggtggcgtattcaacaacgcagctcaggtctggaaccatactttctactggaactgcctggcaccgaacgccggtggcgaaccgactggaaaagtcgctgaagctatcgccgcatcttttggcagctttgccgatttcaaagctcagtttactgatgcagcgatcaaaaactttggttctggctggacctggctggtgaaaaacagcgatggcaaactggctatcgtttcaacctctaacgcgggtactccgctgaccaccgatgcgactccgctgctaaccgttgatgtctgggaacacgcatattacatcgactatcgcaatgcacgtcctggctatcttgagcacttctgggcgctggtgaactgggaattcgtagcgaaaaatctcgctgcataa

SEQ ID NO: 106330 - protein, 193 aa, Escherichia coli O157
MSFELPALPYAKDALAPHISAETIEYHYGKHHQTYVTNLNNLIKGTAFEGKSLEEIIRSSEGGVFNNAAQVWNHTFYWNCLAPNAGGEPTGKVAEAIAASFGSFADFKAQFTDAAIKNFGSGWTWLVKNSDGKLAIVSTSNAGTPLTTDATPLLTVDVWEHAYYIDYRNARPGYLEHFWALVNWEFVAKNLAA

SEQ ID NO: 106331 - DNA, 618 bp, Methanobacterium thermoautotrophicum
  CDS (1)..(618): transl_table=11
gtgaatgatttggagaaaaaattctatgagctacctgagctcccgtacccatacgacgcccttgaaccacacatatcccgggagcagctcaccatacaccaccagaaacaccaccaggcatacgtggatggtgccaacgcactcctcaggaaactggatgaggcaagggaatcagacacagacgttgacatcaaggcagccctcaaggagctctccttccatgttgggggctacgtgcttcacctcttcttctggggtaacatgggacccgcagatgaatgcggaggagaaccctcaggaaaactcgcagagtacatagagaaggactttggaagctttgaaagattcaggaaggagttctcacaggcagcaataagtgcagagggttcaggatgggcggtactcacctactgccagaggacagacaggctcttcataatgcaggtcgagaaacacaacgtcaacgtcataccacacttcaggatactcctggtcctcgatgtatgggaacacgcctactacattgactacaggaacgtgagaccagactacgttgaggcattctggaacatagttaactggaaggaagttgaaaaacgcttcgaggatatcctctaa

SEQ ID NO: 106332 - protein, 205 aa, Methanobacterium thermoautotrophicum
MNDLEKKFYELPELPYPYDALEPHISREQLTIHHQKHHQAYVDGANALLRKLDEARESDTDVDIKAALKELSFHVGGYVLHLFFWGNMGPADECGGEPSGKLAEYIEKDFGSFERFRKEFSQAAISAEGSGWAVLTYCQRTDRLFIMQVEKHNVNVIPHFRILLVLDVWEHAYYIDYRNVRPDYVEAFWNIVNWKEVEKRFEDIL

SEQ ID NO: 106333 - DNA, 609 bp, Methanobacterium thermoautotrophicum
  CDS (1)..(609): transl_table=11
atggagaaaaaattctatgaactccctgaactcccatacccctacgatgcccttgaaccatacatatcagaggagcagctgaggatacaccatgagaagcaccatcaggcctacgtggatggggccaatggcgtcctcagaaaactcgacgatgcccgggagaatggcgaagaagttgacatcaaggcggccctcaaggaactctcattccacgtggggggctacgtcctgcacctattcttctggggtaacatgggacccgcagatgaatgcggtggggaaccagacgggcggcttgcagagtacatagagaaggacttcggaagctttcaacgctttaaaaaagagttttctcaggctgctgtgagcgcggagggctcaggatgggctgtcctcacctactgccagaggaccgacaggctattcataatgcaggttgaaaagcacaacgtcaacgtgataccccacttcaggatcctcatggtcctggatgtatgggaacacgcctactacattgactacaggaacgtgagacccgactacgttgaggcattctggaacatcgtaaactggaaagaggttgaaaaacgcttcgatgacctcttctaa

SEQ ID NO: 106334 - protein, 202 aa, Methanobacterium thermoautotrophicum
MEKKFYELPELPYPYDALEPYISEEQLRIHHEKHHQAYVDGANGVLRKLDDARENGEEVDIKAALKELSFHVGGYVLHLFFWGNMGPADECGGEPDGRLAEYIEKDFGSFQRFKKEFSQAAVSAEGSGWAVLTYCQRTDRLFIMQVEKHNVNVIPHFRILMVLDVWEHAYYIDYRNVRPDYVEAFWNIVNWKEVEKRFDDLF

SEQ ID NO: 106335 - DNA, 624 bp, Mycobacterium tuberculosis
  CDS (1)..(624): transl_table=11
gtggccgaatacaccttgccagacctggactgggactacggagcactggaaccgcacatctcgggtcagatcaacgagcttcaccacagcaagcaccacgccacctacgtaaagggcgccaatgacgccgtcgccaaactcgaagaggcgcgcgccaaggaagatcactcagcgatcttgctgaacgaaaagaatctagctttcaacctcgccggccacgtcaatcacaccatctggtggaagaacctgtcgcctaacggtggtgacaagcccaccggcgaactcgccgcagccatcgccgacgcgttcggttcgttcgacaagttccgtgcgcagttccacgcggccgctaccaccgtgcaggggtcgggctgggcggcactgggctgggacacactcggcaacaagctgctgatattccaggtttacgaccaccagacgaacttcccgctaggcattgttccgctgctgctgctcgacatgtgggaacacgccttctacctgcagtacaagaacgtcaaagtcgactttgccaaggcgttttggaacgtcgtgaactgggccgatgtgcagtcacggtatgcggccgcgacctcgcagaccaaggggttgatattcggctga

SEQ ID NO: 106336 - protein, 207 aa, Mycobacterium tuberculosis
MAEYTLPDLDWDYGALEPHISGQINELHHSKHHATYVKGANDAVAKLEEARAKEDHSAILLNEKNLAFNLAGHVNHTIWWKNLSPNGGDKPTGELAAAIADAFGSFDKFRAQFHAAATTVQGSGWAALGWDTLGNKLLIFQVYDHQTNFPLGIVPLLLLDMWEHAFYLQYKNVKVDFAKAFWNVVNWADVQSRYAAATSQTKGLIFG

SEQ ID NO: 106337 - DNA, 600 bp, Plectonema boryanum
  CDS (1)..(600): transl_table=11
atggcattcacacaaccccctttaccgtttccaaaagatgcacttgagccatatggcatgaaggcagaaacatttgattatcactacggcaagcatcatgcagcttacgttaccaacttgaataagttggtagaaggaacgccgatggaaagcctatcgctagaagatgtgatcaaacagtcgtttggggattcctcgaaagtgggcgtatttaacaatgcggctcaagtttggaaccacaccttcttctggaattgcctgaaagcaggcggcggtggcgcaccgacaggtgaactggcagccaaaatcgatgctgcattcggtagccttgacaagttcaaagaagagtttagcaatgcggctgcaactcaatttggcagtggttgggcatggttggtagacgatggcggtacgctaaaagtgaccaaaactccgaatgcagagaatcctctggtgcatggtcaaaagcctttgttgacgttggatgtttgggaacacgcttactacttggatttccaaaatgcacgtcctgccttcatcaagaacttcttggataatttggtcaactgggattttgtcgctcagaacttagctgcttaa

SEQ ID NO: 106338 - protein, 199 aa, Plectonema boryanum
MAFTQPPLPFPKDALEPYGMKAETFDYHYGKHHAAYVTNLNKLVEGTPMESLSLEDVIKQSFGDSSKVGVFNNAAQVWNHTFFWNCLKAGGGGAPTGELAAKIDAAFGSLDKFKEEFSNAAATQFGSGWAWLVDDGGTLKVTKTPNAENPLVHGQKPLLTLDVWEHAYYLDFQNARPAFIKNFLDNLVNWDFVAQNLAA

SEQ ID NO: 106339 - DNA, 576 bp, Porphyromonas gingivalis
  CDS (1)..(576): transl_table=11
atgactcacgaactcatttccctgccttatgcggtcgatgcactggctcctgttatcagcaaagaaacagtggaattccaccacggtaagcacctgaagacctatgtggacaacctcaataagctcatcatcggcacggaatttgaaaacgcagacttgaataccatcgtacaaaagagcgaaggcggtatcttcaacaatgccggccaaaccctcaaccacaatctctatttcactcagttccgtccgggcaaaggaggagcaccgaaaggcaaactgggggaagctatcgacaaacaattcggctcattcgaaaagttcaaagaggagttcaacacagccggtaccaccctctttggttcgggctgggtatggcttgcatccgatgccaatggcaaactgtccatcgagaaggaacccaatgccggcaatcccgtgcgcaaagggttgaaccctttgctcggattcgacgtatgggagcacgcatattatctgacttaccagaatcgtcgtgccgaccacctcaaagatctttggagtatcgttgactgggatattgtagaatctcggtattaa

SEQ ID NO: 106340 - protein, 191 aa, Porphyromonas gingivalis
MTHELISLPYAVDALAPVISKETVEFHHGKHLKTYVDNLNKLIIGTEFENADLNTIVQKSEGGIFNNAGQTLNHNLYFTQFRPGKGGAPKGKLGEAIDKQFGSFEKFKEEFNTAGTTLFGSGWVWLASDANGKLSIEKEPNAGNPVRKGLNPLLGFDVWEHAYYLTYQNRRADHLKDLWSIVDWDIVESRY

SEQ ID NO: 106341 - DNA, 582 bp, Pseudomonas aeruginosa
  CDS (1)..(582): transl_table=11
atggctttcgaattgccgccgctgccttacgaaaagaacgcccttgagccgcacatttccgcagaaaccctggaataccaccacgacaagcaccacaacacctacgtggtgaacctgaacaacctgatcccgggtaccgagttcgaaggcaagagcctcgaagagatcgtcaagagctcctccggcggcatcttcaacaacgccgcccaggtgtggaaccacaccttctactggaactgcctgagcccgaacggcggtggccagcccaccggcgccctggccgacgccatcaacgccgccttcggctccttcgacaagttcaaggaagagttcaccaagacttccgtcggcaccttcggttccggctggggctggctggtgaagaaggccgacggctccctggccctggccagcaccatcggtgccggcaacccgctgaccagcggcgacaccccgctgctgacctgcgacgtctgggaacacgcctactacatcgactaccgcaacctgcgtccgaagtacgtcgaggcgttctggaacctggtcaactgggacttcgtagcgaagaatttcgctgcctga

SEQ ID NO: 106342 - protein, 193 aa, Pseudomonas aeruginosa
MAFELPPLPYEKNALEPHISAETLEYHHDKHHNTYVVNLNNLIPGTEFEGKSLEEIVKSSSGGIFNNAAQVWNHTFYWNCLSPNGGGQPTGALADAINAAFGSFDKFKEEFTKTSVGTFGSGWGWLVKKADGSLALASTIGAGNPLTSGDTPLLTCDVWEHAYYIDYRNLRPKYVEAFWNLVNWDFVAKNFAA

SEQ ID NO: 106343 - DNA, 597 bp, Pseudomonas putida
  CDS (1)..(597): transl_table=11
atggcttttgaattgccgccgctgccgtacgcccatgatgccctgcagccgcacatctccaaggaaaccctggagtatcaccacgacaagcaccacaacacctatgtcgtgaacctgaacaacctggtcccaggcaccgaattcgaaggcaagaccctggaagagatcgtcaagagctcttcgggcggcatcttcaacaacgccgctcaagtctggaaccacaccttctactggaactgcctgtcgccaaacggcggcggccagcctaccggtgcactggctgacgccatcaacgccgctttcggttccttcgacaagttcaaggaagagttcaccaagacttcggtgggcaccttcggttccggctggggctggctggtgaagaaagctgacggttccctggccctggccagcaccatcggcgccggctgcccactgaccagcggcgacaccccgctgctgacctgcgacgtctgggaacacgcctactacatcgactaccgcaacctgcgtccgaagtacgtcgaggcgttctggaacctggtcaactgggccttcgttgccgagcagttcgaaggcaagaccttcaaggcctga

SEQ ID NO: 106344 - protein, 198 aa, Pseudomonas putida
MAFELPPLPYAHDALQPHISKETLEYHHDKHHNTYVVNLNNLVPGTEFEGKTLEEIVKSSSGGIFNNAAQVWNHTFYWNCLSPNGGGQPTGALADAINAAFGSFDKFKEEFTKTSVGTFGSGWGWLVKKADGSLALASTIGAGCPLTSGDTPLLTCDVWEHAYYIDYRNLRPKYVEAFWNLVNWAFVAEQFEGKTFKA

SEQ ID NO: 106345 - DNA, 597 bp, Pseudomonas putida
  CDS (1)..(597): transl_table=11
atggcttttgaattgccgccgctgccgtacgcccacgatgccctgcagccgcacatctccaaggaaaccctggagtttcaccacgacaagcaccacaacacctatgtcgtgaacctgaacaacctggtcccaggcaccgaattcgaaggcaagaccctggaagagatcgtcaagacctcttcgggcggcatcttcaacaacgccgctcaggtctggaaccacaccttctactggaactgcctggcgccaaacgccggtggtcaaccgaccggtgccctggctgacgccatcaacgccgctttcgggtccttcgacaagttcaaggaagagttcaccaagacttcggttggtaccttcggttccggctggggctggctggtgaagaaagctgacggttccctggccctggccagcaccatcggcgccggttgcccgctgaccagcggcgacaccccgctgctgacctgcgacgtctgggaacacgcctactacatcgactaccgcaacctgcgtccgaagtacgtcgaggcgttctggaacctggtcaactgggccttcgttgccgaacagttcgaaggcaagaccttcaaggcctga

SEQ ID NO: 106346 - protein, 198 aa, Pseudomonas putida
MAFELPPLPYAHDALQPHISKETLEFHHDKHHNTYVVNLNNLVPGTEFEGKTLEEIVKTSSGGIFNNAAQVWNHTFYWNCLAPNAGGQPTGALADAINAAFGSFDKFKEEFTKTSVGTFGSGWGWLVKKADGSLALASTIGAGCPLTSGDTPLLTCDVWEHAYYIDYRNLRPKYVEAFWNLVNWAFVAEQFEGKTFKA

SEQ ID NO: 106347 - DNA, 636 bp, Pyrobaculum aerophilum
  CDS (1)..(636): transl_table=11
atggtaaccacaaaaagatacacactacccccgctcccgtatgcctacaacgccctggagccgtacatatcggctgagataatgcaactacaccaccaaaaacaccaccagggatatgtcaacggggccaacgcggctttggagaagcttgagaaattcagaaaaggcgaggcgcaaattgacatccgagccgtgctgagggatctgtccttccacctcaacggccacatactacactccatcttctggccgaacatggcgccgccaggcaaaggcggcggaaagccgggcgggaaaatagctgatttgataaataagttcttcggctccttcgagaagttcaaagaggagttctcgcaggcggctaaaaacgtggagggagtcggctgggccatactagtatacgagcccctcgaagagcaactactcatactacaaattgaaaaacacaacttaatgcacgccgccgacgcccaagtgttgctggcgctggacgtgtgggaacacgcctactacttgcaatacaaaaacgaccgcggctcttacgtagacaactggtggaacgtggtcaactgggacgacgtagagaggagactgcaaaaagccctaaacggccaaattgcgctaaaattataa

SEQ ID NO: 106348 - protein, 211 aa, Pyrobaculum aerophilum
MVTTKRYTLPPLPYAYNALEPYISAEIMQLHHQKHHQGYVNGANAALEKLEKFRKGEAQIDIRAVLRDLSFHLNGHILHSIFWPNMAPPGKGGGKPGGKIADLINKFFGSFEKFKEEFSQAAKNVEGVGWAILVYEPLEEQLLILQIEKHNLMHAADAQVLLALDVWEHAYYLQYKNDRGSYVDNWWNVVNWDDVERRLQKALNGQIALKL

SEQ ID NO: 106349 - DNA, 603 bp, Rhizobium meliloti
  CDS (1)..(603): transl_table=11
atggctttcgaattgccgaaccttccctatgactacgatgcgcttgcgccctacatgtcgcgcgaaacgctcgaataccatcacgacaagcaccacctcgcttacgtgacgaacggcaacaagctcgccgaggaagccggtctttccgatctttcgctggaagatatcgtcaagaagtcctacggcaccaatcagccgttgttcaacaatgccggccagcactacaaccacgttcacttctggaagtggatgaagaagggcggcggcggcaccagcctgcccggcaagctcgacgcggcgatcaaatcggacctcggcggctacgacaagttccgcgccgatttcagtgctgccggcgcaggtcagttcggctcgggctgggcctggctttccgtgaagaacggcaagctggaaatctccaagaccccgaacggcgagaacccgctcgtccacggcgcaaccccgatcctcggcgtcgatgtgtgggagcattcctattacatcgactatcgcaacgcgcgtccgaaatacctggaagccttcgtcgacaatctcatcaactgggattacgtcctcgagctgtacgaagcggctgcaaagtaa

SEQ ID NO: 106350 - protein, 200 aa, Rhizobium meliloti
MAFELPNLPYDYDALAPYMSRETLEYHHDKHHLAYVTNGNKLAEEAGLSDLSLEDIVKKSYGTNQPLFNNAGQHYNHVHFWKWMKKGGGGTSLPGKLDAAIKSDLGGYDKFRADFSAAGAGQFGSGWAWLSVKNGKLEISKTPNGENPLVHGATPILGVDVWEHSYYIDYRNARPKYLEAFVDNLINWDYVLELYEAAAK

SEQ ID NO: 106351 - DNA, 669 bp, Rickettsia felis
  CDS (40)..(669): transl_table=11
atgacgataaacaccaaaaccaacctaggagaaaataacatgacctattgcaacaaatctaatcaaacctcatatccttttatcttacctgatttaccttatgacaaagagagttttaaaccacattttactcccgagacttttgattatcatcatggtaaacatcataatgcttatgtacaaaatctaaacaatttactcaaagataaagaagaattacaaaaaaaagatttagaagaaataatagaatggtcatctcaaaactcaaatgcagctatttttaataacgcagcccaaatatggaatcatagttttttttggcattcaataaaaccgcagggcggaggtaagccaagcggtaaaatattagaacaaattaataaagatttcggtagttttgaaggattttgtgaacagtttaagcaagaggccgtaggacagttcggtagcggctgggcatggcttgtatatcacgataataggctacaaattataaaaaccgctaatgccggtacacctatagcaaacggtatgaagccgcttcttgcatgcgatgtttgggagcatgcctattatattgattatcgtaacaaacgacctgattatgttgacatatttattaagcatatgattaactggaagtttgtagaagataacttaataaaataa

SEQ ID NO: 106352 - protein, 209 aa, Rickettsia felis
MTYCNKSNQTSYPFILPDLPYDKESFKPHFTPETFDYHHGKHHNAYVQNLNNLLKDKEELQKKDLEEIIEWSSQNSNAAIFNNAAQIWNHSFFWHSIKPQGGGKPSGKILEQINKDFGSFEGFCEQFKQEAVGQFGSGWAWLVYHDNRLQIIKTANAGTPIANGMKPLLACDVWEHAYYIDYRNKRPDYVDIFIKHMINWKFVEDNLIK

SEQ ID NO: 106353 - DNA, 630 bp, Rickettsia prowazekii
  CDS (1)..(630): transl_table=11
atgacatattgtagcaaagctaatcaaccctcatatccttttatcttacctgatttaccttatgataaggagagttttaaaccgcattttactcgtgaaacttttgattatcatcatggtaaacatcataactcttatgtacaaaatctcaataacttaatcaaagatagagaagaattgcaaaaaaaagatttagaagaaataatagagtggtcttctcaaaatgcggaggttgctattttaaataatgcctctcaaatatggaatcatacatttttttggtattcaataaagccacatggtggaggaaaaccaagtggtaaagtatttgaacaaattagtaaagatttcggtagtttcgaacagttttgtgcacagtttaaacaagaagcagtagggcagtttggtagcggatggacatgggttgtatatcacgataataagttacaaattataaaaacatctaatgcaggtacacctatagtaaactttatgaagccgattctagcatgcgatgtatgggaacatgcttattatattgattatcgtaataaacgatctgattatattgacatatttattaggcatatgattaactggaaatttgtagaagataacttaatacagtaa

SEQ ID NO: 106354 - protein, 209 aa, Rickettsia prowazekii
MTYCSKANQPSYPFILPDLPYDKESFKPHFTRETFDYHHGKHHNSYVQNLNNLIKDREELQKKDLEEIIEWSSQNAEVAILNNASQIWNHTFFWYSIKPHGGGKPSGKVFEQISKDFGSFEQFCAQFKQEAVGQFGSGWTWVVYHDNKLQIIKTSNAGTPIVNFMKPILACDVWEHAYYIDYRNKRSDYIDIFIRHMINWKFVEDNLIQ

SEQ ID NO: 106355 - DNA, 582 bp, Salmonella typhi
  CDS (1)..(582): transl_table=11
atgtcgttcgaattacctgcattaccgtatgccaaagatgctctggcgccgcatatttctgctgagacgctggaatatcactatggcaaacatcatcagacttacgtgaccaatcttaacaatttgatcaaaggcacggcgtttgaaggcaaatcgctggaagagatcgtgcgcacttccgaaggcggcatctttaataacgccgctcaggtgtggaaccacaccttctactggaactgcctggcgccaaacgctggcggcgaaccgaccgggaaactggctgatgctatcgcggcatcttttggcagcttcgcggaatttaaagcgcagttcaccgatgccgctatcaaaaactttggttccggatggacatggctggtaaaaagcgctgatggcaaactggctatcgtttctacctcaaatgccggtacgccgctgactacggatgcaacgccgttgctgacggttgatgtgtgggaacacgcgtattacatcgactaccgcaacgcccgtccaaactatctggagcatttctgggcgctggttaactgggaatttgttgcgaaaaatctcgccgcataa

SEQ ID NO: 106356 - protein, 193 aa, Salmonella typhi
MSFELPALPYAKDALAPHISAETLEYHYGKHHQTYVTNLNNLIKGTAFEGKSLEEIVRTSEGGIFNNAAQVWNHTFYWNCLAPNAGGEPTGKLADAIAASFGSFAEFKAQFTDAAIKNFGSGWTWLVKSADGKLAIVSTSNAGTPLTTDATPLLTVDVWEHAYYIDYRNARPNYLEHFWALVNWEFVAKNLAA

SEQ ID NO: 106357 - DNA, 747 bp, Glycine max
  CDS (1)..(747)
atggcctcattgggtgggttacaaaatgtgagcggcatcaattttcttatcaaagagggtccaaaagtcaatgcaaagttcgagctgaagccgccaccatatccactgaatggtttggagccggtgatgagccagcagacacttgagtttcactgggggaagcaccacaagacttatgtggaaaatctgaaaaaacaagttgttgggacagagcttgatgggaagtcactagaagagattattgtcacatcatacaataagggtgacattcttccagctttcaacaatgcagcacaggtatggaaccatgacttcttctgggagtgcatgaaaccaggtggaggtggaaagccatccggggagcttctagaactgattgaaagagactttggttcatttgtaaaattccttgatgagttcaaggctgctgctgcaacacaatttggttcagggtgggcttggctagcatatagagcaagaaaatttgatggggaaaatgtagcaaatcctccttcacccgatgaggacaacaagctagtggtgctcaagagtcccaatgctgtgaacccccttgtttggggaggttactacccacttcttaccattgatgtttgggagcatgcttactaccttgattttcagaaccggcgtcctgattatatatcagtgttcatggataagcttgtttcctgggatgcagtgagctctagacttgaacaagctaaggctttaattaccagtgcatga

SEQ ID NO: 106358 - protein, 248 aa, Glycine max
MASLGGLQNVSGINFLIKEGPKVNAKFELKPPPYPLNGLEPVMSQQTLEFHWGKHHKTYVENLKKQVVGTELDGKSLEEIIVTSYNKGDILPAFNNAAQVWNHDFFWECMKPGGGGKPSGELLELIERDFGSFVKFLDEFKAAAATQFGSGWAWLAYRARKFDGENVANPPSPDEDNKLVVLKSPNAVNPLVWGGYYPLLTIDVWEHAYYLDFQNRRPDYISVFMDKLVSWDAVSSRLEQAKALITSA

SEQ ID NO: 106359 - DNA, 642 bp, Streptomyces coelicolor
  CDS (1)..(642): transl_table=11
atgtccgtctacacgcttcctgaactgccgtacgactactccgcgctggctcccgtgatcagtcccgagatcatcgagctgcaccacgacaagcaccacgccgcgtacgtcaagggcgccaacgacacgctggagcagctcgccgaggcgcgggacaaggagacgtggggctcgatcaacggcctggagaagaacctggccttccacctctccggccacatcctgcactcgatctactggcacaacatgaccggtgacggcggcggcgagcccctggacaaggacggcgtgggcgagctggccgacgcgatcgccgagtccttcggctccttcgccggattccgggcgcagctcaccaaggccgccgcgaccacccagggctcgggctggggcgtgctggcctacgagccgctgagcggccggctgatcgtcgagcagatctacgaccaccagggcaacgtcggccagggctccaccccgatcctggtcttcgacgcctgggagcacgccttctacctgcagtacaagaaccagaaggtcgacttcatcgacgccatgtgggccgtcgtcaactggcaggacgtggccaggcgctacgaggccgccaagtcccgcaccaacacgctgctgctggccccctga

SEQ ID NO: 106360 - protein, 213 aa, Streptomyces coelicolor
MSVYTLPELPYDYSALAPVISPEIIELHHDKHHAAYVKGANDTLEQLAEARDKETWGSINGLEKNLAFHLSGHILHSIYWHNMTGDGGGEPLDKDGVGELADAIAESFGSFAGFRAQLTKAAATTQGSGWGVLAYEPLSGRLIVEQIYDHQGNVGQGSTPILVFDAWEHAFYLQYKNQKVDFIDAMWAVVNWQDVARRYEAAKSRTNTLLLAP

SEQ ID NO: 106361 - DNA, 606 bp, Synechococcus sp
  CDS (1)..(606): transl_table=11
atgtcctacgaattgccagcattgccctttgactacacggcactggcgccttacatcaccaaggaaacgctggagttccaccacgataagcaccacgcggcctacgtcaataactacaacaacgccgtcaaagacaccgacctcgatggccagccgatcgaagccgtgatcaaagcgatcgcgggtgacgctagcaaagccggtctgttcaacaatgcggctcaagcttggaaccacagcttttactggaactcgatcaagcccaatggcggtggcgctcccaccggcgcgttggccgacaaaatcgccgctgacttcggcagtttcgagaacttcgtgaccgagttcaaacaagccgcagcaacccagttcggcagcggctgggcttggttggtgctggacaatggcaccctcaaaatcaccaaaaccggcaacgccgacaccccgattgcccatggtcaaaccccgctactgaccatcgatgtctgggaacacgcttactacctcgactaccaaaaccgtcgtcccgactacatcagcaccttcgttgagaagctggcgaactgggacttcgcctctgccaactacgcagctgcgatcgcttag

SEQ ID NO: 106362 - protein, 201 aa, Synechococcus sp
MSYELPALPFDYTALAPYITKETLEFHHDKHHAAYVNNYNNAVKDTDLDGQPIEAVIKAIAGDASKAGLFNNAAQAWNHSFYWNSIKPNGGGAPTGALADKIAADFGSFENFVTEFKQAAATQFGSGWAWLVLDNGTLKITKTGNADTPIAHGQTPLLTIDVWEHAYYLDYQNRRPDYISTFVEKLANWDFASANYAAAIA

SEQ ID NO: 106363 - DNA, 600 bp, Synechocystis sp
  CDS (1)..(600): transl_table=11
atggcttacgcactacctaacttaccttacgactacaccgctctggaaccctgcatttccaaaagcaccctggagttccatcacgacaaacaccatgccgcctacgttaacaatttcaacaatgcagtggcgggtactgatttagataatcaatccattgaagacgtaattaaagccgttgctggcgatgctagcaaagccggtattttcaacaacgccgcccaagcttggaaccatagtttctactggaattgcatgaagcccggtggtggtggccagccctctggtgccttggcggacaaaatcaacgctgactttggtagctttgacgctttcgtggaagctttcaaacaagctggagccacccaattcggtagcggctgggcttggttggtgttagacaatggcactttgaaagtgaccaaaaccggcaacgccgaaaaccccatgaccgccggtcaaactcctttgctgaccatggacgtatgggagcatgcttactatttagactatcaaaaccgtcgtcccgattacattgccgatttcctcggtaagttggtcaactgggactttgtggcggctaacttagcagcggcctag

SEQ ID NO: 106364 - protein, 199 aa, Synechocystis sp
MAYALPNLPYDYTALEPCISKSTLEFHHDKHHAAYVNNFNNAVAGTDLDNQSIEDVIKAVAGDASKAGIFNNAAQAWNHSFYWNCMKPGGGGQPSGALADKINADFGSFDAFVEAFKQAGATQFGSGWAWLVLDNGTLKVTKTGNAENPMTAGQTPLLTMDVWEHAYYLDYQNRRPDYIADFLGKLVNWDFVAANLAAA

SEQ ID NO: 106365 - DNA, 612 bp, Bacillus anthracis
  CDS (1)..(612): transl_table=11
atggcaaaacacgaattaccaaatttaccttatgcgtatgatgctttagagcctcactttgacaaagaaacaatgaacatccatcatacaaaacaccataacacgtacatcacaaacttaaacgctgctttagaaggtcatgcagaattagctgacaaaagcgtagaagaattagttgcaaacttaaacgaagtaccagaagcaatccgtacagcagtacgtaacaatggtggcggacatgctaaccacacattcttctggacaatcttatctccaaacggcggcggacaaccagtaggtgaacttgcaactgcaattgaagcgaaattcggtagcttcgatgcgttcaaagaagaattcgcaaaagctggcgcaactcgcttcggttctggttgggcttggttagtagtaaataatggtgagttagaagtaacaagcacgccaaaccaagattctcctctaactgaaggtaaaactccagttatcggtttagatgtttgggaacatgcttactacttaaattaccaaaaccgtcgtccagattacatcggtgcattctggaatgttgtagattggaacgctgctgaaaaacgttaccaagaagcaaaataa

SEQ ID NO: 106366 - protein, 203 aa, Bacillus anthracis
MAKHELPNLPYAYDALEPHFDKETMNIHHTKHHNTYITNLNAALEGHAELADKSVEELVANLNEVPEAIRTAVRNNGGGHANHTFFWTILSPNGGGQPVGELATAIEAKFGSFDAFKEEFAKAGATRFGSGWAWLVVNNGELEVTSTPNQDSPLTEGKTPVIGLDVWEHAYYLNYQNRRPDYIGAFWNVVDWNAAEKRYQEAK

SEQ ID NO: 106367 - DNA, 657 bp, Bacillus cereus
  CDS (1)..(657): transl_table=11
atgtcacttaagtggcaatacataaactgggaggaatataacaatggcaaaacacgaatttaccaaatttacccttatgcgtatgatgctttagagcctcactttgacaaagaaacaatgaacatccatcatacaaaacatcacaacacgtacattacaaacttaaacgctgctttagaaggtcatgcagaattagctgacaaaagcgtagaagaattagttgcaaacttaaacgaagtaccagaagcaatccgtacagcagtacgtaacaatggtggcggacatgctaaccatacattcttctggacaatcctatctccaaacggcggaggacaacctgtaggtgaacttgcaactgcaattgaagcaaaattcggtagcttcgatgcattcaaagaagaattcgcaaaagctggcgcaactcgctttggttctggttgggcttggttagtagtaaacaatggtgagttagaagtaacaagcactccaaaccaagattctcctttaactgaaggtaaaactccagttatcggtttagatgtttgggagcatgcttactacttaaactaccaaaaccgtcgtccagactacatcggcgcattctggaacgttgtagattggaacgctgctgaaaaacgttaccaagaagcaaaataa

SEQ ID NO: 106368 - protein, 218 aa, Bacillus cereus
MSLKWQYINWEEYNNGKTRIYQIYPYAYDALEPHFDKETMNIHHTKHHNTYITNLNAALEGHAELADKSVEELVANLNEVPEAIRTAVRNNGGGHANHTFFWTILSPNGGGQPVGELATAIEAKFGSFDAFKEEFAKAGATRFGSGWAWLVVNNGELEVTSTPNQDSPLTEGKTPVIGLDVWEHAYYLNYQNRRPDYIGAFWNVVDWNAAEKRYQEAK

SEQ ID NO: 106369 - DNA, 708 bp, Zea mays
  CDS (1)..(708)
atggctctccgcaccctggcatcgaagaaggtcctatccttcccgttcggcggcgcgggccggccgttggcggcggcggcgtctgcgaggggggtgacgacggtcacactccccgacctctcctacgacttcggcgcgctggaaccggccatctcgggggagatcatgcgcttgcaccaccaaaagcaccacgccacctacgtcgccaactacaacaaggcgctggagcagcttgaaactgccgtctccaagggcgacgcctccgctgtcgtccagctgcaggcggcgatcaagttcaacggcggcggtcatgtgaaccattcaatcttctggaagaacctcaagcccattagcgaaggtggcggggagccgcctcatgggaaacttggctgggccatcgatgaggattttggttcgtttgaggcacttgtaaagaagatgaatgcagaaggcgctgctttacaagggtctggatgggtgtggttagctttggataaagaggcaaaaaaggtttcagttgaaacaacagctaatcaggatcctctggtgactaaaggtgcaagcttggttccgctgttggggattgatgtctgggaacatgcatactacctgcagtacaagaatgttaggccggattacctgaacaacatctggaaggtgatgaactggaaatatgctggagaggtgtacgaaaatgttcttgcttga

SEQ ID NO: 106370 - protein, 235 aa, Zea mays
MALRTLASKKVLSFPFGGAGRPLAAAASARGVTTVTLPDLSYDFGALEPAISGEIMRLHHQKHHATYVANYNKALEQLETAVSKGDASAVVQLQAAIKFNGGGHVNHSIFWKNLKPISEGGGEPPHGKLGWAIDEDFGSFEALVKKMNAEGAALQGSGWVWLALDKEAKKVSVETTANQDPLVTKGASLVPLLGIDVWEHAYYLQYKNVRPDYLNNIWKVMNWKYAGEVYENVLA

SEQ ID NO: 106371 - DNA, 747 bp, Plectonema boryanum
  CDS (1)..(747): transl_table=11
atgcaaacaactttcagacgtatcctcattcttttcgtcggtttgctagttccattattttttgcctgtcagtctaatagccaagtcgatgcggctccctcagcagcaccacagttgagtgcttcccccgcaaagcttgatccattgccttacgattatgctgccctagagccttacattgatgctcaaacgatgcgacttcaccacgataagcatcatgcaacttatgtgaataacattaatgagactctaaaggcttatccagaccttcagaagcagagcgttgatagtttaattcagaatctcaaccaggttccggaggcaattcggacgaagattcgcaacaacggcggcggacatgtcaatcacacgatgttctggcagattatggctccaaaagctggaggcacgccgactggagctgtcgcaaaagcaattgatcagaccttcggcagttttgatgcatttaagcagcagtttaataaagctggagccgatcgctttggcagtggatgggcgtggctcgtcagcgatcgccaaggaaaactcagcatcacttcaaccgcaaatcaagataatcccctgatgagcaatcccaatgcctatccgattttaggcaatgatgtttgggaacacgcttactacctgaagtatcagaatcgtcgagcagaatatctgacaaattggtggaatgtcgtgaactggcaagcagtcaatcaacgctacgcgcaagcgcagagaaagtaa

SEQ ID NO: 106372 - protein, 248 aa, Plectonema boryanum
MQTTFRRILILFVGLLVPLFFACQSNSQVDAAPSAAPQLSASPAKLDPLPYDYAALEPYIDAQTMRLHHDKHHATYVNNINETLKAYPDLQKQSVDSLIQNLNQVPEAIRTKIRNNGGGHVNHTMFWQIMAPKAGGTPTGAVAKAIDQTFGSFDAFKQQFNKAGADRFGSGWAWLVSDRQGKLSITSTANQDNPLMSNPNAYPILGNDVWEHAYYLKYQNRRAEYLTNWWNVVNWQAVNQRYAQAQRK

SEQ ID NO: 106373 - DNA, 627 bp, Bacillus anthracis
  CDS (1)..(627): transl_table=11
atgtcttcatttcaattgccaaaactttcatatgactatgatgaactagagccatatatcgatagcaatacactttctattcatcatggaaagcaccatgcgacatatgtaaataatttgaatgccgcattagaaaactattcggaattacataataaatctttagaagagttactatgtaatttagaaactttaccaaaggaaattgttacagctgtcagaaataacggtggtggacattattgtcatagtcttttttgggaagtaatgagcccacggggtggcggtgagcctaatggagacgttgcaaaagtaattgattattatttcaatacctttgacaacttaaaagatcaactgtctaaagcagctattagccgttttggaagtggttatgggtggcttgttcttgacggtgaagaactttctgttatgagtacaccgaatcaagatacacctttgcaagaaggcaaaattccattactcgtcattgatgtatgggaacatgcctattatttaaaatatcaaaatcggcgcccagaatttgttaccaactggtggcatacagtgaactgggaccgggtaaatgaaaagtatttacaagcaattcaatcacaaaaacattag

SEQ ID NO: 106374 - protein, 208 aa, Bacillus anthracis
MSSFQLPKLSYDYDELEPYIDSNTLSIHHGKHHATYVNNLNAALENYSELHNKSLEELLCNLETLPKEIVTAVRNNGGGHYCHSLFWEVMSPRGGGEPNGDVAKVIDYYFNTFDNLKDQLSKAAISRFGSGYGWLVLDGEELSVMSTPNQDTPLQEGKIPLLVIDVWEHAYYLKYQNRRPEFVTNWWHTVNWDRVNEKYLQAIQSQKH

SEQ ID NO: 106375 - DNA, 627 bp, Bacillus cereus
  CDS (1)..(627): transl_table=11
atgtcttcatttcaattgccaaagctttcatatgactatgatgaactagagccacatattgatagcaatacactttccattcatcatggaaagcaccatgcgacatacgtaaacaatttaaatgctactttagaaaattatactgaattacataataaatctttagaagaattgctatgtaatttagatactttaccgaaggaaattgttacagctgtacgaaataacggtggtggtcactattgtcatagtcttttttgggaagtgatgagcccacgaggtggcggtgagcctaatggagacgttgcaaaagtaattgattattatttcaatacctttgacaacttaaaagatcaactttccaaagcagctattagtcgttttggaagtggctatggatggcttgttcttgacggtgaggaactctctgttatgagtacaccaaatcaagatacgcctttgcaagaagggaaaatccccttactcgtaattgatgtatgggaacatgcttattatttaaagtatcaaaataggcgcccagagtttgttaccaactggtggcatacagtaaactgggaccaagtaaacgagaagtatttacaagcaattcaatcacaaaaacattag

SEQ ID NO: 106376 - protein, 208 aa, Bacillus cereus
MSSFQLPKLSYDYDELEPHIDSNTLSIHHGKHHATYVNNLNATLENYTELHNKSLEELLCNLDTLPKEIVTAVRNNGGGHYCHSLFWEVMSPRGGGEPNGDVAKVIDYYFNTFDNLKDQLSKAAISRFGSGYGWLVLDGEELSVMSTPNQDTPLQEGKIPLLVIDVWEHAYYLKYQNRRPEFVTNWWHTVNWDQVNEKYLQAIQSQKH

SEQ ID NO: 106377 - DNA, 699 bp, Zea mays
  CDS (1)..(699)
atggctctccgcaccctggcatcgaagaacgccctatccttcgcgctcggcggcgcggcccggccgtcggcggcgtccgcgaggggggtgacgacggtcgcgctccccgacctctcctacgacttcggcgcgctggagccggtcatctcgggggagatcatgcgcctgcaccaccagaagcaccacgccacctacgtcgtcaactacaacaaggcgctggagcagctcgacgctgtcgtcgtcaagggcgacgcctccgctgtcgtccagctccagggggccatcaagttcaacggggggggtcattttaaccattcaatcttttgggagaacctcaagcctattagcgaaggtggggagccgccacatgggaaacttggctgggccatcgatgaggattttggttcatttgaggcacttgtaaagaggatgaatgcagaaggcgctgctttacaaggatctggatgggtgtggttagctttggataaagagccaaaaaagctttcagttgaaactacagctaatcaggatcctctggtgactaaaggtgcaagcttggttccgctgttggggattgatgtctgggagcatgcgtactacctgcagtacaagaatgttaggccggattacctgaacaacatctggaaggtgatgaactggaaatatgctggagaggtgtacgaaaatgttcttgcttga

SEQ ID NO: 106378 - protein, 232 aa, Zea mays
MALRTLASKNALSFALGGAARPSAASARGVTTVALPDLSYDFGALEPVISGEIMRLHHQKHHATYVVNYNKALEQLDAVVVKGDASAVVQLQGAIKFNGGGHFNHSIFWENLKPISEGGEPPHGKLGWAIDEDFGSFEALVKRMNAEGAALQGSGWVWLALDKEPKKLSVETTANQDPLVTKGASLVPLLGIDVWEHAYYLQYKNVRPDYLNNIWKVMNWKYAGEVYENVLA

SEQ ID NO: 106379 - DNA, 621 bp, Plectonema boryanum
  CDS (1)..(621): transl_table=11
atggcttttgaactgaaaccgttaccttatgcttacgatgcgttggagccttacattgatgcaacgacgatgcaactccatcacgataagcaccatgccgcttatgtgaataacttgaacgcagcgatcgagaaatacagcgacttgcaaagtatgtctgttgaggatctcgtgactcacctcgatcgagtcccggaagatgttcgtactactgttcgcaataatgcgggtgggcatgtgaaccatacgatgttctgggaaattatgggtgcaaatggtagcggcgcaccgactggagcaatttctgaagcgattaataattccttcggtagttttgatgcctttaagcagcagtttaacgacgcaggcacaaaacgttttggtagcggttgggtttggctcgtgcgatcgcagcagggcgatttgcaaattctttcaacgccaaatcaagatagcccattgatagagggtcatacgccgattatgggaaatgacgtttgggaacatgcttactatttgaagtatcagaaccgacgaccggaatatctcaatgcttggtggaatgtcttgaattgggaagagattaaccgtcgattcgatgcagcgatgagcggacattaa

SEQ ID NO: 106380 - protein, 206 aa, Plectonema boryanum
MAFELKPLPYAYDALEPYIDATTMQLHHDKHHAAYVNNLNAAIEKYSDLQSMSVEDLVTHLDRVPEDVRTTVRNNAGGHVNHTMFWEIMGANGSGAPTGAISEAINNSFGSFDAFKQQFNDAGTKRFGSGWVWLVRSQQGDLQILSTPNQDSPLIEGHTPIMGNDVWEHAYYLKYQNRRPEYLNAWWNVLNWEEINRRFDAAMSGH

SEQ ID NO: 106381 - DNA, 702 bp, Zea mays
  CDS (1)..(702)
atggctctccgcaccctggcatcgaagaacgccctatccttcgcgctcggtggagcggcccggccgtcggcggagtccgcgaggggggtgacgacggtcgcgctccccgacctctcctacgacttcggcgcgctggagccggtcatctcgggggagatcatgcgcctgcaccaccagaagaaccacgccacctacgtcgtcaactacaacaaggcgcttgagcagatcgacgatgtcgtcgtcaagggcgacgactccgctgtcgtccagctccagggcgccatcaagttcaacggcggcggtcatgtgaaccattcaatcttttggaagaacctcaagcctattagcgaaggtggtggggagccgccacatgggaaacttggctgggccatcgatgaggattttggttcatttgaggcacttgtaaagaggatgaatgcagaaggcgctgctttacaaggatctggatgggtgtggttagctttggataaagaggcaaaaaaggtttcagttgaaactacagctaatcaggatcctctggtgactaaaggtgcaagcttggttccgctgttggggattgatgtctgggaacatgcgtactacctgcagtacaagaatgttaggccggattacctgaacaacatctggaaggtgatgaactggaaatatgctggagaggtgtacgaaaatgttcttgcttga

SEQ ID NO: 106382 - protein, 233 aa, Zea mays
MALRTLASKNALSFALGGAARPSAESARGVTTVALPDLSYDFGALEPVISGEIMRLHHQKNHATYVVNYNKALEQIDDVVVKGDDSAVVQLQGAIKFNGGGHVNHSIFWKNLKPISEGGGEPPHGKLGWAIDEDFGSFEALVKRMNAEGAALQGSGWVWLALDKEAKKVSVETTANQDPLVTKGASLVPLLGIDVWEHAYYLQYKNVRPDYLNNIWKVMNWKYAGEVYENVLA

SEQ ID NO: 106383 - DNA, 702 bp, Zea mays
  CDS (1)..(702)
atggctctccgcaccctggcatcgaagaacgccctatccttcgcgctcggcggcgcggcccggccgtcggcggcgtccgcgaggggggtgacgacggtcgcgctccccgacctctcctacgacttcggcgcgctggagccggccatctcgggggagatcatgcgcctgcaccaccagaagcaccacgccacctacgtcggcaactacaacaaggcgctggagcagctcgacgctgccgtcgccaagggcgacgcctccgctgtcgtccagctccagggcgccatcaagttcaacggcggcggtcatgtgaaccattcaatcttttggaagaacctcaagcctattagcgaaggtggtggggagccgccacatgggaaacttggctgggccatcgatgaggattttggttcatttgaggcacttgtaaagaggatgaatgcagaaggcgctgctttacaaggatctggatgggtgtggttagctttggataaagagccaaaaaagctttcagttgaaactacagctaatcaggatcctctggtgactaaaggtgcaagcttggttccgctgttggggattgatgtctgggagcatgcgtactacctgcagtacaagaatgttaggccggattacctgaacaacatctggaaggtgatgaactggaaatatgctggagaggtgtacgaaaatgttcttgcttga

SEQ ID NO: 106384 - protein, 233 aa, Zea mays
MALRTLASKNALSFALGGAARPSAASARGVTTVALPDLSYDFGALEPAISGEIMRLHHQKHHATYVGNYNKALEQLDAAVAKGDASAVVQLQGAIKFNGGGHVNHSIFWKNLKPISEGGGEPPHGKLGWAIDEDFGSFEALVKRMNAEGAALQGSGWVWLALDKEPKKLSVETTANQDPLVTKGASLVPLLGIDVWEHAYYLQYKNVRPDYLNNIWKVMNWKYAGEVYENVLA

SEQ ID NO: 106385 - DNA, 687 bp, Acinetobacter sp
  CDS (1)..(687): transl_table=11
atgacacgttcacttaaaacaacactgattttacttgctagctcagtgatcagcatgtcagcactggcggagtttaaacaagcacctttaccgtatgcgacgaatgcattacaacctgcaatcgatcaacaaaccatggaaatccactatggcaaacatcataaggcttatgtagataacctaaatgcacaaattaaaacttatccagaacttgataaaaccgatttaattcaacttcaaaagcaaatctctaaatacaacacagcagtacgtaataatggtgggggccactttaaccatactttcttctgggaaagcttggcggcaaccaacaaaacaggtcagcctagtcctgccctcgtaaaacaaattactcaagattttggttctctcgatgcattcaaacaaaaatttaatgaagccgcatctggacgttttggatcgggctgggcatggttgattgttactccaaatggcaaactggctgtaacatctactccaaatcaagacaatcctttaatggatctgagtgaaaccaaaggcacacctttactggggcttgatgtttgggaacatgcctattacctgaaatatcaaaaccgtcgcgccgattacatcaaagcattttggagcgtagtaaactggaataaagttaatgagcgttacaacgaagccattaaaaaataa

SEQ ID NO: 106386 - protein, 228 aa, Acinetobacter sp
MTRSLKTTLILLASSVISMSALAEFKQAPLPYATNALQPAIDQQTMEIHYGKHHKAYVDNLNAQIKTYPELDKTDLIQLQKQISKYNTAVRNNGGGHFNHTFFWESLAATNKTGQPSPALVKQITQDFGSLDAFKQKFNEAASGRFGSGWAWLIVTPNGKLAVTSTPNQDNPLMDLSETKGTPLLGLDVWEHAYYLKYQNRRADYIKAFWSVVNWNKVNERYNEAIKK

SEQ ID NO: 106387 - DNA, 603 bp, Agaricus bisporus
  CDS (1)..(603)
atggcccacgtccttcctgatctgccctatgcgtacgatgccctcgagccctacatctctcgtcagatcatggagctccatcacaaaaagacatcatcagacttatgtgaatgcgctcaacactgcagaggctgcttacgccattcaacggcggtggtaggtggctttgacctaagcctttttttcatactcacaacgttaggtcacatcaaccactccctcttttggcagaacctcgcccctgctgcaggtgcaggcggtcagctcaagcctggtcctctcaaggacgccattgatcagacctttggcggcctcgacaacctcaagaaggaattcaacactaccactgccggcatccaaggctctggctggggctggctcggagtgaacccttccaacaagcgtcttgaaatttcgaccacgcccaaccaggaccctctcctcaacttggtccccatcatcggcgtcgatatctgggagcatgcgttttatctccaatacctcaacgtcaaggctgactatctgaacgccatctggtccgtcatcaactttgacgaggcccagcgccgctacgtcgaggccacccaaggcagcaagctctga

SEQ ID NO: 106388 - protein, 200 aa, Agaricus bisporus
MAHVLPDLPYAYDALEPYISRQIMELHHKKTSSDLCECAQHCRGCLRHSTAVVGGFDLSLFFILTTLGHINHSLFWQNLAPAAGAGGQLKPGPLKDAIDQTFGGLDNLKKEFNTTTAGIQGSGWGWLGVNPSNKRLEISTTPNQDPLLNLVPIIGVDIWEHAFYLQYLNVKADYLNAIWSVINFDEAQRRYVEATQGSKL

SEQ ID NO: 106389 - DNA, 633 bp, Aspergillus fumigatus
  CDS (1)..(633)
atgtcacagcaatacacgctcccacccctcccctacccctacgatgccctccaaccctacatctcccaacagatcatggagctgcaccacaaaaagcaccatcaaacctacgtcaatggcctgaatgccgcactcgaggcgcagaagaaagcggcggaagccaacgacgtccccaagctcgtctccgtgcagcaagcgatcaaattcaacggcggggggcacatcaaccattccctcttctggaagaatctggccccggagaaatccgggggtggcaagatcgatcaggcaccggtcctcaaagcagccatcgagcagcgttggggatccttcgataagttcaaggatgctttcaacacgaccctgctgggcattcagggcagcggatggggttggttagtgaccgacggacccaagggaaagctagacattaccacaacccacgaccaggatccggtgaccggggcggcccccgtctttggggtggatatgtgggagcatgcttactaccttcagtacttgaacgacaaagcctcgtatgccaagggcatctggaacgtgatcaactgggctgaagcggagaatcggtacatagcgggtgacaagggtggacacccattcatgaagctgtag

SEQ ID NO: 106390 - protein, 210 aa, Aspergillus fumigatus
MSQQYTLPPLPYPYDALQPYISQQIMELHHKKHHQTYVNGLNAALEAQKKAAEANDVPKLVSVQQAIKFNGGGHINHSLFWKNLAPEKSGGGKIDQAPVLKAAIEQRWGSFDKFKDAFNTTLLGIQGSGWGWLVTDGPKGKLDITTTHDQDPVTGAAPVFGVDMWEHAYYLQYLNDKASYAKGIWNVINWAEAENRYIAGDKGGHPFMKL

SEQ ID NO: 106391 - DNA, 615 bp, Bacillus caldotenax
  CDS (1)..(615): transl_table=11
atgccatttgaattgccagcattgccgtatccgtatgatgcgcttgagccgcacatcgacaaagaaacgatgaacattcaccacacgaagcaccataacacatacgttacaaatttgaatgcggcgcttgaagggcatccggatttgcaaaacaaatcgctcgaagaattgctcagcaatttggaagcccttccggaaagcattcgcacggcggtgcgcaacaacggcggcggtcatgcaaaccactcgcttttctggacgattttgtcgccaaatggcggcggtgagccgacgggtgagctggctgaggcgatcaacaaaaaattcggcagcttcaccgcgtttaaagacgagttttcgaaagcagcggccggccgtttcggttctggctgggcatggcttgtcgtgaacaacggcgagctggaaattacgagcacgccgaaccaagactcgccgatcatggaaggcaaaacgccgattctcggcttggacgtttgggagcatgcgtactacttgaaataccaaaaccgccgtccggaatacattgccgcattctggaacattgtcaactgggacgaagtggcgaaacggtacagcgaagcgaaagcgaagtaa

SEQ ID NO: 106392 - protein, 204 aa, Bacillus caldotenax
MPFELPALPYPYDALEPHIDKETMNIHHTKHHNTYVTNLNAALEGHPDLQNKSLEELLSNLEALPESIRTAVRNNGGGHANHSLFWTILSPNGGGEPTGELAEAINKKFGSFTAFKDEFSKAAAGRFGSGWAWLVVNNGELEITSTPNQDSPIMEGKTPILGLDVWEHAYYLKYQNRRPEYIAAFWNIVNWDEVAKRYSEAKAK

SEQ ID NO: 106393 - DNA, 609 bp, Bacillus halodurans
  CDS (1)..(609): transl_table=11
atggcttttgaactaccaaaactaccgtatcctgcaaatgcacttgaaccacacatcgatgaggcaacgatgaacattcaccacgggaagcaccataacacgtatgtaacaaaattaaatgcagctcttgaaggtcacagtgctcttgctgaaaagtcaattgaagcgcttgtcagcgacctcgatgctgtaccagaaaacattcgtacagcagtccgcaataatggtggtggccatgcaaaccacacgcttttttggcaaattcttagcccgaatggtggaggcgctcctactggtgagcttgcagatgcgatcaatgctgaattcggtagctttgatcaattcaaagaaaaatttgcagacgcagcagcaaaccgcttcggttctggctgggcgtggcttgttgtcaatgatggcaaactagaaatcacaagcactccaaaccaagatacgccattaatggaagggaaaacaccaattcttggcttagacgtatgggagcatgcatactacttgaattaccaaaaccgtcgtcctgattacatttcagctttctggaacgttgtcaattgggacgaagtagcgaagcgttacaacgaagcaaaataa

SEQ ID NO: 106394 - protein, 202 aa, Bacillus halodurans
MAFELPKLPYPANALEPHIDEATMNIHHGKHHNTYVTKLNAALEGHSALAEKSIEALVSDLDAVPENIRTAVRNNGGGHANHTLFWQILSPNGGGAPTGELADAINAEFGSFDQFKEKFADAAANRFGSGWAWLVVNDGKLEITSTPNQDTPLMEGKTPILGLDVWEHAYYLNYQNRRPDYISAFWNVVNWDEVAKRYNEAK

SEQ ID NO: 106395 - DNA, 615 bp, Bacillus stearothermophilus
  CDS (1)..(615): transl_table=11
atgccatttgaattgccagcattgccgtatccgtatgatgctctggagccgcacatcgacaaagaaacgatgaacattcaccacacgaagcaccataacacatacgttacaaatttgaatgcggcgcttgaaggacatccggatttgcaaaacaaatcgctcgaagaactgctcagcaatttggaagcccttccggaaagcatccgcacggcggtgcgcaacaacggcggcggccatgcgaaccactcgcttttctggacgattttgtcgccaaatggcggcggcgagccgacgggtgagctggctgacgccatcaacaaaaaattcggcagcttcaccgcgttcaaagacgagttttcgaaagcagcggccggccgtttcggttccggttgggcatggcttgttgtgaacaacggcgagctggaaatcacaagcacgccgaaccaagattcgccgattatggaaggcaaaacgccgattctcggcttggacgtttgggagcatgcgtactacttgaaataccaaaaccgccgtccggaatacattgccgcattctggaacgtcgtcaactgggacgaagtggcgaaacggtacagcgaagcgaaagcaaaataa

SEQ ID NO: 106396 - protein, 204 aa, Bacillus stearothermophilus
MPFELPALPYPYDALEPHIDKETMNIHHTKHHNTYVTNLNAALEGHPDLQNKSLEELLSNLEALPESIRTAVRNNGGGHANHSLFWTILSPNGGGEPTGELADAINKKFGSFTAFKDEFSKAAAGRFGSGWAWLVVNNGELEITSTPNQDSPIMEGKTPILGLDVWEHAYYLKYQNRRPEYIAAFWNVVNWDEVAKRYSEAKAK

SEQ ID NO: 106397 - DNA, 609 bp, Bacillus subtilis
  CDS (1)..(609): transl_table=11
atggcttacgaacttccagaattaccttatgcgtacgatgctttagaaccgcatatcgacaaggaaactatgactattcaccatacgaaacaccacaacacatacgtgacaaatttaaacaaagcggttgaaggaaacactgctcttgccaacaaatcagttgaagagcttgttgcagatcttgattctgttcctgaaaacatccgcactgcagtccgcaacaacggcggcggacacgcgaaccacaaattattctggacacttttatctccaaacggcggaggcgaaccgactggcgcgcttgctgaagagattaacagtgtatttggaagctttgacaaattcaaagagcaattcgcagcagcagcagctggacgcttcggttctggctgggcatggcttgttgtgaacaacggtaaacttgaaatcacaagcacgccaaaccaagattctccgctttcagaaggcaaaacgcctatcttaggtcttgacgtttgggagcatgcttactaccttaactatcaaaaccgccgtcctgattacatttcagctttctggaatgttgtaaactgggacgaagtggctcgtctatacagcgaacgaaaataa

SEQ ID NO: 106398 - protein, 202 aa, Bacillus subtilis
MAYELPELPYAYDALEPHIDKETMTIHHTKHHNTYVTNLNKAVEGNTALANKSVEELVADLDSVPENIRTAVRNNGGGHANHKLFWTLLSPNGGGEPTGALAEEINSVFGSFDKFKEQFAAAAAGRFGSGWAWLVVNNGKLEITSTPNQDSPLSEGKTPILGLDVWEHAYYLNYQNRRPDYISAFWNVVNWDEVARLYSERK

SEQ ID NO: 106399 - DNA, 612 bp, Borrelia burgdorferi
  CDS (1)..(612): transl_table=11
atgtttaagctgccagaacttggttatgattatgatgctgttgagccttatattgatgctaaaactatggaaattcatcatagcaagcatcataatggttttgtaatgaatttgaattctattttggaaaaaatggggaaaattcatttaacagatgtgtcaaacatattaaaaaatattcatgattttccagaagaatttcaaactttaataagaaataatgctggtggttattctaaccatactttatattttagaactttaaggccaggaaacaaggacaatctttttgaaaagtttaaagatgatattaatgcagcttttggaagcctagacgttcttaaggccaatttgaaagatactgcaatgaaaatttttggaagtggttgggcatggttagtattgtgtcctgagagtggccttaaagtgatttcaatgcctaatcaggatagtcctttgatgaattcttataagccgattttaggtattgatgtttgggagcatgcctattaccttaaatatcaaaatagaagaattgaatatgttgatgcatttttaaaggctttaaattgggaagaagtttcaaaagtttacaatgaagtgattaattag

SEQ ID NO: 106400 - protein, 203 aa, Borrelia burgdorferi
MFKLPELGYDYDAVEPYIDAKTMEIHHSKHHNGFVMNLNSILEKMGKIHLTDVSNILKNIHDFPEEFQTLIRNNAGGYSNHTLYFRTLRPGNKDNLFEKFKDDINAAFGSLDVLKANLKDTAMKIFGSGWAWLVLCPESGLKVISMPNQDSPLMNSYKPILGIDVWEHAYYLKYQNRRIEYVDAFLKALNWEEVSKVYNEVIN

SEQ ID NO: 106401 - DNA, 636 bp, Bordetella pertussis
  CDS (1)..(636): transl_table=11
atgccatacgtcctgcctgccctttcgtatgcctacgatgcgctcgagccgcatatcgatgcacgcacgatggaaatacaccatacgcgccatcaccagacctacgtcaacggcctgaacgccgcgctcgaaggcgccggcctggacagcgaggagccggtcgagcaactgttgcgccgcatcccggcgctgccgccgggcatccacggcgcggtgcgcaaccacggcggcggccatgccaaccacagcctgttgtggaccgtcatgtcgccgtcgggcggcggccgcccggatggacggctggcggccgacatccaggcccagctgggcgggcacgacgccttccaggcggccttcacgcaggccgcgctgggccgattcggcagcggctgggcctggctgaccgtcacgcctgccggccgcctgcgggtcgacagcagcgccaaccaggattcgccgctcatggagggcaacaccccgatactcggcctggatgtctgggagcacgcgtattacctccagtaccagaaccgccgccccgaatacatcgaggccttctaccgggtggtggactgggccgaagtggcgcgccgctacgagatcgccctggccgagctcggccgggaggccgcatga

SEQ ID NO: 106402 - protein, 211 aa, Bordetella pertussis
MPYVLPALSYAYDALEPHIDARTMEIHHTRHHQTYVNGLNAALEGAGLDSEEPVEQLLRRIPALPPGIHGAVRNHGGGHANHSLLWTVMSPSGGGRPDGRLAADIQAQLGGHDAFQAAFTQAALGRFGSGWAWLTVTPAGRLRVDSSANQDSPLMEGNTPILGLDVWEHAYYLQYQNRRPEYIEAFYRVVDWAEVARRYEIALAELGREAA

SEQ ID NO: 106403 - DNA, 612 bp, Buchnera aphidicola subsp
  CDS (1)..(612): transl_table=11
atgagttatgttcttccttctttaccttattcatacaatgcgttagaaccattttttgatgaagaaactatgaaaattcatcatactaaacatcatcaaaattatatcaataatactaattctattttagaaaatacaactttttcttcattgcctatagaagaattaatatctattttaaatgaaattattttagaaaagaaaaatgcattacgtaataatgcaggaggtcatataaatcatagttttttttggaaaagtttaaaatcaggaacagttttaacaaatgatctaaaaatagaaatagaaaaacaatttggtactattgatgaatttaaagaaaaatttgaatcagtagcactaaatcattttggatcaggctgggtctggttagtaaatcaaaatggtgtattatctatagtttctactgtcaatcaagatagtccgttgatgggaaaattgatatctaatacttatggatatccaattattgggttagatatttgggaacatgcttattatttaaaatatcaaaatagacgtttagattacattaaatctttttggaatgttgttaattgggaagaagcatctaatcgtctgcaaaaatag

SEQ ID NO: 106404 - protein, 203 aa, Buchnera aphidicola subsp
MSYVLPSLPYSYNALEPFFDEETMKIHHTKHHQNYINNTNSILENTTFSSLPIEELISILNEIILEKKNALRNNAGGHINHSFFWKSLKSGTVLTNDLKIEIEKQFGTIDEFKEKFESVALNHFGSGWVWLVNQNGVLSIVSTVNQDSPLMGKLISNTYGYPIIGLDIWEHAYYLKYQNRRLDYIKSFWNVVNWEEASNRLQK

SEQ ID NO: 106405 - DNA, 612 bp, Buchnera aphidicola subsp
  CDS (1)..(612): transl_table=11
atgtcttattccctacctgatctatcttatgcatataatgctttagaacctttttttgatgaagaaacaatgagaattcatcatacgaaacatcatcaaaattatattaataatactaattctattttagaaagaacaaatttttcttcactttcaattgaagagttaatgtctatttttaatgaaataagtttagaaaataaaaatgtattacgtaataatgcaggaggacatataaatcatagtttattttggaaaggtttaaaaattggaacaatattgcaaggtgatttaaaatcagaaattaacaaacaatttggaagtgttgaatatttcaagagtaaatttgaagatattgcgttaaaccactttggttcaggttggatttggttagtaaatcaaaatggtatactatctatagtatctacaataaatcaagataatccattaatgggtaaatcaatatctggtactcatggtaatcctattttcggattagatctttgggaacatgcttattatttaaaatatcaaaatagacgattagattatattaaatctttttggaatgtagtaaattgggatgaagcatctcgtcgtttgtccaaatag

SEQ ID NO: 106406 - protein, 203 aa, Buchnera aphidicola subsp
MSYSLPDLSYAYNALEPFFDEETMRIHHTKHHQNYINNTNSILERTNFSSLSIEELMSIFNEISLENKNVLRNNAGGHINHSLFWKGLKIGTILQGDLKSEINKQFGSVEYFKSKFEDIALNHFGSGWIWLVNQNGILSIVSTINQDNPLMGKSISGTHGNPIFGLDLWEHAYYLKYQNRRLDYIKSFWNVVNWDEASRRLSK

SEQ ID NO: 106407 - DNA, 627 bp, Buchnera aphidicola subsp
  CDS (1)..(627): transl_table=11
atgacttatgtattaccatctttaccatattcatataatagtttagagccattttttgatgagaaaacaatgataattcatcatactaggcatcatcaagcatatataaataatactaatagtattttaaatggaactcattatgaaaatttattgattgaagagttgatttctaaattaaacatattgtctatagaaaataaattagcacttcaaaataatgcaggtggtcatattaatcatagtttattttggaaatggttaaaattaaatacaattttaaaagatgattttaaaattattcttgaaaaaaattttaaatcagtagatttttttaagaagcaatttgaaaagatagcattaagtcattttggttctggttggatttggttaattaaaaaatatgataatactttacgcattgttactacagttaatcaaaatactcctttaatgggaaaagaaatatcgggtatttcaggtattcctattttgggtttagatttatgggaacatgcatattatttaaaatataaaaataatcgttcggattatgttaatgctttttggaatgtagttaattgggatgaagttagttatcgtttttttaatatatcaaatatgtaa

SEQ ID NO: 106408 - protein, 208 aa, Buchnera aphidicola subsp
MTYVLPSLPYSYNSLEPFFDEKTMIIHHTRHHQAYINNTNSILNGTHYENLLIEELISKLNILSIENKLALQNNAGGHINHSLFWKWLKLNTILKDDFKIILEKNFKSVDFFKKQFEKIALSHFGSGWIWLIKKYDNTLRIVTTVNQNTPLMGKEISGISGIPILGLDLWEHAYYLKYKNNRSDYVNAFWNVVNWDEVSYRFFNISNM

SEQ ID NO: 106409 - DNA, 705 bp, Candida albicans
  CDS (1)..(705): transl_table=12
atgttttctatcagatcatcatctcgtgttttattaaaggcttcttccgcaaccacccgtgctactttgaacgccgctgcttccaagactttcactagatctaaatatagtttaccagaattggactatgaattctccgctactgaaccatacatttctggtcaaataaacgaaattcactacactaaacatcaccaaacttatgttaacaaccttaatgcttcaattgaacaagccgttgaagccaaatctaaaggtgaagttaaaaaattggttgccttagaaaaagccatcaatttcaacggtggtggttacctcaatcattgtttgtggtggaaaaacttggctcctgtctctcaaggtggtggtcaaccaccaagtgaagattccaaattaggtaaacaaatcgtcaaacaatttggttctttggataaattgattgaaatcaccaatggcaaattggctggtattcaaggttctggatgggcttttattgttaaaaacaaagccaatggtgatactattgatgtcatcaccactgctaaccaagatactgttactgatccaaacttggttccattgattgctattgatgcttgggaacatgcttattatttgcaataccaaaatgttaaagctgattacttcaagaacctttggcatgttatcaactggaaggaagctgaaagaagatttgaattttaa

SEQ ID NO: 106410 - protein, 234 aa, Candida albicans
MFSIRSSSRVLLKASSATTRATLNAAASKTFTRSKYSLPELDYEFSATEPYISGQINEIHYTKHHQTYVNNLNASIEQAVEAKSKGEVKKLVALEKAINFNGGGYLNHCLWWKNLAPVSQGGGQPPSEDSKLGKQIVKQFGSLDKLIEITNGKLAGIQGSGWAFIVKNKANGDTIDVITTANQDTVTDPNLVPLIAIDAWEHAYYLQYQNVKADYFKNLWHVINWKEAERRFEF

SEQ ID NO: 106411 - DNA, 687 bp, Capsicum annuum
  CDS (1)..(687)
atggctcttcgaaacctaatgaccaaaaagcccttcgccggaattctaacattccggcaacaactccgatgcgtccaaactttctctctaccggatctttcttacgattatggagccttagaacctgctattagtggtgaaatcatgcagcttcatcaccagaaacatcatcagacttacataacaaattacaataatgcccttcaacagcttcatgatgcaatcaacaagggtgattctcctactgtagctaaattgcaaggtgctatcaagttcaatggcggaggtcatattaatcactcagttttctggaagaacctagcccctactcgcgaaggtggtggtgagcctccaaagggttctcttggctctgccatagacaccaactttggctctcttgaagctgtaatacaaaagatgaatgcagagggtgctgctttacagggttctggttgggtgtggcttggtttggacaaagagctgaagcgccttgttattgaaacaaccgcaaatcaggatcctttggttattaaaggaccgaacttggttcctcttttgggcattgatgtttgggaacatgcatactacttgcagtacaaaaatgtgaaaccagattacctaaagaatatatggaaagtcattaactggaaatatgctgctgaagtttacgagaaagaatgcccttga

SEQ ID NO: 106412 - protein, 228 aa, Capsicum annuum
MALRNLMTKKPFAGILTFRQQLRCVQTFSLPDLSYDYGALEPAISGEIMQLHHQKHHQTYITNYNNALQQLHDAINKGDSPTVAKLQGAIKFNGGGHINHSVFWKNLAPTREGGGEPPKGSLGSAIDTNFGSLEAVIQKMNAEGAALQGSGWVWLGLDKELKRLVIETTANQDPLVIKGPNLVPLLGIDVWEHAYYLQYKNVKPDYLKNIWKVINWKYAAEVYEKECP

SEQ ID NO: 106413 - DNA, 624 bp, Chlamydia pneumoniae
  CDS (1)..(624): transl_table=11
atgagttttgttccttattctttaccagagttaccctatgattatgacgctttggagcctgtaatttcttctgaaattatgattttacaccaccaaaagcatcatcagatctacattaataatcttaacgcggctttgaagagattagatgctgcagaaacacaacaaaaccttaatgaactcattgctttagaacccgctctccgctttaacgggggaggacacatcaaccactctctattctgggaaactcttgctcctatcgatcaagggggaggacagcctccaaaacatgagctcctttctcttattgaaagattttggggtacgatggacaactttttaaaaaaattaatcgaagttgctgcaggagttcaaggctccggttgggcctggctaggattttgtcccgcaaaacaagaacttgtcttacaagcaacagcaaatcaggatcctctagagcctctcacagggaaactccctctgcttggcgtggatgtttgggagcacgcctattacctgcaatataaaaatgttcgtatggattatttaaaagcctttcctcaaataattaattggggacatatagaaaatagattttctgaaataatatcatctaaataa

SEQ ID NO: 106414 - protein, 207 aa, Chlamydia pneumoniae
MSFVPYSLPELPYDYDALEPVISSEIMILHHQKHHQIYINNLNAALKRLDAAETQQNLNELIALEPALRFNGGGHINHSLFWETLAPIDQGGGQPPKHELLSLIERFWGTMDNFLKKLIEVAAGVQGSGWAWLGFCPAKQELVLQATANQDPLEPLTGKLPLLGVDVWEHAYYLQYKNVRMDYLKAFPQIINWGHIENRFSEIISSK

SEQ ID NO: 106415 - DNA, 657 bp, Chlamydomonas reinhardtii
  CDS (1)..(657)
atggcccaggctctgcccccgctgccttacgactatggctcgctggagccgcatgtggatgccaccaccatgaacatccaccacaccaagcaccaccagacctacgtgaacaacctgaacgcggctctcgacaagttccccgagctcaaggaccttggcctggtggacctgaacaaggccgtgggcaccgataagctgcctaaggatgtcgccactgtcatccgcaacaacggcggtggccactacaaccacagcttcttctggaaggtgatgaccaacccctccaacaccaacggccccaacggcgacgtgaaggccgcgatcgaggcgtccttcggctccgtggacgagatgaaggccaagttcaacgccgctgctgctggccgcttcggctcgggttgggcctggctgagtgtcaagcccgacggctccctgtcgatcgactccacccccaaccaggacaacccgctgatgaccgcgctgccggacgtggcgggcggcattccgctgctgggcctggacgtgtgggagcacgcctactaccttaagtaccagaaccgccgccccgagtacatcgcggcctggtggaacgtggtcaactgggagcaggtggccgagaactacaaggccgcccaggccggcaccgtgccgctgtga

SEQ ID NO: 106416 - protein, 218 aa, Chlamydomonas reinhardtii
MAQALPPLPYDYGSLEPHVDATTMNIHHTKHHQTYVNNLNAALDKFPELKDLGLVDLNKAVGTDKLPKDVATVIRNNGGGHYNHSFFWKVMTNPSNTNGPNGDVKAAIEASFGSVDEMKAKFNAAAAGRFGSGWAWLSVKPDGSLSIDSTPNQDNPLMTALPDVAGGIPLLGLDVWEHAYYLKYQNRRPEYIAAWWNVVNWEQVAENYKAAQAGTVPL

SEQ ID NO: 106417 - DNA, 600 bp, Corynebacterium diphtheriae
  CDS (1)..(600): transl_table=11
atgacgtacgcccttcctgaactcgattacgcatacgacgctctcgagccacacatcgctgctgagatcatggagctgcaccactccaagcaccacgctaactacgtgaacggtgcaaatgctgctctggagaagctgcagaaggctcgcgagaatggtgagatcggtgctgttgttaccgctttgtccaaggatttggctttcaacttgggtggccacaccaaccactccattttctggaagaacctctcccctaacggtggcggcgagccaaccggcgctttggctgaggcaattgccaaggagttcggttcttttgagaagttcaaggatcacttctctgctgcagctcttggtctgcagggttccggctgggctgttctcggctacgatcacatcggtggccgtctggttatcgagcagctcactgaccagcagggcaacatctccgctaacctgaccccacttcttatgctcgatatgtgggagcacgctttctaccttcagtacaagaacgtgaaggctgactacgtcaaggctgtgtggaacgtcttcaactgggatgacgttgctgctcgtttcgaggctgctaccaagtaa

SEQ ID NO: 106418 - protein, 199 aa, Corynebacterium diphtheriae
MTYALPELDYAYDALEPHIAAEIMELHHSKHHANYVNGANAALEKLQKARENGEIGAVVTALSKDLAFNLGGHTNHSIFWKNLSPNGGGEPTGALAEAIAKEFGSFEKFKDHFSAAALGLQGSGWAVLGYDHIGGRLVIEQLTDQQGNISANLTPLLMLDMWEHAFYLQYKNVKADYVKAVWNVFNWDDVAARFEAATK

SEQ ID NO: 106419 - DNA, 636 bp, Debaryomyces hansenii
  CDS (1)..(636)
atgtcaaatagcccagcatttggtaagaataaaattgaattgccccaattagattgggcctatgattcattagagccttatatttctggtaagattaatgaaattcaccacaagaagcatcaccaaacttatgttaatggttataatagtgcaattgaacaattaattgaagctgagtcccaaggagacgttaaaaaagctattgtaattcaacaaaatattaaattccatggaggcggacatactaatcatgtcttattttggaaaagtttggcacctaattctcagaatggtggaaaacatccaggatcggatactaaccttggcaagaaaattattgaacagtatggttcaattgataatttgataagcattacaaacgctaagttggctagtattcagggttcaggatgggcattcatcgttaaaaacaaacagaacggtgggaacctagatgttgtgactacatacaaccaagacactgttaccgatcccctagttccattgatagcaattgatgcatgggagcatgcctattatttgcaatatcaaaatgttaaagctgattatttcaaggctatttggaatgttataaactgggaagaagctagtaaaaggttcgattctcatttataa

SEQ ID NO: 106420 - protein, 211 aa, Debaryomyces hansenii
MSNSPAFGKNKIELPQLDWAYDSLEPYISGKINEIHHKKHHQTYVNGYNSAIEQLIEAESQGDVKKAIVIQQNIKFHGGGHTNHVLFWKSLAPNSQNGGKHPGSDTNLGKKIIEQYGSIDNLISITNAKLASIQGSGWAFIVKNKQNGGNLDVVTTYNQDTVTDPLVPLIAIDAWEHAYYLQYQNVKADYFKAIWNVINWEEASKRFDSHL

SEQ ID NO: 106421 - DNA, 636 bp, Deinococcus radiodurans
  CDS (1)..(636): transl_table=11
atggcttacactcttccccaactgccctacgcttacgacgcgcttgagccccatatcgacgcccgcacgatggaaattcaccacaccaagcatcaccagacctacgtggacaacgccaacaaggcgctcgaaggcaccgaattcgccgacctgcccgtcgaacaactcattcagcagctcgaccgcgtgcccgccgacaagaagggcgccctgcgcaacaatgcgggcggccacgccaaccacagcatgttctggcagatcatgggccagggtcagggccagaacggcgccaaccagcccagcggcgaactgctggacgccatcaacagcgccttcggcagcttcgacgccttcaagcagaagttcgaagacgccgccaagacccgcttcggctcgggctgggcgtggctggtcgtcaaggacggcaagctcgatgtcgtgtccaccgccaaccaggacaacccgctgatgggcgaagccatcgcgggcgtcagcggcaccccgattctgggtgtggacgtgtgggaacacgcctactacctcaactaccagaaccgccgccccgactacctcgccgccttctggaacgtggtgaactgggacgaagtctcgaagcgctacgccgccgcgaagtaa

SEQ ID NO: 106422 - protein, 211 aa, Deinococcus radiodurans
MAYTLPQLPYAYDALEPHIDARTMEIHHTKHHQTYVDNANKALEGTEFADLPVEQLIQQLDRVPADKKGALRNNAGGHANHSMFWQIMGQGQGQNGANQPSGELLDAINSAFGSFDAFKQKFEDAAKTRFGSGWAWLVVKDGKLDVVSTANQDNPLMGEAIAGVSGTPILGVDVWEHAYYLNYQNRRPDYLAAFWNVVNWDEVSKRYAAAK

SEQ ID NO: 106423 - DNA, 621 bp, Escherichia coli O157
  CDS (1)..(621): transl_table=11
atgagctataccctgccatccctgccgtatgcttacgatgccctggaaccgcacttcgataagcagaccatggaaatccaccacaccaaacaccatcagacctacgtcaacaacgccaacgcggcgttggaaagcctgccagaatttgccaacctgccggttgaagagttgatcaccaaactggaccagctgccagcagacaagaaaaccgtactgcgcaacaacgctggcggtcacgctaaccacagcctgttctggaaaggtctgaaaaaaggcaccaccctgcagggtgacctgaaagcggctatcgaacgtgatttcggttccgtagataacttcaaagcagaatttgagaaagcggcagcttcccgctttggttccggctgggcatggctggtgctgaaaggcgataaactggcggtggtttctactgctaaccaagactccccgctgatgggtgaagctatttctggcgcatccggcttcccgattctgggcctggatgtgtgggagcatgcttactacctgaaattccagaaccgccgcccggactacatcaaagagttctggaacgtggtgaactgggacgaagcagcggcacgtttcgcggcgaaaaaataa

SEQ ID NO: 106424 - protein, 206 aa, Escherichia coli O157
MSYTLPSLPYAYDALEPHFDKQTMEIHHTKHHQTYVNNANAALESLPEFANLPVEELITKLDQLPADKKTVLRNNAGGHANHSLFWKGLKKGTTLQGDLKAAIERDFGSVDNFKAEFEKAAASRFGSGWAWLVLKGDKLAVVSTANQDSPLMGEAISGASGFPILGLDVWEHAYYLKFQNRRPDYIKEFWNVVNWDEAAARFAAKK

SEQ ID NO: 106425 - DNA, 609 bp, Enterococcus faecalis
  CDS (1)..(609): transl_table=11
atgacttacacattaccagaattaccatatgcttatgatgcattagaaccttacattgacgtggaaacaatgcacttacaccatgataaacaccacaacacttatgtgactaacttaaacgcagcgattgaaaaacatccagaattaggcgaaaaatctgtagaaaacctaatttcagatatgaatgctattcctgaagatatccgcacagctgttcgtaacaatggtggcggtcacgcaaaccatacattcttctgggaaattatggcaccaaatgctggtggacaaccaactggcgctattaaagaagcaatcgatgaaacatttggtagctttgatgaaatgaaagctgctttcaaaacagctgcaactggccgctttggttcaggttgggcttggttagttgtgaataacggtaaattagaaatcacttcaacaccaaaccaagattcaccattaatggatggccaaacacctgttttaggtcttgacgtttgggaacatgcgtattacttaaaatataaaaacgttcgtccagattacattgaagcattctggaacgttgttaactgggataaagtaaacgaactttttgctgcagcaaaataa

SEQ ID NO: 106426 - protein, 202 aa, Enterococcus faecalis
MTYTLPELPYAYDALEPYIDVETMHLHHDKHHNTYVTNLNAAIEKHPELGEKSVENLISDMNAIPEDIRTAVRNNGGGHANHTFFWEIMAPNAGGQPTGAIKEAIDETFGSFDEMKAAFKTAATGRFGSGWAWLVVNNGKLEITSTPNQDSPLMDGQTPVLGLDVWEHAYYLKYKNVRPDYIEAFWNVVNWDKVNELFAAAK

SEQ ID NO: 106427 - DNA, 603 bp, Ganoderma microsporum
  CDS (1)..(603)
atggcccacgtcctccccgacctcccgtacgcgtacaacgcgctcgagcccttcatctcgcagcagatcatggagctccaccacaagaagcaccaccagacctacgtcaactcgctcaacgccgccgagcaggcctacgccaaggcctccacccccaaggagcgcatcgccctccagtcggccctcaagttcaacggcggtggtcacatcaaccactccctcttctggaagaaccttgcccccgccaagtcggagggcaagggcaacggcggcgccctcgcggacggccccctcaagtctgcgatcgagcagaactggggctccgtcgacaacttcatcaaggagttcaacgccaccactgctgccatccagggctctggctggggctggctcggacttaacccggcaacgaagcgtctcgagataacgacgaccgccaatcaggacccgctcctctcgcatgtccccatcatcggcgtcgatatctgggagcacgcgttctacctccagtacctcaacgtcaaggccgactacctggcggcgatctggatcgtgatcaacttcaaggaggcggagcgtcgtctgatcgaggccaccaagtaa

SEQ ID NO: 106428 - protein, 200 aa, Ganoderma microsporum
MAHVLPDLPYAYNALEPFISQQIMELHHKKHHQTYVNSLNAAEQAYAKASTPKERIALQSALKFNGGGHINHSLFWKNLAPAKSEGKGNGGALADGPLKSAIEQNWGSVDNFIKEFNATTAAIQGSGWGWLGLNPATKRLEITTTANQDPLLSHVPIIGVDIWEHAFYLQYLNVKADYLAAIWIVINFKEAERRLIEATK

SEQ ID NO: 106429 - DNA, 651 bp, Glossina morsitans morsitans
  CDS (1)..(651)
  misc_feature (446)..(446): y is t or c
  misc_feature (558)..(558): w is a or t
  misc_feature (561)..(561): r is g or a
  misc_feature (566)..(566): k is g or t
  misc_feature (567)..(567): r is g or a
  misc_feature (568)..(568): s is g or c
  misc_feature (590)..(590): w is a or t
  misc_feature (613)..(613): r is g or a
  misc_feature (618)..(618): y is t or c
atgtctttcttgaatcgcaatctcagtcgaacaatcaaagcagcggtgcgcggcaagcacacattacccaaattgccgtacgactatggtgctttggctccaattatcagtaaagatattttggaagtacatcatggcaaacatcaccaaacctatgttaataacttgaatgcagtggaagagcaaatgacagaagcacacagcaaaaaagatgtaaataaagtggttgaactttccaagaattatgctttcaactggggcgggcatttaaatcattcgatttattggcaaaatctatctccaaccaaatcggaaccttctgctgacttgaagaaagccattgaagaacaatttagcagtttcgaacaattcaaaaaggatttgtctgctttgtcaatcggtgttcagggctccggttggggttggttgggctataacaagaagtytaagaaattacaaattctggctgtgagcaatcaagaaccattgcaagcagttactggtttggtgccattattcgctatagatgtctgggagcatgcttactatttgcagtawaaraacgkrsgcgctaaatatgttgaggcaawatgggatattgccaattggaaaracatytcagatcgttatgctgaagctacttgtaattaa

SEQ ID NO: 106430 - protein, 216 aa, Glossina morsitans morsitans
  misc_feature (149)..(149): The Xaa at location 149 stands for Phe, or Ser.
  misc_feature (186)..(186): The Xaa at location 186 stands for Stop, or Tyr.
  misc_feature (189)..(189): The Xaa at location 189 stands for Gly, or Val.
  misc_feature (190)..(190): The Xaa at location 190 stands for Arg, or Gly.
  misc_feature (197)..(197): The Xaa at location 197 stands for Ile, or Lys.
MSFLNRNLSRTIKAAVRGKHTLPKLPYDYGALAPIISKDILEVHHGKHHQTYVNNLNAVEEQMTEAHSKKDVNKVVELSKNYAFNWGGHLNHSIYWQNLSPTKSEPSADLKKAIEEQFSSFEQFKKDLSALSIGVQGSGWGWLGYNKKXKKLQILAVSNQEPLQAVTGLVPLFAIDVWEHAYYLQXKNXXAKYVEAXWDIANWKBISDRYAEATCN

SEQ ID NO: 106431 - DNA, 642 bp, Haemophilus ducreyi
  CDS (1)..(642): transl_table=11
atgacatatcaattacctgaattaggctatgcttatgatgcattagagccatatttcgataaagaaacgatggaaatccatcattcaaaacatcaccaagcttatgtaaataattcaaatgcattattagaaaagcatcctgaactactagaaaaatgtcccggtgcattattaaaagatttaactcaagtgcctgctgaaaaacgtacagctgtacgtaataacttaggtggtcacgtaaaccacacattattttggaaaggcttaaaaacaggtaccacgttacaaggtgcattaaaagatgcaattatccgcgattttggttccgtagaagcattccaagccgagtttgaacaagccgcagcgactcgttttggttctggatgggcttggctggtcttagaagaaggcaaactagcggttgtttcaactgctaaccaagattcgcctattatgggcaaagatgtagccggcgtttcaggctaccctatttttactttagatgtttgggaacacgcttactatttacattatcaaaatcgccgtccagactacattaaggctttctggaatgtggtgaattgggatgaagcatcacgccgttttgaagaaaaacaagctggttgcggatgcaccaaataa

SEQ ID NO: 106432 - protein, 213 aa, Haemophilus ducreyi
MTYQLPELGYAYDALEPYFDKETMEIHHSKHHQAYVNNSNALLEKHPELLEKCPGALLKDLTQVPAEKRTAVRNNLGGHVNHTLFWKGLKTGTTLQGALKDAIIRDFGSVEAFQAEFEQAAATRFGSGWAWLVLEEGKLAVVSTANQDSPIMGKDVAGVSGYPIFTLDVWEHAYYLHYQNRRPDYIKAFWNVVNWDEASRRFEEKQAGCGCTK

SEQ ID NO: 106433 - DNA, 702 bp, Hevea brasiliensis
  CDS (1)..(702)
atggctctgcgatctctagtgacccgaaagaacctaccctcagccttcaaggccgccacagggctagggcaactgcggggattgcagaccttctctctccccgatctcccttacgactatggtgccctggagcccgcgattagcggcgagataatgcagctgcatcaccagaaacatcaccagacttatattactaactacaacaaggctctcgagcaactcaacgacgctatagagaagggcgattctgctgccgtcgtcaagttgcagagcgccatcaagttcaacggtggaggtcatgtcaaccactccattttctggaagaatcttgcccccgtccgtgaaggaggtggtgaactcccgcatggttcccttggttgggctattgacgcagattttggctcattggaaaagttgatacaattaatgaatgcagaaggtgctgcgctgcaaggatctggatgggtgtggcttgccttggacaaagaattgaagaagcttgtggttgagaccactgcaaaccaggatccattggtaactaaaggaccaactttagttcctttgcttggtattgatgtttgggagcatgcatactacttacagtacaaaaatgtcagaccagactatctaaagaacatatggaaagtaatgaattggaagtatgcaagtgaagtgtatgccaaagaatgcccttcttcttag

SEQ ID NO: 106434 - protein, 233 aa, Hevea brasiliensis
MALRSLVTRKNLPSAFKAATGLGQLRGLQTFSLPDLPYDYGALEPAISGEIMQLHHQKHHQTYITNYNKALEQLNDAIEKGDSAAVVKLQSAIKFNGGGHVNHSIFWKNLAPVREGGGELPHGSLGWAIDADFGSLEKLIQLMNAEGAALQGSGWVWLALDKELKKLVVETTANQDPLVTKGPTLVPLLGIDVWEHAYYLQYKNVRPDYLKNIWKVMNWKYASEVYAKECPSS

SEQ ID NO: 106435 - DNA, 621 bp, Lactococcus lactis subsp
  CDS (1)..(621): transl_table=11
atggcatttacattacctgaacttccatacgcgccaaatgcgcttgaacctttctttgacgaagcaacaatgcgtttgcatcatggaaaacatcatcaaacttatgtgaataatcttaatgcagcaattgaaaaacataatgaacttgatgaccttagccttgaagaattattgacagatttgtcagcaattccagaagacattcgtacagctgttcgtaacaatggtggtggtcatttgaaccatagtcaattctggctttggcttcgtccaaacactgacggttctgaaaaccatgctgacggcgaaattggggatgcaattgcgaaagaatttggtagttttgaaactttcaaaacagaatttaaagctgcagccacaggtcgttttggttcaggatgggcttggttagttgttgatgaagctggaaaattgaaagttgtatcaactgcaaatcaagataatccaatttctgaagggttgacaccagttttaggacttgatgtttgggaacatgcttactatcttaaatatcacaatgtacgtcctgattacattgaagcattctttaaccttgtaaactgggataaagttaacgaactttatgctaaagcaaaataa

SEQ ID NO: 106436 - protein, 206 aa, Lactococcus lactis subsp
MAFTLPELPYAPNALEPFFDEATMRLHHGKHHQTYVNNLNAAIEKHNELDDLSLEELLTDLSAIPEDIRTAVRNNGGGHLNHSQFWLWLRPNTDGSENHADGEIGDAIAKEFGSFETFKTEFKAAATGRFGSGWAWLVVDEAGKLKVVSTANQDNPISEGLTPVLGLDVWEHAYYLKYHNVRPDYIEAFFNLVNWDKVNELYAKAK

SEQ ID NO: 106437 - DNA, 609 bp, Listeria innocua
  CDS (1)..(609): transl_table=11
atgacttacgaattacctaaattaccttatacttatgatgctttggagccaaattttgataaagaaacaatggaacttcattatacaaagcaccacaatacttatgtaacaaaactaaacgaagcggtttcaggtcatcctgaacttgctgagaaacctgttgaagaattggttgctaacttagatagcgttcctgaagatattcgcggcgctgtacgtaaccacggtggcggtcatgctaaccatacattattttggtctatccttagcccaaatggtggcggcgctccaactggtgacttaaaatctgctatcgaaagcgaattcggtacatttgatgatttcaaagaaaaattcaatgcagcagctgcagcacgttttggttctggctgggcttggttagtagttaataacggtaaactggaaatcgtttctactgcaaaccaagattctccattaagcgatggaaaaactcctgttctaggcctagatgtttgggaacatgcttattaccttaaattccaaaaccgtcgtcctgaatatatcgacacattttggaatgttgttaactgggatgaagctaacaaacgctttgacgcagctaaataa

SEQ ID NO: 106438 - protein, 202 aa, Listeria innocua
MTYELPKLPYTYDALEPNFDKETMELHYTKHHNTYVTKLNEAVSGHPELAEKPVEELVANLDSVPEDIRGAVRNHGGGHANHTLFWSILSPNGGGAPTGDLKSAIESEFGTFDDFKEKFNAAAAARFGSGWAWLVVNNGKLEIVSTANQDSPLSDGKTPVLGLDVWEHAYYLKFQNRRPEYIDTFWNVVNWDEANKRFDAAK

SEQ ID NO: 106439 - DNA, 609 bp, Listeria ivanovii
  CDS (1)..(609): transl_table=11
atgacttacgaattaccaaaattaccttatacttatgatgctttggagccgaattttgataaagaaacaatggaaattcactatacaaagcaccacaatatttatgtaacaaaactaaatgaagcagtctcaggacacgcagaacttgcaagtaaacctggggaagaattagttgctaatctagatagcgttcctgaagaaattcgtggcgcagtacgtaaccacggtggtggacatgctaaccatactttattctggtctagtcttagcccaaatggtggtggtgctccaactggtaacttaaaagcagcaatcgaaagcgaattcggcacatttgatgaattcaaagaaaaattcaatgcggcagctgcggctcgttttggttcaggatgggcatggctagtagtgaacaatggtaaactagaaattgtttccactgctaaccaagattctccacttagcgaaggtaaaactccagttcttggcttagatgtttgggaacatgcttattatcttaaattccaaaaccgtcgtcctgaatacattgacacattttggaatgtaattaactgggatgaacgaaataaacgctttgacgcagcaaaataa

SEQ ID NO: 106440 - protein, 202 aa, Listeria ivanovii
MTYELPKLPYTYDALEPNFDKETMEIHYTKHHNIYVTKLNEAVSGHAELASKPGEELVANLDSVPEEIRGAVRNHGGGHANHTLFWSSLSPNGGGAPTGNLKAAIESEFGTFDEFKEKFNAAAAARFGSGWAWLVVNNGKLEIVSTANQDSPLSEGKTPVLGLDVWEHAYYLKFQNRRPEYIDTFWNVINWDERNKRFDAAK

SEQ ID NO: 106441 - DNA, 609 bp, Listeria monocytogenes
  CDS (1)..(609): transl_table=11
atgacttacgaattacctaaattaccttatacttatgatgctttggagccgaattttgataaagaaaccatggaaattcactatacaaagcaccacaatacttatgtaacaaaactaaatgaagcggttgctggtcatcctgaacttgcaagcaaatctgcggaagaattagttactaacctagatagcgttcctgaagatattcgcggcgctgtccgtaaccacggtggcggtcatgctaaccatacattgttctggtctattcttagcccaaatggtggcggcgctccaactggcaatttaaaagcagcaatcgaaagcgaattcggtacttttgacgaatttaaagaaaaattcaatgcagcagctgcagcacgttttggttctggttgggcttggctagtagttaatgatggcaaattagaaatcgtttctacagctaaccaagattctccattaagcgatggcaaaacacccgttcttggcttagatgtttgggaacatgcttactaccttaaattccaaaaccgtcgtcctgaatatatcgaaacattttggaatgttattaactgggatgaagctaacaaacgctttgacgcagctaaataa

SEQ ID NO: 106442 - protein, 202 aa, Listeria monocytogenes
MTYELPKLPYTYDALEPNFDKETMEIHYTKHHNTYVTKLNEAVAGHPELASKSAEELVTNLDSVPEDIRGAVRNHGGGHANHTLFWSILSPNGGGAPTGNLKAAIESEFGTFDEFKEKFNAAAAARFGSGWAWLVVNDGKLEIVSTANQDSPLSDGKTPVLGLDVWEHAYYLKFQNRRPEYIETFWNVINWDEANKRFDAAK

SEQ ID NO: 106443 - DNA, 624 bp, Mycobacterium fortuitum
  CDS (1)..(624): transl_table=11
gtggctgaatacactttgccggacctggattacgactacggagcactggagccccacatctcggggcagatcaacgagctccaccacagcaagcaccacgccgcgtacgtcaagggcgtcaacgacgccgtggccaagctcgatgaggcgcgggccaacggtgaccacgcggcgatcttcctcaacgagaagaacctggcgttccatctcggcggccacgtgaaccactcgatctggtggaagaacctgtcccccaacggtggtgacaagccgacgggcgatctggccgcggcgatcgacgatcagttcggctcgttcgacaagttccaggcgcagttcaccgccgccgccaacgggctgcagggctcgggctgggccgtgctcggctacgacagcctgggcgatcggctgctgaccttccagctctacgaccagcaggccaacgtgccgctcggcatcatcccgctgctccaggtcgacatgtgggagcacgccttctacctgcagtacaagaacgtcaaggccgactacgtcaaggcgttctggaatgtcgtgaactgggaggatgtgcagaaccgctacgctgcggccacttccaagaccaacggcctgatcttcggctag

SEQ ID NO: 106444 - protein, 207 aa, Mycobacterium fortuitum
MAEYTLPDLDYDYGALEPHISGQINELHHSKHHAAYVKGVNDAVAKLDEARANGDHAAIFLNEKNLAFHLGGHVNHSIWWKNLSPNGGDKPTGDLAAAIDDQFGSFDKFQAQFTAAANGLQGSGWAVLGYDSLGDRLLTFQLYDQQANVPLGIIPLLQVDMWEHAFYLQYKNVKADYVKAFWNVVNWEDVQNRYAAATSKTNGLIFG

SEQ ID NO: 106445 - DNA, 624 bp, Mycobacterium smegmatis
  CDS (1)..(624): transl_table=11
gtggctgaatacaccctgccggacctggattacgactatggagccctcgagccccatatctccggtcagatcaacgagctgcaccacagcaagcaccacgcgacctacgtcaagggtgtgaacgacgcgattgccaagctcgaggaggcacgggccaacggtgaccacgcggccatcttcctgaacgagaagaacctcgcgttccatctcggtggccacatcaaccactcgatctggtggaagaacctctcccccaacggtggcgacaagcccaccggcgagctcgcggccgcgatcgacgaccagttcggctcgttcgacaagttccaggcacagttcaccgctgcggccaacggcctgcagggttcgggctgggcagtgctcggatacgacagcctcggtggccgtctgctgaccttccagctctacgaccagcaggccaacgtgccgctcggcatcatcccgctgctccaggtcgacatgtgggagcacgcgttctacctgcagtacaagaacgtcaaggccgactacgtcaaggccttctggaacgtcgtcaactgggatgacgtgcagaaccgcttcgcggcagccacttccaagaccagcggtctgatcttcggctga

SEQ ID NO: 106446 - protein, 207 aa, Mycobacterium smegmatis
MAEYTLPDLDYDYGALEPHISGQINELHHSKHHATYVKGVNDAIAKLEEARANGDHAAIFLNEKNLAFHLGGHINHSIWWKNLSPNGGDKPTGELAAAIDDQFGSFDKFQAQFTAAANGLQGSGWAVLGYDSLGGRLLTFQLYDQQANVPLGIIPLLQVDMWEHAFYLQYKNVKADYVKAFWNVVNWDDVQNRFAAATSKTSGLIFG

SEQ ID NO: 106447 - DNA, 738 bp, Neurospora crassa
  CDS (1)..(738)
atggtcaatctaggaagcatttggcaaaaccttctcgcctcgcaagctcctctccagtccatgacaggcaacgcaaccaccatggccggcctcgcgacttattcccttccgcagctaccatatgcctacaatgctctggagccctacatctcagcccagatcatggagcttcaccacagcaagcaccatcagacttacgtgaccaatctcaacaacgccttgaaagttcacgtcgccgccatcgcctctagcgatatccccgcccagatcgcccagcagcccgccatcaagttcaacggcggcggccacatcaatcactcgctcttctggaagaacctggcccccgctgagaccccagagaccaactactcgaaggcggctccttcgctggcggccgaaattgagaagacatggggtagttttgacgagttcaagaaggccttctctgctgcgctcttgggcatccagggcagtggctggggttggctcgttaaggagtctactgccgagaagggaaggctgcgtatcattactaccaaggatcaggatcccgtcgtgggcggtgaggtccctgtgttcggggtggacatgtgggagcatgcgtactacctccagtacctaaacggaaaggctgcgtatgttgagaatatctggaaggtgatcaactggaagacagccgaggagcgcttccagggtagtcgtgaggacgcttttgcggacctcaaggctttgctatga

SEQ ID NO: 106448 - protein, 245 aa, Neurospora crassa
MVNLGSIWQNLLASQAPLQSMTGNATTMAGLATYSLPQLPYAYNALEPYISAQIMELHHSKHHQTYVTNLNNALKVHVAAIASSDIPAQIAQQPAIKFNGGGHINHSLFWKNLAPAETPETNYSKAAPSLAAEIEKTWGSFDEFKKAFSAALLGIQGSGWGWLVKESTAEKGRLRIITTKDQDPVVGGEVPVFGVDMWEHAYYLQYLNGKAAYVENIWKVINWKTAEERFQGSREDAFADLKALL

SEQ ID NO: 106449 - DNA, 687 bp, Nicotiana plumbaginifolia
  CDS (1)..(687)
atggcactacgaaccctagtgagcagacggaccttagcaacagggctagggttccgccagcaactccgcggcttgcagaccttttcgctccccgatctcccctacgactatggagcactggagccggcaattagcggtgacataatgcagctccaccaccagaatcaccatcagacttacgtcaccaattacaataaagcccttgaacagctacatgacgccatttccaaaggagatgctcctaccgtcgccaaattgcatagcgctatcaaattcaacggcggaggtcacattaaccactcgattttctggaagaatcttgcccctgtccgcgagggtggtggtgagcctccaaagggttctcttggttgggctatcgacactaactttggctccctagaagctttagttcaaaagatgaatgcagaaggtgctgctttacagggctctggctgggtgtggcttggtgtggacaaagagcttaagcgcctggtgattgaaaccactgctaatcaggaccctttggtttctaaaggagcaaatttggttcctcttctgggaatagacgtttgggaacatgcatactacttgcagtacaaaaatgtaagacctgattatctgaagaacatatggaaagttatgaactggaaatatgcaaatgaagtttatgagaaagaatgtccttga

SEQ ID NO: 106450 - protein, 228 aa, Nicotiana plumbaginifolia
MALRTLVSRRTLATGLGFRQQLRGLQTFSLPDLPYDYGALEPAISGDIMQLHHQNHHQTYVTNYNKALEQLHDAISKGDAPTVAKLHSAIKFNGGGHINHSIFWKNLAPVREGGGEPPKGSLGWAIDTNFGSLEALVQKMNAEGAALQGSGWVWLGVDKELKRLVIETTANQDPLVSKGANLVPLLGIDVWEHAYYLQYKNVRPDYLKNIWKVMNWKYANEVYEKECP

SEQ ID NO: 106451 - DNA, 624 bp, Nocardia asteroides
  CDS (1)..(624): transl_table=11
gtggctgagtacacgctgccggatctggattacgactacagcgccctggaaccccacatctccgggcagatcaacgagctgcaccattccaagcaccacgccgcctacgtcgccggtgccaacacggcactggagaagctggaagccgcccgtgaggccggcgatcacagcgcgatcttcctgcacgagaagaacctcgcgttccacctcggcggacacgtcaaccactccatctggtggaagaacctgtcccccaacggtggcgacaagccggtcggcgagctggccgcggccatcgacgaccagttcggttcgttcgacaagttccgcgcgcagttcaccgccgcggccaacggcctgcagggctcgggctgggcggtgctcggttacgacaccctcggccagaagctgctgaccttccagctctacgaccagcaggccaacgtgccgctgggcatcatcccgctgctccaggtcgacatgtgggagcacgccttctacctgcagtacaagaacgtcaaggccgactacgtgaccgcgttctggaacgtcgtcaactgggccgacgtgcaggaccgcttcggcaaggccgtcaaccagggcaagggccttatcttcgggtaa

SEQ ID NO: 106452 - protein, 207 aa, Nocardia asteroides
MAEYTLPDLDYDYSALEPHISGQINELHHSKHHAAYVAGANTALEKLEAAREAGDHSAIFLHEKNLAFHLGGHVNHSIWWKNLSPNGGDKPVGELAAAIDDQFGSFDKFRAQFTAAANGLQGSGWAVLGYDTLGQKLLTFQLYDQQANVPLGIIPLLQVDMWEHAFYLQYKNVKADYVTAFWNVVNWADVQDRFGKAVNQGKGLIFG

SEQ ID NO: 106453 - DNA, 642 bp, Pasteurella haemolytica
  CDS (1)..(642): transl_table=11
atggcatatacattaccagaattaggctacgcttatgatgcgttagagccacatttcgatgctaaaacaatggaaatccaccattctaaacatcaccaagcttacatcaacaatgcaaatgcagcattagaagctcaccctgaattattagaaaaatgtccgggtgcattaatcaaagatttgagccaagtgcctgcagaaaaacgtattgcagtgcgtaacaacgtaggtggtcatgtaaaccacactttattctggaaaggtttaaaaacaggcactaccttacaaggtgcattaaaagaagcgattgagcgtgatttcggttcagttgaagctttccaatcagaatttgaaaaagcagcgactactcgtgttggttcaggctgggcgtggttagtattagaagagggtaaattagccgttgtttcaaccgctaaccaggacaacccactaatgggtaaagaagtggcaggcgtttcaggctatccgattttagtcttagacgtttgggaacacgcttactacttaaactaccaaaaccgccgtccggatttcattaaagcattctggaacgttgtaaactgggacgaagccgctcgccgttttgaagaaaaagtagcaacctgcggttgtgcgaaataa

SEQ ID NO: 106454 - protein, 213 aa, Pasteurella haemolytica
MAYTLPELGYAYDALEPHFDAKTMEIHHSKHHQAYINNANAALEAHPELLEKCPGALIKDLSQVPAEKRIAVRNNVGGHVNHTLFWKGLKTGTTLQGALKEAIERDFGSVEAFQSEFEKAATTRVGSGWAWLVLEEGKLAVVSTANQDNPLMGKEVAGVSGYPILVLDVWEHAYYLNYQNRRPDFIKAFWNVVNWDEAARRFEEKVATCGCAK

SEQ ID NO: 106455 - DNA, 645 bp, Pasteurella multocida
  CDS (1)..(645): transl_table=11
atggcttatacactaccagaattaggctatgcctacgatgcattagaaccccattttgatgcaatgacgatggaaattcaccattcaaaacatcatcaagcctatgtcaacaatgccaatgctgcattggaaaatttaccagaattagcacaaggttgcccaggtcaattattaactaagttagcagaggtgcctgctgataaattgacagctatccgcaataacgtgggtggtcacttaaaccactcgctattttggaaaagcttgaaaaaaggtaccacgttacaaggcgcactaaaagatgccatcgtgcgtgattttggctctgtggaagccttccaagcagaatttgaaaaagcggcagcaacccgtttcggttcaggttgggcatggttagtcttacaagaaaacggtaaattagccgtcgtatccaccgcaaaccaagattcacctgtaatgggtaaagctattgcgggttgcgaaggttacccattattaggtttagacgtttgggaacacgcttactacttgaaattccaaaaccgccgtccagactacattaaagaattctggcacgtggtaaactgggatttcgtggcagaacgcttcgagaaaaaagttgaacattgcaactgcacaaaataa

SEQ ID NO: 106456 - protein, 214 aa, Pasteurella multocida
MAYTLPELGYAYDALEPHFDAMTMEIHHSKHHQAYVNNANAALENLPELAQGCPGQLLTKLAEVPADKLTAIRNNVGGHLNHSLFWKSLKKGTTLQGALKDAIVRDFGSVEAFQAEFEKAAATRFGSGWAWLVLQENGKLAVVSTANQDSPVMGKAIAGCEGYPLLGLDVWEHAYYLKFQNRRPDYIKEFWHVVNWDFVAERFEKKVEHCNCTK

SEQ ID NO: 106457 - DNA, 633 bp, Penicillium chrysogenum
  CDS (1)..(633)
atgacttctcaaacacacacactgcctcctctcccctatgcctacgatgcgttggagcccgtcatctccaagcagataatggagctgcatcatcagaagcaccaccaaacttacatcaacaatctgaacgcagcgctctccgcccaagcttctgcaacagcatcaaatgatgtccccaccttgatttcattgcaacaaaagcttcgctttaacggtggaggccatatcaatcactccctgttctggaagaacctgactccccccggtacacctgcgaatgacatcgctggtgctcccgctctgcgcgaagccatcgtctcccgctggggctcgcatgaagcgtttgtcaaggcttttggcgccgagctgctcggtcttcaggggagtggctggggatggctggtgagcaagggtggtgccaagggacgacttgagatcgttacgactaaggaccaggaccctgttaatgcacctgatgtgcctgtcttcggtgtggatatgtgggagcatgcctactacctccagtacctgaacaacaaggctggctatgttgaggggatttggaagatcattcactgggctgaagctgagaagcgttacactgctggcgttgagaacccgctgaagctgtga

SEQ ID NO: 106458 - protein, 210 aa, Penicillium chrysogenum
MTSQTHTLPPLPYAYDALEPVISKQIMELHHQKHHQTYINNLNAALSAQASATASNDVPTLISLQQKLRFNGGGHINHSLFWKNLTPPGTPANDIAGAPALREAIVSRWGSHEAFVKAFGAELLGLQGSGWGWLVSKGGAKGRLEIVTTKDQDPVNAPDVPVFGVDMWEHAYYLQYLNNKAGYVEGIWKIIHWAEAEKRYTAGVENPLKL

SEQ ID NO: 106459 - DNA, 687 bp, Prunus persica
  CDS (1)..(687)
atggcactacgaaccctagtgagcagacggaccttagcaacagggctagggttccgccagcaactccgcggcttgcagaccttttcgctccccgatctcccctacaactatggagcactggagccggcaattagcggtgacataatgcagctccaccaccagaatcaccatcagacttacgtcaccaattacaataaagcccttgaacagctacatgacgccatttccaaaggagatgctcctaccgtcgccaaattgcatagcgctatcaaattcaacggcggaggtcacattaaccactcgattttctggaagaatcttgcccctgtccgcgagggtggtggtgagcctccaaagggttctcttggttgggctatcgacactaactttggctccctggaagctttagttcaaaagatgaatgcagaaggtgctgctttacagggttctggatgggtgtggctggctctagacaaagagttgaagaaacttgtggttgaaaccactgcaaatcaggacccattggttaccaaaggaccaactttagttccattgcttggtattgatgtttgggagcatgcgtactacttacagtataagaatgtgaggccagattatctcaagaacatatggaaagtaatcaactggaagtatgccagcgaagtgtacgagaaagaaagcccttga

SEQ ID NO: 106460 - protein, 228 aa, Prunus persica
MALRTLVSRRTLATGLGFRQQLRGLQTFSLPDLPYNYGALEPAISGDIMQLHHQNHHQTYVTNYNKALEQLHDAISKGDAPTVAKLHSAIKFNGGGHINHSIFWKNLAPVREGGGEPPKGSLGWAIDTNFGSLEALVQKMNAEGAALQGSGWVWLALDKELKKLVVETTANQDPLVTKGPTLVPLLGIDVWEHAYYLQYKNVRPDYLKNIWKVINWKYASEVYEKESP

SEQ ID NO: 106461 - DNA, 612 bp, Pseudomonas aeruginosa
  CDS (1)..(612): transl_table=11
atgccccacgccttgccgcccttgccttacgcctacgatgccctggaaccgcacatcgatgcgctgaccatggagatccaccacagcaagcaccaccagacctatgtgaacaacctgaacgccgcgctggaaggcacgccctatgccgagcagccggtggaaagtctgctgcggcaactggctggtctgccggagaagctgcgcaccccggttgtcaacaatggcggtgggcatgccaaccactcgctgttctggaccgtgatgtcgccccagggcggtggccgtcccgatggcgacctggggcgggccatcgatgagcagctcgggggcttcgaggcgttcaaggatgcgttcaccaaggctgcgctgacccgcttcggcagcggctgggcctggctcagcgtgactccccagggcagcttgctggtggagagcagcggcaaccaggacagcccgctgatgaacggcaatacgccgatcctcggcctggacgtatgggagcacgcctattacctgaagtaccagaaccgccgcccggaatacatcggcgctttctacaacgtgatcgactggcgggaggtcgcgcgtcgctatgcgcaagccctggcctag

SEQ ID NO: 106462 - protein, 203 aa, Pseudomonas aeruginosa
MPHALPPLPYAYDALEPHIDALTMEIHHSKHHQTYVNNLNAALEGTPYAEQPVESLLRQLAGLPEKLRTPVVNNGGGHANHSLFWTVMSPQGGGRPDGDLGRAIDEQLGGFEAFKDAFTKAALTRFGSGWAWLSVTPQGSLLVESSGNQDSPLMNGNTPILGLDVWEHAYYLKYQNRRPEYIGAFYNVIDWREVARRYAQALA

SEQ ID NO: 106463 - DNA, 612 bp, Pseudomonas putida
  CDS (1)..(612): transl_table=11
atgccgcataccttgcctgctttgccctacgcctacgatgcgctggagccgcacatcgacgcgcagaccatggaaattcaccacaccaagcaccatcagacctacgtcaacggcctcaatgccgccatcgaaggcaccgaatgggccgaatggcccgtggagaagctggttggtgcagtcaagcagctaccggaaagcctgcgtggcgctgtgaccaaccatggcggggggcacgccaaccatagcctgttctggacggtgatgtcgccgcaaggtggtggtgagccacacggccagctggcgcaggccatcgcctcgcaactgggtggtttcgatgccttcaaggaggcgttcaccaaggctgcgctgacccgctttggcagcggctgggcctggctcagcgtaacgccgcagaaaaccctcgttgtcgagagcagtggcaaccaggacagcccgctgatgttcggcaacacgccaatcttcggcctggacgtgtgggaacatgcctactacctgaagtatcagaaccgtcgtccggaatacatcggtgccttctacaacgtgattgactgggccgaagtggaacgccgttacctcgaagccctgaagtga

SEQ ID NO: 106464 - protein, 203 aa, Pseudomonas putida
MPHTLPALPYAYDALEPHIDAQTMEIHHTKHHQTYVNGLNAAIEGTEWAEWPVEKLVGAVKQLPESLRGAVTNHGGGHANHSLFWTVMSPQGGGEPHGQLAQAIASQLGGFDAFKEAFTKAALTRFGSGWAWLSVTPQKTLVVESSGNQDSPLMFGNTPIFGLDVWEHAYYLKYQNRRPEYIGAFYNVIDWAEVERRYLEALK

SEQ ID NO: 106465 - DNA, 621 bp, Salmonella typhi
  CDS (1)..(621): transl_table=11
atgagttatacactgccatccctgccgtacgcttatgatgcactggaaccgcacttcgataagcagacgatggagattcaccacaccaaacaccatcaaacctatgtcaacaacgctaacgcggcgctggaaaatctgcctgagtttgctgacctgccggttgaagaactgattactaaactggaccaggtgccagcggacaaaaaaaccgtgctgcgtaacaacgcgggcggccacgctaaccacagcctgttctggaaagggctgaaaaaaggcaccactctgcagggcgatctgaaagcggctatcgagcgtgacttcggttccgttgacaacttcaaagctgaattcgaaaaagcagcagcaacccgtttcggctccggctgggcgtggctggtgctgaaaggcgacaaactggctgtggtttctaccgcaaaccaggattccccgctgatgggtgaagccatttccggcgcttccggcttcccgatcctgggtctggacgtgtgggaacacgcttactatctgaaattccagaaccgccgcccggactacatcaaagagttctggaacgtggtgaactgggacgaagcagcagcgcgtttcgccgctaaaaaataa

SEQ ID NO: 106466 - protein, 206 aa, Salmonella typhi
MSYTLPSLPYAYDALEPHFDKQTMEIHHTKHHQTYVNNANAALENLPEFADLPVEELITKLDQVPADKKTVLRNNAGGHANHSLFWKGLKKGTTLQGDLKAAIERDFGSVDNFKAEFEKAAATRFGSGWAWLVLKGDKLAVVSTANQDSPLMGEAISGASGFPILGLDVWEHAYYLKFQNRRPDYIKEFWNVVNWDEAAARFAAKK

SEQ ID NO: 106467 - DNA, 621 bp, Salmonella typhimurium
  CDS (1)..(621): transl_table=11
atgagttatacactgccatccctgccgtacgcttatgatgcactggaaccgcacttcgataagcagacgatggagattcaccacaccaaacaccatcaaacctatgtcaacaacgctaacgcggcgctggaaaacctgcctgagtttgccagcctgccggttgaagaactgattactaaactggaccaggtgccagcggacaaaaaaactgtgctgcgtaacaacgcgggcggccatgctaaccacagcctgttctggaaagggctgaaaaaaggcaccactctgcagggcgatctgaaagcggctatcgagcgtgacttcggttccgttgacaacttcaaagctgaattcgaaaaagcagcagcaacccgtttcggctccggctgggcgtggctggtgctgaaaggcgacaaactggctgtggtttctaccgcaaaccaggattccccgctgatgggtgaagccatttccggcgcttccggcttcccgatcctgggcctggacgtgtgggaacacgcttactacctgaaattccagaaccgccgcccggactacatcaaagagttctggaacgtggtgaactgggacgaagcagcagcgcgtttcgccgctaaaaaataa

SEQ ID NO: 106468 - protein, 206 aa, Salmonella typhimurium
MSYTLPSLPYAYDALEPHFDKQTMEIHHTKHHQTYVNNANAALENLPEFASLPVEELITKLDQVPADKKTVLRNNAGGHANHSLFWKGLKKGTTLQGDLKAAIERDFGSVDNFKAEFEKAAATRFGSGWAWLVLKGDKLAVVSTANQDSPLMGEAISGASGFPILGLDVWEHAYYLKFQNRRPDYIKEFWNVVNWDEAAARFAAKK

SEQ ID NO: 106469 - DNA, 657 bp, Schizosaccharomyces pombe
  CDS (1)..(657)
atgcttcgctttttgtctaagaactctgtagccgctattaggaacgtctcaattgccaggggagttcatactaaggctactcttccccctttaccttatgcttacaatgcacttgaacctgctttgtcggaaacgattatgaagttacatcatgacaagcatcaccaaacatatgttaacaacttgaatgccgctcaggagaagctggccgatcccaacctcgatttggagggagaggttgcccttcaagctgctattaaattcaatggcggtggtcacatcaatcattctctcttttggaagattttagcacctcaaaaggaaggtggtggcaaacccgtcacctctggatctttacataaggctataacctctaaatggggttctttggaggatttccagaaggaaatgaatgccgccttagctagcatccaaggtagtggttgggcatggctaatcgtggataaagacggtagtctccgtattactactactgctaaccaagacacgattgtcaagtccaagcccattattggaattgatgcttgggaacatgcctactatcctcaatacgagaatcgtaaggccgaatactttaaagctatttggaatgtgattaattggaaagaggccgagtctcgttattccaaccgttaa

SEQ ID NO: 106470 - protein, 218 aa, Schizosaccharomyces pombe
MLRFLSKNSVAAIRNVSIARGVHTKATLPPLPYAYNALEPALSETIMKLHHDKHHQTYVNNLNAAQEKLADPNLDLEGEVALQAAIKFNGGGHINHSLFWKILAPQKEGGGKPVTSGSLHKAITSKWGSLEDFQKEMNAALASIQGSGWAWLIVDKDGSLRITTTANQDTIVKSKPIIGIDAWEHAYYPQYENRKAEYFKAIWNVINWKEAESRYSNR

SEQ ID NO: 106471 - DNA, 606 bp, Staphylococcus carnosus
  CDS (1)..(606): transl_table=11
atggcttttgaattaccaaatttaccatacgagtttgatgcattggaaccatatatcgataaagaaacaatggaaatccatcatgacaaacatcataatacttatgtaacaaaattaaatgcagcaatcgaaggtactgatttagaaaataaatctatcgaagagatcgttgctaatttagacagcgtaccatctgacatccaaactgcagttcgtaataacggtggtggacatttaaaccattcattattctggcaacttctaacacctaattctgaagaaaaaggtacagtaattgataaaatcaaagaagaatggggttctttagacaaatttaaagatgaatttgctaaaaaagctgctggacaatttggttcaggttgggcatggctagttgtagataaagacggtaaactagaaatcgtttctactcctaaccaagacaatccaatcacagaaggcaaaactcctattttaggacttgatgtttgggaacacgcttactatcttaaatatcaaaataaacgtccagattatatcgatgcattctggaacgttgttaactggaataaagttgatgaactttatgaagcagcaacaaaataa

SEQ ID NO: 106472 - protein, 201 aa, Staphylococcus carnosus
MAFELPNLPYEFDALEPYIDKETMEIHHDKHHNTYVTKLNAAIEGTDLENKSIEEIVANLDSVPSDIQTAVRNNGGGHLNHSLFWQLLTPNSEEKGTVIDKIKEEWGSLDKFKDEFAKKAAGQFGSGWAWLVVDKDGKLEIVSTPNQDNPITEGKTPILGLDVWEHAYYLKYQNKRPDYIDAFWNVVNWNKVDELYEAATK

SEQ ID NO: 106473 - DNA, 600 bp, Staphylococcus epidermidis
  CDS (1)..(600): transl_table=11
atggcatttgaattaccaaaattaccatatgcatttgacgcattagaaccacacatcgataaagaaactatggagattcaccatgataaacaccacaacacttatgtaacaaaattaaatgcagttgtagaaggtactgacttagaagctaaatcaatcgaagaaattgtagctaacttagatagtgttccttctgatattcaaactgcagtaagaaataacggtggcggacacttaaaccactcattattctgggaattattaacacctaattcagaagaaaaaggtgaagtagtagagaaaattaaagaacaatggggttctttagatgaattcaaaaaagaattcgctgacaaagctgcagctcgttttggttcaggttgggcttggttagttgttaataatggtcaattagaaatcgttacaactccaaaccaagataacccattaactgaaggtaaaacacctatcctaggcttagatgtttgggaacatgcttattaccttaaatatcaaaacaaacgtccagattatatcagtgctttctggaatgttgttaactgggaaaaagttgacgaattatacaacgctgctaaataa

SEQ ID NO: 106474 - protein, 199 aa, Staphylococcus epidermidis
MAFELPKLPYAFDALEPHIDKETMEIHHDKHHNTYVTKLNAVVEGTDLEAKSIEEIVANLDSVPSDIQTAVRNNGGGHLNHSLFWELLTPNSEEKGEVVEKIKEQWGSLDEFKKEFADKAAARFGSGWAWLVVNNGQLEIVTTPNQDNPLTEGKTPILGLDVWEHAYYLKYQNKRPDYISAFWNVVNWEKVDELYNAAK

SEQ ID NO: 106475 - DNA, 600 bp, Staphylococcus epidermidis
  CDS (1)..(600): transl_table=11
atggcttttgaattaccaaatttaccttatgcatatgatgcattagaaccacacatcgacaaacaaactatggaaattcatcatgacaaacatcataacacatatgttacaaaattaaattcagcagttgaagggacagatttagaagctaaatcaatcgaagaaattgttgctaatttagatagtgtgccatctaatattcaaacagctgttcgtaataatggcggtggtcaccttaaccattcattgttctgggaactattatcaccaaattctgaagaaaaaggtgaagtagtagataaaattaaagaacaatggggttctttagatgaatttaaaaaagaatttgcagataaagctgcagcacgctttggttcaggatgggcttggttagttgtaaacaatggacaattagaaattgttacaacaccaaatcaagataatccaattactgaaggaaaaacaccaattttaggtttagatgtttgggagcatgcttattatcttaaatatcaaaataaacgcccagattatatcaatgcattctggaatgttgttaactgggaaaaagttaatgaattatataatgcaactaaataa

SEQ ID NO: 106476 - protein, 199 aa, Staphylococcus epidermidis
MAFELPNLPYAYDALEPHIDKQTMEIHHDKHHNTYVTKLNSAVEGTDLEAKSIEEIVANLDSVPSNIQTAVRNNGGGHLNHSLFWELLSPNSEEKGEVVDKIKEQWGSLDEFKKEFADKAAARFGSGWAWLVVNNGQLEIVTTPNQDNPITEGKTPILGLDVWEHAYYLKYQNKRPDYINAFWNVVNWEKVNELYNATK

SEQ ID NO: 106477 - DNA, 600 bp, Staphylococcus xylosus
  CDS (1)..(600): transl_table=11
atggcttttgaattaccaaacttaccttatggttttgatgcattggaaccacacattgatcaacaaacaatggaaattcaccatggcaaacaccataacacttatgtaactaaattaaacgcagcagtagaaggaactgatttagaatctaaatcaattgaagaaattgttgcaaatctagacagtgttccagaaaacattcaaacagctgttcgcaataatggcggtggacatttaaaccactcattattctgggaattattaactccaaactcagaagaaaaaggtactgttgttgataaaattaaagaacaatggggttctttagatgcatttaaagaagaatttgcagacaaagcagcagcacgtttcggttcaggttgggcctggttagtagttaataacggtaacttagaaatcgttactacacctaaccaagacaatccaattactgaaggtaaaacacctatcttaggattagatgtttgggaacacgcttattatcttaaataccaaaacaaacgtccagactatattagtgcattctggaacgtagtaaattgggaaaaagttgacgaattatataacgctgctaaataa

SEQ ID NO: 106478 - protein, 199 aa, Staphylococcus xylosus
MAFELPNLPYGFDALEPHIDQQTMEIHHGKHHNTYVTKLNAAVEGTDLESKSIEEIVANLDSVPENIQTAVRNNGGGHLNHSLFWELLTPNSEEKGTVVDKIKEQWGSLDAFKEEFADKAAARFGSGWAWLVVNNGNLEIVTTPNQDNPITEGKTPILGLDVWEHAYYLKYQNKRPDYISAFWNVVNWEKVDELYNAAK

SEQ ID NO: 106479 - DNA, 612 bp, Streptococcus mutans
  CDS (1)..(612): transl_table=11
atggctattcttttaccagatcttccatatgcttatgacgcacttgaaccatatattgatgctgaaacgatgacccttcatcatgataagcatcatgcaacttatgtcgcaaacgctaatgcggctcttgaaaaacatccagaaatcggagaaaatttggaagtgcttttggctgatgtggaacaaattccagcggatattcgtcagtctttgattaataatggtggcggtcatcttaatcacgctcttttctgggaactcttgtcaccagaaaagacaaaagttactgcggaagtagccgcagcaatcaatgaagcttttggctcatttgatgattttaaagcagcttttacagctgccgcaacgacgcgttttggctcaggttgggcttggttagtagttgataaagaaggaaaacttgaagtgacctcaacagctaatcaagatactccaatttcacagggcttgaaaccaattttagcacttgatgtctgggaacacgcttattatctcaattatcgtaatgttcgtccaaactatatcaaagccttctttgaagttatcaattggaacactgttgctcgtctttatgccgaagctctcactaaataa

SEQ ID NO: 106480 - protein, 203 aa, Streptococcus mutans
MAILLPDLPYAYDALEPYIDAETMTLHHDKHHATYVANANAALEKHPEIGENLEVLLADVEQIPADIRQSLINNGGGHLNHALFWELLSPEKTKVTAEVAAAINEAFGSFDDFKAAFTAAATTRFGSGWAWLVVDKEGKLEVTSTANQDTPISQGLKPILALDVWEHAYYLNYRNVRPNYIKAFFEVINWNTVARLYAEALTK

SEQ ID NO: 106481 - DNA, 615 bp, Thermus aquaticus
  CDS (1)..(615): transl_table=11
atgccgtacccgttcaagctacccgagctaggctacccctacgaggccctcgagccccacattgacgccaggaccatggagatccaccaccagaagcaccacggcgcctacgtcaccaacctgaacgccgccctggagaagtacccctacctccaaggcgccgaggtggaaaccctcctccggcacctcaccgccctccccgccgacatccaggccgccgtgcgcaacaacgggggcgggcacctgaaccacagcctcttctggcgcctcctcaccccgggcggggccaaggagcccgtgggggagctgaagaaggccattgacgagcagtttggcggcttcgccgccctaaaggagaagctcacccaggcggccatggggcgcttcggctccgggtgggcctggctggtcaaggaccccttcggcaagctccacgtgatctccaccgccaaccaggacaacccagtgatgggaggcttcgcccccatcgtgggcattgacgtctgggagcacgcctactacctgaagtaccagaaccgccgggccgactacctgcaggccatctggaacgtcctgaactgggacgtggccgaggagatctacaagggcgcctga

SEQ ID NO: 106482 - protein, 204 aa, Thermus aquaticus
MPYPFKLPELGYPYEALEPHIDARTMEIHHQKHHGAYVTNLNAALEKYPYLQGAEVETLLRHLTALPADIQAAVRNNGGGHLNHSLFWRLLTPGGAKEPVGELKKAIDEQFGGFAALKEKLTQAAMGRFGSGWAWLVKDPFGKLHVISTANQDNPVMGGFAPIVGIDVWEHAYYLKYQNRRADYLQAIWNVLNWDVAEEIYKGA

SEQ ID NO: 106483 - DNA, 615 bp, Thermus thermophilus
  CDS (1)..(615): transl_table=11
atgccgtacccgttcaagcttcctgacctaggctacccctacgaggccctcgagccccacattgacgccaagaccatggagatccaccaccagaagcaccacggggcctacgtgacgaacctcaacgccgccctggagaagtacccctacctccacggggtggaggtggaggtcctcctgaggcacctcgccgcccttccccaggacatccagaccgccgtgcgcaacaacgggggcgggcacctgaaccacagcctcttctggaggctcctcacccccgggggggccaaggagcccgtgggggagctgaagaaggccattgacgagcagttcgggggcttccaggccctcaaggagaagctcacccaggcggccatgggccggttcggctcgggctgggcctggctcgtgaaggaccccttcggcaagctccacgtcctctccacccccaaccaagacaaccccgtgatggagggcttcacccccatcgtgggcattgacgtctgggagcacgcctactacctcaagtaccagaaccgccgggccgattacctccaggccatctggaacgtcctcaactgggacgtggccgaggagttcttcaagaaggcctga

SEQ ID NO: 106484 - protein, 204 aa, Thermus thermophilus
MPYPFKLPDLGYPYEALEPHIDAKTMEIHHQKHHGAYVTNLNAALEKYPYLHGVEVEVLLRHLAALPQDIQTAVRNNGGGHLNHSLFWRLLTPGGAKEPVGELKKAIDEQFGGFQALKEKLTQAAMGRFGSGWAWLVKDPFGKLHVLSTPNQDNPVMEGFTPIVGIDVWEHAYYLKYQNRRADYLQAIWNVLNWDVAEEFFKKA

SEQ ID NO: 106485 - DNA, 702 bp, Saccharomyces cerevisiae
  CDS (1)..(702)
atgttcgcgaaaacagcagctgctaatttaaccaagaagggtggtttgtcattgctctccaccacagcaaggagaaccaaagtcaccttgccagacttgaagtgggacttcggtgcactggaaccttatatctccggtcaaatcaacgaattgcattacaccaagcaccatcaaacttatgtgaacggattcaacactgctgttgaccaattccaagaactctcagatcttctggccaaggagccctctcccgcaaacgcaagaaaaatgattgctatccaacagaacatcaagttccatggcggtggtttcacaaaccactgtctattctgggaaaacctggctccagagtcgcagggcggtggtgaaccacccaccggcgctttggcaaaggcaatcgacgagcagtttggcagtctggacgagctgattaagttgaccaacacaaagctagcaggcgtgcagggctccggatgggccttcattgtgaagaacctctctaatggaggcaagctggacgttgttcaaacctacaaccaggataccgtcacaggcccactagttcctctagttgccattgacgcctgggaacacgcctactacttgcagtaccaaaacaagaaagccgactacttcaaagccatttggaatgtggtcaactggaaagaagcatccagaagattcgatgctggcaagatctga

SEQ ID NO: 106486 - protein, 233 aa, Saccharomyces cerevisiae
MFAKTAAANLTKKGGLSLLSTTARRTKVTLPDLKWDFGALEPYISGQINELHYTKHHQTYVNGFNTAVDQFQELSDLLAKEPSPANARKMIAIQQNIKFHGGGFTNHCLFWENLAPESQGGGEPPTGALAKAIDEQFGSLDELIKLTNTKLAGVQGSGWAFIVKNLSNGGKLDVVQTYNQDTVTGPLVPLVAIDAWEHAYYLQYQNKKADYFKAIWNVVNWKEASRRFDAGKI

SEQ ID NO: 106487 - DNA, 624 bp, Yersinia enterocolitica
  CDS (1)..(624): transl_table=11
atgagttactcactgccatccctgccttatgcttatgacgccctggaaccacacttcgataagcagacgatggaaatccatcacaccaaacaccaccaaacctatgttaacaatgcaaacacggtgttggagagcttccctgagctggctaaattcagtgttgaagatctgatcaaagatctggacaaagtcccggctgaaaaacgcacctttatgcgtaataacgccggcggtcacgctaaccacagcctgttctggaagggcttgaaactgggcaccactctgaccggtgacctgaaagccgctatcgagcgcgacttcggcagcgttgacagcttcaaagagaaatttgaagctgctgcggcaacacgtttcggttcaggctgggcctggctggtactgaaagacgacggcaaactggctgttgtttcgactgctaaccaagacagcccgctgatgggtgaagctgtttctggcgcatcaggtttcccaattgtgggcctggatgtgtgggaacacgcttactatctgaaattccaaaaccgccgcccagactacatcaaagcattctggaacgtggttaactgggacgaagcagccgcgcgcttcgctcaagctaagtaa

SEQ ID NO: 106488 - protein, 207 aa, Yersinia enterocolitica
MSYSLPSLPYAYDALEPHFDKQTMEIHHTKHHQTYVNNANTVLESFPELAKFSVEDLIKDLDKVPAEKRTFMRNNAGGHANHSLFWKGLKLGTTLTGDLKAAIERDFGSVDSFKEKFEAAAATRFGSGWAWLVLKDDGKLAVVSTANQDSPLMGEAVSGASGFPIVGLDVWEHAYYLKFQNRRPDYIKAFWNVVNWDEAAARFAQAK

SEQ ID NO: 106489 - DNA, 696 bp, Oryza sativa
  CDS (1)..(696)
atggcgctccgcacgctggcctcgaggaaaaccctagccgccgcggcgctgccgctggctgcggcggcggcggcgaggggtgtgacgaccgtcgcgctcccggacctcccctacgactacggcgcgctggagccggccatctccggggagatcatgcgcctgcaccaccagaagcaccacgccacctacgtcgccaactacaacaaggccctcgagcagctcgacgccgccgtcgccaagggcgacgcccccgccatcgtgcacctccagagcgccatcaagttcaacggcggaggccatgtcaatcattcgatcttctggaataacctcaagcctatcagcgagggtggtggtgatccaccacatgcaaaacttggctgggccattgatgaggattttggttcatttgaggcacttgtaaagaagatgagtgcagaaggtgctgctttacaaggatctggatgggtgtggctagctttggataaagaggcaaagaagctttcagtggaaacaactgctaaccaggaccctctggtaacgaagggggccaacttggttcctttgttgggaattgatgtctgggagcatgcgtactacctgcagtacaagaatgtcaggccagactacctgagcaacatctggaaggtgatgaactggaaatacgcaggggaggtgtacgaaaatgcgactgcttga

SEQ ID NO: 106490 - protein, 231 aa, Oryza sativa
MALRTLASRKTLAAAALPLAAAAAARGVTTVALPDLPYDYGALEPAISGEIMRLHHQKHHATYVANYNKALEQLDAAVAKGDAPAIVHLQSAIKFNGGGHVNHSIFWNNLKPISEGGGDPPHAKLGWAIDEDFGSFEALVKKMSAEGAALQGSGWVWLALDKEAKKLSVETTANQDPLVTKGANLVPLLGIDVWEHAYYLQYKNVRPDYLSNIWKVMNWKYAGEVYENATA

SEQ ID NO: 106491 - DNA, 1176 bp, Oryza sativa
  CDS (1)..(1176)
atggcgttcgccacactggtgggagtgggaggcctatcgcctgccctcttctccccctcccgccccctctcctgctccagctccacctccgtctcggccccgttcatcctccgcgccggcggcggcggcgacgcccggcggcatggcctccgacgcctcgtcaccccactgagagggagcgcctgcaggggagagagtacgaactcacgtgtactccagtgtgccaatgaggctaatgtggtgaccgaggatgacattgtgaacgatggtatcgatgatgaaaccgcttccgatgctgaaatggatgaggatgctgaagcaaatggtgatgagtcgtcaggcactgatgaagatgcttctgtctcctggatagagcagcagcctcttccttatccttcagatgccctagagccatacatcagcaaggagacggtggaacagcactggggagttcatcagaacattcacgtcgagaggctcaatggcatgattggtggcagtgagtgggaggggatgtcgctggggcagatgatgctatcctccttcaatgagggcagggaggcaccccatccccccttcttccatgctgcacagatatggaaccatgatttctattggcgatctatgcaacctggtggcgggggaaaacccccagaacgccttttgaaatttatcaacagggactttggatcctatgatggcatgattcgacaatttatggatgctgcatcaactcaatttggttctggatgggtttggctttgttacaaaacaagcaagttgcctcatgtgaaatcaagaagcccaatcccatctgataattatggtagactggtcatctcaaagtctccgaatgccatcaatcctcttgtctggggtcactctccactccttgcaattgatctttgggagcatgcatactacctggattatgaggatcggagatctgactatgtctccacatttctagagaagcttgtgtcatgggaaactgttgagtccaggcttaagaaggccgtacaacgggcagtagaaagagatgaatatgttagcacaaagcatataaggaagcaacttttagctcgggcaaagagccaaatcagagctatgcctcagcaggtcaatggggatgcaagagagcagaccagcggtcaagagaagtccctaggggtgtga

SEQ ID NO: 106492 - protein, 391 aa, Oryza sativa
MAFATLVGVGGLSPALFSPSRPLSCSSSTSVSAPFILRAGGGGDARRHGLRRLVTPLRGSACRGESTNSRVLQCANEANVVTEDDIVNDGIDDETASDAEMDEDAEANGDESSGTDEDASVSWIEQQPLPYPSDALEPYISKETVEQHWGVHQNIHVERLNGMIGGSEWEGMSLGQMMLSSFNEGREAPHPPFFHAAQIWNHDFYWRSMQPGGGGKPPERLLKFINRDFGSYDGMIRQFMDAASTQFGSGWVWLCYKTSKLPHVKSRSPIPSDNYGRLVISKSPNAINPLVWGHSPLLAIDLWEHAYYLDYEDRRSDYVSTFLEKLVSWETVESRLKKAVQRAVERDEYVSTKHIRKQLLARAKSQIRAMPQQVNGDAREQTSGQEKSLGV

SEQ ID NO: 106493 - DNA, 768 bp, Oryza sativa
  CDS (1)..(768)
atggcggctttcgcctccgctctccgcgttctcccctcgccgccggctgcggtgcctcgtcggcttcgctcgagagaacaaaggcagggctgtagatctcgaaggtattcaaaagtcgtggcttactacgctctcactactccgccgtataaacttgatgccctggaaccttatattagcaagaggacagttgaacttcactggggtaagcatcagcaagactatgtggatagcttgaataagcagcttgctaccagcatgttctatgggtacactctggaggaactaataaaagaagcatacaacaacggcaacccattaccagaatataataatgcagcacaggtatggaaccatcacttcttctgggaatcaatgcagccagaaggtggtgggtcaccagggcgaggtgtcctgcagcagatagagaaggattttggctcttttactaattttagggaagagtttatacgctcagcattatcacttttggggtctggctgggtttggcttgtcttgaagagaaaagaacgaaaattttcggtagtccatacacaaaatgccatcagtccacttgcacttggtgatattccactcatcaatctagacttgtgggagcatgcttactacttggattacaaggatgacaggcgaatgtatgttacaaactttatcgaccatcttgtctcttgggatactgtcactctacgcatgatgcgcgctgaggcttttgtgaaccttggtgaaccaaatatcccagttgcatga

SEQ ID NO: 106494 - protein, 255 aa, Oryza sativa
MAAFASALRVLPSPPAAVPRRLRSREQRQGCRSRRYSKVVAYYALTTPPYKLDALEPYISKRTVELHWGKHQQDYVDSLNKQLATSMFYGYTLEELIKEAYNNGNPLPEYNNAAQVWNHHFFWESMQPEGGGSPGRGVLQQIEKDFGSFTNFREEFIRSALSLLGSGWVWLVLKRKERKFSVVHTQNAISPLALGDIPLINLDLWEHAYYLDYKDDRRMYVTNFIDHLVSWDTVTLRMMRAEAFVNLGEPNIPVA

SEQ ID NO: 106495 - DNA, 639 bp, Brassica napus
  CDS (1)..(639)
atggctgcttcagctgctgtaaccgcaaactacgtccttaagccacctccataccctctggatgctttggagccgcatatgagcaaacaaactctggagtttcactggggaaaacatcacagagcttatgtggacaacctcaagaaacaggttcttggatccgagcttgaaggcaagcccttggagcatatcatccaaaacacttacaacaacggcgacctcctccctcctttcaacaacgctgctcaggcgtggaaccacgagttcttctgggaatcaatgaaacccggtggtggaggaaaaccatcaggagagcttcttgctctgcttgaaagagatttcacttcttatgagaagttctatgatgagttcaatgctgctgccgccactcagtttggagctggctgggcctggcttgcttacgcagacaacaaactcaaagtagtgaaaactcccaatgctgtgaacccccttgtgcttggctctttcccattgcttaccattgatgtctgggagcatgcatactatctcgacttccagaaccgcagaccggattacataaagacattcatgaacaatcttgtgtcttgggaggctgttagttccagacttgaggctgccaaggctgcttcttcctga

SEQ ID NO: 106496 - protein, 212 aa, Brassica napus
MAASAAVTANYVLKPPPYPLDALEPHMSKQTLEFHWGKHHRAYVDNLKKQVLGSELEGKPLEHIIQNTYNNGDLLPPFNNAAQAWNHEFFWESMKPGGGGKPSGELLALLERDFTSYEKFYDEFNAAAATQFGAGWAWLAYADNKLKVVKTPNAVNPLVLGSFPLLTIDVWEHAYYLDFQNRRPDYIKTFMNNLVSWEAVSSRLEAAKAASS

SEQ ID NO: 106497 - DNA, 729 bp, Brassica napus
  CDS (1)..(729)
atgatcatcgttgtttctatcatcctccttactgttttcgcgatgagcattgacgttggaacaggaaaaagtaccaccatggacccgtgtcttgagtcgatgaagaccgcttcacttcctgatcttccctacgcttacgatgcactagagccagcgatcagcgaggagatcatgcggttgcaccaccagaaacaccaccagacttacgttactaattacaacaaagccctcgaacatctccgctccgccttggccgatggtgatcactcctccgtcgtcaaacttcagagccaaatcaagttcaacggcggaggtcacgttaaccatgcaatcttctggaaaaacctagcccctgttcatgaaggaggtggtaagccaccgcacgatcctttgtcttcggctatagatgctcattttggctccttagaagaattaatgcaaaagatgaacaccgaaggtgctgctgtgcagggatctggatgggtgtggtttggactagacaaagagctaaagagacttgtcgtggagaccacagctaatcaggatccattggtgactaaaggatcacacctggttcctctagtcggaatagacgtatgggagcacgcctactatccacagtacaaaaatgcaagagcagagtacttgaagaacatatggactgtgatcaactggaaatacgcttcggacatattcgtgaagcacaatcgagatctaaacgagttttag

SEQ ID NO: 106498 - protein, 242 aa, Brassica napus
MIIVVSIILLTVFAMSIDVGTGKSTTMDPCLESMKTASLPDLPYAYDALEPAISEEIMRLHHQKHHQTYVTNYNKALEHLRSALADGDHSSVVKLQSQIKFNGGGHVNHAIFWKNLAPVHEGGGKPPHDPLSSAIDAHFGSLEELMQKMNTEGAAVQGSGWVWFGLDKELKRLVVETTANQDPLVTKGSHLVPLVGIDVWEHAYYPQYKNARAEYLKNIWTVINWKYASDIFVKHNRDLNEF

SEQ ID NO: 106499 - DNA, 648 bp, Brassica napus
  CDS (1)..(648)
atggctgcttcaagtgctgtaaccgctgactacgttctcaagccacctccatactctctggatgctttggagccgtttatgagccgacaaactctggagtttcactggggcaagcatcacagggcttacgtggaaaacctcaagaaacaggttcttggatccgatcttgaaggcaagaccttagaccacatcatcctcaacacttacaacaatggcgacctactccctgctttcaacaacgctgctcaggcatggaaccacgagttcttctgggaatcaatgaaaccaggtggtggtggaaaaccatcaggagagcttcttgctcggcttgaaagagatttcacttcttatgagaagttttatgatgagttcaatgctgctgctgccactcaattcggagctggctgggcctggcttgcttacgcagataacaaactcaaagtaatgaaaactccaaatgctgtgaatccccttgtgcttggttcttttccattgcttaccattgacgtctgggagcatgcttactatctagactttcagaatcgaagaccggattacataaagacattcatgaacaatcttgtgtcttgggaagctgttagttccagacttcacgctgccaaggctgcttcttcctcttctgcttaa

SEQ ID NO: 106500 - protein, 215 aa, Brassica napus
MAASSAVTADYVLKPPPYSLDALEPFMSRQTLEFHWGKHHRAYVENLKKQVLGSDLEGKTLDHIILNTYNNGDLLPAFNNAAQAWNHEFFWESMKPGGGGKPSGELLARLERDFTSYEKFYDEFNAAAATQFGAGWAWLAYADNKLKVMKTPNAVNPLVLGSFPLLTIDVWEHAYYLDFQNRRPDYIKTFMNNLVSWEAVSSRLHAAKAASSSSA

SEQ ID NO: 106501 - DNA, 726 bp, Brassica napus
  CDS (1)..(726)
atgagcatcgttgtttctatcttccttcttactgtttttgcgatgagccttgacgtcggaacaggaaaaaccaccatggaaccgtgtctcgaatcgatgaagaccgcttcactacctgatctaccctacgcttacgatgccctagagccagcgatcagcgaggagatcatgcgcttgcaccacctgaaacaccaccagacttacgttactaattacaacaaagccctcgaccatctccgttccgccttgtccagtggtgatcactcctccgtcgtcaaacttcagagccaaatcaagttcaacggcggaggtcacgttaaccatgcaatcttctggaaaaacctagcccctgttcatgaaggaggtggtaagccacctcaggatcctctgtcttctgcgatagatgctcacttcggatccttagaggagttgatgcaaaaaatgaactctgagggtgctgctgtgcagggatctggatgggtgtggtttgggttagacaaagagctaaagagacttgtcgttgagaccacagctaatcaggatccattggtgactaaaggatcacacttggttcctctgatcggaatagacgtatgggagcacgcctactatccacagtacaaaaatgcaagagcggagtacttgaagaacatatggactgtgatcaactggaaatacgcttcagacatattcgagaagcacaaccgaggtctaaacgagttttag

SEQ ID NO: 106502 - protein, 241 aa, Brassica napus
MSIVVSIFLLTVFAMSLDVGTGKTTMEPCLESMKTASLPDLPYAYDALEPAISEEIMRLHHLKHHQTYVTNYNKALDHLRSALSSGDHSSVVKLQSQIKFNGGGHVNHAIFWKNLAPVHEGGGKPPQDPLSSAIDAHFGSLEELMQKMNSEGAAVQGSGWVWFGLDKELKRLVVETTANQDPLVTKGSHLVPLIGIDVWEHAYYPQYKNARAEYLKNIWTVINWKYASDIFEKHNRGLNEF

SEQ ID NO: 106503 - DNA, 792 bp, Brassica napus
  CDS (1)..(792)
atggcttcttgtcttgtgacgacaagcagtttctgtactattacagattctagtatacgtttgaaatcctccaagcttgtccatctgagtaatcagcagagaagacgctctcttgggtcacgaggcggtttaaaggttgaagcttactatggcctaaagacccctccttatcctcttgatgctttggaaccgtacatgagcaaaagaacactagaagtgcattggggtaaacaccaccgaggctacgtagacaatctaaacaaacagttagggaaagatgataaactctatggatacaccatggaagagcttatcaaggccacatacaacaacgggaatcctttgcctgagttcaacaacgctgcgcaggtctataaccatgatttcttctgggagtcgatgcaacctggtggtggagacatgcctcaaaagggtgttcttgagcagattgagaaagattttgggtcatttacgaatttcagagagaagttcactaatgctgctcttactcagtttggttctggctgggtttggcttgttttgaagagggaagagaggagacttgaagtggtgaaaacctcaaacgccattaacccacttgtgtgggatgatattccaatcatcagcttggatgtatgggagcactcttattatatagactacaagaacgagaggggaaagtacataaacacgtttctgaaccatttggtgtcgtggaacgctgcaatgagtaggatggcacgtgctgaggcctttgtgaatcttggcgaacccaacatcccaattgcctaa

SEQ ID NO: 106504 - protein, 263 aa, Brassica napus
MASCLVTTSSFCTITDSSIRLKSSKLVHLSNQQRRRSLGSRGGLKVEAYYGLKTPPYPLDALEPYMSKRTLEVHWGKHHRGYVDNLNKQLGKDDKLYGYTMEELIKATYNNGNPLPEFNNAAQVYNHDFFWESMQPGGGDMPQKGVLEQIEKDFGSFTNFREKFTNAALTQFGSGWVWLVLKREERRLEVVKTSNAINPLVWDDIPIISLDVWEHSYYIDYKNERGKYINTFLNHLVSWNAAMSRMARAEAFVNLGEPNIPIA

SEQ ID NO: 106505 - DNA, 696 bp, Brassica napus
  CDS (1)..(696)
atggcgattcgttctgtattgagcagaagaaccctatccagcctaaaggagtcgtcttctaagcttctgggactcagaggaatccagaccttcacgcttcctgatctaccctatgattacagcgcgctggagccggcgataagcggcgagattatgcagattcatcaccagaagcatcaccagacttacgtcactaattacaacaatgccctcgagcagcttgatcaggccgtgaacaagggagacgcttcaactgttgtcaagcttcatagcgccatcaagttcaacggcggaggtcatgtgaaccattcgattttctggaagaatcttgctcctgtcaatcaaggtggtggagagccaccgaagggagcacttggtggagctattgacactcactttggctctcttgaaggtttggtgaaaaagatgagtgctgaaggtgctgctctgcaaggctcgggatgggtgtggctcggtttagacaaagaacttaagaagcttgtggttgacacaaccgccaatcaggatccacttgtgacaaaaggagcaagcttggttcctctggtgggtatagatgtttgggagcacgcctactacttgcagtacaagaatgtgaggccggattatctgaagaacgtgtggaaagtgatcaactggaaatacgcaagcgaagtttatgagagtgaatgcaagtga

SEQ ID NO: 106506 - protein, 231 aa, Brassica napus
MAIRSVLSRRTLSSLKESSSKLLGLRGIQTFTLPDLPYDYSALEPAISGEIMQIHHQKHHQTYVTNYNNALEQLDQAVNKGDASTVVKLHSAIKFNGGGHVNHSIFWKNLAPVNQGGGEPPKGALGGAIDTHFGSLEGLVKKMSAEGAALQGSGWVWLGLDKELKKLVVDTTANQDPLVTKGASLVPLVGIDVWEHAYYLQYKNVRPDYLKNVWKVINWKYASEVYESECK

SEQ ID NO: 106507 - DNA, 696 bp, Brassica napus
  CDS (1)..(696)
atggcgattcgttctttagccagcagaagaaccctagccggccttaaggagacatcttcgaggcttcttggtctccgatcaatccagaccttcacgcttcctgatctcccctatgactacagcgcgctggagccggcgatcagcggcgagattatgcagatccatcaccagaagcatcaccaagcgtacgtcactaattacaacaatgctctcgagcagctcgatcaggccgtcaacaagggagacgcttccaccgtcgttaagttgcagagcgccatcaagttcaacggcggaggtcatgtgaaccactctattttctggaagaaccttgctcctgtcaaggaaggtggtggagagccaccaaagggagctcttggtggagctattgatactcactttggctcccttgaaggtttggtgaagaagatgagtgctgaaggtgctgctctgcaaggctcaggatgggtgtggctcggtttagacaaagagcttaagactcttgtggttgacacaacagccaatcaggatccacttgtgacgaaaggaggaagcttggttcctctggtgggtattgatgtttgggagcacgcctactacttgcagtacaagaatgtgaggccggagtatctgaagaacgtgtggaaagtgatcaattggaaatatgcaagcgaagtttatgagaaggagtgcaagtga

SEQ ID NO: 106508 - protein, 231 aa, Brassica napus
MAIRSLASRRTLAGLKETSSRLLGLRSIQTFTLPDLPYDYSALEPAISGEIMQIHHQKHHQAYVTNYNNALEQLDQAVNKGDASTVVKLQSAIKFNGGGHVNHSIFWKNLAPVKEGGGEPPKGALGGAIDTHFGSLEGLVKKMSAEGAALQGSGWVWLGLDKELKTLVVDTTANQDPLVTKGGSLVPLVGIDVWEHAYYLQYKNVRPEYLKNVWKVINWKYASEVYEKECK

SEQ ID NO: 106509 - DNA, 693 bp, Brassica napus
  CDS (1)..(693)
atggcgattcgttccgtagccagcagaaaaaccctagcgggcctaaaggagacatcttcgaggcttcttggtctccgatcaatccagaccttcacgcttcctgatctcccctatgattacagcgccttggagccggcgatcagcggcgagatcatgcagatccatcaccagaagcatcaccaggcgtacgtcactaattacaacaatgccctcgagcagctggatcaggccgtcaacaagggagacgcttccggcgtcgttaagttgcagagcgccatcaagttcaacggcggaggtcatgtgaaccactctattttctggaagaatcttgctcctgtcaaggaaggtgggggagagccaccaaagggagctcttggctacgccattgacactcattttggctcccttgaaggtttggtgaagaagatgagtgctgaaggtgctgctctgcaagggtcaggatgggtgtggctcggtttagacaaagagcttaagaagcttgtggttgacacaaccgccaatcaggatccacttgtgacaaaaggaggaagcttggttcctctggtgggtattgatgtttgggagcacgcctactatttacagtacaagaatgtgaggccggagtatctgaagaacgtgtggaaagtggtcaactggaaatatgcaagcgaagtttataaggagtgcaagtga

SEQ ID NO: 106510 - protein, 230 aa, Brassica napus
MAIRSVASRKTLAGLKETSSRLLGLRSIQTFTLPDLPYDYSALEPAISGEIMQIHHQKHHQAYVTNYNNALEQLDQAVNKGDASGVVKLQSAIKFNGGGHVNHSIFWKNLAPVKEGGGEPPKGALGYAIDTHFGSLEGLVKKMSAEGAALQGSGWVWLGLDKELKKLVVDTTANQDPLVTKGGSLVPLVGIDVWEHAYYLQYKNVRPEYLKNVWKVVNWKYASEVYKECK

SEQ ID NO: 106511 - DNA, 879 bp, Brassica napus
  CDS (1)..(879)
atgatgatgacaaccacttcctcgttgctctcgccgtgctctctgcttccttctcaagggccaaaccggcaaacgcaatggaaaagacacgaaaagagacagttctcgagaaaggtagttgtttctggtgttgtcagagcgggatttgagcttaagccacctccctatccccttgatgctctagaaccgcatatgagccgggaaacaatggattatcattggggcaagcatcacagaacttacgttgagaacctgaacaagcaaatcctaggcacagatctagatggattgtcattggaagaggttgtgctactttcatataacagaggcaatatgcttcctgtcttcaataatgccgcacaggcatggaaccatgagttcttctgggagtctatccaacccggaggtggaggaaagccaagtggagatctcctcagactgatagagagagattttgggtcttttgatgactttgtagaaaggttcaaggcagctgcatcctccaactttggttctggttggacttggcttgcatacaaggcgaacagactcgacgttgcaaatgcagtaaacccgcttccaaaggaggaagacaagaagcttgtgatagtaaaaactcccaatgcagtgaatccactcgtatgggactattctccacttctcaccattgatacctgggagcacgcttactatctggattttgagaaccgaagagtcgaatacataaatacattcatggaaaagcttgtgtcatgggaaactgtaagcacaaggctagaatctgcaatggctcgagcagctcaaagagaacaagaaggcactgatacagaagatgaagagattccagatgatgaagagccagaggttttacttagatga

SEQ ID NO: 106512 - protein, 292 aa, Brassica napus
MMMTTTSSLLSPCSLLPSQGPNRQTQWKRHEKRQFSRKVVVSGVVRAGFELKPPPYPLDALEPHMSRETMDYHWGKHHRTYVENLNKQILGTDLDGLSLEEVVLLSYNRGNMLPVFNNAAQAWNHEFFWESIQPGGGGKPSGDLLRLIERDFGSFDDFVERFKAAASSNFGSGWTWLAYKANRLDVANAVNPLPKEEDKKLVIVKTPNAVNPLVWDYSPLLTIDTWEHAYYLDFENRRVEYINTFMEKLVSWETVSTRLESAMARAAQREQEGTDTEDEEIPDDEEPEVLLR

SEQ ID NO: 106513 - DNA, 792 bp, Brassica napus
  CDS (1)..(792)
atggcttcttgtcttgtgacgacaagcagtttctgtactgtttcagattctagtatacgtttgaaatcctccaagcttgtccatctgagtaatcagcagagaagacgctctcttggttcacgaggtggtttaaaggttgaagcttactatggcctaaagacccctccttatcctcttgatgctttggaaccgtacatgagccaaagaacactagaagtgcattggggtaaacaccaccgaggctacgtggacaatctaaacaaacagttagggaaagatgataaactctatggatacaccatggaagagcttatcaaggccacatacaacaacgggaatcctttgcctgagttcaacaacgctgctcaggtctataaccatgatttcttctgggagtcgatgcaacctggtggtggagacatgcctcaaaagggtgttcttgagcagattgagaaagattttgggtcatttacgaatttcagagagaagttcactaatgctgctcttactcagtttggttctggctgggtttggcttgttttgaagagggaagagaggagacttgaagtggtgaaaacctcaaacgccattaacccacttgtgtgggatgatattccaatcatcagcttggatgtatgggagcactcttattatatagactacaagaacgagaggggaaagtacataaacacgtttctgaaccatttggtgtcgtggaacgctgcaatgagtaggatggcacgtgctgaggcgtttgtgaatcttggtgaacccaacatcccaattgcctaa

SEQ ID NO: 106514 - protein, 263 aa, Brassica napus
MASCLVTTSSFCTVSDSSIRLKSSKLVHLSNQQRRRSLGSRGGLKVEAYYGLKTPPYPLDALEPYMSQRTLEVHWGKHHRGYVDNLNKQLGKDDKLYGYTMEELIKATYNNGNPLPEFNNAAQVYNHDFFWESMQPGGGDMPQKGVLEQIEKDFGSFTNFREKFTNAALTQFGSGWVWLVLKREERRLEVVKTSNAINPLVWDDIPIISLDVWEHSYYIDYKNERGKYINTFLNHLVSWNAAMSRMARAEAFVNLGEPNIPIA

SEQ ID NO: 106515 - DNA, 735 bp, Glycine max
  CDS (1)..(735)
atggcctcattgggtgggttacaaaatctaagcggcatcaattttcttatcaaaaaagagggtccaaaagtcaatgcgaagttcgagctgaagccgccaccatatccactgaatggtttggagccggtgatgagccagcagacacttgagtttcattgggggaaacaccacaagacatatgtggaaaatctgaaaaaacaaattgttgggacagagcttgatgggaaatcactagaagagattatagtgacatcatataataagggtgacattcttccagctttcaacaatgcagcacaggtatggaaccatgacttcttctgggagtgcatgaaaccaggtggaggtggaaagccatccggggagcttctagaactgattgaaagagactttggctcatttgaaaaattccttgatgagtttaaggctgctgctgcaacacaatttggttcaggatgggcttggcttgcatatagagcaagcaaatttgatggggaaaatgcagcaaatcctccttcaccagatgaggacaacaagctagtggtgctcaagagtcccaatgctgtgaacccccttgtttggggaggctattatccacttcttaccattgatgtttgggagcatgcttactaccttgattttcagaaccggcgccctgattatatatcagtgttcatggataagcttgtttcctgggatgcagtgagttctagacttgaacaagcaaggctttaa

SEQ ID NO: 106516 - protein, 244 aa, Glycine max
MASLGGLQNLSGINFLIKKEGPKVNAKFELKPPPYPLNGLEPVMSQQTLEFHWGKHHKTYVENLKKQIVGTELDGKSLEEIIVTSYNKGDILPAFNNAAQVWNHDFFWECMKPGGGGKPSGELLELIERDFGSFEKFLDEFKAAAATQFGSGWAWLAYRASKFDGENAANPPSPDEDNKLVVLKSPNAVNPLVWGGYYPLLTIDVWEHAYYLDFQNRRPDYISVFMDKLVSWDAVSSRLEQARL

SEQ ID NO: 106517 - DNA, 942 bp, Glycine max
  CDS (1)..(942)
atgaatttgttatcgcaatccactgccccttctacttctctatcaccttcctgttttcttccacgccaccctcatggttccacctggttctcttctggtaccttcaaattcttgaagaaagagagtagatgtctaaggaaagctggacgtactaaaatcactgcaaagtttgagctgaagccaccaccatatcctttgagtgctttggagccaattatgagtcaggagacactcgaataccattgggggaagcatcataggacttatgtagataatctgaacaggcaaattgatggaacagatctagatgggaattcactggagaacactatagttattacgtacaataagggtgacattcttccagctttcaacaatgcagcgcaggcatggaaccatgacttcttctgggagtccatgaaacctggtggtggtggaaggccatctggggatcttctaaatctgattgaaagagactttggttcattcgaaaaattccttgatgagttcaagactgctgcttcaacacagtttggttcaggatgggcatggcttgcatataaagaaagcagacttgacgtggaaaatgctgtgaaccctcttcaatctgatgaggacaagaagctagttgtggtgaagactcccaatgctgtaaacccccttgtttggaactactatcatccactccttaccattgatgtttgggagcatgcttacttcattgactttcagaaccagcgccgtgattatatatcagttttcatggataagcttgtgtcttgggatgcagtcagctcaagacttgagcaagccaaggctctaatcaaggagagagagagagaggctgagaggaaaagaagagaggaagaagagaaacggtcaagcagtgaagccattcctgagatatattctgatggtgatgctgacttggatgcagaatga

SEQ ID NO: 106518 - protein, 313 aa, Glycine max
MNLLSQSTAPSTSLSPSCFLPRHPHGSTWFSSGTFKFLKKESRCLRKAGRTKITAKFELKPPPYPLSALEPIMSQETLEYHWGKHHRTYVDNLNRQIDGTDLDGNSLENTIVITYNKGDILPAFNNAAQAWNHDFFWESMKPGGGGRPSGDLLNLIERDFGSFEKFLDEFKTAASTQFGSGWAWLAYKESRLDVENAVNPLQSDEDKKLVVVKTPNAVNPLVWNYYHPLLTIDVWEHAYFIDFQNQRRDYISVFMDKLVSWDAVSSRLEQAKALIKEREREAERKRREEEEKRSSSEAIPEIYSDGDADLDAE

SEQ ID NO: 106519 - DNA, 768 bp, Oryza sativa
  CDS (1)..(768)
atggcggctttcgcctccgctctccgcgttctcccctcgccgccggctgcggtgcctcgtccgcttcgctcgagagaacaaaggcagggctgtagatctcgaaggtattcaaaagtcgtggcttactacgctctcactactccgccggataaacttgatgccctggaaccttatattagcaagaggacagttgaacttcactggggtaagcatcagcaagactatgtggatagcttgaataagcagcttgctaccagcatgttctatgggtacactctggaggaactaataaaagaagcatacaacaacggcaacccattaccagaatataataatgcagcacaggtatggaaccatcacttcttctgggaatcaatgcagccagaaggtggtgggtcaccagggcgaggtgtcctgcagcagatagagaaggattttggctcttttactaattttagggaagagtttatacgctcagcattatcacttttggggtctggctgggtttggcttgtcttgaagagaaaagaacgaaaattttcggtagtccatacacaaaatgccatcagtccacttgcacttggtgatattccactcatcaatctagacttgtgggagcatgcttactacttggattacaaggatgacaggcgaatgtatgttacaaactttatcgaccatcttgtctcttgggatactgtcactctacgcatgatgcgcgctgaggcttttgtgaaccttggtgaaccaaatatcccagttgcatga

SEQ ID NO: 106520 - protein, 255 aa, Oryza sativa
MAAFASALRVLPSPPAAVPRPLRSREQRQGCRSRRYSKVVAYYALTTPPDKLDALEPYISKRTVELHWGKHQQDYVDSLNKQLATSMFYGYTLEELIKEAYNNGNPLPEYNNAAQVWNHHFFWESMQPEGGGSPGRGVLQQIEKDFGSFTNFREEFIRSALSLLGSGWVWLVLKRKERKFSVVHTQNAISPLALGDIPLINLDLWEHAYYLDYKDDRRMYVTNFIDHLVSWDTVTLRMMRAEAFVNLGEPNIPVA

SEQ ID NO: 106521 - DNA, 1161 bp, Zea mays
  CDS (1)..(1161)
atggcgtccaccgcgctggtggcagtggcagtggggggcgccatttctctcggtctcgtcgcctcctctggcgtcgcgtcctgctccctgcgcgccggcggcgactcccggcggtttggcccccgactcgtcctcctgcggagaggaggcgccgagggggaggggacgaggacacggaattgcccaatatttcgttgtgccaataaggtggacgttgtgaccgaggatgacagcgtcgatggtgacgttaccgacgatggagaagaccttgaggatgcagctgatgacgccattgatgctgatgttggtaccgaagatgaactggagtcttcgctgcctgaggatgttgagtggataaagcagcagccacttccttatcctttggatgctctggagccatacataagcaaggagacggtggagcagcactggggagttcaccagcagattcacgtggaccggctcaatggcatgatcggtggcagcgagtgggaaggcatgtcgctggggcagatgatgctctcctccttcaatgagggcagggagcagccccatcctcccttcttccatgccgcacaggtatggaaccatgatttctattggcgatccatgaaacctggtggcgggggcaagccaccggaacggctcctgaagtttatcaatagagactttggctcccacgagggtatgatccggcaattcatggatgctgcactaactcagttcggttctggatgggtttggctttcctacaaaggaagtgggttgccttctgtgaaatcgagaagccccatcccatcggacaaccatggtaggctggtgatctcaaagactccaaatgccatcaaccctcttgtctggggccactctccactcctcgcgattgatgtttgggagcatgcatactatctggattacgaggatcgaagggctgactatgtttctgcgattctggagaagcttgtgtcgtgggaaacagtcgagtccaggctcgcgaaagccgttgcacgggcggtagaaagagatgagcatctccgcagaaggattctaaggaaacagcgtttagctcaggcgaacggacagagcagagctaggcctcgcgctcggcaagggaggcaaggagaccaggaagtcgccagaagcagtcccgtggaggcatga

SEQ ID NO: 106522 - protein, 386 aa, Zea mays
MASTALVAVAVGGAISLGLVASSGVASCSLRAGGDSRRFGPRLVLLRRGGAEGEGTRTRNCPIFRCANKVDVVTEDDSVDGDVTDDGEDLEDAADDAIDADVGTEDELESSLPEDVEWIKQQPLPYPLDALEPYISKETVEQHWGVHQQIHVDRLNGMIGGSEWEGMSLGQMMLSSFNEGREQPHPPFFHAAQVWNHDFYWRSMKPGGGGKPPERLLKFINRDFGSHEGMIRQFMDAALTQFGSGWVWLSYKGSGLPSVKSRSPIPSDNHGRLVISKTPNAINPLVWGHSPLLAIDVWEHAYYLDYEDRRADYVSAILEKLVSWETVESRLAKAVARAVERDEHLRRRILRKQRLAQANGQSRARPRARQGRQGDQEVARSSPVEA

SEQ ID NO: 106523 - DNA, 708 bp, Zea mays
  CDS (1)..(708)
atggctctccgcaccctggcatcgaagaaggtcctatccttcccgttcggcggcgcgtgccggccgttggcggcggcggcgtctgcgaggggggtgacgacggtcacactccctgacctctcctacgacttcggcgcgctggaaccggccatctcgggggagatcatgcgcttgcaccaccagaagcaccacgccacctacgtcgccaactacaacaaggcgctggagcagcttgacactgccgtcgccaagggcgacgcctccgctgtcgtccagctgcagggcgccatcaagttcaacggcggcggtcatgtgaaccattcaatcttctggaagaacctcaagcccattagcgaaggtggcggggagccgcctcatgggaaacttggctgggccatcgatgaggattttggttcgtttgaggcacttgtaaagaagatgaatgcagaaggcgctgctttacaagggtctggatgggtgtggttagctttggataaagaggcaaaaaagctttcagttgaaacaacagctaatcaggatcctctggtgactaaaggtgcaagcttggttccgctgttggggattgatgtctgggaacatgcatactatctgcagtacaagaatgttaggccggattacctgaacaacatctggaaggtgatgaactggaaatatgctggagaggtgtacgaaaatgttcttgcttga

SEQ ID NO: 106524 - protein, 235 aa, Zea mays
MALRTLASKKVLSFPFGGACRPLAAAASARGVTTVTLPDLSYDFGALEPAISGEIMRLHHQKHHATYVANYNKALEQLDTAVAKGDASAVVQLQGAIKFNGGGHVNHSIFWKNLKPISEGGGEPPHGKLGWAIDEDFGSFEALVKKMNAEGAALQGSGWVWLALDKEAKKLSVETTANQDPLVTKGASLVPLLGIDVWEHAYYLQYKNVRPDYLNNIWKVMNWKYAGEVYENVLA

SEQ ID NO: 106525 - DNA, 708 bp, Zea mays
  CDS (1)..(708)
atggctctccgcaccctggcatcgaagaaggtcctatccttcccgttcggcggcgcgggccggccgttggcggcggcggcgtctgcgaggggggtgacgacggtcacactccccgacctctcctacgacttcatcgcgctggaaccggccatctcgggggagatcatgcgcttgcaccaccaaaagcaccacgccacctacgtcgccaactacaacaaggcgctggagcagcttgacactgccgtctccaagggcgacgcctccgctgtcgtccagctgcagggcgccatcaagttcaacggcggtggtcatgtgaaccattcaatcttctggaagaacctcaagcccattagcgaaggtggcggggagccgcctcatgggaaacttggctgggccatcgatgaggattttggttcgtttgaggcacttgtaaagaagatgaatgcagaaggcgctgctttacaagggtctggatgggtgtggttagctttggataaagaggcaaaaaagctttcagttgaaacaacagctaatcaggatcctctggtgactaaaggtgcaagcttggttccgctgttggggattgatgtctgggaacatgcatactacctgcagtacaagaatgttaggccggattacctgaacaacatctggaaggtgatgaactggaaatatgctggagaggtgtacgaaaatgttcttgcttga

SEQ ID NO: 106526 - protein, 235 aa, Zea mays
MALRTLASKKVLSFPFGGAGRPLAAAASARGVTTVTLPDLSYDFIALEPAISGEIMRLHHQKHHATYVANYNKALEQLDTAVSKGDASAVVQLQGAIKFNGGGHVNHSIFWKNLKPISEGGGEPPHGKLGWAIDEDFGSFEALVKKMNAEGAALQGSGWVWLALDKEAKKLSVETTANQDPLVTKGASLVPLLGIDVWEHAYYLQYKNVRPDYLNNIWKVMNWKYAGEVYENVLA

SEQ ID NO: 106527 - DNA, 22 bp, Artificial sequence
  primer
atgagctataccctgccatccc

SEQ ID NO: 106528 - DNA, 24 bp, Artificial sequence
  primer
ttattttttcgccgcaaaacgtgc

SEQ ID NO: 106529 - protein, 251 aa, Artificial sequence
  consensus sequence
  Variant (3)..(3): Xaa in position 3 is any amino acid
  Variant (4)..(11): Xaa in position 4 to 11 is any or no amino acid
  Variant (13)..(13): Xaa in position 13 is any amino acid
  Variant (15)..(16): Xaa in position 15 to 16 is any amino acid
  Variant (17)..(17): Xaa in position 17 is any or no amino acid
  Variant (22)..(30): Xaa in position 22 to 30 is any amino acid
  Variant (31)..(31): Xaa in position 31 is any or no amino acid
  Variant (33)..(34): Xaa in position 33 to 34 is any amino acid
  Variant (38)..(39): Xaa in position 38 to 39 is any amino acid
  Variant (42)..(44): Xaa in position 42 to 44 is any amino acid
  Variant (46)..(74): Xaa in position 46 to 74 is any amino acid
  Variant (75)..(93): Xaa in position 75 to 93 is any or no amino acid
  Variant (96)..(98): Xaa in position 96 to 98 is any amino acid
  Variant (100)..(103): Xaa in position 100 to 103 is any amino acid
  Variant (105)..(107): Xaa in position 105 to 107 is any amino acid
  Variant (108)..(121): Xaa in position 108 to 121 is any or no amino acid
  Variant (123)..(128): Xaa in position 123 to 128 is any amino acid
  Variant (129)..(134): Xaa in position 129 to 134 is any or no amino acid
  Variant (136)..(139): Xaa in position 136 to 139 is any amino acid
  Variant (142)..(156): Xaa in position 142 to 156 is any amino acid
  Variant (157)..(159): Xaa in position 157 to 159 is any or no amino acid
  Variant (164)..(164): Xaa in position 164 is any amino acid
  Variant (167)..(172): Xaa in position 167 to 172 is any amino acid
  Variant (173)..(189): Xaa in position 173 to 189 is any or no amino acid
  Variant (191)..(196): Xaa in position 191 to 196 is any amino acid
  Variant (198)..(205): Xaa in position 198 to 205 is any amino acid
  Variant (206)..(217): Xaa in position 206 to 217 is any or no amino acid
  Variant (219)..(222): Xaa in position 219 to 222 is any amino acid
  Variant (224)..(224): Xaa in position 224 is any amino acid
  Variant (231)..(232): Xaa in position 231 to 232 is any amino acid
  Variant (234)..(234): Xaa in position 234 is any amino acid
  Variant (236)..(236): Xaa in position 236 is any amino acid
  Variant (238)..(239): Xaa in position 238 to 239 is any amino acid
  Variant (241)..(248): Xaa in position 241 to 248 is any amino acid
  Variant (249)..(249): Xaa in position 249 is any or no amino acid
LPXXXXXXXXXLXYXXXALEPXXXXXXXXXXHXXKHHXXYVXXXNXXXXXXXXXXXXXXXXXXXXXXXXXXXXXXXXXXXXXXXXXXXXXXXXNHXXXWXXXXPXXXXXXXXXXXXXXXXXPXXXXXXXXXXXXIXXXXGSXXXXXXXXXXXXXXXXXXGSGWXWLXXXXXXXXXXXXXXXXXXXXXXXLXXXXXXNXXXXXXXXXXXXXXXXXXXXPXXXXDXWEHAYYXXYXNXRXXYXXXXXXXXXNW

SEQ ID NO: 106530 - protein, 18 aa, Artificial sequence
  protein pattern
  Variant (2)..(2): Xaa in position 2 is any amino acid
  Variant (9)..(9): Xaa in position 9 is Ile or Leu
  Variant (10)..(12): Xaa in position 10 to 12 is any amino acid
  Variant (14)..(14): Xaa in position 14 is any amino acid
  Variant (15)..(15): Xaa in position 15 is Lys or Arg
  Variant (16)..(17): Xaa in position 16 to 17 is any amino acid
  Variant (18)..(18): Xaa in position 18 is Phe or Tyr
DXWEHAYYXXXXNXXXXX

SEQ ID NO: 106531 - protein, 14 aa, Artificial sequence
  protein pattern
  Variant (2)..(2): Xaa in position 2 is His, Trp or Tyr
  Variant (3)..(3): Xaa in position 3 is Asp, Gly, Gln, Ser or Thr
  Variant (7)..(7): Xaa in position 7 is any amino acid
  Variant (8)..(8): Xaa in position 8 is Ala, Gly, Asn, Ser or Thr
  Variant (10)..(11): Xaa in position 10 to 11 is any amino acid
  Variant (12)..(13): Xaa in position 12 to 13 is any or no amino acid
HXXKHHXXYXXXXN

SEQ ID NO: 106532 - DNA, 453 bp, Escherichia coli
  CDS (1)..(453): transl_table=11
atgaaaatgcccataaagcgggtgcagacattaatgtgctggaacacgcgctcaaactggtggcggataagcgttaacttttcaccaaaaagtagtcaaattcaccacgccctgcgcaccgtcgcggggcgttttgctgttaaatcaatagattatttttggcatgattcttgtaatgccagcaagagatttcatatttgggagagcatcatgctggaactactttttgtgattggcttttttgtcatgctgatggtcaccggcgtttcgttgctgggcattatcgccgcgctggttgtggcgacggccattatgttcctcggcggtatgctggcattgatgattaagttgctgccgtggttactactggcgattgcggtggtgtgggttattaaggcgattaaagcaccaaaagtgccgaaatatcagcgttatgaccgctggcgttactaa

SEQ ID NO: 106533 - protein, 150 aa, Escherichia coli
MKMPIKRVQTLMCWNTRSNWWRISVNFSPKSSQIHHALRTVAGRFAVKSIDYFWHDSCNASKRFHIWESIMLELLFVIGFFVMLMVTGVSLLGIIAALVVATAIMFLGGMLALMIKLLPWLLLAIAVVWVIKAIKAPKVPKYQRYDRWRY

SEQ ID NO: 106534 - DNA, 453 bp, Escherichia coli CFT073
  CDS (1)..(453): transl_table=11
gtgaaaatgcccataaagcgggtgcagacattaatgtgctggaacacgcgctcaaactggtggcggataagcgttaacttttcaccaaaaagtagtcaaattcaccacgccctgcgcaccgtcgcggggtgttttgctgttaaatcaacagattatttttggcatgattcttgtaatgccagcaagagatttcatatttgggagagcatcatgctggaactactttttgtaattggcttttttgtcatgctgatggtcaccggtgtttcgttgctgggtattatcgccgcgctgattgtggcgacggcctttatgttcctcggcggtatgctggcattgatgattaagttgctgccgtggctgctgttggcggttgcggtggtgtgggtgatcagggcaattaaagcaccaaaagtgccgaaatatcagcgttatgaccgctggcgttactaa

SEQ ID NO: 106535 - protein, 150 aa, Escherichia coli CFT073
MKMPIKRVQTLMCWNTRSNWWRISVNFSPKSSQIHHALRTVAGCFAVKSTDYFWHDSCNASKRFHIWESIMLELLFVIGFFVMLMVTGVSLLGIIAALIVATAFMFLGGMLALMIKLLPWLLLAVAVVWVIRAIKAPKVPKYQRYDRWRY

SEQ ID NO: 106536 - DNA, 24 bp, Artificial sequence
  primer
atgaaaatgcccataaagcgggtg

SEQ ID NO: 106537 - DNA, 23 bp, Artificial sequence
  primer
ttagtaacgccagcggtcataac

SEQ ID NO: 106538 - DNA, 1503 bp, Escherichia coli
  CDS (1)..(1503): transl_table=11
atgagtgaacccctgttaattgcccgcacgccggacacagaactgtttttactgccgggaatggctaaccgtcatgggctgattaccggcgcaacggggacgggtaaaaccgttacgctgcaaaaactggcggagtcattgtcggaaatcggcgtgccggtgtttatggctgatgtgaaaggcgatctgaccggcgtcgcgcaggcaggaacggtgtcggaaaaactgctcgcaaggcttaaaaatatcggcgtcaatgactggcaaccgcatgccaatccggtggtggtgtgggatatctttggcgagaaaggccatccggtgcgggcgacggtttcggatctggggccgctgttgctggcacgactgttgaatctcaacgatgtgcaatctggcgtgctgaatatcatcttccgcattgctgacgatcaggggctgttactgctcgactttaaagatctgcgggcaattacccagtacatcggcgataacgccaaatccttccagaatcagtacggtaatatcagtagcgcatcggttggtgccatccagcgcgggctgttgtcgctggaacagcaaggcgcagcacacttctttggtgagccgatgctggatatcaaagactggatgcgcaccgatgccaacggtaaaggcgttatcaatatcctcagcgccgagaaactttatcagatgccgaaactgtacgccgccagcctgctgtggatgctttcagagttgtatgaacaattgccggaagcgggcgatctggagaaaccaaaactggtgtttttcttcgacgaggcacatctgctgtttaacgatgccccgcaggtactgctggataagattgagcaggtgataaggcttattcgctcaaaaggcgtgggcgtctggttcgtttcgcaaaacccgtctgatattccggataatgtgctcgggcagctcggtaatcgcgttcaacatgctttgcgggcttttacgccaaaagatcagaaagcagtgaaggcagcggcgcaaaccatgcgggccaatccggcgtttgataccgaaaaggcgattcaggaactgggcaccggcgaggcgttgatctcttttctggatgcgaaaggaagcccttctgtggtggagcgtgcgatggtgatcgcgccttgttcgcggatggggccggtgacggaagatgagcgtaatggcttgattaatcactctccggtgtatggcaaatatgaggatgaggtggaccgggaatccgcctatgagatgttgcaaaaaggctttcaggccagtaccgagcagcaaaataatcctcccgcgaaagggaaagaggtagcggtggatgacggcattcttggtggattgaaggatattttgttcggcactaccggaccacgcggcgggaagaaagatggtgtggtgcaaacaatggccaaaagcgccgctcgccaagtgacgaatcagattgtacgcgggatgttggggagtttgctgggggggagaagaaggtaa

SEQ ID NO: 106539 - protein, 500 aa, Escherichia coli
MSEPLLIARTPDTELFLLPGMANRHGLITGATGTGKTVTLQKLAESLSEIGVPVFMADVKGDLTGVAQAGTVSEKLLARLKNIGVNDWQPHANPVVVWDIFGEKGHPVRATVSDLGPLLLARLLNLNDVQSGVLNIIFRIADDQGLLLLDFKDLRAITQYIGDNAKSFQNQYGNISSASVGAIQRGLLSLEQQGAAHFFGEPMLDIKDWMRTDANGKGVINILSAEKLYQMPKLYAASLLWMLSELYEQLPEAGDLEKPKLVFFFDEAHLLFNDAPQVLLDKIEQVIRLIRSKGVGVWFVSQNPSDIPDNVLGQLGNRVQHALRAFTPKDQKAVKAAAQTMRANPAFDTEKAIQELGTGEALISFLDAKGSPSVVERAMVIAPCSRMGPVTEDERNGLINHSPVYGKYEDEVDRESAYEMLQKGFQASTEQQNNPPAKGKEVAVDDGILGGLKDILFGTTGPRGGKKDGVVQTMAKSAARQVTNQIVRGMLGSLLGGRRR

SEQ ID NO: 106540 - DNA, 1518 bp, Klebsiella pneumoniae
  CDS (1)..(1518): transl_table=11
atggaggaatcgaccatgagctcacccctgttgattgcgcgcacgctggataacgcgctctatttactgcccgcgatggccaaccgccatgggcttatcaccggtgcgaccggcaccggtaaaaccgtcaccctgcagaagctggctgagtcgttctcggagattggcgtgccggtatttatggccgacgtcaagggcgacctgaccggcattgccgccgcggggcagagctcagagaaactgcaggcgcggctggagaagatcggcgtcagcgactgggagccgcacgccaacccggtggtgctctgggatatctttggcgagaagggccacccggtgcgggcgacggtctccgatctcggccccctgctgctggcgcgcctgctcaatctcaacgaggtgcagagcggcgtactgaacattattttccgcatcgcggacgaccgcggcctgctgctgctcgacttcaaagacctccgcgccatcacccagtttatcggcgataacgccaagtctttccagaaccagtacggcaatattaacagcgcctcgatcggcgccatccagcgcgggctgttgaccctggagcaacagggcgccgagcacttcttcggcgagccgatgctggatattgccgactggatgcgcgtcgatgccagcggtaaaggggtgatcaatatccttagcgccgaaaagctctaccagatgccgaagctgtacgccgccagcctgctgtggatgctctccgagctctacgagcgcctgccggaagccggcgacctcgataaaccgaagctggtgttcttcttcgatgaggcgcatctgctgttcaacgacgcgccgcaggtgctgctggataaaattgaacaggtgatccgccttatccgctccaagggcgtcggcgtctactttgtctcgcagaacccggcggatattcccgacgccgtgctcggccagctgggcaaccgcgtgcagcatgccctgcgcgcttttacgccgaaggaccagaaggcggtgaaaaccgccgcccagaccatgcgcgccaacccggccttcagtaccgagcaggcgatccaggagctgggcaccggcgaggcgctgatctccttcctcgatgagaaaggcagcccgtcggtggtcgagcgggcgatggttatcgccccctgctcgcgaatggggccggtcagcgatgacgagcgcaatggtctgctgaaccactcgccgctgtacggtaagtatgaggaggaggtggaccgcgagtcggctttcgaaatgctgcagcaaggggtgcaggtcgccaccgggcagcagtcggctccgccggcgaagggccagcagaacggcgatgacgacgggctgcttggcggcctgaaagatatcctgttcggcagcaccggcccgcgcggcggaaaacgcgacggtatcgtgcagaccgcagcgaaaagcgcggttcgccaggtcaccaatcagatcgtccgcggcatgctgggcagcctgctgggcggacgcaagcgctaa

SEQ ID NO: 106541 - protein, 505 aa, Klebsiella pneumoniae
MEESTMSSPLLIARTLDNALYLLPAMANRHGLITGATGTGKTVTLQKLAESFSEIGVPVFMADVKGDLTGIAAAGQSSEKLQARLEKIGVSDWEPHANPVVLWDIFGEKGHPVRATVSDLGPLLLARLLNLNEVQSGVLNIIFRIADDRGLLLLDFKDLRAITQFIGDNAKSFQNQYGNINSASIGAIQRGLLTLEQQGAEHFFGEPMLDIADWMRVDASGKGVINILSAEKLYQMPKLYAASLLWMLSELYERLPEAGDLDKPKLVFFFDEAHLLFNDAPQVLLDKIEQVIRLIRSKGVGVYFVSQNPADIPDAVLGQLGNRVQHALRAFTPKDQKAVKTAAQTMRANPAFSTEQAIQELGTGEALISFLDEKGSPSVVERAMVIAPCSRMGPVSDDERNGLLNHSPLYGKYEEEVDRESAFEMLQQGVQVATGQQSAPPAKGQQNGDDDGLLGGLKDILFGSTGPRGGKRDGIVQTAAKSAVRQVTNQIVRGMLGSLLGGRKR

SEQ ID NO: 106542 - DNA, 1548 bp, Mesorhizobium loti MAFF303099
  CDS (1)..(1548): transl_table=11
atggctgacgataccagtattttcatcggcgccagccgcaagcccgacgacagctatcagcgcccggagcagttgctgctgcaatatgggaatcgccatggcctggtgaccggtgccaccggcaccggcaagaccgtcaccttgcagatcctggccgaagggttttcgaatgccggcgtgccggtgttctgcgccgatatcaagggcgacctgtccggcatcgcgatgatgggcacggcgcaggatttcctggtcaagcgggccgcgcaggtcaagctcgacccctacgacttccaggaattccccgtcatcttctgggatctgttcggcgagcagggccaccccatccgcgcgaccatttcggaaatgggaccacttctcctgtcgcggctgatgaacctgaccgacgcgcaggagggcatcatgaacattgccttccgcattgccgatgaagagggtctgctgcttctcgatctcaaggacctgcaggcgctgcttgccaacatcgccgagcgcgccgaagagatcagcgctcgctacggcaatgtcaccaagccatcggtgggtgccatccagcgcacgctgctggtgctggagcaacagggcgcggccaacttcttcggcgagccggctctgcgcatctccgacatcatgcgcaccacgcgtgacggtcggggcgccgtcagcgtgctggccgccgacaagctgatgatgaatccgcgcctctacgcgaccttcctgctttggctgatgtcggagctgttcgaggaactgcccgaagtcggcgatcccgaccagccgaaactggtgttcttcttcgacgaggcgcatctgctgtttgacgaggcgccgaaagtgctgatcgaccgcgtcgagcaggtggtccgcctgatccgctcgaaaggcgtcggcgtctatttcgtcacgcagaaccccctggatatccccgaaaaggtgctggcccagctcggcaatcgcgtccagcacgcgctgcgcgcctatacgccgcgtgagcagcaggcagtcaggacggcagcggaaacgttccgccccaatcccgatttcgactgcgccaccaccatcacccaactcgccactggcgaagcgctcgtctcgaccttggaggccaagggcgtgccgtccatggtgcagcgcacgctgattcgcccgccatcctcgcggctcggacccataactccggccgagcggcaaaagctgatcgtggaaagcccggtcaccggccagtatgaccaggtcatcgaccgcgaatcggccttcgagatgttgcagaaaaaggccagggacgcgcaggacgctgaagcgcaggcccagcaggcaggtacaggcggctcgcgctggaccataccgggcttcggcaacgacgatcccgcgccgcagtccggtggccgccgggcgccagcgccgcgcccctccaatcgccagactgtggccgaggccgcgatcaagtccgtggtgcgctcggtcggctcgtcggtcggacgcgccattgtgcgcgggatcctggggagcctgtcgcgcgggcgctga

SEQ ID NO: 106543 - protein, 515 aa, Mesorhizobium loti MAFF303099
MADDTSIFIGASRKPDDSYQRPEQLLLQYGNRHGLVTGATGTGKTVTLQILAEGFSNAGVPVFCADIKGDLSGIAMMGTAQDFLVKRAAQVKLDPYDFQEFPVIFWDLFGEQGHPIRATISEMGPLLLSRLMNLTDAQEGIMNIAFRIADEEGLLLLDLKDLQALLANIAERAEEISARYGNVTKPSVGAIQRTLLVLEQQGAANFFGEPALRISDIMRTTRDGRGAVSVLAADKLMMNPRLYATFLLWLMSELFEELPEVGDPDQPKLVFFFDEAHLLFDEAPKVLIDRVEQVVRLIRSKGVGVYFVTQNPLDIPEKVLAQLGNRVQHALRAYTPREQQAVRTAAETFRPNPDFDCATTITQLATGEALVSTLEAKGVPSMVQRTLIRPPSSRLGPITPAERQKLIVESPVTGQYDQVIDRESAFEMLQKKARDAQDAEAQAQQAGTGGSRWTIPGFGNDDPAPQSGGRRAPAPRPSNRQTVAEAAIKSVVRSVGSSVGRAIVRGILGSLSRGR

SEQ ID NO: 106544 - DNA, 1500 bp, Pasteurella multocida subsp. multocida str. Pm70
  CDS (1)..(1500): transl_table=11
atgcaatatcttttatcgcaaacagaacaaggacaacaactggggatcaccgccaaaatggcaaatcgacatggtttaattgcgggagcaaccgggactgggaaaacggttaccttacgtaccatggcagaagcttttagtgatgacggtgtgccggtctttttagtggatgtcaaaggcgatttatctggtttagtcaaagccggtcaatttcaaggaaaaattgctgagcgtattgagcaatttggcttgggtggcgaaggctaccttaatggctatcctgtttcattttgggatgtgtttggcgaaacgggtattccgcttcgtactacaatttcagaaatgggacctttactgttatcgcgtcttttaaatctgaatgccacgcaagaagggctattgaatttagtgttccgtgttgcagatgataaagggttattgctgatagatttaaaagatttacgtgcgatgttgaaatatgtagcagacaatgccaaaacgttccaattggaatacggtaatgtttcagctgccagtgtgggggcgattcagcgtgccttgcttacccttgaaaatcaaggggctgcaaatttgtttggcgagcccgcactgaatttagaagattggttacaaacgcgagatgggcgtggtgtcatcaatgtgctgaattcggaaaaattaattaattcaccaaaaatgtacagtgcctttttactctggctcatgtcagagttattcgagactttacctgaagtcggtgatccggaaaagccgaaatttgtgatgttctttgatgaagcacatttattgtttgatggtgcccccgccgtgttggtggataaagtggaacaagtggtgcgtttaattcgttctaaaggcgttggtgtgtattttgtgacgcaaaacccattagatttgccggatacggtgttaggtcagcttggtaaccgtgtacagcacgccttacgtgccttcacgccacgagatcaaaaagcggtaaaagctgccgccgaaacgttccgcactaatccaaagattaatgtaacggaaacgatcaccagtcttggtgtgggacaagcgttggtgtcttttttggatgaaaaagggatgccgatccccgtcgaagtagcgtttattttcccgccacgtagccagctaaaaccgattgcacaagaagaacgcgatgcttgggttaaagacgatgatatttatcctttttaccgtgaattgattgataatgagtctgcctttgaagtgttaaatcaacaagcagatcttgctgctgttgcgcaaaagcaagcagagcaagcacaacaagaagaggaaagtggtttaatgggcagtttaagtcgcatgatttttggtacgaaaaaacgcggtgagaaactgactgtgacagaagaaattgttagtggtgtggcgaaatcagttggacgtagcatccgtactcaagtgaccaagcaaatcatgcgtggtattttgggggcattgaagaaataa

SEQ ID NO: 106545 - protein, 499 aa, Pasteurella multocida subsp. multocida str. Pm70
MQYLLSQTEQGQQLGITAKMANRHGLIAGATGTGKTVTLRTMAEAFSDDGVPVFLVDVKGDLSGLVKAGQFQGKIAERIEQFGLGGEGYLNGYPVSFWDVFGETGIPLRTTISEMGPLLLSRLLNLNATQEGLLNLVFRVADDKGLLLIDLKDLRAMLKYVADNAKTFQLEYGNVSAASVGAIQRALLTLENQGAANLFGEPALNLEDWLQTRDGRGVINVLNSEKLINSPKMYSAFLLWLMSELFETLPEVGDPEKPKFVMFFDEAHLLFDGAPAVLVDKVEQVVRLIRSKGVGVYFVTQNPLDLPDTVLGQLGNRVQHALRAFTPRDQKAVKAAAETFRTNPKINVTETITSLGVGQALVSFLDEKGMPIPVEVAFIFPPRSQLKPIAQEERDAWVKDDDIYPFYRELIDNESAFEVLNQQADLAAVAQKQAEQAQQEEESGLMGSLSRMIFGTKKRGEKLTVTEEIVSGVAKSVGRSIRTQVTKQIMRGILGALKK

SEQ ID NO: 106546 - DNA, 1491 bp, Pseudomonas aeruginosa PAO1
  CDS (1)..(1491): transl_table=11
atgtcgcaagcgaatgagttgttgatcggcgctggccccgatggccagccggtaggacaggcctggcgcctggccaaccgtcatggattgatcgccggcgccaccggtaccggcaagacggtgaccttgcagcacctcgccgaatccttcagcgatgccggtgtcgcggtgttcgccgccgacatcaagggcgacctgtgcggcatcgccgcgccgggcaacccgcagggcaaggtcgccgaacgtatcgccagcatgccgtggctgaactaccagccgaaggcctacccgaccacgctctgggacatcgccgggaagaccggccacccgttgcgcaccaccatcagcgagatgggcccgctgctgctggccaacctcctggagttgaccgatagccagcaggccgcgctgttcgccgccttccaggtggccgaccgggaaggcctgctgctgctcgacctgaaggacctgaaggcgctgctcaaccatctgaaggacaatccggaaatccttggcgaggaccgggcgctgttcactggcgcttccgggcaggcgctgctgcgccgcctggccactctggagcagcagggcgccgaggccttcttcggcgagcctgccctgcaactggaagacatcctccgccccgagccggacgggcgcgggcgcatccacctgctcgacgccagccgcctggtgcacgaggcgccgaaggtctacgcgactttcctgctctggctgttggccgagctgttcgagcaactgccggagcgcggcgatgccgacaagccggtgctggcactgttcttcgacgaggcccacctgctgttcaacggcacgccgaaagccttgcgcgaccgcctggaacaggtggtccggctgatccgctcgaaaggcgtcggggtgtacttcgtcacccagtcgccgggcgacctgccggacgatgtcctggcccagctcggcctgcgtatccagcatggcctgcgcgccttcaccgccaaggagcagaaatcgctgcgcgcggtggccgacggtttccgcccgaacccggcgttcgacaccctgggggtgctgaccgaactgggtatcggcgaggcgttggtcggcaccctggaggaaaagggcacgccggccatggtccagcgcgtcgcggtggcgccgccctattcgcggatcggcccgctgagcgacagcgagcgcgctgaactggtccagcggtcgccgttgaagggtcgctacgaccagccgatcgatcgcgagtcggcctacgaggtgctggcgaacaaggcgggcgccaaacccgaggtccagggccaggcgactgctcagcaggaaagctcgtccggcgtcggcggcatggccgggcagattctcggcagcctgctgtccaattcgacggtgaagagcgccatgcgccaggcggccaaccagttgagccgggagctggtgcgtggcctgctcggctcgttgatgggcgggaagaagcggcgctga

SEQ ID NO: 106547 - protein, 496 aa, Pseudomonas aeruginosa PAO1
MSQANELLIGAGPDGQPVGQAWRLANRHGLIAGATGTGKTVTLQHLAESFSDAGVAVFAADIKGDLCGIAAPGNPQGKVAERIASMPWLNYQPKAYPTTLWDIAGKTGHPLRTTISEMGPLLLANLLELTDSQQAALFAAFQVADREGLLLLDLKDLKALLNHLKDNPEILGEDRALFTGASGQALLRRLATLEQQGAEAFFGEPALQLEDILRPEPDGRGRIHLLDASRLVHEAPKVYATFLLWLLAELFEQLPERGDADKPVLALFFDEAHLLFNGTPKALRDRLEQVVRLIRSKGVGVYFVTQSPGDLPDDVLAQLGLRIQHGLRAFTAKEQKSLRAVADGFRPNPAFDTLGVLTELGIGEALVGTLEEKGTPAMVQRVAVAPPYSRIGPLSDSERAELVQRSPLKGRYDQPIDRESAYEVLANKAGAKPEVQGQATAQQESSSGVGGMAGQILGSLLSNSTVKSAMRQAANQLSRELVRGLLGSLMGGKKRR

SEQ ID NO: 106548 - DNA, 1602 bp, Mycobacterium tuberculosis CDC1551
  CDS (1)..(1602): transl_table=11
atgggcaccgaatcggcggccggtggacctggcgggcccgcgcagcggatcgcggcgggttacaccgtcgaaggccaggccctgcagttgggcaccgtcgtcgtcgacggcgaacccgacccgagcgcgcagattcgcattccgctggccaccgtcaaccggcacggtctggtcgccggggccaccggaaccggcaagaccaagacgctgcagctgatcgccgaacagctcagtgcggcgggggtggcagtgctgatggccgacgtgaagggcgatttgtccggtctggcccgcccgggggaggccgccgacaagacggccgcccgtgcgaaagacaccggtgacgactgggtgccgacggccttcccggtggagttcctgtcgctgggtgccagtggcgtcggggttccggtgcgtgcgaccatctccagcttcggcccgattctgctggcaaaggtgttggggctcaacgctacccaggaatctacactgggcctgatctttcactgggccgaccaacgaggacttccgctgctggacctgaaggatctgcgggcggtcattacccatctgaccagtgatgagggcaaggtagagctgaaatcccttggggcggtgtcgcccacgacggccggggtcatcctgcgggctttggtcaacctggaagccgaaggtgccgacacattcttcggtgagcccgaactgaggcccgaggacctgctgcgcgtcgacagccagggtcggggcatcatctcgttgctggagttcgggagccaggcgttgcgcccggcgatgttctccacttttctgatgtgggtgctggcggacctgtttaccttcctgcccgaggtgggtgacctggacaagcccaaactggtgttctttttcgacgaggcgcacctgttgttcaccgatgcctcgaaggcctttctcgagcaggtcgagcagaccgtgaagctgatccgttccaagggtgttggggtgttcttctgcacccagctgcccacggatctacccaacgatgtcctctcccagctgggagcccgaattcagcacgcgctgcgcgcgtttacccccgacgaccacaaggcgctgcgcaagaccgtgcgcacctacccgaaaaccgatgtctacgacttggagtccgcgctgacgtcgctgggcaccggcgaggccgtcgtcaccgtgctatcggagaagggcgcaccgacgccggtcgcctggaccaggatgcgagcgccacggtcgctgatggccgcgatcggagccgaagcgattggcgccgcggcccaggcaagctcgttgcaggccgtatatggccagaccatcgaccgcccgtcagcccacgagatactgagcgccaaactcgcgccggcgcaagaggccccggcccaggaggccccagccccaagggggcagtacgatccgctgccctggccggacgattttgaagttccgccgatgcccgctccggtggagccgcagggccccgcggtgtgggaggagatactcaagaatccgaccgtcaagagcgtcctcaacaccaccgcacgcgagatcacccgcagcatcttcggcaccgggcgccgccgccggaagtga

SEQ ID NO: 106549 - protein, 533 aa, Mycobacterium tuberculosis CDC1551
MGTESAAGGPGGPAQRIAAGYTVEGQALQLGTVVVDGEPDPSAQIRIPLATVNRHGLVAGATGTGKTKTLQLIAEQLSAAGVAVLMADVKGDLSGLARPGEAADKTAARAKDTGDDWVPTAFPVEFLSLGASGVGVPVRATISSFGPILLAKVLGLNATQESTLGLIFHWADQRGLPLLDLKDLRAVITHLTSDEGKVELKSLGAVSPTTAGVILRALVNLEAEGADTFFGEPELRPEDLLRVDSQGRGIISLLEFGSQALRPAMFSTFLMWVLADLFTFLPEVGDLDKPKLVFFFDEAHLLFTDASKAFLEQVEQTVKLIRSKGVGVFFCTQLPTDLPNDVLSQLGARIQHALRAFTPDDHKALRKTVRTYPKTDVYDLESALTSLGTGEAVVTVLSEKGAPTPVAWTRMRAPRSLMAAIGAEAIGAAAQASSLQAVYGQTIDRPSAHEILSAKLAPAQEAPAQEAPAPRGQYDPLPWPDDFEVPPMPAPVEPQGPAVWEEILKNPTVKSVLNTTAREITRSIFGTGRRRRK

SEQ ID NO: 106550 - DNA, 1563 bp, Sinorhizobium meliloti 1021
  CDS (1)..(1563): transl_table=11
atgctgcaggaaggcaagatctatatcggaaccagccgcaagccggacgattcgatcaacaaaggcgaatatctggagctgaagttcggcaatcgccacgggctgatcaccggcgccacggggaccggcaagaccgtcacgctgcagatcctggccgagggtttctccaacgcgggggttccggtcttctgtgcggacgtcaagggcgacctctccggtatcggcgcgatgggcgagcccaaggacttcctgctgaagcgcgccgaacagatcggcctcgacccatacgatttccaggaattcccggtgatcttctgggatctctatggcgagaagggccacagggtccgcaccaccatctccgaaatgggcccgctgcttctgtcgcggctgatgaatgcgacggacgcgcaggaaggcgtgttgaacatcgctttcaagatcgccgacgagggcggcctgccgctgctcgacctcaaggacctgcaggcgctgctcaattacatgggcgagaatgcgagcgagctttccaatcagttcggcttcatttccaaggcctccgtcggctcgatccagcgcgaactcctgatcctggaacagcagggtgcggagcatttcttcggcgagccggcgctgaagatcaccgacatcatgcggaccaccaatgacgggcgcggcgcgatttcggtgcttgccgccgacaagctgatgatgaacccgcgtctctacgcgaccttcctgctgtggctcttgtccgagctgttcgaagagctgcccgaagtcggcgatcccgacaagccgaagctggtgttcttcttcgacgaggcacatctgctcttcaacgatgcgccgaaggttctcgtcgagcgtgtcgaacaggtcgtccgcctgatccgctctaagggcgtcggcgtctatttcgtcacgcagaacccgctggacgtaccggaggcggtcctcgcacagctcggcaaccgcatccagcacgcgctgcgcgcctattccccgcgcgaacaaaaggccgtcaagacggctgccgacacattccgcccgaaccccgacttcaattgtgccgacgtgatcaccaaccttggcaccggcgaggctctggtctcgacgctcgagggcaagggatcgccgtcgatcgtcgagagaaccctggtccggccgcctgcgtcgcgcctgggcccgctcacagatgcggagcggcagaaggtggtggacgtgagcccggtgcgcggtctctatgacgaggacttcgagcgcgactcagcctacgagatgctcgccaaacgtgcggccaaggcagcggaacaggcggaggctgcccggcaggctgaagaaaaaccggccgaggatacttccggcggcagccgctggaccctgcccggcttcggcgacgacacggccgaagcgccctccggcaagcaggcccggccgcgatcctccggctacaaacgggagaccatcatggaagctgcgatgaagtcggtggcacgaacggttgcgacccaggtgggacgagcccttgtgcgcggcattctcggcagcctgaagcggtag

SEQ ID NO: 106551 - protein, 520 aa, Sinorhizobium meliloti 1021
MLQEGKIYIGTSRKPDDSINKGEYLELKFGNRHGLITGATGTGKTVTLQILAEGFSNAGVPVFCADVKGDLSGIGAMGEPKDFLLKRAEQIGLDPYDFQEFPVIFWDLYGEKGHRVRTTISEMGPLLLSRLMNATDAQEGVLNIAFKIADEGGLPLLDLKDLQALLNYMGENASELSNQFGFISKASVGSIQRELLILEQQGAEHFFGEPALKITDIMRTTNDGRGAISVLAADKLMMNPRLYATFLLWLLSELFEELPEVGDPDKPKLVFFFDEAHLLFNDAPKVLVERVEQVVRLIRSKGVGVYFVTQNPLDVPEAVLAQLGNRIQHALRAYSPREQKAVKTAADTFRPNPDFNCADVITNLGTGEALVSTLEGKGSPSIVERTLVRPPASRLGPLTDAERQKVVDVSPVRGLYDEDFERDSAYEMLAKRAAKAAEQAEAARQAEEKPAEDTSGGSRWTLPGFGDDTAEAPSGKQARPRSSGYKRETIMEAAMKSVARTVATQVGRALVRGILGSLKR

SEQ ID NO: 106552 - DNA, 1551 bp, Caulobacter crescentus CB15
  CDS (1)..(1551): transl_table=11
ttgctcatgccgctgtcgatcagcgagaacgagattctggtcggcctcggcgaaggtccggtcacgcaaaggctcgatcgctcgaaccggcatggcgtggtcgccggcgccacgggcaccggcaaaaccgtgacccttcaggtgctgacgcaggcgttctccgacgccggtgtcccggtgttcgcggccgatgtgaagggcgatctctcaggcgtcgccatcccgggaacgcccaatgaaaagatgctggcccgcgccgcatcgatggacctcgtcctggcgcccgccgcgccgccggtgatcttctgggatctgttcggccagaaaggtcaccccatccgcaccaccatctcggagatggggccgctgctgctctcgcgtctgctggagctgaacgacgtgcaggaaggtgttctgacgatcgccttccacgtcgccgacaaggatgggctgctgctgctggacctgaaggacctccaggcggcgctgaaatatgtcgccgacaacgctgatgagatcggcacgcagtatggcaatgttgcgccggcgactgtcggcgccatccagcgcaagctcctgacgctgcagacccagggggccgagcacttcttcggcgagcctgcgcttgatctgtccgacatcatgcgcaccgatgcggccggacgcggctatgtgagcctgctggcggctgatcgtctgatccagtcgcccaagctctattcgaccttcctgctgtggcttctgtcggagctgtttgaagtcctgcccgaggtcggcgatccggagaaacccaagctggtgttcttcttcgacgaggcgcacctgctgttcaacgacgcgcctaagccgctgctggagaagatcgagcaggttgtcaggctgatccgctcgaagggcgtggggatctatttcgtcacccagaatccagcggatatcccggacggggtgctaggccagttgggcgcccgcgtgcagcatgccctgcgcgcctatacgcctgcggatcagaagggcctcaaggccgccgcccagtcgttccgggtcaatccgggcttcgacaccgccgaaaccatccaggcgctgggcgtgggtgaggcgctggtctccacgctcgacgagaagggcgcgccccggatcgtccagaagaccttgatccggccgccggcttctcgcctggggccgttgacgccgcaggagcgcgccgcgctgcatgcagaaagtcccgtcgcgggcgtctacgacacggccgaggatcgcgactccgcctacgaaatcctgcaggggcgcgctgcacaggcgcaacggcaggcggaggccgagcgccaggagaccgaagccgaccagcgcgccgccgccgaggccaaggttcgggagcgcgaagccgcccgcgaggcgcgcgaaagtcgcccccgcgcgtcgggtcgccagaccatggtcgaggccttcgcggtcacgctggttcgtacggtcgcctcacaggcgggacgggagctcatgcgcgggttgttgggcggtctcagcggtggtgcgagccgtcgtcgtcggcgctga

SEQ ID NO: 106553 - protein, 516 aa, Caulobacter crescentus CB15
MLMPLSISENEILVGLGEGPVTQRLDRSNRHGVVAGATGTGKTVTLQVLTQAFSDAGVPVFAADVKGDLSGVAIPGTPNEKMLARAASMDLVLAPAAPPVIFWDLFGQKGHPIRTTISEMGPLLLSRLLELNDVQEGVLTIAFHVADKDGLLLLDLKDLQAALKYVADNADEIGTQYGNVAPATVGAIQRKLLTLQTQGAEHFFGEPALDLSDIMRTDAAGRGYVSLLAADRLIQSPKLYSTFLLWLLSELFEVLPEVGDPEKPKLVFFFDEAHLLFNDAPKPLLEKIEQVVRLIRSKGVGIYFVTQNPADIPDGVLGQLGARVQHALRAYTPADQKGLKAAAQSFRVNPGFDTAETIQALGVGEALVSTLDEKGAPRIVQKTLIRPPASRLGPLTPQERAALHAESPVAGVYDTAEDRDSAYEILQGRAAQAQRQAEAERQETEADQRAAAEAKVREREAAREARESRPRASGRQTMVEAFAVTLVRTVASQAGRELMRGLLGGLSGGASRRRRR

SEQ ID NO: 106554 - DNA, 1608 bp, Ralstonia solanacearum GMI1000
  CDS (1)..(1608): transl_table=11
atgaccgatcccatcctgattgccaagaacgccaaggccgaactggtgctgctgccccagctcgcgaaccggcatggcctgatcaccggcgccaccggcaccggcaagaccgtcaccctgcagaccctcgcccagggcctgtcgaagatcggcgtgccggtcttcctggccgacgtcaaaggtgacctgactggcatttcgcagccgggccagccgaccgacaagctcaaggcccggctggaagagcgcggcctgcccgagccgcaatgggccggctgtcccgtcacactatgggacgtctacggcgaaaagggccacccggtgcgcgccaccgtgtccgacatgggcccgctgatgctggcgcgcatgctggagctcaacgacatccagaccggcgtgctcaacctcgtcttccggatcgccgacgacgccggcctggcgctgctcgacgccaaggacctgcgcgcgatgctgcagcacgttggcgagcatgcggccgagtacaccaaccagtacggcaacatctcgtcggccagcatcggcgccatccagcgcaacctgatcgggctggaggagcagggcgccgaccagtttttcggcgagccgatgctcgacatcgccgacctgatgcagaccgtgcgcggccagggcgtggtcaatatcctggcggccgacaagctgctcaacgctcccaagctgtatgcgaccttcctgctgtggatgctgtcggagctgttcgagcacctgcccgaggtgggcgacctggacaagccgaagctggccttcttcttcgacgaggcgcacctgctgttcaacgacgcgccgccgtcgctgctgcagaaggtggagcaggtggtgcggctgatccgctccaagggcgtgggcgtgtacttcgtcacgcagaatccggccgacgtgcccgacaccgtgctcggccagctcggcaaccgcgtgcagcacgcgctgcgcgccttcacgccgcgcgaccagaaggcggtgaaggcggccgccacgaccatgcgtgccaatcccgagttcagcatcgagcaggcgatcggcgagctggccgtgggcgaggcgctgatctccatgctggacgagggcggccgtcccgagatcacgcagcgcgccttcgtcgtgccgccggcctcgcgcatcggcccgatttccgacgacgagcgccgcgcgctgatggccggctcgctggtggccggccgctacgacacgccgatcgaccgcgagtccgcgtatgaaaagctgaccggtcgcgtggcttcgaccggccagtcgccggcatctgcgcccgcaccgggccccctcggcaccgactttggcgcgtcggccggcacggtgccggctcccgttcctgctcccgttcctgctcccgcgccggcgcaggcaccggccggcaacggcggcggcatcggcggctggctgcaggatgcggccggcgcgatcctcaccaagggcaccggccgcagcggccgcggcgattccgtggtcgaggcgctggccaagtcggcggcgcgcagcatcggctcgcaggtcgggcgcgagatcgtgcgcggcgtgctgggcagcctgctgggcggatcgaagcggcgctga

SEQ ID NO: 106555 - protein, 535 aa, Ralstonia solanacearum GMI1000
MTDPILIAKNAKAELVLLPQLANRHGLITGATGTGKTVTLQTLAQGLSKIGVPVFLADVKGDLTGISQPGQPTDKLKARLEERGLPEPQWAGCPVTLWDVYGEKGHPVRATVSDMGPLMLARMLELNDIQTGVLNLVFRIADDAGLALLDAKDLRAMLQHVGEHAAEYTNQYGNISSASIGAIQRNLIGLEEQGADQFFGEPMLDIADLMQTVRGQGVVNILAADKLLNAPKLYATFLLWMLSELFEHLPEVGDLDKPKLAFFFDEAHLLFNDAPPSLLQKVEQVVRLIRSKGVGVYFVTQNPADVPDTVLGQLGNRVQHALRAFTPRDQKAVKAAATTMRANPEFSIEQAIGELAVGEALISMLDEGGRPEITQRAFVVPPASRIGPISDDERRALMAGSLVAGRYDTPIDRESAYEKLTGRVASTGQSPASAPAPGPLGTDFGASAGTVPAPVPAPVPAPAPAQAPAGNGGGIGGWLQDAAGAILTKGTGRSGRGDSVVEALAKSAARSIGSQVGREIVRGVLGSLLGGSKRR

SEQ ID NO: 106556 - DNA, 1563 bp, Agrobacterium tumefaciens str. C58
  CDS (1)..(1563): transl_table=11
atgttgcaggacggacagctctatatcggcaccagccgcaatccggacgacagcctgaacaagggcgaatatctggaactgaaattcggcaaccgccacggcctcatcaccggcgcgacgggaacgggtaagaccgtgaccctgcaggtgctcgccgaaggtttttccaaggcaggcgtgccggtcttctgcgccgatatcaagggtgacctttccggtatcgcactggaaggcgaagcaaaagactgggtgcagaaacgcgccgaacagatcggtttcaccgatttttcctatagcaaatcgcccgtgatcttctgggatctctacggtgaaaaaggccatcgcgtgcgcgccactatcgccgaaatgggaccgcttttgctcgcccggctgatggacgcctcggaagcgcaggaaggcgtgctcaacatcgccttcaagatcgccgatcagggtgggttgccgctgctcgatctgaaagacctgcaatcgctcttgaactatatgggcgaaaacgcaacggcgctttccaaccagttcggcctgatttccaaggcctcggtcggttcgctgcagcgtgggctactcgttctcgaacagcagggcgcggccaacttcttcggcgaaccggcgctgaagatcgccgacatcatgcgcgtcggcgcggatgggcgcggcacggtttcggttctcgccgccgacaagctgatgatgaacccgcgcctttacgccaccttcctgctctggatgctgtcggaactgttcgaggaactgcctgaagtgggtgacccggaaaaaccgcgcctggtgttcttcttcgatgaagcgcatctgctgttcaacgatgccccgcgggtgctggtggaacgcgtggaacaggtcgtgcgtcttatccgctccaagggcgttggcgtctatttcgtcacgcagaacccgctcgacgtgccggaaaccgttcttgcccagctcggcaaccgcgtgcagcatgcgctgcgcgcctatacgccgcgcgaacagaaggcagtgcgcaccgccgccgatacattccgccagaaccccgctttcagcacggccgataccatcaccacgctcggcacgggtgaagcgctgatctccaccctgcatgacaagggtgcgccttccatcgtcgagcgcacgctcgtgcgcccgccctccggccgcgtcgggccgttgactgattcggagcgcaagtcgctgatcgatctcagccccgtctccggccagtatgacaaggatatcgaccgggaatcggcctttgaaatccttaacgcccgcgcccagaaggcggcggaagcagaagccgccaaacgcgccgaggaagaaaatgccgccaaccagtccgacaacgcctcggggcgctggcgcctgcccggcttcggtgatgaggagcccaaacaggcctcgaccaccggcgctcgcaagacgagcggttatcagcgcgaaacggtgatcgaggcagcaatgaaaagcgctgcccgctcggttgcgacttcggtcggacgcgccatcgtgcgcgggattttgggaagccttaagcgctag

SEQ ID NO: 106557 - protein, 520 aa, Agrobacterium tumefaciens str. C58
MLQDGQLYIGTSRNPDDSLNKGEYLELKFGNRHGLITGATGTGKTVTLQVLAEGFSKAGVPVFCADIKGDLSGIALEGEAKDWVQKRAEQIGFTDFSYSKSPVIFWDLYGEKGHRVRATIAEMGPLLLARLMDASEAQEGVLNIAFKIADQGGLPLLDLKDLQSLLNYMGENATALSNQFGLISKASVGSLQRGLLVLEQQGAANFFGEPALKIADIMRVGADGRGTVSVLAADKLMMNPRLYATFLLWMLSELFEELPEVGDPEKPRLVFFFDEAHLLFNDAPRVLVERVEQVVRLIRSKGVGVYFVTQNPLDVPETVLAQLGNRVQHALRAYTPREQKAVRTAADTFRQNPAFSTADTITTLGTGEALISTLHDKGAPSIVERTLVRPPSGRVGPLTDSERKSLIDLSPVSGQYDKDIDRESAFEILNARAQKAAEAEAAKRAEEENAANQSDNASGRWRLPGFGDEEPKQASTTGARKTSGYQRETVIEAAMKSAARSVATSVGRAIVRGILGSLKR

SEQ ID NO: 106558 - DNA, 1503 bp, Streptococcus pyogenes MGAS8232
  CDS (1)..(1503): transl_table=11
atgactacaatgacaattgcaaaaggcaatcaaccgatagccttacaattagggatgctaaatcgtcacggtttgattgctggagcgactggaacaggtaaaactgtgaccttaaaagtgctagcagagcaattaagtttagctggtgtgccagtctttttggcagatatcaaaggagacctgtctaatcttactaaagcaggagaggtgactgataaattggctgcgcgtctagccacaatcggggtaagtgattaccagcctcaggcctttcctgtaagaatgtgggatgtttttggtcaaaacggtcaacccttacggacaacgatttctgaaatgggaccgatgatgttgtcgcgtttattgaatcttaatgatacccagacaggtgtcttaaacatcgtctttaaaatcgccgacgagaaaggctggcttttgattgatttgaaagacttgcaggctatcttaaaagaagttggtgaccatgcctcagactactccagccattacggtaatatcgccaagcaatctatcggggctatccaaagaagtctcttgacattagaacaagaaggagcccaccaattttttggagagcctgctttagatgtggctgatttgatgcaattagatgttgcttcgggctatggagccattaacattttgtcagcgactaagctttttcaatctcctaccctttacacaaccttcttactttggctcttgtctgagttgtacgaattattgccagaagttggggatttggacaaacctaagatggttttcttttttgatgaagctcacttgctcttcaaagatgcccctaaagttttcttggaaaaagttgaacagattgtgcgacttattcgttcaaagggagttgggattttctttgtgactcaaagcccacttgatttgccagaaacggttttggctcagcttggaaatcgtattcagcatgccttgcgcgcttatacaccgaaagaacaaaaggcggttcgtgtcgctgcggatactttccgacaaaatcctgacttagatgtggcaagggtgattacagaactagaagtcggtgaggccttgatttctgttttgaatgataagggacaaccatccatcgttgaacgtgcctatatcatgccgcctaagagtagctttgctgttttgtcagagatagagagtcagcagcttgtgcagtcctcaccttttgccagtaaatatagtcagtccattgaccgtgaatctgcttatgaaaaattagctgctaaggttttagaagacaaccgactggcccaagaagcgatagcgacagcacaacgcgaaaaagaagctaaagaagccatcaaggcgcaagcagctaccaaaaaagctaatcggcgttctgttgggcgtccacgaaaaacagtcgtcgaaaaagcaacagatgcgtttattagtacgacggttagaacaattgggcgagaactggtcagaggtttactgggtagtttacgtaaacgatga

SEQ ID NO: 106559 - protein, 500 aa, Streptococcus pyogenes MGAS8232
MTTMTIAKGNQPIALQLGMLNRHGLIAGATGTGKTVTLKVLAEQLSLAGVPVFLADIKGDLSNLTKAGEVTDKLAARLATIGVSDYQPQAFPVRMWDVFGQNGQPLRTTISEMGPMMLSRLLNLNDTQTGVLNIVFKIADEKGWLLIDLKDLQAILKEVGDHASDYSSHYGNIAKQSIGAIQRSLLTLEQEGAHQFFGEPALDVADLMQLDVASGYGAINILSATKLFQSPTLYTTFLLWLLSELYELLPEVGDLDKPKMVFFFDEAHLLFKDAPKVFLEKVEQIVRLIRSKGVGIFFVTQSPLDLPETVLAQLGNRIQHALRAYTPKEQKAVRVAADTFRQNPDLDVARVITELEVGEALISVLNDKGQPSIVERAYIMPPKSSFAVLSEIESQQLVQSSPFASKYSQSIDRESAYEKLAAKVLEDNRLAQEAIATAQREKEAKEAIKAQAATKKANRRSVGRPRKTVVEKATDAFISTTVRTIGRELVRGLLGSLRKR

SEQ ID NO: 106560 - DNA, 1506 bp, Xanthomonas axonopodis pv. citri str. 306
  CDS (1)..(1506): transl_table=11
atggcctcgttcctgctcggcaaaggcgtcaccgacgacatcccggttgtgctggaagcccgcttcggcaatcgccacgggctggtggccggcgccaccggcaccggcaagaccgtgaccctgatgaccctggccgaaggcttctcgcggctgggcgttccggtgttcctggccgatgtaaaaggcgatgtcgccggcctggccgtggccggcgacggggcagccggcgtgctgcagcgcgccaacgatacgggcatgaccgactacgccccagcggctaacccggtggtgttctgggacctgtatggccagctcgggcatccggtacgtaccaccgtcagcgagatgggccccaccctgctcgccaggattctggagctcaacgacacccagtccggcgtactcgacatcgtgttcaagctggccgacgaccgcggcttgctgttgctggacctggacgacctgcgtgcactgctcgcgctggtggtccaagagcgcaaggagctctccaccagttacggactggtgtccagccaatcggtggccgccatccagcgcgccttgctgcgcttgtcgcaggacggcggcgaacagttcttcggtgaacccgcgctggagctggccgaactgatgcgcgtcacaccggatggccgtggcgtgatcggcatcctggctgccaaccaattggtgctcaagccgaagctgtattccaccttcctgctgtggctgctgtcggaactattcgaacgcttgcccgaagtgggcgacctggaacaacccacactggtgttcgtcttcgacgaggcgcacctgctgttcgacgatgcgccggcggcgctggtgcagcgcatcgaacaggtggtgcgcctgatccgttccaagggcgtgggcgtgtatttctgctcgcagtttcccgatgacattcccgacaatatcctcggccagctcggcaatcgcgtgcagcacgcgctgcgcgcctacacgccgcgcgaccagaaggcggtgaagaccgccgcgcagaccttcgtcggcaatcccaagctcgatgtcgccaccgccatctccagcctgggtaccggcgaggcgctggtatcgccgctgcagggcaagggcgtaccggcgccggtgcagcagacattgatcgccccgccgcgttgccgtatgggcgccatcagcgagaccgaacgcacgcaggtgcgcgccaccagcccggtcggcacccgctacgacaccgcgatcaatcgccaatcggcggccgaactgctggcgcgccgtgtcgaacaggtggccgaacacaacgcagcaccacctgcccgcactcgcgcagacgacgacgcgcacgacagcggcttcggtcaggcggtcaaggacgcggtcttcggcaccaaccgccgccagggcatgctcgaagcgatggccaagcagacctcgcgcacggtaggcaacaagatcgggcagcagatcgtgcgcggcatcttcggtagcatttttggtgggaagcgttga

SEQ ID NO: 106561 - protein, 501 aa, Xanthomonas axonopodis pv. citri str. 306
MASFLLGKGVTDDIPVVLEARFGNRHGLVAGATGTGKTVTLMTLAEGFSRLGVPVFLADVKGDVAGLAVAGDGAAGVLQRANDTGMTDYAPAANPVVFWDLYGQLGHPVRTTVSEMGPTLLARILELNDTQSGVLDIVFKLADDRGLLLLDLDDLRALLALVVQERKELSTSYGLVSSQSVAAIQRALLRLSQDGGEQFFGEPALELAELMRVTPDGRGVIGILAANQLVLKPKLYSTFLLWLLSELFERLPEVGDLEQPTLVFVFDEAHLLFDDAPAALVQRIEQVVRLIRSKGVGVYFCSQFPDDIPDNILGQLGNRVQHALRAYTPRDQKAVKTAAQTFVGNPKLDVATAISSLGTGEALVSPLQGKGVPAPVQQTLIAPPRCRMGAISETERTQVRATSPVGTRYDTAINRQSAAELLARRVEQVAEHNAAPPARTRADDDAHDSGFGQAVKDAVFGTNRRQGMLEAMAKQTSRTVGNKIGQQIVRGIFGSIFGGKR

SEQ ID NO: 106562 - DNA, 1512 bp, Brucella suis 1330
  CDS (1)..(1512): transl_table=11
atgactgctgaagatgctatttttcttggcgcaagccgcaagccggacgatacctaccagcagccggaatatctggcgctgcaatatggcaaccggcatggtcttgttaccggtgcgacgggtacgggcaagacggtttctctccaggtgctggcggagagcttttctgcggctggtgttcctgtgttctgcgcggatatcaagggcgatctctccggcattgctgctgcgggtgttctcaatgacggtctgaaaaagcgtgccgccgaagtgaagctcgacccatacgagatgcgggctgctccggtgattttctgggatatttttggcgagaagggccaccccgtgcgcgccaccatttcagaaatggggccgcttctgctgtcgcgcctgatgaacctgaccgatgcgcaggaaggggtgctgaatatcgccttccgtcttgctgatgaagaagggcttctcctgctcgacctgaaggatttgcaggcgatccttaccgaaatggcgggccgctccgatgagctttcggcaaaatacggcaacgtcaacaaggcgtctgttggggcgatccagcgttcgcttctggtactcgatcagcagggcggttccaaattcttcggcgaaccagccttgcgcattgccgacctcatgcgcacaacgacggatgggcgcggcgtggtgagtgtgcttgccgccgacaagctgatgatgaatccgcgcctttattccactttcctgctctggctgatgtcggagcttttcgaggaattgccggaagtgggcgaccccgacaagccgaagatggtgttcttcttcgatgaagcccatcttctgttcgatgaggcaccgaaggctctgatcgaccgtgtggaacaggtggtgcgcctgatccgctccaagggcgtcggcatctatttcgtcacgcagaacccgcttgatgtgccggaaaccgttctggcgcagcttggcaatcgtgtgcaacatgcacttcgtgcctatacgccgcgcgaaaccaacgcggtgaagacggcggcggatacattccgccccaacccggatttcaatacgtttcaggcaatcaccagccttggaaccggcgaggcgctcgtttctacgcttcaggccaagggtgtaccatccatggtgcagcgcacgctgatgcgcccgccatcctcgcgcatcgggccgctgacgccggaagaacgcgcgcagatcatcgctgcaagccccgttgccgggcagtatgaccagcctctggaccgtgattctgcttttgaaatgctggcgcgcaaggctgccgatgctgcggccgcgcagcagaagaccggacaggaagaagaaggcggcggcggtttgctgggcgatatcatcggcacggcacttggaacgggtcgccgttcaggtcgccagacggttgcggaagctgcgatgaaatccgtcgctcgctcggtcggcagctcgctcggtcgcgcgctggtgcgcggtattctgggaggtttccggcgataa

SEQ ID NO: 106563 - protein, 503 aa, Brucella suis 1330
MTAEDAIFLGASRKPDDTYQQPEYLALQYGNRHGLVTGATGTGKTVSLQVLAESFSAAGVPVFCADIKGDLSGIAAAGVLNDGLKKRAAEVKLDPYEMRAAPVIFWDIFGEKGHPVRATISEMGPLLLSRLMNLTDAQEGVLNIAFRLADEEGLLLLDLKDLQAILTEMAGRSDELSAKYGNVNKASVGAIQRSLLVLDQQGGSKFFGEPALRIADLMRTTTDGRGVVSVLAADKLMMNPRLYSTFLLWLMSELFEELPEVGDPDKPKMVFFFDEAHLLFDEAPKALIDRVEQVVRLIRSKGVGIYFVTQNPLDVPETVLAQLGNRVQHALRAYTPRETNAVKTAADTFRPNPDFNTFQAITSLGTGEALVSTLQAKGVPSMVQRTLMRPPSSRIGPLTPEERAQIIAASPVAGQYDQPLDRDSAFEMLARKAADAAAAQQKTGQEEEGGGGLLGDIIGTALGTGRRSGRQTVAEAAMKSVARSVGSSLGRALVRGILGGFRR

SEQ ID NO: 106564 - DNA, 1551 bp, Shigella flexneri 2a str. 301
  CDS (1)..(1551): transl_table=11
gtgcacagccgttgcctatactccaggcaggaaactggaggaaatctcatgagcgaacccctgttaattgcccgcacgccggacacagaactgtttttactgccgggaatggctaaccgtcacgggctgattactggcgcaacggggacgggtaaaaccgttacgctgcaaaaactggcagagtcattgtcggaaatcggcgtgccggtgtttatggctgatgtgaaaggcgatctgaccggtatcgcgcaggcaggaacggcgtcggaaaaactgctcacaaggcttaaaaatatcggcgtcaatgactggcaaccgcatgccaatccggtggtggtgtgggatatctttggcgagaaaggccacacggtgcgggcgacggtttcggatctggggccgctgttgctggcgcgactgttgaatctcaacgatgtgcaatctggcgtgctgaatattatcttccgcattgcggacgatcagggattgttgctgctcgactttaaagatttgcgggcgattacccagtacatcggcgataacgccaaatccttccagaatcagtacggaaatatcagtagcgcatcggttggtgccatccagcgcggattactgtcgctggaacagcaaggcgcagcacacttctttggtgagccgatgctggatatcaaagactggatgcgcaccgatgccaacggtaaaggcgttatcaatatcctcagcgccgagaaactttatcagatgccgaaactgtacgccgccagcctgctgtggatgctttcagagttgtatgaacaattgccggaagcgggcgatctggagaaaccaaaactggtgtttttcttcgacgaggcacatctgctgtttaacgatgcaccgcaggtactgctggataagattgagcaggtgataaggcttattcgctcaaaaggcgtgggcgtctggttcgtttcgcaaaacccgtctgatattccggataatgtgttcggccagctcggtaatcgtgttcagcacgctttgcgggcttttacgccaaaagatcagaaagcagtgaagacagcggcgcaaaccatgcgggccaatccggcatttgataccgaaaaggcaatccaggaactggggaccggcgaggcgttaatctcgtttctcgatgcaaaaggaagtccttctgtggtggaacgggcgatggtgatcgcaccttgttcgcgaatggggccggtgacggaagatgagcgtaatggcctgattaatcactccccggtgtatggcaaatatgaagatgaggtggaccgcgagtccgcctatgagatgctgcaaaaaggctttcaggccagtaccgagcagcaaaataatccccccgtgaaagggaaagaggtggcggtggatgacggtattcttggtggattgaaggatattttgtttggcactaccggaccacgcggcgggaagaaagatggtgtggtgcaaacaatggcgaaaagcgccgctcgccaggtgacgaatcagattgtacgcgggatgttggggagtttgctgggggggagaaaaagataa

SEQ ID NO: 106565 - protein, 516 aa, Shigella flexneri 2a str. 301
MHSRCLYSRQETGGNLMSEPLLIARTPDTELFLLPGMANRHGLITGATGTGKTVTLQKLAESLSEIGVPVFMADVKGDLTGIAQAGTASEKLLTRLKNIGVNDWQPHANPVVVWDIFGEKGHTVRATVSDLGPLLLARLLNLNDVQSGVLNIIFRIADDQGLLLLDFKDLRAITQYIGDNAKSFQNQYGNISSASVGAIQRGLLSLEQQGAAHFFGEPMLDIKDWMRTDANGKGVINILSAEKLYQMPKLYAASLLWMLSELYEQLPEAGDLEKPKLVFFFDEAHLLFNDAPQVLLDKIEQVIRLIRSKGVGVWFVSQNPSDIPDNVFGQLGNRVQHALRAFTPKDQKAVKTAAQTMRANPAFDTEKAIQELGTGEALISFLDAKGSPSVVERAMVIAPCSRMGPVTEDERNGLINHSPVYGKYEDEVDRESAYEMLQKGFQASTEQQNNPPVKGKEVAVDDGILGGLKDILFGTTGPRGGKKDGVVQTMAKSAARQVTNQIVRGMLGSLLGGRKR

SEQ ID NO: 106566 - DNA, 1482 bp, Shewanella oneidensis MR-1
  CDS (1)..(1482): transl_table=11
ttgaatactctactcttagataaaggtgagcaacaggttcacttaaatcttaaatatgccaaccgccacgggctcattgcgggcgctacaggtacaggcaaaaccgtttcgctgatgagcctagcagagggtttctcgcgccaaggggtgccagtttttatcaccgatattaaaggcgatatttcagggcttggcgtggcgggtacaccaaacgataagctattacagcgggcggctgaaatcggggttgagggttatcaaaccgaggcaaatcccgtcgtgttctgggacttagcagggattcaaggacatccgctacgcaccacagtaagtgaaatgggccccaccttgcttgggcgcatccttgagctcaacgacacccaaagcagcattttagacatagtgtttcaactggctgacgaccaaggtttattgttactcgaccttgacgatctgcgcgcgatgctgaacttagtggccgatgagcgtaaagacatctccgccaaatatgggttaattagcgcccaatccctcgctgctattcaacgctcagtgcttggtttagaacgcgatggcggcaaagactttttcggcgagccagcattgcaactcgaagacttgatgcgcactaacttgcaagggcgcggcattatcaacctgttagccgccaataaactaatcctcacccctaacctctattccagcttcttactctggctgctatcagaactctttgaaaatttacccgaagtcggcgatctcgataaacctaaattagtcttctttattgatgaggcacacttattgtttgaaggttgcccagcaagtttgcttaaacgcatagagcaaattatgcggcttatccgctccaagggcgtcggggtatatttctgctcgcaatttcccgacgacattcccaatgaaattctcggtcagctcggcaatcgcattcagcatgccctcagggcgtataccccaagggatcaaaaagccgttaaaaccgcagccgaaacctttgtatcgaatcctaaattggtggtcagcgaggtaatttcacaacttgccgtgggcgaagccttagtgtcaacccttgccgagaaaggtgtgccaactatggttgagcgcaccttgatagcaccaccacgctgccgtatggggccagccaatcccgaggagttaaccgctatccgcgccctgagcccgataggcggcaaatacgataccttaatcaatcgcgaatctgcctatgagcgactgaatcaacgacataccgacgaaacgaatggcgtcaatactgcacagccagccgcgaatgaggctgaacaaggatggttgagtgaactgatttttggcaataaacgccgtcaagggttggccgaaaccttgtccaaacaagcagcaagaaccgttggtaatcaactcgggaaacaaattttacgcggtttactcggcggtatactcggaaaatcgacccgtaggtaa

SEQ ID NO: 106567 - protein, 493 aa, Shewanella oneidensis MR-1
MNTLLLDKGEQQVHLNLKYANRHGLIAGATGTGKTVSLMSLAEGFSRQGVPVFITDIKGDISGLGVAGTPNDKLLQRAAEIGVEGYQTEANPVVFWDLAGIQGHPLRTTVSEMGPTLLGRILELNDTQSSILDIVFQLADDQGLLLLDLDDLRAMLNLVADERKDISAKYGLISAQSLAAIQRSVLGLERDGGKDFFGEPALQLEDLMRTNLQGRGIINLLAANKLILTPNLYSSFLLWLLSELFENLPEVGDLDKPKLVFFIDEAHLLFEGCPASLLKRIEQIMRLIRSKGVGVYFCSQFPDDIPNEILGQLGNRIQHALRAYTPRDQKAVKTAAETFVSNPKLVVSEVISQLAVGEALVSTLAEKGVPTMVERTLIAPPRCRMGPANPEELTAIRALSPIGGKYDTLINRESAYERLNQRHTDETNGVNTAQPAANEAEQGWLSELIFGNKRRQGLAETLSKQAARTVGNQLGKQILRGLLGGILGKSTRR

SEQ ID NO: 106568 - DNA, 1476 bp, Pseudomonas putida KT2440
  CDS (1)..(1476): transl_table=11
atgtcggaattttcgaccatcgttgtaggcgcgggcccggatggccagccagtcgggcaagcaatgcgcctggccaaccgccacggtctggtggctggcgcaaccggtactggcaagaccgtcaccctgcagcgcctggcggaggtgttcagcgacgcaggggtggcggtgttcgccgcggatgtcaaaggcgacctttgtggcctgggtgctgccggtgcgccacagggcaaggtggctgagcgcatcgccggcatgccgtggctggggcatacgcccagggcttacccggtgagcttgtgggatatcgccgggcagtctggccacccgctgcgcaccaccctcagtgaaatggggccgttgttgctgggcaacttgctggaactgaccgacagccagcaggcggcgctttatgcagcattcaaggtggccgaccgcgaaggcctgctgctgctggacctcaaagacctcaaggccctgctggcgcatctgaaggacaacccgcagctgctcggcgaagacagcgcgctgatgaccacggcctccacccaggctttgttgcgccggctcgctaccttggagcagcagggcgccgaggcactgttcggcgagccggcattgcaactggaggacctgctgcgccctgatccggatggacgtggacgtatccacctgctcgatgccagccgattggtgcacgaggcacccaaggtgtacgcgacgttcctgttgtggctgctggccgaactgttcgagcagttgcccgagcgcggtgatgccgacaagccggtgctggcgctgttcttcgatgaagcacacctgctgttcaacggcacgcccaaggcgttgcaggaccgtcttgagcaagtggtccggctgatccgctccaagggggtgggggtctatttcgttacccagtcgccgggtgacttgcccgacgcggtgctggcccagttgggcttgcgcattcagcacggcttgcgggcgttcacggccaaggagcagaagtcgctgcgggcggtagccgatggtttccgccccaacccgacgttcgacactctggcggtgctgaccgaactgggtattggcgaagcgctggtgggtacgttgcaagagaagggcacgccggccatggtgcagagggtgctggttgcaccgccgcagtcgcgtatcgggccactgagtgcggctgagcgcagtgcgctgattgccgcttcgccactggcggggcgctatgacaaaccggtggaccgtgagtcagcctatgaaatgctgagccagcgtaagggcgagccggtggaaccggcgccgcaaccgaaggcggatgaagagagttttgccgacaaggcgggtgagttcttgcagagtgcagcggggcaggcgatcaagtcggcagtgcgccaggccgctaaccagttggggcggcagttggtgcgcgggttgatggggtcgttgttagggggcaagaaaaggtag

SEQ ID NO: 106569 - protein, 491 aa, Pseudomonas putida KT2440
MSEFSTIVVGAGPDGQPVGQAMRLANRHGLVAGATGTGKTVTLQRLAEVFSDAGVAVFAADVKGDLCGLGAAGAPQGKVAERIAGMPWLGHTPRAYPVSLWDIAGQSGHPLRTTLSEMGPLLLGNLLELTDSQQAALYAAFKVADREGLLLLDLKDLKALLAHLKDNPQLLGEDSALMTTASTQALLRRLATLEQQGAEALFGEPALQLEDLLRPDPDGRGRIHLLDASRLVHEAPKVYATFLLWLLAELFEQLPERGDADKPVLALFFDEAHLLFNGTPKALQDRLEQVVRLIRSKGVGVYFVTQSPGDLPDAVLAQLGLRIQHGLRAFTAKEQKSLRAVADGFRPNPTFDTLAVLTELGIGEALVGTLQEKGTPAMVQRVLVAPPQSRIGPLSAAERSALIAASPLAGRYDKPVDRESAYEMLSQRKGEPVEPAPQPKADEESFADKAGEFLQSAAGQAIKSAVRQAANQLGRQLVRGLMGSLLGGKKR

SEQ ID NO: 106570 - DNA, 1503 bp, Escherichia coli CFT073
  CDS (1)..(1503): transl_table=11
atgagcaaacccctgttaattgcccgcacgctggacacagaactgtttttactgccgggaatggctaaccgtcacgggctgattactggcgcaacggggacaggtaaaactgtcacgctgcaaaaactggcggaatctctgtcagaaatcggcgttccggtgtttatggccgatgtaaaaggtgatttaaccggggttgcggcagaaggtacggcgtcggaaaaactgctcgcaaggcttaaaaatatcggcgtaaatgactggcaacctcatactaatccggtggtggtgtgggatatctttggcgagaaaggccacccggtgcgggcgacggtttcggatctggggccgctgttgctggcgcggctgttgaatctcaacgatgtgcaatctggcgtgctgaatatcattttccgcattgctgacgatcagggattgttgctgctcgactttaaagatctgcgggcaattacccagtacatcggcgataacgccaaatccttccagaatcagtacggtaatatcagtagtgcatcggttggtgccatccagcgcgggctgttgtcgctggaacagcaaggcgcagcacacttatttggtgagccgatgctggatatcaaagactggatgcgcaccgatgccaacggtaaaggcgttatcaatatccttagcgccgaaaaactctaccagatgccgaaactgtacgccgccagcctgttgtggatgctttcagagttgtatgaacaattgccggaagcgggcgatctggagaaaccaaaactggtgtttttcttcgacgaagcgcatctgctgtttaacgatgcaccgcaggtactgctggataagattgagcaggtgataaggcttattcgctcaaaaggcgtgggcgtctggttcgtttcgcaaaacccgtcagatatcccggataacgtgctcgggcagctcggtaatcgcgttcaacacgctttgcgtgcttttacgcctaaagatcagaaagcagtgaaggcagcggcgcaaaccatgcgccccaatccgacgtttgataccgaaaaggcaatccaggaactggggacgggcgaagcgttaatctcgtttctcgatgcgaaaggaagcccttcagtggtggaacgggcgatggtgattgccccctgttcacgaatggggccggtgacggaagatgagcgcaatggcttggttaaccactccccggtgtatggcaagtacgaggatgacgtggaccgagaatccgcctatgagatgttgcaaaaaggctttcaggccagtatcgagcagcaaaataatcctcccgcgaaagggaaagaggtggcggtggatgacggtattctcggtggattgaaggatattttgttcggcactaccggaccacgcggcgggaagaaagatggtgtggtgcaaacaatggcaaaaagcgccgcccgccaggtgacgaatcagattgtgcgcgggatgttggggagtttgctgggggggagaagaaggtaa

SEQ ID NO: 106571 - protein, 500 aa, Escherichia coli CFT073
MSKPLLIARTLDTELFLLPGMANRHGLITGATGTGKTVTLQKLAESLSEIGVPVFMADVKGDLTGVAAEGTASEKLLARLKNIGVNDWQPHTNPVVVWDIFGEKGHPVRATVSDLGPLLLARLLNLNDVQSGVLNIIFRIADDQGLLLLDFKDLRAITQYIGDNAKSFQNQYGNISSASVGAIQRGLLSLEQQGAAHLFGEPMLDIKDWMRTDANGKGVINILSAEKLYQMPKLYAASLLWMLSELYEQLPEAGDLEKPKLVFFFDEAHLLFNDAPQVLLDKIEQVIRLIRSKGVGVWFVSQNPSDIPDNVLGQLGNRVQHALRAFTPKDQKAVKAAAQTMRPNPTFDTEKAIQELGTGEALISFLDAKGSPSVVERAMVIAPCSRMGPVTEDERNGLVNHSPVYGKYEDDVDRESAYEMLQKGFQASIEQQNNPPAKGKEVAVDDGILGGLKDILFGTTGPRGGKKDGVVQTMAKSAARQVTNQIVRGMLGSLLGGRRR

SEQ ID NO: 106572 - DNA, 1620 bp, Bradyrhizobium japonicum USDA 110
  CDS (1)..(1620): transl_table=11
atgaccgcacaggacagcaagctcggcgacaccgacgacaagatcttcgtcggcaagggagacgagcaggcatggctgacgctggcgctcgccaatcgccacggcctcgtcaccggtgcaaccggaaccggcaagacggtatcgctgcaagtcatggcagagggatttgcgcgcgccggtgttccggtcttcgcggccgacatcaagggcgacctctccggcatctccgaggtcggcgtgcccgcggacttcatcgtcaagcgcgccaccgagatggggctgacgttccagcccgaccagttctcgacggtgttctgggatgtgttcggtgagcagggccacccggtgcgggcgaccgtcaccgagatggggccgcttctgctcgcgcgcatgctcgacctcaacgacgtgcaggagggcgtgctcaacgtcgccttccgtgtcgccgacgacaacggccttgtcctgatcgacatgaaggatctgcgggcgttgctcgatgccatcgtgcccgacagcagcaagaaggggccggacgccgccgacgatccgcttgccgacatccgcaaggccgcccagggatttggcaacgtcaccaaggccaccgtcggcaccatccagcgccagctcctcgtgctggagaaccagggcgccaccaagttcttcggcgagccggcgctgacgctgaaggacttcatgaggaccgaccgcgacggccgcggcatggtcaacatcctcgtcgccgacaagctgctccagagcccgcggctttacgcgacattcctgttgtggatgctgtcggagctgttcgaggagctgcccgaggccggcgacctgccgaagccgaagctggtgttcttcttcgacgaggcgcatctgctgttcaacgacgcgcccaaggcgctgatggacaagatcgagcaggtggtccgcctgatccgctccaagggcgtcggcgtctacttcgtgacgcagaacccgatcgacgtgcccgaccgcgtgctcggtcagctcggtaaccgggtgcagcacgcgctgcgcgccttcaccccgcgcgaccagaaggcggtcgctgccgcggcccagaccttccggcccaacccgaagctcgacaccgccaaggtgatcatggagctcggcaagggcgaagcgctggtgtccttcctcgaaggcaacggcacgccggcgatggtcgagcgggtgatgatccggccgccgtcggcccggatcggatcgatcacgccggaagagcgcaaggcgatcatggatgcgagcccggtgaagggcaaatacgacaccgccgttgatgaagagtccgcctacgagatgatccagaagcgcatcgccggcaccgcggcgacggcggatgctccggcgggcggcggcggtggcatcctcggccagatcggctcgatcgtcggcaccatcttcggcaccaatgtcaagcgcggccgcctgtcggccggccaggtcattgcgcgcgacgtgacgcgatcggtgaccaaccaggtgatcggagggatggccgccaatctcggcaagtcggtcggcggccagctcggcggctcgatcggccgcaccttggtccgcggcgcgctcggcggcttgctgcgtcggtag

SEQ ID NO: 106573 - protein, 539 aa, Bradyrhizobium japonicum USDA 110
MTAQDSKLGDTDDKIFVGKGDEQAWLTLALANRHGLVTGATGTGKTVSLQVMAEGFARAGVPVFAADIKGDLSGISEVGVPADFIVKRATEMGLTFQPDQFSTVFWDVFGEQGHPVRATVTEMGPLLLARMLDLNDVQEGVLNVAFRVADDNGLVLIDMKDLRALLDAIVPDSSKKGPDAADDPLADIRKAAQGFGNVTKATVGTIQRQLLVLENQGATKFFGEPALTLKDFMRTDRDGRGMVNILVADKLLQSPRLYATFLLWMLSELFEELPEAGDLPKPKLVFFFDEAHLLFNDAPKALMDKIEQVVRLIRSKGVGVYFVTQNPIDVPDRVLGQLGNRVQHALRAFTPRDQKAVAAAAQTFRPNPKLDTAKVIMELGKGEALVSFLEGNGTPAMVERVMIRPPSARIGSITPEERKAIMDASPVKGKYDTAVDEESAYEMIQKRIAGTAATADAPAGGGGGILGQIGSIVGTIFGTNVKRGRLSAGQVIARDVTRSVTNQVIGGMAANLGKSVGGQLGGSIGRTLVRGALGGLLRR

SEQ ID NO: 106574 - DNA, 1503 bp, Streptococcus pyogenes SSI-1
  CDS (1)..(1503): transl_table=11
atgactacaatgacaattgcaaaaggcaatcaaccgatagccttacaattagggatgctaaatcgtcacggtttgattgctggagcgactggaacaggtaaaactgtgaccttaaaagtgctagcagagcaattaagtttagctggtgtgccagtctttttggcagatatcaaaggagacctgtctaatcttactaaagcaggagaggtgactgataaattggctgcgcgtttagccacaatcggggtaagtgattaccagcctcaggcctttcctgtaagaatgtgggatgtttttggtcaaaacggtcaacccttacggacaacgatttctgagctgggacctatgatgttgtcgcgtttattgaatcttaatgatacccagacaggtgtcttaaacatcgtctttaaaattgccgacgagaaaggttggcttttgattgatttgaaagacttgcaggctatcttaaaagaagttggtgaccatgcctcagactactccagccattacggtaatatgaccaaacaatctatcggggctatccaaagaagtctcttgactttggaacaagaaggggcccaccaattttttggagagcctgctttagatgtggctgatttgatgcaattagatgttgcttcgggctatggagccattaacattttgtcagcgactaagctttttcaatctcctaccctttacacaaccttcttactttggctcttgtctgagttgtacgaattattgccagaagtaggtgatgtggacaaacctaagatggttttcttttttgatgaagctcacttgctcttcaaagatgctcctaaagttttcttggaaaaagttgaacagattgtgcgacttattcgttcaaagggagttgggattttctttgtgactcaaaacccacttgatttgccagaaacggttttggctcagcttggaaatcgtattcagcatgccttacgtgcctatacactgaaagaacaaaaggcggttcgtgtcgctgcggatactttccgacaaaatcctgacttagatgtggcaagggtgattacagaactagaagtcggcgaagctttgatttctgttttgaatgataagggacaaccatccatcgttgaacgtgcctatatcatgccgcctaagagtagctttgctgttttgtcagagatagaaagtcagcagcttgtgcagtcctcaccttttgccagtaaatatagtcagtccattgatcgtgactctgcttatgaaaaattagctgctaaggttttagaagacaaccgactggcccaagaagcgatagcgacagcacaacgcgaaaaagaagctaaagaagccatcaaggcgcaagcagctaccaaaaaagctagtcgccgttctgttgggcgtccacgaaaaacagtcgtcgaaaaagcaacagatgcgtttattagtacgacggttagaacaattgggcgagaactggtcagaggtttactgggtagtttacgtaaacgatga

SEQ ID NO: 106575 - protein, 500 aa, Streptococcus pyogenes SSI-1
MTTMTIAKGNQPIALQLGMLNRHGLIAGATGTGKTVTLKVLAEQLSLAGVPVFLADIKGDLSNLTKAGEVTDKLAARLATIGVSDYQPQAFPVRMWDVFGQNGQPLRTTISELGPMMLSRLLNLNDTQTGVLNIVFKIADEKGWLLIDLKDLQAILKEVGDHASDYSSHYGNMTKQSIGAIQRSLLTLEQEGAHQFFGEPALDVADLMQLDVASGYGAINILSATKLFQSPTLYTTFLLWLLSELYELLPEVGDVDKPKMVFFFDEAHLLFKDAPKVFLEKVEQIVRLIRSKGVGIFFVTQNPLDLPETVLAQLGNRIQHALRAYTLKEQKAVRVAADTFRQNPDLDVARVITELEVGEALISVLNDKGQPSIVERAYIMPPKSSFAVLSEIESQQLVQSSPFASKYSQSIDRDSAYEKLAAKVLEDNRLAQEAIATAQREKEAKEAIKAQAATKKASRRSVGRPRKTVVEKATDAFISTTVRTIGRELVRGLLGSLRKR

SEQ ID NO: 106576 - DNA, 1392 bp, Coxiella burnetii RSA 493
  CDS (1)..(1392): transl_table=11
atggaacagttacttattgcaaaaactgaaaccggcgttcctaaatacttaaatttgacgatgaccaatcgtcacggcttaatcacgggcgcgaccggtaccgggaaaacagtcaccttacaaaggactgccgaacagttttcaaaagcgggggtgcccgtttttacaactgatgttaaaggcgatttatcgggcatcggcaaacccccggcgcctcaaggatgccctgttattttttgggatctgtacggtcatcgcggccatccgttacgtgcaacgattagcgaagtcggcccacttttattgagccgcttcttaaatgcgaatgatgttcagcaaggaataataaacgctgcatttaatttggccgatgagcaaggattgttgttactcgatttaaaagattttcgtgctttattaacctggatgagtgaaaacgcgtcatcgctaaaaataaaatacgggaatatctccagcagttcggtgggtgcgttacaacgaagtttattgactctcgctgaaagtggtggggatcaattttttggtgagccttcgcttaaattggaagatctcttacgaaaagacccctcgggtaaaggcgttattagtatccttgatgcaaccaccttaattaacgacggtcgtttatatagcacttttcttttatggcttttatcggaattattcgagcaactacccgaagtgggtgatttaaataagccaaaattaatcttcttttttgatgaagctcatcttttatttaattccgcgccaaaaatcttgcttgaaaaaataaatcaaatggtaagattaattcgctcaaaagccgtcggcgtttattttgcaacgcagagtcctttagatattccagaaagcgtattagggcagttgggcaaccgcgtacaacatgctttgcgcgcattcacccctaaagatcaaaaagcggtaaaaaacgcggcgcaaacttttagacaaaatcctcaattagctacagaaaaagttattactcaattaaaagtgggtgaagcgttagtttcatttctcgacagcgcaggaagtcctgaaatagttgaaaaagtcaaaataatgcttccagaatcccacgttggcgcattatccgatgcggaacgagaaaaattaataataaattcgtctttacatggtgtttatgacacaacgatcgatcgtgaatccgcttatgaagtattagaaaaaagaatgcaagtaaaacaagcacccacaagcaaaccaattcaaaagcggccacccggccgccctcgtcaaagcgttgcggaaacacttttgaaatcaacagcaagaacagtaggcagtcaaatcggacggcaaattatccgaggattactaggttcagtattcaaaggaaagaaataa

SEQ ID NO: 106577 - protein, 463 aa, Coxiella burnetii RSA 493
MEQLLIAKTETGVPKYLNLTMTNRHGLITGATGTGKTVTLQRTAEQFSKAGVPVFTTDVKGDLSGIGKPPAPQGCPVIFWDLYGHRGHPLRATISEVGPLLLSRFLNANDVQQGIINAAFNLADEQGLLLLDLKDFRALLTWMSENASSLKIKYGNISSSSVGALQRSLLTLAESGGDQFFGEPSLKLEDLLRKDPSGKGVISILDATTLINDGRLYSTFLLWLLSELFEQLPEVGDLNKPKLIFFFDEAHLLFNSAPKILLEKINQMVRLIRSKAVGVYFATQSPLDIPESVLGQLGNRVQHALRAFTPKDQKAVKNAAQTFRQNPQLATEKVITQLKVGEALVSFLDSAGSPEIVEKVKIMLPESHVGALSDAEREKLIINSSLHGVYDTTIDRESAYEVLEKRMQVKQAPTSKPIQKRPPGRPRQSVAETLLKSTARTVGSQIGRQIIRGLLGSVFKGKK

SEQ ID NO: 106578 - DNA, 1575 bp, Streptomyces avermitilis MA-4680
  CDS (1)..(1575): transl_table=11
gtgccgcaggccgagacccccgaggtggccgggagtgctcccgcacttccccaggaggccctgaagatcgcttcggggtacgccttcgccggtcccgccctcgatctgggcgccctcctgtgggacggccggtgcctgccggacgcgcagatccgcatcccgctgcccatgctcaaccggcacgggctggtcgcgggcgccaccggcaccggcaagaccaagacgctccaactgatcgccgagcagctgtcggcgcagggcgtgccggtgttcctcgcggatgtgaagggcgacgtctccggcatctcggcgcccggccgggagaacgaccgggtgcacggccgggccgccgaggtccaccaggagtgggcgccggccggctttcccagcgagttctacgccctgggcggcatgggccacggcatccccgtacgcgccacgatcaccagcttcggaccggtcctgctgtccaaggtgctccagctcaaccagacccaggagcagtcgctcggccttatcttccactacgcggaccagaagggtctggagctggtggacctgaaggacctgcgggccgtggtcgccttcctgacctcggacgagggcaagcaggagctgaaagccctcggcgggatctccacggccacggccggggtgatcctgcgttccttcacggcgttcgaggcgcaggggatgagcccgttcttcggggaacccgagttcgacacgagtgagctgctgcgcacggcgtccgacggccggggcacggtctcggtcctggaactcccggccgtgcaggacaagccgcagctcttctcgaccttcctgatgtggctgctcgcggacctcttccacgatctccccgaggtcggtgacgcggatcagccgaagctcgtcttcttcttcgacgaggcgcatctgctcttcaacgacgcgtcgaaggcgttcctcgactccatcacgcagaccgtccggctgattcgctcgaaaggggtcggcgtcttcttcgtcacgcagaccccgaaggacgtaccggcggacgtcctggcccagctcgggaaccgtgtccagcatgcgttgcgcgctttcacgcccgacgaccagaaggcgctgaagtcgacggtgaagacgttcccgaactcggcgtacgacctggaggaggtcctgacgggcctgggcaccggcgaggcggtggtcaccgtactgagcgagaagggcgcgccgacgccggtggcggtgacccggctgcgggccccggagtcgctgatggggccggtcgacgcggccgtactggaccaggcggtgaagtcgtcgcccctgtacgggcggtacgcgcgggcggtcgaccgggaatcggcgtacgagaagctgacggcgcgggaggcggaggcggccggccgccgggaggaggagcccgcggcccgggggcgcaccgcggctcccgccgaggagccctcggtcgtcgaacaggtggtcggcagcggggtcttcaagtccctggcccgctccctgggcactcagctcggccgggagatcacccgctcgatcttcggtaccgcgaagcggagacggtag

SEQ ID NO: 106579 - protein, 524 aa, Streptomyces avermitilis MA-4680
MPQAETPEVAGSAPALPQEALKIASGYAFAGPALDLGALLWDGRCLPDAQIRIPLPMLNRHGLVAGATGTGKTKTLQLIAEQLSAQGVPVFLADVKGDVSGISAPGRENDRVHGRAAEVHQEWAPAGFPSEFYALGGMGHGIPVRATITSFGPVLLSKVLQLNQTQEQSLGLIFHYADQKGLELVDLKDLRAVVAFLTSDEGKQELKALGGISTATAGVILRSFTAFEAQGMSPFFGEPEFDTSELLRTASDGRGTVSVLELPAVQDKPQLFSTFLMWLLADLFHDLPEVGDADQPKLVFFFDEAHLLFNDASKAFLDSITQTVRLIRSKGVGVFFVTQTPKDVPADVLAQLGNRVQHALRAFTPDDQKALKSTVKTFPNSAYDLEEVLTGLGTGEAVVTVLSEKGAPTPVAVTRLRAPESLMGPVDAAVLDQAVKSSPLYGRYARAVDRESAYEKLTAREAEAAGRREEEPAARGRTAAPAEEPSVVEQVVGSGVFKSLARSLGTQLGREITRSIFGTAKRRR

SEQ ID NO: 106580 - DNA, 1515 bp, Shigella flexneri 2a str. 2457T
  CDS (1)..(1515): transl_table=11
atgagcgaacccctgttaattgcccgcacgccggacacagaactgtttttactgccgggaatggctaaccgtcacgggctgattactggcgcaacggggacgggtaaaaccgttacgctgcaaaaactggcagagtcattgtcggaaatcggcgtgccggtgtttatggctgatgtgaaaggcgatctgaccggtatcgcgcaggcaggaacggcgtcggaaaaactgctcacaaggcttaaaaatatcggcgtcaatgactggcaaccgcatgccaatccggtggtggtgtgggatatctttggcgagaaaggccacacggtgcgggcgacggtttcggatctggggccgctgttgctggcgcgactgttgaatctcaacgatgtgcaatctggcgtgctgaatattatcttccgcattgcggacgatcagggattgttgctgctcgactttaaagatttgcgggcgattacccagtacatcggcgataacgccaaatccttccagaatcagtacggaaatatcagtagcgcatcggttggtgccatccagcgcggattactgtcgctggaacagcaaggcgcagcacacttctttggtgagccgatgctggatatcaaagactggatgcgcaccgatgccaacggtaaaggcgttatcaatatcctcagcgccgagaaactttatcagatgccgaaactgtacgccgccagcctgctgtggatgctttcagagttgtatgaacaattgccggaagcgggcgatctggagaaaccaaaactggtgtttttcttcgacgaggcacatctgctgtttaacgatgcaccgcaggtactgctggataagattgagcaggtgataaggcttattcgctcaaaaggcgtgggcgtctggttcgtttcgcaaaacccgtctgatattccggataatgtgttcggccagctcggtaatcgtgttcagcacgctttgcgggcttttacgccaaaagatcagaaagcagtgaagacagcggcgcaaaccatgcgggccaatccggcatttgataccgaaaaggcaatccaggaactggggaccggcgaggcgttaatctcgtttctcgatgcaaaaggaagtccttctgtggtggaacgggcgatggtgatcgcaccttgttcgcgaatggggccggtgacggaagatgagcgtaatggcctgattaatcactccccggtgtatggcaaatatgaagatgaggtggaccgcgagtccgcctatgagatgctgcaaaaaggctttcaggccagtaccgagcagcaaaataatccccccgtgaaagggaaagaggtggcggtggatgacggtattcttggtggattgaaggatattttgtttggcactaccggaccacgcggcgggaagaaagatggtgtggtgcaaacaatggcgaaaagcgccgctcgccaggtgacgaatcagattgtacgcggggatgttggggagtttgctgggggggagaaaaagataagtcagacgtga

SEQ ID NO: 106581 - protein, 504 aa, Shigella flexneri 2a str. 2457T
MSEPLLIARTPDTELFLLPGMANRHGLITGATGTGKTVTLQKLAESLSEIGVPVFMADVKGDLTGIAQAGTASEKLLTRLKNIGVNDWQPHANPVVVWDIFGEKGHTVRATVSDLGPLLLARLLNLNDVQSGVLNIIFRIADDQGLLLLDFKDLRAITQYIGDNAKSFQNQYGNISSASVGAIQRGLLSLEQQGAAHFFGEPMLDIKDWMRTDANGKGVINILSAEKLYQMPKLYAASLLWMLSELYEQLPEAGDLEKPKLVFFFDEAHLLFNDAPQVLLDKIEQVIRLIRSKGVGVWFVSQNPSDIPDNVFGQLGNRVQHALRAFTPKDQKAVKTAAQTMRANPAFDTEKAIQELGTGEALISFLDAKGSPSVVERAMVIAPCSRMGPVTEDERNGLINHSPVYGKYEDEVDRESAYEMLQKGFQASTEQQNNPPVKGKEVAVDDGILGGLKDILFGTTGPRGGKKDGVVQTMAKSAARQVTNQIVRGDVGEFAGGEKKISQT

SEQ ID NO: 106582 - DNA, 1488 bp, Nitrosomonas europaea ATCC 19718
  CDS (1)..(1488): transl_table=11
atgactgaaccgcttctcatcgctaaatccggcaataccgaactggccatcctgccgagcatggccaaccgccacgggctgattgccggggcaaccggtacaggtaagaccatcacgctgcaaagtctggcagagcagttttcgcgtgccggggtgccggtgttcatggcggatgtgaagggtgatctttccggcatgtgccagccgggcgggggtaatgccagggtggaagcgcgtgtggcggagctgggattgaagggctttggctacgcggcttgcccggtggtgttctgggatgtgtttggccagaaggggcacccggtgcgagcaacggtatccgacatgggaccattgctgctggcacgcatgctgaatctgaacgatacccagagtggggtgctgacggcagtattccatattgccgatgacaatggctggctgttgctggacctgaaggatctgcgtgcgatgttgcagcacgcggcggaaaacgccagcagttacagtgtggaatacggcaatatttctaccgccagcgtcggtgccatccagcgcagattattgcaactggagcacgagggcggtgaccagctgtttggcgagcctgcgctcaattttgacgatctgatgcagattgcagaagatggacgcggcataatcaatatcttggcggcagaaacgctttataactcaccgcgcgcttatgccacgctgcttttgtggctgctttccgagttgttcgagaaccttcccgaagtgggagatgtggaaaagcctcgactggtgttcttttttgatgaagcgcatctgctgttcaatgatgcacccgccgcgctgctgtccagaatcgagcaggtggtacggctgatccgctccaagggtgttggcgtgtattttgtcagccagaatccgctggatattccggatgcagtgttgggacaactgggcaaccgtgtccagcatgccctgcgcgcctttacgccacgtgaccagaaagcggtacgggcggcagccgaaacctttcgccccaatccgcaaatcgacgtggaggcggccattaccgagatgggcgtaggcgaagcgctgatttccctactggatgaaaagggacgtcctcaccccgtggagcgcggcctgattgtgccgccgggcagccgagtggggccggctaccgaggccgagcgtcaacaggtcattcgcggttccctgctgtacgggcattatgaacagttggtggatcgggaatcagcttatgaaatcctcaaggcgcgtgccgcaacatcaccggaacaagcgccggctgaagccgatcgcggctttaactggggcgaattgctgggcggcagcactggaccgcgcggcgggcgacgcgagggtatcgtggagacgataaccagaagcacggcgcgcaccattggctcgcagcttgggcgtcaggtgatccgtggcgtgctgggttccatttttggtggcgggcggcggcgctaa

SEQ ID NO: 106583 - protein, 495 aa, Nitrosomonas europaea ATCC 19718
MTEPLLIAKSGNTELAILPSMANRHGLIAGATGTGKTITLQSLAEQFSRAGVPVFMADVKGDLSGMCQPGGGNARVEARVAELGLKGFGYAACPVVFWDVFGQKGHPVRATVSDMGPLLLARMLNLNDTQSGVLTAVFHIADDNGWLLLDLKDLRAMLQHAAENASSYSVEYGNISTASVGAIQRRLLQLEHEGGDQLFGEPALNFDDLMQIAEDGRGIINILAAETLYNSPRAYATLLLWLLSELFENLPEVGDVEKPRLVFFFDEAHLLFNDAPAALLSRIEQVVRLIRSKGVGVYFVSQNPLDIPDAVLGQLGNRVQHALRAFTPRDQKAVRAAAETFRPNPQIDVEAAITEMGVGEALISLLDEKGRPHPVERGLIVPPGSRVGPATEAERQQVIRGSLLYGHYEQLVDRESAYEILKARAATSPEQAPAEADRGFNWGELLGGSTGPRGGRREGIVETITRSTARTIGSQLGRQVIRGVLGSIFGGGRRR

SEQ ID NO: 106584 - DNA, 1476 bp, Haemophilus ducreyi 35000HP
  CDS (1)..(1476): transl_table=11
atgagagattatccaattgctcaaactaacacaggtcaaattatttcattgacagcgaaaatggcgaaccgccacggattaattgccggtgcaacaggaacgggtaaaacggtgacgttacgtaaattagctgagctattcagtgatgatggtgtccccgtttttcttgttgatgttaaaggcgatttgtcagggctagcacaagcggggcatttaacaggaaaagtggctgaacgtattgcacaatttgatttaggcggtgagaattacttaaattcttatcctgttacatattgggacctttttggacaaagtggtatccctttgcgcaccactatttcagaaatggggccaatgttgcttgctcgtttactaaatttaaatgccacacaagaaggattattgaatttagtttttagagtggccgatgatcgtggtttattattgattgatttgaaagatttacgtgcgctcttaacgtttgtggctgaaaatgctaaagcatttcaaatagaatatggcaatatttcagccgctagtataggcgctattcagcgttcattacttgccttagaaaatgaaggtgcgagcaatttatttggcgaaccagcattgaatttagccgattggatacaaacgcacgatggtaaaggcgtaattaatgtattgaactccgaaaaattgattaattcaccacgtttatatagtgcttttttattgtggtttatggcagagttatttgaaaacttacccgaagtaggtgatttagcaaagccaaactttgtattgtttttcgatgaagcacatttattatttgatggcgcgcccaaagtgttggtggacaaaatagaacaagttgtgcgcttaattcgctcaaaaggtgttggcgtttattttgtaacacaaaatccgttagatttaccagacactgtgcttggtcaattaggtaatcgaattcaacatgccttacgcgcatttacgccacgagatcaaaaagctgttaaggctgcggcagaaacatttcgtgcgaataagcatattaatgtaattgaagcgatttctcagttagcggttggggaagcacttatttcggtattagatgaaaaaggaatgccaactccggttgaacgggcgtatatttatccgccaagaagtcagttagcccctctttctatgaatgaacgagatgaattagttaaacaagatgatttatatcactattataaccaatatgtggataactattctgcttatgaggctttaaatgctcaagctaaaatagaacaagcagatgcagacagtcaaaataatttttttgcaggaatattaagcgctatttttggtaataaaaagaaaaaagatcaaaccgttgctgaacagatagtcagtaaagtgactcaggatgtgacaagaaaactgaccaatcaagtatctaaacgtattgtgcgtgggcttttgggcgcgattattaaataa

SEQ ID NO: 106585 - protein, 491 aa, Haemophilus ducreyi 35000HP
MRDYPIAQTNTGQIISLTAKMANRHGLIAGATGTGKTVTLRKLAELFSDDGVPVFLVDVKGDLSGLAQAGHLTGKVAERIAQFDLGGENYLNSYPVTYWDLFGQSGIPLRTTISEMGPMLLARLLNLNATQEGLLNLVFRVADDRGLLLIDLKDLRALLTFVAENAKAFQIEYGNISAASIGAIQRSLLALENEGASNLFGEPALNLADWIQTHDGKGVINVLNSEKLINSPRLYSAFLLWFMAELFENLPEVGDLAKPNFVLFFDEAHLLFDGAPKVLVDKIEQVVRLIRSKGVGVYFVTQNPLDLPDTVLGQLGNRIQHALRAFTPRDQKAVKAAAETFRANKHINVIEAISQLAVGEALISVLDEKGMPTPVERAYIYPPRSQLAPLSMNERDELVKQDDLYHYYNQYVDNYSAYEALNAQAKIEQADADSQNNFFAGILSAIFGNKKKKDQTVAEQIVSKVTQDVTRKLTNQVSKRIVRGLLGAIIK

SEQ ID NO: 106586 - DNA, 1599 bp, Bordetella pertussis Tohama I
  CDS (1)..(1599): transl_table=11
gtgcatgccacggcccacaagcggcggcccaggctctacacttgggcgtccgattttgcccccttccggagagcggttatgcctgatcccattgttatcgccaagaatgcccagaccgagctggcgctgctgcccgcgctggccaatcggcacggctgcattaccggcgccaccggcacgggcaaaacggtgacgcttcaggtgctcgccgaggcgttttcccgtattggcacgccggttttcatggctgatgtaaagggggatctgaccgggatatcgcaggcgggtacggcatcgccgaaactgcaggagcgtctgaagaacctgggcctgcccgagccggcctggggcgccagcccggtatcgctatgggatgtgttcggcgaacagggcgtgccgatccgcgccacggtgtcggacatggggcccttgctgctgtcgcgcatgctggagctcaacgatacccaggaaggggtgctgacgctggtgttccgcgtggccgacgacgaggggcagttgctgctggacctgaaggacttgcgcgccatgctgcagaacgtggcggaccgctcggccgagctgaagacgcgctatggcaatgtgtcggccgccacggtgggcgccatccagcgcggcctgctgcggctggagtcgcagggcgccgagcaattcttcggcgagcccatgctggacgtgcacgatctgctgcgcaccgacgcgcaggggcgcgggatggtcaatatcctggcggccgacaagctgatgcaggcgccgcgcctgtacggggtgttcctgctctggctgctggccgacctgtacgagaagctgccagagatcggcgacccggagcaacccgggctggtgttcttcttcgacgaggcgcacctgctgttcaatgatgcgccatcggcgctgctggacaagatcgagcaggtggtgcggctggtgcgctccaagggcgtgggggtgtacttcgtgacgcagaatccgctggacatcccggacaccgtgctgggccagctgggcaaccgcatccagcacgccttgcgcgccttcacgccgcgcgaccagaaggcggtcaagacggcggcgcagacgatgcgcccgaatccggggctggatatcgaggccgccatcacggagctcggcgtgggcgaggccctggtctcgctgctggatgccaagggacggccgaccccgaccgaacgcgcctggatcctgccgccgggcagccgcatcggcccggccaccgatgccgagcgccaggccttgaggcaggccatgccgctggcgcccaagtacgagcagaccgtcgaccgcgagtcggcctacgaggtgctgaccgcgcgcgccgcggccgatgcgccggccacggacggcgcccgcgcgcccgcgggcaagaatggcgcgccggccgcgcccgccgaggaaggcgggctgatgcaaggcatcaacgaggtgctgttcggttcgaccggttcgcgcggcggcaagcgcgacggcgtggtccagagcgtggccaagagcacggcgcgccagatggcgcgcgaactggtgcggggcgtgctgggatccctgctggggtcgcggcgacgctga

SEQ ID NO: 106587 - protein, 532 aa, Bordetella pertussis Tohama I
MHATAHKRRPRLYTWASDFAPFRRAVMPDPIVIAKNAQTELALLPALANRHGCITGATGTGKTVTLQVLAEAFSRIGTPVFMADVKGDLTGISQAGTASPKLQERLKNLGLPEPAWGASPVSLWDVFGEQGVPIRATVSDMGPLLLSRMLELNDTQEGVLTLVFRVADDEGQLLLDLKDLRAMLQNVADRSAELKTRYGNVSAATVGAIQRGLLRLESQGAEQFFGEPMLDVHDLLRTDAQGRGMVNILAADKLMQAPRLYGVFLLWLLADLYEKLPEIGDPEQPGLVFFFDEAHLLFNDAPSALLDKIEQVVRLVRSKGVGVYFVTQNPLDIPDTVLGQLGNRIQHALRAFTPRDQKAVKTAAQTMRPNPGLDIEAAITELGVGEALVSLLDAKGRPTPTERAWILPPGSRIGPATDAERQALRQAMPLAPKYEQTVDRESAYEVLTARAAADAPATDGARAPAGKNGAPAAPAEEGGLMQGINEVLFGSTGSRGGKRDGVVQSVAKSTARQMARELVRGVLGSLLGSRRR

SEQ ID NO: 106588 - DNA, 1599 bp, Bordetella parapertussis 12822
  CDS (1)..(1599): transl_table=11
gtgcatgccacggcccacaagcggcggcccaggctctacacttgggcgtccgattttgcccccttccggacagcggttatgcctgatcccattgttatcgccaagaatgtccagaccgagctggcgctgctgcccgcgctggccaatcggcacggctgcattaccggcgccaccggcacgggcaaaacggtgacgcttcaggtgctcgccgaggcgttttcccgtattggcacgccggttttcatggctgatgtaaagggggatctgaccggggtatcgcaggcgggtacgccatcgccgaagttgcaggagcgtctgaagaacctgggcctgcccgagccagcctggggcgccagcccggtatcgctgtgggatgtgttcggcgaacagggcgtgccgatccgcgccacggtgtcggacatggggcccttgctgctgtcgcgcatgctggagctcaacgatacccaggaaggggtgctgacgctggtgttccgcgtggccgacgacgaggggcagttgctgctggacctgaaggacttgcgcgccatgctgcagaacgtggcggaccgctcggccgagctgaagacgcgctatggcaatgtgtcggccgccacggtgagcgccatccagcgcggcctgctgcggctggagtcgcagggcgccgagcaattcttcggcgagcccatgctggatgtgcacgatctgctgcgcaccgatgcgcaggggcgcggcatggtcaatatcctggcggccgacaagctgatgcaggcgccgcgcctgtacggggtgttcctgctctggctgctggccgacctgtacgagaagctgcccgagatcggcgacccagagcaacccgggctggtgttcttcttcgacgaggcgcacctgctgttcaatgatgcgccatcggcgctgctggacaagatcgagcaggtggtgcggctggtgcgctccaagggcgtgggggtgtatttcgtgacgcagaatccgctggacatcccggacaccgtgctgggccagctgggcaaccgcatccagcacgccttgcgcgccttcacgccgcgcgaccagaaggcggtcaagacggcggcgcagacgatgcgcccgaatccggggctggatatcgaggccgccatcacggagctcggcgtgggcgaggccctggtctcgctgctggatgccaagggacggccgaccccgaccgaacgcgcctggatcctgccgccgggtagccgcatcggcccggccaccgatgccgagcgccaggccttgaggcaggccatgccgctggcgcccaagtacgagcagaccgtcgaccgcgagtcggcctacgaggtgctgaccgcgcgcgccgcggccgatgcgccggccacggacggcgcccgcgcgcccgcgggcaagaatggcgcgccggccgcgcccgccgaggagggcgggctgatgcaaggcatcaacgaggtgctgttcggttcgaccggcccgcgcggcggcaagcgcgacggcgtggtccagagcgtggccaagagcacggcgcgccagatggcgcgcgaactggtgcggggcgtgctgggatccctgctgggatcgcggcggcgctga

SEQ ID NO: 106589 - protein, 532 aa, Bordetella parapertussis 12822
MHATAHKRRPRLYTWASDFAPFRTAVMPDPIVIAKNVQTELALLPALANRHGCITGATGTGKTVTLQVLAEAFSRIGTPVFMADVKGDLTGVSQAGTPSPKLQERLKNLGLPEPAWGASPVSLWDVFGEQGVPIRATVSDMGPLLLSRMLELNDTQEGVLTLVFRVADDEGQLLLDLKDLRAMLQNVADRSAELKTRYGNVSAATVSAIQRGLLRLESQGAEQFFGEPMLDVHDLLRTDAQGRGMVNILAADKLMQAPRLYGVFLLWLLADLYEKLPEIGDPEQPGLVFFFDEAHLLFNDAPSALLDKIEQVVRLVRSKGVGVYFVTQNPLDIPDTVLGQLGNRIQHALRAFTPRDQKAVKTAAQTMRPNPGLDIEAAITELGVGEALVSLLDAKGRPTPTERAWILPPGSRIGPATDAERQALRQAMPLAPKYEQTVDRESAYEVLTARAAADAPATDGARAPAGKNGAPAAPAEEGGLMQGINEVLFGSTGPRGGKRDGVVQSVAKSTARQMARELVRGVLGSLLGSRRR

SEQ ID NO: 106590 - DNA, 1599 bp, Bordetella bronchiseptica RB50
  CDS (1)..(1599): transl_table=11
gtgcatgccacggcccacaagcggcggcccaggctctacacttgggcgtccgattttgcccccttccggagagcggttatgcctgatcccattgttatcgccaagaatgcccagaccgagctggcgctgctgcccgcgctggccaatcggcacggctgcattaccggcgccaccggcacgggcaaaacggtgacgcttcaggtgctcgccgaggcgttttcccgtattggcacgccggttttcatggctgatgtaaagggggatctgaccggggtatcgcaggcgggtacgccatcgccgaagttgcaggagcgtctgaagaacctgggcctgcccgagccagcctggggcgccagcccggtatcgctgtgggatgtgttcggcgaacagggcgtgccgatccgcgccacggtgtcggacatggggcccttgctgctgtcgcgcatgctggagctcaacgatacccaggaaggggtgctgacgctggtgttccgcgtggccgacgacgaggggcagttgctgctggacctgaaggacttgcgcgccatgctgcagaacgtggcggaccgctcggccgagctgaagacgcgctatggcaatgtgtcggccgccacggtgggcgccatccagcgcggcctgctgcggctggagtcgcagggcgccgagcaattcttcggcgagcccatgctggatgtgcacgatctgctgcgcaccgatgcgcaggggcgcggcatggtcaatatcctggcggccgacaagctgatgcaggcgccgcgcctgtacggggtgttcctgctctggctgctggccgacctgtacgagaagctgcccgagatcggcgacccagagcaaccggggctggtgttcttcttcgacgaggcgcacctgctgttcaatgatgcgccatcggcgctgctggacaagatcgagcaggtggtgcggctggtgcgctccaagggcgtgggggtgtatttcgtgacgcagaatccgctggacatcccggacaccgtgctgggccagctgggcaaccgcatccagcacgccttgcgcgccttcacgccgcgcgaccagaaggcggtcaagacggcggcgcagacgatgcgcccgaatccggggctggatatcgaggccgccatcacggagctcggcgtgggcgaggccctggtctcgctgctggatgccaagggacggccgaccccgaccgaacgcgcctggatcctgccgccgggtagccgcatcggcccggccaccgatgccgagcgccaggccttgaggcaggccatgccgctggcgcccaagtacgagcagaccgtcgaccgcgagtcggcctacgaggtgctgaccgcgcgcgccgcggccgatgcgccggccacggacggcgcccgcgcgcccgcgggcaagaatggcgcgccggccgcgcccgccgaggaaggcgggctgatgcaaggcatcaacgaggtgctgttcggttcgaccggcccgcgcggcggcaagcgcgacggcgtggtccagagcgtggccaagagcacggcgcgccagatggcgcgcgaactggtgcggggcgtgctgggatccctgctgggatcgcggcggcgctga

SEQ ID NO: 106591 - protein, 532 aa, Bordetella bronchiseptica RB50
MHATAHKRRPRLYTWASDFAPFRRAVMPDPIVIAKNAQTELALLPALANRHGCITGATGTGKTVTLQVLAEAFSRIGTPVFMADVKGDLTGVSQAGTPSPKLQERLKNLGLPEPAWGASPVSLWDVFGEQGVPIRATVSDMGPLLLSRMLELNDTQEGVLTLVFRVADDEGQLLLDLKDLRAMLQNVADRSAELKTRYGNVSAATVGAIQRGLLRLESQGAEQFFGEPMLDVHDLLRTDAQGRGMVNILAADKLMQAPRLYGVFLLWLLADLYEKLPEIGDPEQPGLVFFFDEAHLLFNDAPSALLDKIEQVVRLVRSKGVGVYFVTQNPLDIPDTVLGQLGNRIQHALRAFTPRDQKAVKTAAQTMRPNPGLDIEAAITELGVGEALVSLLDAKGRPTPTERAWILPPGSRIGPATDAERQALRQAMPLAPKYEQTVDRESAYEVLTARAAADAPATDGARAPAGKNGAPAAPAEEGGLMQGINEVLFGSTGPRGGKRDGVVQSVAKSTARQMARELVRGVLGSLLGSRRR

SEQ ID NO: 106592 - DNA, 1611 bp, Rhodopseudomonas palustris CGA009
  CDS (1)..(1611): transl_table=11
atggcggcgagcggcatcgcgagcggtgataccgaagacaagatttttatcggtaaaggcgaacagccggcgtggttgacgttggcgctcgccaatcgtcacggcctggtcaccggcgccaccggtacaggcaaaacagtgtcgctgcaggtgatggcggaaggctttgcgcgcgccggcgtaccggtatttgcagccgacatcaaaggcgatctatccggtatcgccgaggtcggcgaggccaaggacttcgtcctcaagcgcgcccaggagatcgggctgaaattccagcctgatcagttcaccaccgtgttctgggacgtgttcggtgagcagggccatccggtgcgcgccaccgtttccgagatggggccgctgctgctgtcgcggatgctcgatctcaacgacgtgcaggagggcgtactcaacgtcgcattccgtgtcgccgacgacatgggcctgccgctgatggacatgaaggatctgcgtgcgatgctggatgcgatcgcgccgatcgcccagaaggtcgcggacaacagcgatgtcaacgccgacattcgccaggctgcgcagtcgctcggtaacgtcaccaagcagaccgtcggcaccatccaacgtcagcttctggtcctggaaaatcagggcggcgagaagttcttcggcgagcctgcgctgcagctcaaagacttcatccgcaccgacagccagggccgcggcctcgtcaatattctggtcgccgacaagctgatgaccaatccgcggctgtacgcgaccttcctgctgtggatgctgtcggaactgttcgaggagctgccggaagtcggcgatcccgacaagccgaagctggtgttcttcttcgacgaggcacacctgctgttcaacgacgcgcccaagccgttgatggacaaaattgaacaggtggtgcggctgatccgctccaagggcgtcggcgtgtacttcatcacccagaacccgatcgacgtgcccgaccgggtgctggcgcagcttggcaatcgcgtgcagcacgcgttgcgcgcgttcacgccgcgcgaccagaaggcagtggcggctgcggccgacacgtttcggccgaacccgaagctcgataccgctaaggcgatcaccgagctcggcaagggcgaggcgctggtgtcgttcctcgaaggcaacggcacgccggcgatggtcgagcgcgtgctggtgcggccgccgtcggcgcggatcgggccgatcacgccggaggagcgcaaggcgatcatcgccgcgagcccggtgaggggcaaatacgacaccacggtggattccgaatccgcctatgagaagctgcgcgcccggatcgacggcaagtcggcgagtgaaggccctgcaccgggcgagggcggcattctcggtcagctcggcgggctgttttcgaccgtgttcggcaccaacacgccgcgcggcaagctcaccaccggtcaactcgtcgcccgcaatgtcgcccgcaccgtcgcaaccacggtggtcggcggcgtcgccgccgagctcggcaagaaggtcggcggctcgctcggcagctcggtcggtcgctcgatcgtgcgtggcacgctcggcggaatgctgcgacggtga

SEQ ID NO: 106593 - protein, 536 aa, Rhodopseudomonas palustris CGA009
MAASGIASGDTEDKIFIGKGEQPAWLTLALANRHGLVTGATGTGKTVSLQVMAEGFARAGVPVFAADIKGDLSGIAEVGEAKDFVLKRAQEIGLKFQPDQFTTVFWDVFGEQGHPVRATVSEMGPLLLSRMLDLNDVQEGVLNVAFRVADDMGLPLMDMKDLRAMLDAIAPIAQKVADNSDVNADIRQAAQSLGNVTKQTVGTIQRQLLVLENQGGEKFFGEPALQLKDFIRTDSQGRGLVNILVADKLMTNPRLYATFLLWMLSELFEELPEVGDPDKPKLVFFFDEAHLLFNDAPKPLMDKIEQVVRLIRSKGVGVYFITQNPIDVPDRVLAQLGNRVQHALRAFTPRDQKAVAAAADTFRPNPKLDTAKAITELGKGEALVSFLEGNGTPAMVERVLVRPPSARIGPITPEERKAIIAASPVRGKYDTTVDSESAYEKLRARIDGKSASEGPAPGEGGILGQLGGLFSTVFGTNTPRGKLTTGQLVARNVARTVATTVVGGVAAELGKKVGGSLGSSVGRSIVRGTLGGMLRR

SEQ ID NO: 106594 - DNA, 1566 bp, Mycobacterium avium subsp. paratuberculosis K-10
  CDS (1)..(1566): transl_table=11
atgagcaccgattcagcggcaacaccggcgacgcggatcgcggacggctacgccgtcgcgggccaggcattggaattgggcacggtcgtcatcgacggtgcggccgacccgtcggcgcagatccgcatcccgctggcgacggtgaaccggcacggcctggtggccggcgcgacgggcaccggcaagaccaagacgctgcaactgatcgccgagcagctcagcgccgcgggcgtgccggtgttgatggccgacgtcaagggtgacctgtccgggctgtccaaggaaggggagcgcagcgaccgaaccgatgcacgcgccaaggacaccggcgatgattggcaaccctcggggttcccggtggagttcctgtcgttaggtgccaacgggattggcgtgccgatccgcgcgaccgtcgacagcttcgggcccgtattgctgtcaaaagtattggggctcaacgctactcaagaatcgacgcttgggctgatcttccactgggccaaggagcggaactggccgctggtcaccaccgacaatctacgcggtgccatcagccacctcaccagcgacgagggcaaggaagatctgaagtccctgggcggcgtgtcggcgacgacggcgggcgtgatcctgcgggcgctggtgaacctcgatgccgagggcggcgacaccttcttcggcgaacccaagctcgaccccaacgacttgctgcgcaccaacgatcaaggccaaggcgtcatttcgctgctggagttcaccggccagtcggtgcgcccggtcatcttctccaccttcctgatgtggttgctcgccgacctgtacacccaactgcccgaggtcggcgacatcgacaaacccaagctggtcttcttcttcgacgaggcgcacctgctgttcgccgacgcgtccaaggccttcctggaacaggtcgaacagacggtgaagctgatccgctccaagggcgtcggggtgttcttctgcacccagttacccaccgacattcccaacgacgtgctgtcccagttgggtgcgcgaattcagcacgcgctgcgggctttcacgcccgacgaccagaaggcgctgtccaagaccgtgcgcacctacccgaaaaccgatgtctacgacctggagtcggcgttgacgtcgctgggaatcggcgaggccgtcgtgaccgtgctctccgagaagggcgcacccacgccggtggcctggacccggatgcgggtgccccgatcgctgatggcgtcgatcgggacagaggagatcacgaaggcagccaaacgcagtgagctgcaagcgaagtacggccaaacggtgcaacaaccggcccagcccccgccgggcccgcaagcaccgaccggatcgcggtcgccgcaagcccagtccgactacccgcccgtcccgccgaatggcccggttccgccgatgccggaacccgcggagcccaaagggccgggcctgctggaaaggctctggcacgaccgcgacgtacagagcgcggtgaacaccgggatccgggagatcattcggctcaagttcggcggcggaggccgtcgccgcaagtaa

SEQ ID NO: 106595 - protein, 521 aa, Mycobacterium avium subsp. paratuberculosis K-10
MSTDSAATPATRIADGYAVAGQALELGTVVIDGAADPSAQIRIPLATVNRHGLVAGATGTGKTKTLQLIAEQLSAAGVPVLMADVKGDLSGLSKEGERSDRTDARAKDTGDDWQPSGFPVEFLSLGANGIGVPIRATVDSFGPVLLSKVLGLNATQESTLGLIFHWAKERNWPLVTTDNLRGAISHLTSDEGKEDLKSLGGVSATTAGVILRALVNLDAEGGDTFFGEPKLDPNDLLRTNDQGQGVISLLEFTGQSVRPVIFSTFLMWLLADLYTQLPEVGDIDKPKLVFFFDEAHLLFADASKAFLEQVEQTVKLIRSKGVGVFFCTQLPTDIPNDVLSQLGARIQHALRAFTPDDQKALSKTVRTYPKTDVYDLESALTSLGIGEAVVTVLSEKGAPTPVAWTRMRVPRSLMASIGTEEITKAAKRSELQAKYGQTVQQPAQPPPGPQAPTGSRSPQAQSDYPPVPPNGPVPPMPEPAEPKGPGLLERLWHDRDVQSAVNTGIREIIRLKFGGGGRRRK

SEQ ID NO: 106596 - DNA, 1548 bp, Treponema denticola ATCC 35405
  CDS (1)..(1548): transl_table=11
atggaaaaaggaatttttatcggagtaggagagagcagggtagagcttctacctaatcgtgcaaataggcacggcctcattgcgggggctacgggaacaggaaagactattaccttaaaggtaattgcagaggcctttagcgacatgggtgtccccgtttttttgcccgatgtaaagggagacttatgcagctttgccgaaaagggcgaggctaatcaaaaaataaacgaaagacttggccttttaggtctttccgaattcgagtttaaatcctatcctatacgcctttggagtatcttaaaagaaaccggccatccgatacgcactaccatatctgagatggggccccttcttctatccaaacttttaaatttaaacgaggttcaagcaggtgttctcaacattgcctttagagtagcagatgaagatggattactccttttggatataaaagacctaaaatcaatcttggtttatataggtgaaaacagcaaagacttaaagcttaaatacggtaatatttccgactcttcaataggagcaattcaacgggctctcctcattttggaaggagagggggccgataacttttttgcagagcctgccttggatattgccgatttttttaaacttacctcggacggaaggggctatataaacattttaaattctacgagcctctatcaaaggcctaatctttattcgacatttttgctttggtttttgtccgagctctatgaaaacctccctgaagccggagacacggaaaaaccgaaaatcgttttcttttttgatgaagctcatcttctttttaataatttatcttcagtcctcatcgaaaagatagagaccatgatcaggcttatccgttcaaagggtgttgcagttttttttgttacgcaaaatcctgccgatttgcctgaaagtattttaagccagttgggaaataaatttcaacatgctctcagggcatttactcccaaggaccaaaaggctataaagctttcggccgaaaccttcagagctaatcctaaattcgatacggctaaggtccttaccgaacttaaaacgggtgaagcccttgtttccctcttacaggaagacggaagtccatctgtaagtcaaagggttctgatagctccccctaagagtaagataggaaccgtaggagaggcaaaacttaaagctattgttgaagagtctccccttctttataagtacaaggatataatcgacagagaatccgcctatgaaattcttacggaccggtttgaagaaaagaagcttgttgccgaaagagaacttgaagaaaaacgtcttaccaaggaggctgctgcaaaggcaaaagaagaggcggccttaatcagggccgagaatgcccgaatacgggcagaaaatgcaaggtgccgtttggaagagagtcaaaataaaaaacaaagaagcgaagccgggaggctgggccgtgtcttggttgacagcatgacccgcacggtaggcagagaaattacccgcggagttttcggctcgataaaaaagatgtttaagtag

SEQ ID NO: 106597 - protein, 515 aa, Treponema denticola ATCC 35405
MEKGIFIGVGESRVELLPNRANRHGLIAGATGTGKTITLKVIAEAFSDMGVPVFLPDVKGDLCSFAEKGEANQKINERLGLLGLSEFEFKSYPIRLWSILKETGHPIRTTISEMGPLLLSKLLNLNEVQAGVLNIAFRVADEDGLLLLDIKDLKSILVYIGENSKDLKLKYGNISDSSIGAIQRALLILEGEGADNFFAEPALDIADFFKLTSDGRGYINILNSTSLYQRPNLYSTFLLWFLSELYENLPEAGDTEKPKIVFFFDEAHLLFNNLSSVLIEKIETMIRLIRSKGVAVFFVTQNPADLPESILSQLGNKFQHALRAFTPKDQKAIKLSAETFRANPKFDTAKVLTELKTGEALVSLLQEDGSPSVSQRVLIAPPKSKIGTVGEAKLKAIVEESPLLYKYKDIIDRESAYEILTDRFEEKKLVAERELEEKRLTKEAAAKAKEEAALIRAENARIRAENARCRLEESQNKKQRSEAGRLGRVLVDSMTRTVGREITRGVFGSIKKMFK

SEQ ID NO: 106598 - DNA, 1539 bp, Acinetobacter sp. ADP1
  CDS (1)..(1539): transl_table=11
atgggtacaccaatcatcattgcaaaaaaaaccaatgatattcaacaggatattattttacattctgaatttgccaatcgtcatggtttgattgctggtgcaacgggcactggtaaaacggtgacgttaaaggtgatggccgagagtttttcacggattggtgtgccggtatttttggccgatgccaaaggggatgtgtccagtattgccaaagcaggtagtgataatcctaagtttgatgcacgaataaaatcattgggtatagagagcattccgtttgcagcatctccaactattttttgggatttatttggtgagcaaggacatcctatccgtaccactatttcagaaattggcccactcctccttgcccaaatgctgaatcttaatgatacccaagaaggcgtgttatcggcgctatttagaattgccgatgatcagggattgttattgatcgattttaaagacttaaaagcgatgctgagttatgtcagtgaaaatgcagctgacctcaaagcagaatacggcaatttatcacctgccagcattggggcgattcagcgtaatttactcgcattaggcgatcaaggtggtgaacaattttttggagaaccaagtctgaatattcttgattttattcagactgacagcaacggccatggttacattaatgtattggccgcagataaactcatgaatacgccaaaactgtatgcgacttttttattatggatgctttcagaattatttgaacaactacctgaagtaggtgatttagacaaacctaaactggtgtttttctttgatgaagcccatttgctatttgataatgccagccctgccctacaacaaaaaattgaacaagtagtacgtttgattcgctccaaaggtgttggtatttactttattacccagaatccgctggatttacctgaaagtgtcttagggcaactgggcaatcgagtacaacatgcgttacgcgcctttacccctaaagatcaaaaagcggtgaaaacagcagcagatacctttagagccaatccagaatttaaagtggaccaagccattaccgaactggcggtgggtgaagctttaattagctgtttggatgagcaaggcacgccgcaaatagtagaacgtggttgggtcatgccgccctattcttcgtttagcccactgagtcctcaagaacgacaagcattcatggcacaaagcattgtagctggtgtgtatgaaaatgcggtggatcgagacagtgcttatgaaatgctgcaacgaaaagtcaatgaaagtacagcgcagcagcaggcacaagctgaagcaaaacaacaagaggccaatgccaaacagcaagcaaaagaacaagagcgcttagcacgagagcagcaaaaagccgaagaaaaggcccaacgtgatcgagaaaaactgactcaggatgtgattggcacttttgcaaaaagtgcggcacgaactcttggaggtccgacaggtcagaaactggtacgaggcttgttaggttctttatttggaaagcgctaa

SEQ ID NO: 106599 - protein, 512 aa, Acinetobacter sp. ADP1
MGTPIIIAKKTNDIQQDIILHSEFANRHGLIAGATGTGKTVTLKVMAESFSRIGVPVFLADAKGDVSSIAKAGSDNPKFDARIKSLGIESIPFAASPTIFWDLFGEQGHPIRTTISEIGPLLLAQMLNLNDTQEGVLSALFRIADDQGLLLIDFKDLKAMLSYVSENAADLKAEYGNLSPASIGAIQRNLLALGDQGGEQFFGEPSLNILDFIQTDSNGHGYINVLAADKLMNTPKLYATFLLWMLSELFEQLPEVGDLDKPKLVFFFDEAHLLFDNASPALQQKIEQVVRLIRSKGVGIYFITQNPLDLPESVLGQLGNRVQHALRAFTPKDQKAVKTAADTFRANPEFKVDQAITELAVGEALISCLDEQGTPQIVERGWVMPPYSSFSPLSPQERQAFMAQSIVAGVYENAVDRDSAYEMLQRKVNESTAQQQAQAEAKQQEANAKQQAKEQERLAREQQKAEEKAQRDREKLTQDVIGTFAKSAARTLGGPTGQKLVRGLLGSLFGKR

SEQ ID NO: 106600 - DNA, 1542 bp, Yersinia pseudotuberculosis IP 32953
  CDS (1)..(1542): transl_table=11
atgagtaacacattacttattgggaaagcgctggttaccgagaaaactcagccagcttcacgtgatttggtgatcttatcggcattggcaaaccgccatggcttaattaccggtgcgaccggtacaggtaaaactgtcaccttgcaaaagatggccgagcagttctctcgtattggtgtacccgtatttttggcggatgtgaaaggggacttatccggtatcggggctgaaggggtgaattcggaaaaactacaggcccgtctggccgcgattgatgtcacggattggcagccacaggcgtgtccgattgtgccttgggatatctttgctgaaaaaggccatcctatccgggcgacaatctcggatcttgggccgcttctacttggccgcttactcgatttaaatgacgtgcaaagtggtgttttgcaactggtatttaaaatcgccgatgacaacggcctgctgttgctggatatgaaagacctgcgtgctatcgtccagtatgttggggacaatgcgaaacagttccgtacgcaatatggcaatattacctccgcttctatcggcgcgatccagcgtggtttactcaccttggaagagcagggtgccaatcaattttttggcgagccgatgctggatattcacgatctcatgcaaacagatagccacgggcagggcgttatcaatttaatggctgccgaccgtctgattaatcagccaaagttatatgccattttcctgctttggctgttggccgagctttttgaacagctaccggaagtgggtgatgtggagaagccaaaactggtctttttctttgacgaggcccatttgttatttacggatgccccggcggcgttagtggataaggttgaacaagtggtgcggctgatccgctcgaaaggggtcggtatctacttcgtgacacaaaatcctctggatatcccagataagatcctcggccaactgggtaaccgggtacaacatgcgttacgcgcttttacgccacgggatcaaaaggcggttaaagccgcagctcagacgatgcggcctaatccggcattcagtgctgaacaggtgattaccgagttgggcgtcggtgaggcgctgatttctttccttgatgagaaagggcggcctaatgtggttgaacgggcgatggttatcgcaccgcaatcaaaaatgggcgcgttggatgcagtagcacgtaatcacgcaatcaatcattccccactgtatggtcgctatgaagagatgattgaccgcgagtctgcttatgaaaagttatcggcggggggcttttctaccatggggcgtgccgctgaaggggagccttctgttcctcagcaaccgacgaatcagcagggtagtggtggtggcttaatgggcgggctgaatgatttactgtttggttccacggggccgcgaggcggtaagcgggacggtattgtgcagactgcggccaagagcatggcacgggatttaggccggcaaattttgcgcggtgttttggggtcaattacgggggggcgcaaacgctaa

SEQ ID NO: 106601 - protein, 513 aa, Yersinia pseudotuberculosis IP 32953
MSNTLLIGKALVTEKTQPASRDLVILSALANRHGLITGATGTGKTVTLQKMAEQFSRIGVPVFLADVKGDLSGIGAEGVNSEKLQARLAAIDVTDWQPQACPIVPWDIFAEKGHPIRATISDLGPLLLGRLLDLNDVQSGVLQLVFKIADDNGLLLLDMKDLRAIVQYVGDNAKQFRTQYGNITSASIGAIQRGLLTLEEQGANQFFGEPMLDIHDLMQTDSHGQGVINLMAADRLINQPKLYAIFLLWLLAELFEQLPEVGDVEKPKLVFFFDEAHLLFTDAPAALVDKVEQVVRLIRSKGVGIYFVTQNPLDIPDKILGQLGNRVQHALRAFTPRDQKAVKAAAQTMRPNPAFSAEQVITELGVGEALISFLDEKGRPNVVERAMVIAPQSKMGALDAVARNHAINHSPLYGRYEEMIDRESAYEKLSAGGFSTMGRAAEGEPSVPQQPTNQQGSGGGLMGGLNDLLFGSTGPRGGKRDGIVQTAAKSMARDLGRQILRGVLGSITGGRKR

SEQ ID NO: 106602 - DNA, 1551 bp, Mannheimia succiniciproducens MBEL55E
  CDS (1)..(1551): transl_table=11
atgcttaactataaacctctaacggaaaaaagcggatttttctgcattctaaggactcttatgacccaatatatcattgctcaaacaaataaaggcgttcaattaggcattacggctaaaatggcaaaccgccacggtttaatcgcaggtgcgacgggaaccggtaaaaccgtgacattacgtaaacttgccgaagctttcagtgatgacggcgtgcccgtttttttagttgatgtaaaaggtgatctttccgggcttacggtgaaaggcactctgcaaggcaaaatcgccgaacgcgtcgaacagtttaatttaggcggcgagaactatttgagcggttatcccgtttcattttgggatgtgttcggcgaaacgggcattccgcttcgaaccactatttcggaaatggggccgatgttgctttctcgtttattaaatttaaacgctacgcaggaaggattactcaatctggttttccgtgttgccgatgataaaggactgttgcttatcgatctgaaagatttgcgcgccatgctgaaatttgtggcggaaaatgcaaaagaatttcaggtggaatacggcaacgtatcggcggcaagtgtgggcgccgttcaacgagcgttattaacgctggaaaacgaaggtgcgacaaatttattcggagagcccgcactgaatcttgaagattggctgcaaacccgggacgggcgaggggtaattaatattttaaattcagaaaaactaattaattcgccgcgtatgtatagcgcatttttattgtggttaatggcggaattattcgagcggttgcctgaagtgggcgatcctgaaaaaccgaaattcgtcatgttttttgacgaagcgcatcttttatttgacggtgtgccttccgcgttggtagataaagtcgagcaggttgtgcgtttgattcgttcaaaaggcgtagggatttattttgtcactcaaaacccgctggatttgcctgatacggtgttaggtcagcttggcaatcgggtacagcacgcattacgcgcctttactcctagagatcaaaaagccgtaaaatctgctgcggaaacatttcgtgccaatccgcaggtggatgtggttgagaccatttcaacactcggggtagggcaggcgttggtttcgtttttagatgaaaaaggtatgccgacaccggtggaaatcgtagggattttcccgccgaaaagccaattaacgccattgacgaatgaacagcgtacggattgggtgaaagacgatgagctttatcctcattatcgcgatttagtggataatgagtccgcttatgaaatattgaacgaccaatcggttcaggctcaagtacaacaacaggtgcaggatgaagaaaatagcgactttttcagcggcatgatttcttctattttcggtacgaaaaagaaaagccggcaaactgttgccgaacaaatggtaagttccgtcgcgcatcaagtaggacggaacttacgcaaccaggttaccaagcagattctgcgtgggattctgggcgccattacgaagaaataa

SEQ ID NO: 106603 - protein, 516 aa, Mannheimia succiniciproducens MBEL55E
MLNYKPLTEKSGFFCILRTLMTQYIIAQTNKGVQLGITAKMANRHGLIAGATGTGKTVTLRKLAEAFSDDGVPVFLVDVKGDLSGLTVKGTLQGKIAERVEQFNLGGENYLSGYPVSFWDVFGETGIPLRTTISEMGPMLLSRLLNLNATQEGLLNLVFRVADDKGLLLIDLKDLRAMLKFVAENAKEFQVEYGNVSAASVGAVQRALLTLENEGATNLFGEPALNLEDWLQTRDGRGVINILNSEKLINSPRMYSAFLLWLMAELFERLPEVGDPEKPKFVMFFDEAHLLFDGVPSALVDKVEQVVRLIRSKGVGIYFVTQNPLDLPDTVLGQLGNRVQHALRAFTPRDQKAVKSAAETFRANPQVDVVETISTLGVGQALVSFLDEKGMPTPVEIVGIFPPKSQLTPLTNEQRTDWVKDDELYPHYRDLVDNESAYEILNDQSVQAQVQQQVQDEENSDFFSGMISSIFGTKKKSRQTVAEQMVSSVAHQVGRNLRNQVTKQILRGILGAITKK

SEQ ID NO: 106604 - DNA, 1563 bp, Legionella pneumophila subsp. pneumophila str. Philadelphia 1
  CDS (1)..(1563): transl_table=11
ttggtgaatcaaaacgaatcctctatacttttaaaaactcttattatcaagaagataagcattatgtatgatgatctatggaagccttatgcgtctattcaactaccctctttaaaattgggcggcattgttttaaatggtcagttactctctgaaacgcctattcacttagtgttaaaggctttcaatcggcatggtttaattgcgggagcaaccggaacaggtaaaacgaaaaccatgcaggtattggcagagcaattatctctaaatggagtacccagtttagtgatggacattaagggggatatttctggtttggctatgccaggtcaaacttctactaaactagtggagagaggccagcagttacatatcgattttactccccgaggtttcccggtagagctattgacgcttactccacaagacctcggggttccattacgtgcgagaattgatgattttggtcccctgcttttttcgctgatgctggatctgaacgacactcaagcaggagttgtcactgtattatttgagtatgccaaggcgaatcaactgaatttggttaatttggatgattttaaatctttgctccaatttgctcaaacggatagaggcaaccagctgattgccgcccaatatggcggagtcgcttccacatccattgggactattgtccgtaaaatcatcgagctcgagtctcagggtgggaaacagttttttggtgaaccttcctttgtcattcaggatttgctgagaacggatgcaaatggtcatggtgttatctcgatattaagattattaaacatgcaagacaagccgaagttattttccagttttatgctgaaattgctgtctgatgtttatcgccaaatgccggaattaggtgatccggacaaaccacggttggttctctttatcgatgaggcgcatttaatttttaattattccagcaaagcattacttaatttaatagaaacaatagttaagctaatccgatctaaaggaattgggttgatattttgcactcaaacgcctaacgatatccctgaggctgttttaagccaattggggttaaaaatccaacactcattacgtgcttttactgcaaaagatcgaaaagccttaaagttggtatcgcagaattttccagtatccagttattataatactgagcaactactcactactttaagtataggggaagctttagtgagtgccttggatgccaagggtcaaccgacacctttagtccaagcgatgattagagctcccgaatcgcgtatggggactttaagcaatgaggaattaaaagttttagtgaatcaatctcctctttttgctaaatattatcaaatgatagatgtgccctctgcgaaagagaaattgtctgaactaatctctgagcaacaagttgcaaaacaacagaccagtcagaaagaaaacgattcctccgtgttgaataatttaagtaaaaacaccttattccgacaagtggtacgtcaagtttttagggaactcaccagagcgattttgtctttatttaagattaaaaggaactag

SEQ ID NO: 106605 - protein, 520 aa, Legionella pneumophila subsp. pneumophila str. Philadelphia 1
MVNQNESSILLKTLIIKKISIMYDDLWKPYASIQLPSLKLGGIVLNGQLLSETPIHLVLKAFNRHGLIAGATGTGKTKTMQVLAEQLSLNGVPSLVMDIKGDISGLAMPGQTSTKLVERGQQLHIDFTPRGFPVELLTLTPQDLGVPLRARIDDFGPLLFSLMLDLNDTQAGVVTVLFEYAKANQLNLVNLDDFKSLLQFAQTDRGNQLIAAQYGGVASTSIGTIVRKIIELESQGGKQFFGEPSFVIQDLLRTDANGHGVISILRLLNMQDKPKLFSSFMLKLLSDVYRQMPELGDPDKPRLVLFIDEAHLIFNYSSKALLNLIETIVKLIRSKGIGLIFCTQTPNDIPEAVLSQLGLKIQHSLRAFTAKDRKALKLVSQNFPVSSYYNTEQLLTTLSIGEALVSALDAKGQPTPLVQAMIRAPESRMGTLSNEELKVLVNQSPLFAKYYQMIDVPSAKEKLSELISEQQVAKQQTSQKENDSSVLNNLSKNTLFRQVVRQVFRELTRAILSLFKIKRN

SEQ ID NO: 106606 - DNA, 1527 bp, Azoarcus sp. EbN1
  CDS (1)..(1527): transl_table=11
atggtcgagccgctcttgatcgcccgcgccgggaacaaggacatcaacctgctgccgcgtctcgccaaccggcacggcctcgtcgccggcgcgaccgggaccgggaagacggtgacgctgcagaagatggccgaatccttcgcgggcatcggcgtgccggtgttcgtcgccgacatcaagggtgacctgtcgggcatcggggcgccaggcgtcgcaagcgacaagctgctgcagcggctcgctgcgatcggcatcaccgactacacgccgcgcgccaacaccgtggtgttctgggacgtgttcggcgagtccggccacccggtgcgcgcaacggtgtccgacatggggccgctgctgctcgcgcgcctcttgaacctcaacgacacgcagtccggcgtgctgcaactggtgttccgcatcgccgacgacaacggtctgctgctgctcgatctcaaggacttgcgcgcgatgatccgccacgtcggcgacaacgcgaaagccttcacgaccgaatacggcaacgtctcggcagcgtcgatcggtgcgatccagcgtggtctcctggcgctcgaggagcagggcggcgaccggttcttcggcgagccgatgctcgacctcgccgatctgatgcagactgacgccgagggccgcggggtcatcaacgtgctcgctgccgacaagctgtaccactcgccggcgctgtattcgactttcctgctgtggatgctcgcggagcttttcgagcagctgcccgaagtcggcgacctcgaccggccgaagctggtgttcttcttcgacgaagcgcacctgttgttcgacgacgcaccgaaggccctcgtcgacaaggtcgagcaggtcgtgcggctgatccgctcgaaaggcgtcggcgtgtatttcgtcacccagaacccgctcgacgtgcccgagtccgtgctcggccaactcggcaaccgcgtccagcacgcgttgcgtgctttcacgccgcgcgaccagaaagcggtcaagaccgcagccgagacgatgcgcgcgaacccggcgttcgacgccgcaacggcgatcaccgagctgggtgtcggcgaagccttggtgtccttcctcgacgaaaaaggccgtcccgaaatcgtcgaacgcgcctccgtcatcgcgcccgggtcgcggctcggcccgctgaccgccgacgagcgcagccaggcgatccgcagctcggtgctgtacggtcattacgagaaactgctcgaccgcgagtccgcatacgaattgctgcgggcgcaggtggctgccgcgactgcggccgatgcagcccaggcttccgggtccggtcccgcggaaggttgggggtcaggcggcctgatgggcggcatgggcgacatcctgttcggttcgaccggcccacgcggcggcaagcgcgacgggctcgtcgatatcgcggcgaaaaccgtcgcgcgcacgatcggcagttcggtcggtcggcagatcgtgcgcggcgtgctcggctcgctgttcggcgggagcagccgcaagcgctga

SEQ ID NO: 106607 - protein, 508 aa, Azoarcus sp. EbN1
MVEPLLIARAGNKDINLLPRLANRHGLVAGATGTGKTVTLQKMAESFAGIGVPVFVADIKGDLSGIGAPGVASDKLLQRLAAIGITDYTPRANTVVFWDVFGESGHPVRATVSDMGPLLLARLLNLNDTQSGVLQLVFRIADDNGLLLLDLKDLRAMIRHVGDNAKAFTTEYGNVSAASIGAIQRGLLALEEQGGDRFFGEPMLDLADLMQTDAEGRGVINVLAADKLYHSPALYSTFLLWMLAELFEQLPEVGDLDRPKLVFFFDEAHLLFDDAPKALVDKVEQVVRLIRSKGVGVYFVTQNPLDVPESVLGQLGNRVQHALRAFTPRDQKAVKTAAETMRANPAFDAATAITELGVGEALVSFLDEKGRPEIVERASVIAPGSRLGPLTADERSQAIRSSVLYGHYEKLLDRESAYELLRAQVAAATAADAAQASGSGPAEGWGSGGLMGGMGDILFGSTGPRGGKRDGLVDIAAKTVARTIGSSVGRQIVRGVLGSLFGGSSRKR

SEQ ID NO: 106608 - DNA, 1554 bp, Silicibacter pomeroyi DSS-3
  CDS (1)..(1554): transl_table=11
atggatggaaagattttcctgggcggcggcggcccggattacggcgtggcgcaggggctggacctgaaatatgccaaccgacacgggctgattgcgggcgccaccggtaccggcaagacggtgacgctgcaaatcctcgcccagggctttgccgaggccggggtgccggtgtttctggccgatgtcaaaggcgacctgtcgggcatggccaagcccggttcgcccgatcacaagctgcacgcggcctttacctcgcgcgcggaaaagatcggcctgagcgattacgcctatcgcgcctgtccggtgaccttctgggatctgtttggcgaacagggccatccggtgcgcaccaccgtggccgagatggggccgttgttgctgtcgcagttgctggagctgacagaggcgcaggagggtatcctgaacatcgccttccgcctttcggacgaagaggggctgccgctgctcgatctcaaggatcttcaggcattgctggtctggatcggcgagaatggtaaatcgctgtcgctgcgctatggcaatatctcgaccgcctcggtgggcgcgattcagcgccggctgctggtgatcgagaaccagggcggcgcgcgcctgttcggcgaaccggcgctggatctggccgacatgatgcgggtcgatgaccaggggcgcggcatggtcaacatcctggccgccgatacgctgatggcctcgccgcggctctactcgaccttcctgctctggctgctcagcgagctgttcgaggaactgcccgaggtgggcgaccccgaaaagccgaaactggtgttcttctttgacgaggcgcatctgctgtttgatgacgcgcccaaggcgctggtggacaaggtcgaacaggtggcccgcctgatccggtccaagggggtgggggtctatttcatcacccagaacccggcggatgtgcccgaggatgtgctgggtcagctgggcaaccgcatccagcacgcgctgcgcgcctttaccgcacgcgaccgcaagaacctgcggctggccgccgagacctatcgcgagaaccccgcgttcgacaccgaagaggcgatccgcgaggtgggcgtgggcgaggcggtgacttcgatgctgatgaaaaagggcgtgccgggggtggtggaacgcaccctgatccgcccgccctcgtcgcaactgggtccgatcactccggccgagcgcaaggcgatcctgaacacctcggacatggcggggaaatacgacacgccgctggaccgcaaatcggccttcgagattctggcgaaacgggccgaggaggccgcgaaagaggccgaacaggccgaggagcgcgccgaggaggccagcccctgggagcgcgagtacaactcggcgcggcgctattccggcagccgggtgggccggtcgagcgcgcgtcagaccagcagccggcgccgcagcgaggacacgctgaccagcgccatgggcgaggcggtgatcaaggagctgaaaggcactaccggccggcgcatcgtgcgcggcattctgggcagcctgttcaaggggcgctga

SEQ ID NO: 106609 - protein, 517 aa, Silicibacter pomeroyi DSS-3
MDGKIFLGGGGPDYGVAQGLDLKYANRHGLIAGATGTGKTVTLQILAQGFAEAGVPVFLADVKGDLSGMAKPGSPDHKLHAAFTSRAEKIGLSDYAYRACPVTFWDLFGEQGHPVRTTVAEMGPLLLSQLLELTEAQEGILNIAFRLSDEEGLPLLDLKDLQALLVWIGENGKSLSLRYGNISTASVGAIQRRLLVIENQGGARLFGEPALDLADMMRVDDQGRGMVNILAADTLMASPRLYSTFLLWLLSELFEELPEVGDPEKPKLVFFFDEAHLLFDDAPKALVDKVEQVARLIRSKGVGVYFITQNPADVPEDVLGQLGNRIQHALRAFTARDRKNLRLAAETYRENPAFDTEEAIREVGVGEAVTSMLMKKGVPGVVERTLIRPPSSQLGPITPAERKAILNTSDMAGKYDTPLDRKSAFEILAKRAEEAAKEAEQAEERAEEASPWEREYNSARRYSGSRVGRSSARQTSSRRRSEDTLTSAMGEAVIKELKGTTGRRIVRGILGSLFKGR

SEQ ID NO: 106610 - DNA, 1488 bp, Pseudomonas fluorescens Pf-5
  CDS (1)..(1488): transl_table=11
atgcctgactcatcgcaactcgtaatcggtgccggcctcgatggcctgccgatcgcccaggccatgcgcctggccaaccgccacggtctggtggcgggcgccacgggcaccggcaagactgtcaccctgcagcgcctggcagaagccttcagtgatgccggggtggcggtatttgccgcagacatcaaaggcgacctctgtgggctgggtgctgcgggcaacccccagggcaaggttgccgagcggatcgccggcatgccctggctcaagcatcaaccacaggcctatccggtgaccctgtgggatatccatgggcaaagcggtcatcctctgcgcaccaccctgagcgaaatgggcccgctgctgctgggcagtttgctggaactcaccgacagccagcagtcggcgctctatgcggcgttcaaggtcgctgatcgcgaaggcctgttgctgctcgacctgaaggacctcaaggcgctgctcaaccacctcaaggacaacccgcagctgctcggggacgatgctgcgttgatgactaccggctccagccaggcgctgttgcggcgcctggcgaccctggagcagcagggcgccgaagcattgttcggtgagccggcgttgcagctggaggacattctgcagccggccgccgatggtcgtgggcggattcatctgctcgatgccagccgcctggtgcatgaggcgccgaaagtctatgcgaccttccttttatggctgctggccgagctgttcgagcaactgccggagcggggcgatgcggacaagccgctgctggcgctgttcttcgacgaagcgcacctgctgttcgccggtactcccaaggccttgcaggaccggctggagcaggtggtgcgactgattcgctccaaaggtgtgggagtgtatttcgttacccagtcgcccggggacctgccggacaatgtcctggctcaattgggattgcgtatccagcatggcttgcgggcctttactgccaaggaacagaagtccctgcgcgccgtggcggatggtttccgtcccaaccccgccttcgatgcgcaggcggtactgaccgagctgggcatcggcgaagcgctggtgggcaccttgcaggacaagggcacgccagaaatggtccagcgggtactggtggcgccgccgcagtcgcggatcgggccgctgaccgaggccgagcgccaggccctgatcgccagttcgccgctgctggggcgctatgacaaaccgatcgaccgcgaatcagcctatgaagtgttgctggggcgcaaggagctggcaccgcaggatcagcagccttctggcaaagcagcggctgaagagcccagcctggccgaccgggcgggtgagttccttggcacggctgccgggcaggcattgaagtcggccatgcgccaggcggctaatcaattgggacggcaactggtgcggggcttgatgggttccctgctcggcggcagcaagcggcgctga

SEQ ID NO: 106611 - protein, 495 aa, Pseudomonas fluorescens Pf-5
MPDSSQLVIGAGLDGLPIAQAMRLANRHGLVAGATGTGKTVTLQRLAEAFSDAGVAVFAADIKGDLCGLGAAGNPQGKVAERIAGMPWLKHQPQAYPVTLWDIHGQSGHPLRTTLSEMGPLLLGSLLELTDSQQSALYAAFKVADREGLLLLDLKDLKALLNHLKDNPQLLGDDAALMTTGSSQALLRRLATLEQQGAEALFGEPALQLEDILQPAADGRGRIHLLDASRLVHEAPKVYATFLLWLLAELFEQLPERGDADKPLLALFFDEAHLLFAGTPKALQDRLEQVVRLIRSKGVGVYFVTQSPGDLPDNVLAQLGLRIQHGLRAFTAKEQKSLRAVADGFRPNPAFDAQAVLTELGIGEALVGTLQDKGTPEMVQRVLVAPPQSRIGPLTEAERQALIASSPLLGRYDKPIDRESAYEVLLGRKELAPQDQQPSGKAAAEEPSLADRAGEFLGTAAGQALKSAMRQAANQLGRQLVRGLMGSLLGGSKRR

SEQ ID NO: 106612 - DNA, 1626 bp, Dechloromonas aromatica RCB
  CDS (1)..(1626): transl_table=11
atgtccgaacctctctacctcgccaagtccgaagacggttatcccgcattgctgccgcagatggccaaccgccacgggctgatcaccggcgccaccggcaccggcaagacggtcaccctgcagtcgatggccgaacgcctgtcctacgccggcgtgccggtcttcatggccgatgtgaagggcgacctctccggcatgggcgccgccggcaccctgaccccgaagctggaaacccgcctcaaggacctcggcctcgaaggcttcgccccctacgccaacccggttgccttctgggatgtcttcggccagggcggcgtgccggtgcgcgccaccatctccgacatgggcccgctgctcctcgcccgcctgctgaacctgaacgacacccagaccggcgtcctgcaactggtcttcaagatcgccgacgacaagggcctgctgctgatcgacctgaaggacctgcgcgcctgcatccagtacgtcggcgaaaacgccaaggacttcaccaccgaatacggcaatgtctcgaccgcctcgatcggcgccatccagcgcggcctgctgacgctggaagagcagggcggcgaccggttcttcggcgaaccgatgctcaatatcaacgacctgatgaaggtcgacgaaaacggccgcggcgtcatcaacgtcctcgccgccgaaaagctggtccaagccccggcgctctactccaccttcctgctctggctgctctccgaactgttcgaacaactcccggaagccggcgatctggacaagcccaagctcgtcttcttcttcgacgaagcccatctgctgttcaccgacgccccgcaggcgctgaccgacaaggtcgagcaggtggtccgtctgatccgctccaagggcgtcggcgtctatttcgtcacgcagaacccgctcgacgtccctgaaaagatcctcggccagctcggcaaccgcgtccagcatgccctgcgcgccttcacgccgcgtgaccagaaggccgtccaggcagcagcgcaaaccatgcgcgccaacccgaaattcgatgccgccaccgtgatcaccgaactcggcgtcggcgaagcgctggtttccttcctcgacgaaaagggcaggccaaccatggttgagcgcagcaccatcttcccgcccgcctcccgcctcggcccactgaccgccgacgaacgccaggccatgatcaacgcctcgccgatgctcgccacctacggccagaccgtcgaccgcgaatccgcctacgaaatcctgcgcggcaaacccgccgccacgcaagccgcccccggcgccattccggcgccaccggccggcaacagcagcctcaacgacagcgactggggcaaccatgccaaccagcaacagccgcgctatgaacaagccccgcaaccccgacagagcgcccccgccccgcaggaaagctcgggcggtggtctgttcggcggcctcggcgacatcctgaccggcaccaccggcccacgcggtggtcatcgcgaaggcgtgctcgaaagtgccgccaagagcgccgctcgcggcgttgccggcacggttggccgggagattgggaagcagattctgcgcggggtgctggggtcaatcctgggcggacgacgctaa

SEQ ID NO: 106613 - protein, 541 aa, Dechloromonas aromatica RCB
MSEPLYLAKSEDGYPALLPQMANRHGLITGATGTGKTVTLQSMAERLSYAGVPVFMADVKGDLSGMGAAGTLTPKLETRLKDLGLEGFAPYANPVAFWDVFGQGGVPVRATISDMGPLLLARLLNLNDTQTGVLQLVFKIADDKGLLLIDLKDLRACIQYVGENAKDFTTEYGNVSTASIGAIQRGLLTLEEQGGDRFFGEPMLNINDLMKVDENGRGVINVLAAEKLVQAPALYSTFLLWLLSELFEQLPEAGDLDKPKLVFFFDEAHLLFTDAPQALTDKVEQVVRLIRSKGVGVYFVTQNPLDVPEKILGQLGNRVQHALRAFTPRDQKAVQAAAQTMRANPKFDAATVITELGVGEALVSFLDEKGRPTMVERSTIFPPASRLGPLTADERQAMINASPMLATYGQTVDRESAYEILRGKPAATQAAPGAIPAPPAGNSSLNDSDWGNHANQQQPRYEQAPQPRQSAPAPQESSGGGLFGGLGDILTGTTGPRGGHREGVLESAAKSAARGVAGTVGREIGKQILRGVLGSILGGRR

SEQ ID NO: 106614 - DNA, 1536 bp, Ralstonia eutropha JMP134
  CDS (1)..(1536): transl_table=11
atggccgaacctatcctgatcgccaaaaatgccgagcttgaactggccttgctgccacaaatgggcaaccggcatggcctgatcaccggcgccaccggcaccggcaagaccgtgacgctgcagacgctcgcgcaggggttctcccggctcggcgtgccagtcttcatggctgacgtcaaaggtgatctgaccggcatttctcagccgggacagcccagcgacaaactcaaggcgcggctcgcagagctgaatctgcccgaaccggcctggggcggttgccctaccacgttgtgggacgtattcggccagaaggggcacccggtccgggcgacgatctcgcacatgggcccactgctgctgtcgcgcatgctggaactcaacgacacgcagcagggcgtgctgaatctggtgttccgcattgccgacgcgaacggcctgctgctgctcgacgccaaggacctgcgcgcgatgcttcagtatgtgggcgacaacgcggcccaattcacgaccgagtacggcaatatctcggcggcttccatcggtgccatccagcgcgggctggtcgcgctggagtcgcagggcgcggacgtgttctttggcgagcccatgctcaacctggaagacttcatccagaccgagaagggccagggcgtggtcaacatcctggcggccgacaagctgatgaactcgcccaagctctatgccacgttcctgctgtggctgctgtcggagctgttcgagaagctgccagaggccggcgacctcgaaaagcccaggctggtcttcttcttcgacgaggcgcatctgctgttcaacgacgcgcccaaggcgctgctcgacaagatcgagcaggtggtgaggctgatccgctccaagggcgtcggcgtgtatttcgtcacgcagaaccccgtcgatattccggacaccgtgctgggccaactcggcaaccgggtgcagcatgcgctgcgcgcgttcacgccgcgcgaccagaaggcagtcaaggtcgcggccacgaccatgcgcgccaatccgaagctcaatctggaaacggtcattggagagttgggcgtgggcgaggcgctggtgtcgctgctcgacgccaagggcacgccgggcgtgaccgagcgcgcatgggtactggcaccgggcagccgcatcggccccatcacggaggacgagcgcaagcaactgatcgcgacgtcgctggtggcaggtacgtatgaaaaggcgatcgaccgggaatcggcctacgagaaactgcgcggcggtgtggcgtcggcggcaaacggtggtggcaacggcggcacttccgtgcaaaagccgacaggcggcgcgccggccgaagagggcggctggcttggtaccgccggcgagatcttcggctcgctgaccaagggcacgggcaagaccggccgtggcgattccatcctcgagtcgatggccaagtccgccgcacgcaccgtcggttctcaggtcggccgcgaactgatccgtggcgtgctgggcagcctgctgggcggcggcaagaagaagtaa

SEQ ID NO: 106615 - protein, 511 aa, Ralstonia eutropha JMP134
MAEPILIAKNAELELALLPQMGNRHGLITGATGTGKTVTLQTLAQGFSRLGVPVFMADVKGDLTGISQPGQPSDKLKARLAELNLPEPAWGGCPTTLWDVFGQKGHPVRATISHMGPLLLSRMLELNDTQQGVLNLVFRIADANGLLLLDAKDLRAMLQYVGDNAAQFTTEYGNISAASIGAIQRGLVALESQGADVFFGEPMLNLEDFIQTEKGQGVVNILAADKLMNSPKLYATFLLWLLSELFEKLPEAGDLEKPRLVFFFDEAHLLFNDAPKALLDKIEQVVRLIRSKGVGVYFVTQNPVDIPDTVLGQLGNRVQHALRAFTPRDQKAVKVAATTMRANPKLNLETVIGELGVGEALVSLLDAKGTPGVTERAWVLAPGSRIGPITEDERKQLIATSLVAGTYEKAIDRESAYEKLRGGVASAANGGGNGGTSVQKPTGGAPAEEGGWLGTAGEIFGSLTKGTGKTGRGDSILESMAKSAARTVGSQVGRELIRGVLGSLLGGGKKK

SEQ ID NO: 106616 - DNA, 1494 bp, Thiobacillus denitrificans ATCC 25259
  CDS (1)..(1494): transl_table=11
atgaccgaacccttgctcatcgcgaaaagcgcgaccgccgatcttgtcctgttgccgcagatggccaaccgccacggcctcgtcacgggtgcgaccggtaccggaaagacggtgaccctgcagacgctcgccgagcacttctcgtcgatcggcgtgccctgcttcatgtccgacgtgaaaggcgacctctcgggaatctcgcagcccggcggcggcaacgccaaggttgccgagcgcgtcgagatgctcaagctcgagggcttcgaacaccgcgcctgcccggtcacgctctgggaccccttcggcgaggccggccatccggtgcggacgacggtatccgacctcgggccgctgctgctctcgcgcatgctcgacctcaacgacacgcaggcgggcgtcctcaatctcgtgttccgcatcgccgacgacaacgggctgctgctgctcgacctcgccgacctgcgcgcgatgctcactttcgtcggcgagaacgcgcggaagttcacgaccgaatacggcaacgtctcggccgcgtcgatcggcgcgatccagcgcggcgtgctcgcgctcgagtcgcagggcggcgccgcggtcttcggcgagccgatgctcgacatcgccgacctcatgcagaccgaccgcgggcgcggcgtgatcaacatcctcgcggccgaccgcctgatgcaggcgccgaagatgtacgcaacgctgctgctgtggctgttggcggaactgttcgagaacctgcccgaggcgggcgacctcgacaagcccaagctcgtcttctttttcgacgaggcgcacctgctgttcgccgatgcgccggccgcgctggtcgagaagatcgaacaggtcgtgcgcctgatccgctcgaagggcgtcggcgtctacttcgtgacgcagaatccggccgacgttcccgacaaggtgctgtcgcaactcggcaaccgcgtgcagcacgcgctgcgggccttctccgcgcgcgaccagaaggcggtgcgcgcggctgcggagacgatgcgcgacaaccccgagctcgacgagacgacggcgatcaccgaactcggcgtcggcgaggcgctggtttccttcctcgacgccaaggggcgccccggcgtcgtcgagcgcgcctacatcgtgccgcccgaggggcagatcggcccgatcagcgaagatcaacgcaggcagttgatgcagacctcgcttgtcgccggcgtctacgacaaggccgtcgaccgcgagtccgcgcacgagatcctcaaagcgcgcgcacagcgtgcgctcgagaacgcggaagccgaagcaaaggcgaagtccgccgcgagccagcccgcaggcggcggcatcctgggcgacattcttggcggacgcggcggccggcgcgaaagcgcggtcgaggcgatggcaaagtccgccgcgcgctcgatcggcagccaggtcggccgtgcgctcatccgcggcgtgctcgggagtcttttcggcggcaagcgctga

SEQ ID NO: 106617 - protein, 497 aa, Thiobacillus denitrificans ATCC 25259
MTEPLLIAKSATADLVLLPQMANRHGLVTGATGTGKTVTLQTLAEHFSSIGVPCFMSDVKGDLSGISQPGGGNAKVAERVEMLKLEGFEHRACPVTLWDPFGEAGHPVRTTVSDLGPLLLSRMLDLNDTQAGVLNLVFRIADDNGLLLLDLADLRAMLTFVGENARKFTTEYGNVSAASIGAIQRGVLALESQGGAAVFGEPMLDIADLMQTDRGRGVINILAADRLMQAPKMYATLLLWLLAELFENLPEAGDLDKPKLVFFFDEAHLLFADAPAALVEKIEQVVRLIRSKGVGVYFVTQNPADVPDKVLSQLGNRVQHALRAFSARDQKAVRAAAETMRDNPELDETTAITELGVGEALVSFLDAKGRPGVVERAYIVPPEGQIGPISEDQRRQLMQTSLVAGVYDKAVDRESAHEILKARAQRALENAEAEAKAKSAASQPAGGGILGDILGGRGGRRESAVEAMAKSAARSIGSQVGRALIRGVLGSLFGGKR

SEQ ID NO: 106618 - DNA, 1488 bp, Pseudomonas fluorescens PfO-1
  CDS (1)..(1488): transl_table=11
atgcctgactcctcgcaactcgtaatcggcgccgacctcgccgggcaaccgatcgctcaggccatgcgcctggccaaccgtcacggactggtggccggggctaccggtaccggcaagaccgtcaccttgcagcgcctggccgaggcgttcagcgacgccggggttgcggtgttcgccgccgacgtcaagggcgacctgtgcggcctcggtgctgccggcaaccctcagggcaagatcgccgagcgcatcgccggcatgccgtggctcaatcacaagcctcaggcgtatcctgtgaccttgtgggacatccacggtcagtccggtcatccgctgcgcactacgttgagtgaaatgggcccgctgctgatcggcgccttactggaactgaccgacagccagcagtcggcgctgtacgcagcgttcaaggtggcggatcgcgaaggcctgttgttgctggatctcaaggatctgaaggcactgctcaatcatctcaaggacaatccgcaactgctgggcgaagacgcggcgctgttcaccaccggctccagtcaggcgctgttgcggcgtctggcgacgctggagcagcagggcgccgaggcgttgttcggcgagccggcgttgcaactcgaagacattctgcagccgaccgccgacggtcgcggacgcattcatctgctggatgccagtcgtctggtgcatgaggcgccgaaggtctatgcaacgttcctgctgtggctgctggccgaactgttcgagcaattgcctgagcgtggcgatgccgacaaaccgttgctggcgctgtttttcgatgaggcgcatttgttgttcggtgacacgcccaaggcattgcaggagcggcttgagcaagtggtgcggctgattcgctcgaaaggtgtgggcgtgtatttcgtcacccagtcgccgggcgatctgccggacgatgtgctggcgcaactggggctgcggatccagcacggcctgcgcgcatttactgccaaggagcagaaatccctgcgggcggtggcggatggcttccggccgaatccggcgttcgacacattgtcggtgctcaccgaactcgggattggcgaggccctggtcggcaccttgcaagaaaagggcacgccggaaatggcgcagcgggtgctggtggcgccgccgcaatcgcggatcgggccgttgaccgagactgagcgcacaatgctgatcgccggttcgccgttcaagggccgttatgacaaaccgattgatcgcgagtcggcctatgaaatcctgatggggcgcaaggggctggcgccggaggctgaagcggcgccgggcaaaccggccgctgaagagccaagcctggcggacagggccggagaatttctcggcacggcggcggggcaggcgctcaagtcggcgatgcgccaggcagcgaactcgctgggtaaacaattggtgcgcggcctgatggggtcattgctcggtggcagcaaacgccgctga

SEQ ID NO: 106619 - protein, 495 aa, Pseudomonas fluorescens PfO-1
MPDSSQLVIGADLAGQPIAQAMRLANRHGLVAGATGTGKTVTLQRLAEAFSDAGVAVFAADVKGDLCGLGAAGNPQGKIAERIAGMPWLNHKPQAYPVTLWDIHGQSGHPLRTTLSEMGPLLIGALLELTDSQQSALYAAFKVADREGLLLLDLKDLKALLNHLKDNPQLLGEDAALFTTGSSQALLRRLATLEQQGAEALFGEPALQLEDILQPTADGRGRIHLLDASRLVHEAPKVYATFLLWLLAELFEQLPERGDADKPLLALFFDEAHLLFGDTPKALQERLEQVVRLIRSKGVGVYFVTQSPGDLPDDVLAQLGLRIQHGLRAFTAKEQKSLRAVADGFRPNPAFDTLSVLTELGIGEALVGTLQEKGTPEMAQRVLVAPPQSRIGPLTETERTMLIAGSPFKGRYDKPIDRESAYEILMGRKGLAPEAEAAPGKPAAEEPSLADRAGEFLGTAAGQALKSAMRQAANSLGKQLVRGLMGSLLGGSKRR

SEQ ID NO: 106620 - DNA, 1449 bp, Geobacter metallireducens GS-15
  CDS (1)..(1449): transl_table=11
atgggtactgcactggacgcactgctgatagccaagggagagaaggaagtctgcctcctgccgcggatggccaaccgccacgggctcgtggccggcgccaccggcaccggcaagacggtgacgctgcgggtgctggccgagcggttcagcgccatcggcgtgccggtcttcatggccgatgtgaagggggacctgtcggggctggccctgccgggggacgagaaccccaaggtggccgaacgggtggcgaagatggggcttgagggattcgcctgcagcggtttccccgtggtcttctgggacgtcttcggggagcaggggcacccggtccggaccacggtctctgagatggggccgcttctcctgtcgcggctcctgaacctgaacgacgtccagagcggggtcctcaacgtcatcttcaaggtggccgacgacaacggcctgctgctcctcgacttcaaggacctccaggccatggtccgctacgtgggggacaacgccgccgagttccagaccgcctacggcaacatctccgccgccagcatcggcgccatccagcggaacctcctggccttgggcgagcagggggcggagcagttcttcggggagccggccctgaacctccaggacttcatgcagaccgactccgacggccggggggtgatcaacatcctcgccgccgacaagctgatgcagtcgcccaagctctatgccaccttcctcctctggatgctgtcggagctcttcgagcagctccccgaggccggggacccggagaagccgaacctggtctttttcttcgacgaggcgcacctcctctttgacgacgcccccaaggccctggtggagaagattgagcaggtggtgcggctcatccgctccaagggggtggggatctacttcgtgacccagaaccccgtcgacctccccgatacggtgctggggcagctggggaatcgagtccagcacgccctgcgggccttcacccccaaggaccagaagggggtcagggctgctgcggaaaccttccgggccaaccccgctttctccgtggagacggtcatcacccagctggaggtgggggaagctcttgtatcggtcctggacgggaagggggcccccaccgtggtggagcgggccctggtctgcccaccccagagccgcttcgcccccctcgcgggtgccgagcggaccgcggtcatcgcccgctcgcccctggccggtttctacgagaaagcggtggaccgggaatcggcctacgagacgctcaaggccaagaccgaggcggcagcgccggcgccagaggaggggaagagcgaagtggcaagccaggtggggacggtgctcggggcctttgccaagagcgcggcccacgccatcggcagtcaggtgggacgccagattatccggggggggctgggatccctctttggcggagggcggcggtaa

SEQ ID NO: 106621 - protein, 482 aa, Geobacter metallireducens GS-15
MGTALDALLIAKGEKEVCLLPRMANRHGLVAGATGTGKTVTLRVLAERFSAIGVPVFMADVKGDLSGLALPGDENPKVAERVAKMGLEGFACSGFPVVFWDVFGEQGHPVRTTVSEMGPLLLSRLLNLNDVQSGVLNVIFKVADDNGLLLLDFKDLQAMVRYVGDNAAEFQTAYGNISAASIGAIQRNLLALGEQGAEQFFGEPALNLQDFMQTDSDGRGVINILAADKLMQSPKLYATFLLWMLSELFEQLPEAGDPEKPNLVFFFDEAHLLFDDAPKALVEKIEQVVRLIRSKGVGIYFVTQNPVDLPDTVLGQLGNRVQHALRAFTPKDQKGVRAAAETFRANPAFSVETVITQLEVGEALVSVLDGKGAPTVVERALVCPPQSRFAPLAGAERTAVIARSPLAGFYEKAVDRESAYETLKAKTEAAAPAPEEGKSEVASQVGTVLGAFAKSAAHAIGSQVGRQIIRGGLGSLFGGGRR

SEQ ID NO: 106622 - DNA, 1491 bp, Syntrophus aciditrophicus SB
  CDS (1)..(1491): transl_table=11
atgaaccagatacttataggcaagggtgagcagcctgttcaattgctcgccaggtacggcaaccggcatggtctgatcgcgggagccaccggtaccggcaagacgatttctctcatggtactggcagagggcttctcacgcatgggtgtaccggtattcatggctgacgtgaaaggcgatgtcgccggcctggcaatggccggcacccccaacgaaaagatccagcagcgtgttaaagagatcgggattgatggttacgccagcgaggcgaatccggttttgttctgggatgtgttcggcaagaatggccatcgggtgcgcaccacgatcagtgaaatcggtccgaacctgctgggacggatactggaaattaacgatacccagaccggcatgcttgagatcgccttcaagctggcggacgatcagggtttacttctgcttgacctcgacgacctgcgtgccttgcttgctttcgtcgctgaaaatcgcaaggagatttcgacacagtatggcctggtaagttcacaatccgtggctgctgtccaacgtgccctgttgacgcttcagcgggaaggaggggaagacctcttcggcgagccggccctggaactcaatgatttgatgcgtaccgatctcaacggccgcggtatcatcaacattctagttgcagaccagctcattttaagaccacgattgtactcgagcttcctcctgtggctgctgtcagagctgttcgagaacctgcccgaggtaggtgacctcgaaaagcccaagcttgtgttcttcttcgatgaggcccacctgctctttgacgatgcgccaccgatgatgcgtcagcgagtggaacaggtcgtgcgcatcatccgatccaagggcgtcggggtctacttctgctcgcaattccccgacgacgtgcccaacgagatcctgggccagctcggaaatcgcatccagcacgcacttcgggcctacactccgcgtgaccagaaggcagtgaaaactgccgcggaaaccttcgttgcgaacccgaaactcaacgtcgcggaagtcatatcacaactcggtgttggtgaagctctggtctccactctccaggagaagggtgttccgatgccggtggagcgaacgttgatctgtccaccgcgctgccggatgggcgctgtcacgcctgaagagcgcttggccgtgcgttcgcgcagcccgctgggaaacaagtacgactcgtcggtgaacagggaatctgcctacgagatcctgaaacggcggacattggaaagggaaacagcagaggcggaatcagatcaggcgcagaaggagaaaccgtctgaaggtcaggggggggttaatgaatggctgtggggaacaaaacgtcggcagggcatggttgaaaccatggctaaacaggccgcgcgtaccgtaggaagccagatcggccgccagatcctgcgcggtgtattaggcgttatattgggcgaatcacgccgtcgctag

SEQ ID NO: 106623 - protein, 496 aa, Syntrophus aciditrophicus SB
MNQILIGKGEQPVQLLARYGNRHGLIAGATGTGKTISLMVLAEGFSRMGVPVFMADVKGDVAGLAMAGTPNEKIQQRVKEIGIDGYASEANPVLFWDVFGKNGHRVRTTISEIGPNLLGRILEINDTQTGMLEIAFKLADDQGLLLLDLDDLRALLAFVAENRKEISTQYGLVSSQSVAAVQRALLTLQREGGEDLFGEPALELNDLMRTDLNGRGIINILVADQLILRPRLYSSFLLWLLSELFENLPEVGDLEKPKLVFFFDEAHLLFDDAPPMMRQRVEQVVRIIRSKGVGVYFCSQFPDDVPNEILGQLGNRIQHALRAYTPRDQKAVKTAAETFVANPKLNVAEVISQLGVGEALVSTLQEKGVPMPVERTLICPPRCRMGAVTPEERLAVRSRSPLGNKYDSSVNRESAYEILKRRTLERETAEAESDQAQKEKPSEGQGGVNEWLWGTKRRQGMVETMAKQAARTVGSQIGRQILRGVLGVILGESRRR

SEQ ID NO: 106624 - DNA, 1575 bp, Novosphingobium aromaticivorans DSM 12444
  CDS (1)..(1575): transl_table=11
atggacgatatctacctcggtctgggttcgaacggcgaacggcaggtgctgcgcctgggccgggcaaaccgccacgggctcatcgcgggggcgaccggcaccggcaagaccgtgaccttgcaaggcattgccgaacagttttcggcgcgcggcgtacccgtgttcatggccgacgtgaaaggcgaccttgcgggcatagccatgcctggcagccccacgttcaagcatgccgcctcgctggaggcgcgcgcgaaggaactgggcatcgccgactacgcctattccgacaatccggcggtgttctgggatctctacggcgaaagcgggcaccccatccgcaccaccatttcggaaatggggccattgctgctggcgcgcctgatggggctcaacgagacgcaggaaggcgtgctcaacatcgcgttccgctatgccgacgacaacggcttgctgctgatcgaccttgcggatctgcaatcggtgctggttgcctgcgccgagaacgcgagcgagcttgccacgcgctacggcaatgtctcgaaggccagcgtgggcacgatccagcgccagctccttgccttcgaaagccagggggcagatcgcttctttggcgagcctgccttcgagatcaacgatttcctcaaggtggacgagcagggacgcggcatggtcaacgtgctggccgccgagaagctgatgcagagccccaagctctacgcgactttcctgctgtggcttctgtccgaactgttcgaggcgctgcccgaagtgggcgacccggagaagccgtgcctcgtgttcttcttcgacgaggcgcacctcctgttcgaggacgcgccacaggcgctgatggaaaaggtcgagcaggtcgtccgcctgatccgctcgaagggcgtcggtgtgttcttcgtcacgcagaacccgatcgacattcccgagaagatcgcgggccagctcggcaaccgggtgcagcacgccctgcgcgccttcaccccgcgcgaccagaaggcgatccgcgccgccgccgagacttttcgcatcaacaaggatctcgatgtcgagacggtcatcaccgaactgaaggtgggcgaggcgctggtttccacgctggaggaggacggtgcgccctcggtggtccagcgcacgctgatcgcgccgccccgctcgcgcctcggaccgctgacgccgaaggagcgcgcaatcatccagtccgtcagcccgttcgatggaaagtacgacacggcggtgaaccgcgaatccgccgcagagattctcgcacgcaaggcatctgacgccgccgccgccgcgcagcagatcgaggccgagggcgaggacagccagcgcgcctcggcgcggaggtcgccttcgatgtgggagcgcgccggaaaggccgccgcaggggcagtggcatcgtcggccggcgcggtcatcgcggcgcagatcaccggcaagaaatcgcgcgcggcgccgatggcttcggggatcacggcgatggcgggctctatcgcctcttcaatcggcggcgaggccttcgggcgatttgcccgcggaatcctgggcgggctgctgcgctag

SEQ ID NO: 106625 - protein, 524 aa, Novosphingobium aromaticivorans DSM 12444
MDDIYLGLGSNGERQVLRLGRANRHGLIAGATGTGKTVTLQGIAEQFSARGVPVFMADVKGDLAGIAMPGSPTFKHAASLEARAKELGIADYAYSDNPAVFWDLYGESGHPIRTTISEMGPLLLARLMGLNETQEGVLNIAFRYADDNGLLLIDLADLQSVLVACAENASELATRYGNVSKASVGTIQRQLLAFESQGADRFFGEPAFEINDFLKVDEQGRGMVNVLAAEKLMQSPKLYATFLLWLLSELFEALPEVGDPEKPCLVFFFDEAHLLFEDAPQALMEKVEQVVRLIRSKGVGVFFVTQNPIDIPEKIAGQLGNRVQHALRAFTPRDQKAIRAAAETFRINKDLDVETVITELKVGEALVSTLEEDGAPSVVQRTLIAPPRSRLGPLTPKERAIIQSVSPFDGKYDTAVNRESAAEILARKASDAAAAAQQIEAEGEDSQRASARRSPSMWERAGKAAAGAVASSAGAVIAAQITGKKSRAAPMASGITAMAGSIASSIGGEAFGRFARGILGGLLR

SEQ ID NO: 106626 - DNA, 1497 bp, Methylobacillus flagellatus KT
  CDS (1)..(1497): transl_table=11
atgacaccgactcctttagccaaaagcgcggatttcctttatctactccccaaaatggccaatcgtcatggattggtcgctggcgccacgggaacaggaaagacagtcacgctgcagagcattgctgaaagcttttcgcgtatgggtgtgccagtattcatggccgatgtcaaaggcgacctggccggcatcagtcaggttggcggcggcaatgccaggatcgatgcgcgcgttgcccagctgggcctgaccgattttagttttgctgcttgtcccgtcaccttctgggatgtctttggcaagcagggccacccgatcaggacaactatcgccgagatggggccattgttgctcgggcgcatgctcaacctcaatgatgtgcaatctggcgtattgaccgccgtgttcaagattgccgatgaccatggttggctgctgcttgatctcaaggatctgcgtgcgatgattcagcacgctgccgaaaattccactcaatatagcgctcagtatggcaacatctccagcgccagcgtaggagcgatccagcgcgccttgctgcagctcgagcatgagggggccgaccagcttttcggtgagccggccttgaatctggacgatatgatgcagaccgatcaaaagggctggggtgtggtgaatgtgctggcagccgatactctttatcactccccgagagtctatgcgaccttgctgctgtggctgttgtccgaactgttcgagaaactgccggaagtcggggatctggacaagccaaagctggcattcttctttgatgaggcgcacctgctgttcaatgacgcgccgaagtccctgctcgacaagatcgagcaggtcgtgagattgattcgctccaaaggtgtgggcgtatatttcgttagccagaacccgctcgatattcccgatgtcgtgctcggccaattgggcaaccgcgtgcagcacgcactgcgtgcatttacgccacgagatcagaaagcagtcaaggcggcggccgaaactttccgtgctaaccctgcagtcaatgtcggtgaggtcatcacggaacttgccgtaggggaggccttggtgtcattcctcgatgagcagggccgcccagcacccgtggaacgcgcatccatctgtccacctgggagtcgtatcggtccggtcagcgctgccgagcgcgagcagctgatcaaaaattccgtcatctatggacattatgaaaacagcatagaccgggaatcggcctatgaaatcctcaagggccgggcaacagaagtgcctgtcgagcaagatgaagccgacgacaacagttttgattggggggacttgttcggcggcggtgcaggagcgcaaggcaagggcaagaagtcgaccagccgtcaaggtgtactggaaactgctgccaaaagcgctgcgcgtgcaattggctctgaattggggcggcaggtattgcgcggagtgctgggctccattctcgggggtaagcgccgcaagtag

SEQ ID NO: 106627 - protein, 498 aa, Methylobacillus flagellatus KT
MTPTPLAKSADFLYLLPKMANRHGLVAGATGTGKTVTLQSIAESFSRMGVPVFMADVKGDLAGISQVGGGNARIDARVAQLGLTDFSFAACPVTFWDVFGKQGHPIRTTIAEMGPLLLGRMLNLNDVQSGVLTAVFKIADDHGWLLLDLKDLRAMIQHAAENSTQYSAQYGNISSASVGAIQRALLQLEHEGADQLFGEPALNLDDMMQTDQKGWGVVNVLAADTLYHSPRVYATLLLWLLSELFEKLPEVGDLDKPKLAFFFDEAHLLFNDAPKSLLDKIEQVVRLIRSKGVGVYFVSQNPLDIPDVVLGQLGNRVQHALRAFTPRDQKAVKAAAETFRANPAVNVGEVITELAVGEALVSFLDEQGRPAPVERASICPPGSRIGPVSAAEREQLIKNSVIYGHYENSIDRESAYEILKGRATEVPVEQDEADDNSFDWGDLFGGGAGAQGKGKKSTSRQGVLETAAKSAARAIGSELGRQVLRGVLGSILGGKRRK

SEQ ID NO: 106628 - DNA, 1536 bp, Ralstonia metallidurans CH34
  CDS (1)..(1536): transl_table=11
atggccgatcccatcctcatcgccaagaatgccgaccaagaactcgtgctgttgcccgaaatgggcaaccgccacggcctgatcaccggggcgaccggcacgggcaagaccgtcacgctgcagacgctggcccagggcttctcgcggctgggcgtgccggtgttcatggccgacgtaaaaggtgacttgaccggcatttcccaggccggccagcccacggacaagctcaaggcccgcctggccgagcatggcctgcccgagccggtctggggcgcatgcccgaccacgctctgggacgtcttcggcgaaaaaggccacccggtgcgcgcgacggtttcccatatggggccgctgctgctgtcgcggatgctcgaactcaacgatacccaggaaggcgtgctgaacctggtattccgcatcgcggacgctaacggcctgctgctgctcgattccaaggatctgcgggcgatgctccagtacgtgggcgacaacgcgggccagttcacgaccgagtacggcaatatttcggcggcgtcgatcggcgcgatccaacgtggtctggtggcgctcgaatcgcagggagcggacaagtttttcggcgagccgatgctcaatctcgaggacttcatccagaccgagaaggggcagggcgtggtcaacatcctggccgccgacaagttgatgaacgcgccgcggctctacgcgaccttcctgctgtggatgctgtccgaattgttcgagaagctacccgaggccggcgatctggaaaagcccaagctggtgttcttcttcgacgaggcgcatctgctgttcaacgatgcgcccaaggcgctgctcgacaagatcgagcaggtcgtgcggctggtgcgctcgaagggcgtgggtgtgtatttcgtgacgcagaatccggtcgatatcccggacactgtgctcggtcagcttggcaaccgcgtgcagcacgcgctgcgcgcattcacgccgcgtgaccagaaggcggtcaaggtggcggccacgacgatgcgcgcgaacccgaagctcaatctggagcaggttatcggcgaactcggcgtgggggaggcgctggtgtcgtgcctcgacgccaagggcacgccctgcgtcaccgagcgtgcctgggtgcttgcgcccggcagccgtatcggcccgatcacggacgacgagcgtcgggcgttgatcgcggggtcactggtggcgggtacctatgagaaaacgattgacagggaatcggcgtacgagaagttgcgcggcaacgcggcggcgtcgggaacgggaacgccggggccggccagtggcggcgcggcaggcgggacaagtggtagcgcggagcagggcggctggctcgatcaggctggcgagatcttcggcacgctgacgaaaggtaccggcaagaccgggcgcggcgattcgatccttgagtcgatggccaagtcggcggcgcggacggtgggttcccaggtgggacgggaactgattcgcggcgtgctgggcagtctgctcggcggcggcaagcgcaagtag

SEQ ID NO: 106629 - protein, 511 aa, Ralstonia metallidurans CH34
MADPILIAKNADQELVLLPEMGNRHGLITGATGTGKTVTLQTLAQGFSRLGVPVFMADVKGDLTGISQAGQPTDKLKARLAEHGLPEPVWGACPTTLWDVFGEKGHPVRATVSHMGPLLLSRMLELNDTQEGVLNLVFRIADANGLLLLDSKDLRAMLQYVGDNAGQFTTEYGNISAASIGAIQRGLVALESQGADKFFGEPMLNLEDFIQTEKGQGVVNILAADKLMNAPRLYATFLLWMLSELFEKLPEAGDLEKPKLVFFFDEAHLLFNDAPKALLDKIEQVVRLVRSKGVGVYFVTQNPVDIPDTVLGQLGNRVQHALRAFTPRDQKAVKVAATTMRANPKLNLEQVIGELGVGEALVSCLDAKGTPCVTERAWVLAPGSRIGPITDDERRALIAGSLVAGTYEKTIDRESAYEKLRGNAAASGTGTPGPASGGAAGGTSGSAEQGGWLDQAGEIFGTLTKGTGKTGRGDSILESMAKSAARTVGSQVGRELIRGVLGSLLGGGKRK

SEQ ID NO: 106630 - DNA, 1545 bp, Silicibacter sp. TM1040
  CDS (1)..(1545): transl_table=11
atggcagaggaaatattcgtcggtggcggaggggacgcatatggcgatccacaatacctcacgttgaaatatgccaaccggcacggtctgattgcgggcgcaacgggaaccggtaaaaccgttacacttcaaatccttgccgagagtttctcgaatgaaggcgtgccggtcatcttggcggatgtcaaaggagacctgtccggactggcgcgcgcaggcagcgaaacggcggagttgcatgcgcctttcgtgaaaagagcacaaaaaattggatttacctctttttcctatcacgacacccccgtcaccttctgggatctctttgcacaacagggccatccgatccggaccacggttgccgaaatggggcctttgctgctgtcgcgtctgctggaactcagcgaagcacaggagggtatcctgaacattgccttccggcttgcggatgagcaggggctgccgctgctggatctcaaggatctacaagcgctgttggtctgggtcggcgagaaccgcgaaagcctgtccctgcgctacggcaatgtctccaccgcttcgatcggcgccatccagcgccgcctgctggttctggagaaccagggcggggcgctgatctttggcgagccggccttggatcttgaggatctgatgcgctttgatgctgcgggccggggcatggtgaacattctggccgcggataaattgatggcttctccaaagctttacgcgacgttcttgctgtggctgttgagcgagctgttcgagagccttcctgaagtcggagatccggaaaagcccaagctggtgttctttttcgacgaggcgcatctcctgtttgaagacgcacccaaagccctcatcgacaaggtggaacaggtcgcacggctgatccgctccaagggggttgggatctattttgtcacccagtctccggacgacattcctgaggatattctggggcagttgggcaatcgcatccaacatgcgctgcgtgcgtttacggcgcgggatcagaagaagctgaagcttgccgcagaaacctatcgtgcaaacccgcgtttttcgaccgaagacgccatccgtgaggtcggcgtcggcgaggcggtgacctccatgctcgagaaaaaggccgtacctggcgtggtggagcggacgcttattcgcccgccctcgagccagcttggaccgatcaccgaagagttccgcaggagtgtaatgcaagcgtctgatatggcgggaaaatatgacaagtctgttgatcgccattcagcctatgaaatcctgaaagagcgggcggacaaagcctcgagagaagcggcagacgccgaggcgcaagccgaaacagcgccagatccggtggtgcgcgagttcagcgccgcgcgacggtatagcggcagtcgcgtggggcgatccacctcgcgccggatcggcggcggtgacacttttgcctccgccatgtccgagtcggtgatcaaagaactgaaaggcaccaccgggcggcgcatcgttcgcgggattctgggcgggctcttcaaggggcgctga

SEQ ID NO: 106631 - protein, 514 aa, Silicibacter sp. TM1040
MAEEIFVGGGGDAYGDPQYLTLKYANRHGLIAGATGTGKTVTLQILAESFSNEGVPVILADVKGDLSGLARAGSETAELHAPFVKRAQKIGFTSFSYHDTPVTFWDLFAQQGHPIRTTVAEMGPLLLSRLLELSEAQEGILNIAFRLADEQGLPLLDLKDLQALLVWVGENRESLSLRYGNVSTASIGAIQRRLLVLENQGGALIFGEPALDLEDLMRFDAAGRGMVNILAADKLMASPKLYATFLLWLLSELFESLPEVGDPEKPKLVFFFDEAHLLFEDAPKALIDKVEQVARLIRSKGVGIYFVTQSPDDIPEDILGQLGNRIQHALRAFTARDQKKLKLAAETYRANPRFSTEDAIREVGVGEAVTSMLEKKAVPGVVERTLIRPPSSQLGPITEEFRRSVMQASDMAGKYDKSVDRHSAYEILKERADKASREAADAEAQAETAPDPVVREFSAARRYSGSRVGRSTSRRIGGGDTFASAMSESVIKELKGTTGRRIVRGILGGLFKGR

SEQ ID NO: 106632 - DNA, 1545 bp, Mesorhizobium sp. BNC1
  CDS (1)..(1545): transl_table=11
atggcagaccaggacagcagcatcttcattggcgcgagccggcataaggacgacagctaccagcgggccgaacaactgcttttggggtatgcgaatcggcatggcctcgtcaccggggcgaccggcaccggcaagacggtgacgctgcaggtgctggcgcagggcttttccgatgcgggcgtccccgtcttctgcgccgatgtgaagggcgatctctccggtatcgcaatgcccggcgaggagaaggattttcttctgaagcgggccgcggaggtcaagctcgatccctacaccttcgaagcctgccccgtcatcttctgggacatcttcggggagaagggacatccgatccgcgccaccatttcggagatggggccgctgcttctctcgcgcctcatgaatctgacggaggcacaggagggagtgctgaacatcgcattccgcatcgcggaccaggaaggactgctccttctcgacctgaaggatctccaggcgctcttgtcgaatgtcgccgagcgggcggacgagatctcggcgcaatatggcaatgtcaacaagcagtccgtcggcgcgatccagcgttcgctgcttatcctggagcagcagggcggcgagcatttcttcggcgagccggcgcttcaacttgccgacctgatgcgcaccacgcgcgacgggcgcggcatggtcagcgtgcttgccgcggacaagctgatgatgaatccgcgcctctactccaccttcctgctgtggcttctctcggaactgttcgaggaattgccggaagttggcgacccggaaaagccgaagctcgtcttcttcttcgacgaggcccatcttctctttgacgatgcgcccaaggcgctgatcgaccgggtggagcaggtggtgcgccttattcggtcgaagggcgtgggcgtctatttcgtcacgcagaacccgatcgacgtgccggaaacggtgctcgcgcagcttggcaaccgcgtccagcacgcgctgcgcgcctatacgccgcgcgagcagaaggccgtgaagacggccgcggatactttccgccccaaccccgacttcgattctttcgcaacgataacccagctcggcgtgggcgaggcgctggtctccactctcgaggcgaagggcatcccgtccatggtgcagcgaaccctggtccgtccgccttcctcgcgcttgggaccgatcacggatgccgagcgccagtcgctggttcagggcagccccgtcgcgggccaatacgacaaaccggtcgaccgggaatccgcctttgagattttgcagaagcgggcacaggcgaaggcggctgaggcccagccggaagaggcgcagcagaccggtggcggctggacgcttccggatttcggggggcgcagccaaagatccagtccgagccgcagaagctccaatggcagctcctcccgccgccagacggtcacggaagcggcgatcaagtccgtcgtgcgctccgtgggcaccacgcttggccgcgagctcattcgcggggtgctgggcagcctgacgcggagaaggtga

SEQ ID NO: 106633 - protein, 514 aa, Mesorhizobium sp. BNC1
MADQDSSIFIGASRHKDDSYQRAEQLLLGYANRHGLVTGATGTGKTVTLQVLAQGFSDAGVPVFCADVKGDLSGIAMPGEEKDFLLKRAAEVKLDPYTFEACPVIFWDIFGEKGHPIRATISEMGPLLLSRLMNLTEAQEGVLNIAFRIADQEGLLLLDLKDLQALLSNVAERADEISAQYGNVNKQSVGAIQRSLLILEQQGGEHFFGEPALQLADLMRTTRDGRGMVSVLAADKLMMNPRLYSTFLLWLLSELFEELPEVGDPEKPKLVFFFDEAHLLFDDAPKALIDRVEQVVRLIRSKGVGVYFVTQNPIDVPETVLAQLGNRVQHALRAYTPREQKAVKTAADTFRPNPDFDSFATITQLGVGEALVSTLEAKGIPSMVQRTLVRPPSSRLGPITDAERQSLVQGSPVAGQYDKPVDRESAFEILQKRAQAKAAEAQPEEAQQTGGGWTLPDFGGRSQRSSPSRRSSNGSSSRRQTVTEAAIKSVVRSVGTTLGRELIRGVLGSLTRRR

SEQ ID NO: 106634 - DNA, 1554 bp, Cytophaga hutchinsonii ATCC 33406
  CDS (1)..(1554): transl_table=11
gtggcagacaaaaaaatacttttttcagaagaaataaacgctaaatataatactaacggagattatatagttctgggcagtgcactatatgaaggcgaatgtttaccggatgcacatatcaaattgcctttaaaaacactgaacaggcatggaatgattgccggtgctaccggtacaggtaaaacaaaaacactacagacaattgctgaatctctttcattaaagggtattccaaccttaatgatggatattaaaggtgatttgagcggtattgctgcaagcggaacaacaaatgctaaaatagaagaaagacaatctaaaataggtctcccattcgaacctcagggatttccgatcgagattttcagtttatcaaaagagaaaggggttcgtttacgtgcaactgtttctgaattcggaccggtattattttcaaaaatattaggactgaatgatacacaaagcggtattgtttccctcatctttaaattctgcgacgatgaacgtttaccgcttctggacctggcagatttcaaacgtttgattcagtatattaccaatgaaggtaaagcccggattgaaaaagaatatggaaaaatatcttctacttctacttcaaccatcttgcgaaaagtaattgagttagagcaacaaggagcagatttattttttggggaatactcttttgaagtagatgatctgttacgcaaagatgcttcaggaaagggttatatatcgattatgaaagtgaccgatattcaggacaggcctaaattgttctcaacatttatgctaagtttattgtcggagatatacagcacatttccggaagttggtgatcaggaaaagcctaaattagtactgtttattgacgaagcacatttaatctttaatgaagcttccgacgcattactcaatcagatagagacgattatcaagttaatacgatctaaaggtgtaggtatatttttctgtacacaaaacccaatggatattcctgcatccatcttaggtcagcttggtttaaaggttcagcatgcattacgtgccttcaccgctgcagatcgcaagcagattaaattaacagctgccaattatccgttatcagattattacgacactgaaagtctgcttacttctatgggtatcggagaagcagcaattacagtacttaccgaaaaaggaacgccttctccccttgcacacaccctgctttgtgcaccaagatcacgcatggacattttgaatgataatgaaatagatgcgatcattcaacgttctgctttaagtaaaaaatacaacgaagcggttgatcgtaaaagcgcttacgaaatactgaatgaaaaatattctgtaaaagaagaagaaacggaagagccggaagaaaaaaaatccagttcccgtaaaagttcccgacctgaaaaaagcacgttcgaagaagcgattaacagcccgattgcaaaacaggttggaagaacattggtacacgaaattgtccgcgggatctttggcgtattaggtgtaaatacttctcaacgcagaaagagaagatag

SEQ ID NO: 106635 - protein, 517 aa, Cytophaga hutchinsonii ATCC 33406
MADKKILFSEEINAKYNTNGDYIVLGSALYEGECLPDAHIKLPLKTLNRHGMIAGATGTGKTKTLQTIAESLSLKGIPTLMMDIKGDLSGIAASGTTNAKIEERQSKIGLPFEPQGFPIEIFSLSKEKGVRLRATVSEFGPVLFSKILGLNDTQSGIVSLIFKFCDDERLPLLDLADFKRLIQYITNEGKARIEKEYGKISSTSTSTILRKVIELEQQGADLFFGEYSFEVDDLLRKDASGKGYISIMKVTDIQDRPKLFSTFMLSLLSEIYSTFPEVGDQEKPKLVLFIDEAHLIFNEASDALLNQIETIIKLIRSKGVGIFFCTQNPMDIPASILGQLGLKVQHALRAFTAADRKQIKLTAANYPLSDYYDTESLLTSMGIGEAAITVLTEKGTPSPLAHTLLCAPRSRMDILNDNEIDAIIQRSALSKKYNEAVDRKSAYEILNEKYSVKEEETEEPEEKKSSSRKSSRPEKSTFEEAINSPIAKQVGRTLVHEIVRGIFGVLGVNTSQRRKRR

SEQ ID NO: 106636 - DNA, 1737 bp, Rhodococcus sp. RHA1
  CDS (1)..(1737): transl_table=11
atgacccggcaatcgcaggacggcgacgcgacctcgaccccggcggagagggcggcggcggcgagggcggcggccgccgaggcggccaggatcgcggcggaggctgcggcagcggcagaggaggccgagaaggaagcccgggacgcggaggccgcggagaaccgtgctcccgcaggcgtcgccgcctcctccggtgccgccgcggacatcgcggccggatactcctcggagggtgcggctctcgagctgggaacggtggttctcgacggcgtcgtggattcggcggcccgggtgcgtatccccctcgcgacggtcaaccggcacggactcgtcgccggcgccaccgggacgggaaagacgaagacgctgcagggtattgccgagcagttgtcggctgcaggggttcccgtggtgatggccgacatgaagggcgacctgtcgggcctgtcgcagccgggtgaggcgggcgacaagatcaccacccgggcgtccgagacgggtgacggcgagtggcggccggcggcgtccccggtcgaattcctctcgctgggaacggaaggtctgggcattcccgtccgcgcgaccatcacggcgttcgggccgatcctgctcgccaaggttctcgggctcaacgagactcaggagtccacgctggggctgatcttccactgggccgacgttcaggggcttgcgcttctcgacctgttggatttgcgatcggtcatcgcgcatctcaccagcgacgagggcaaggccgatctgaagggcatcggaggcgtgtccccggccacggccggcgtgatcctcagggccctcgtcaatctcgaagccgacggcggcgacacgttcttcggggagcccgagctcgagaccgaggatctgctccgggtgatcgacggcaagggcgtgatcacgttgttcgagttgggcgcccaggccgcgcgaccggcattgtttaccaccttcctgatgtgggtgctggccgacctgttccagacgttgcccgaggaaggcgatctcgacaaacccaagctcgtcttcatcttcgacgaggcgcacctgctcttcgcggacgcgtcgaaggcgttcctgcaacaggtggaacagaccgtgaagctcatccgctcgaagggtgtgggggtcttcttctgcacccagttgccgacggacgtcccgaatggggtgttgtcgcagctcggtgcgcggatccagcacgcgctgcgcgccttcactcccgacgatcagaaggcgctcacgaaaacggtacggacgtacccgaccaccgagaactacgacctcgagaaggctctcacctcactgggcatcggtgaggcgatcgtcacggtcctgtcggaacggggcgcaccgacgccggtggcgtggacgaggattcggcctccccgctcgctgatggacaccatcggcaccgacgcgatcacggccgcggcgtcgtcgagcccgctgtcggcgaagtacgggcagaccgtcgaccgggaatcggcgtacgagaagctgacggccaaggtcgccggagccccggccgcggaaccaggtctcgacctgcccccgctgcccgacctgccgacaccaccgcccgcacagccggagggtccgaacatggccgaacagattctcgggaactccgcggtgaagagcttcctccgctcggccgcgtcggccgccggccgcgaaatctcccgcagcatcttcgggacgggtaaacgtcgcaggcggtga

SEQ ID NO: 106637 - protein, 578 aa, Rhodococcus sp. RHA1
MTRQSQDGDATSTPAERAAAARAAAAEAARIAAEAAAAAEEAEKEARDAEAAENRAPAGVAASSGAAADIAAGYSSEGAALELGTVVLDGVVDSAARVRIPLATVNRHGLVAGATGTGKTKTLQGIAEQLSAAGVPVVMADMKGDLSGLSQPGEAGDKITTRASETGDGEWRPAASPVEFLSLGTEGLGIPVRATITAFGPILLAKVLGLNETQESTLGLIFHWADVQGLALLDLLDLRSVIAHLTSDEGKADLKGIGGVSPATAGVILRALVNLEADGGDTFFGEPELETEDLLRVIDGKGVITLFELGAQAARPALFTTFLMWVLADLFQTLPEEGDLDKPKLVFIFDEAHLLFADASKAFLQQVEQTVKLIRSKGVGVFFCTQLPTDVPNGVLSQLGARIQHALRAFTPDDQKALTKTVRTYPTTENYDLEKALTSLGIGEAIVTVLSERGAPTPVAWTRIRPPRSLMDTIGTDAITAAASSSPLSAKYGQTVDRESAYEKLTAKVAGAPAAEPGLDLPPLPDLPTPPPAQPEGPNMAEQILGNSAVKSFLRSAASAAGREISRSIFGTGKRRRR

SEQ ID NO: 106638 - DNA, 1494 bp, Shewanella sp. MR-4
  CDS (1)..(1494): transl_table=11
ttgaatactctactcttaggtaaaggtgagcaacaggttcacttaaatcttaaatatgccaaccgccacggactgatcgcaggcgccactgggacgggtaaaaccgtttcgctgatgaccctcgccgaaggcttctctcgccaaggtgtgccggtatttatcaccgacattaaaggcgatatctctgggcttggcgtcgcgggcacaccaaacgacaaactcttccagcgagccgccgaaatcgggattgaagaatatcaaaccgaggccaatcctgtggttttctgggatttggctggagagcaagggcaccccttacgcacaaccgtgagcgagatgggacccaccctgctcgggcgcattctcgaactcaatgacacccaaagcagtattttggacatagtgtttcaactggctgatgaccaaggtttattgttactcgatctcgacgatcttcgcgccatgctgaacttagtcgccgatgaacgtaaagatatctccgccaagtatgggcttatcagcgcccagtccctcgccgctattcaacgctcggtcctcggcttggagcgcgatggcggcaaagactttttcggcgagccagcgcttcaactcgaagacttgatgcgcacgaacttacaagggcgcggcattatcagcctgttagccgccaataagttaatcctgacccctaacctctattccagcttcttactctggctgctatcagaactctttgaaaacctacccgaagtcggcgatctcgataaacccaagttagtcttctttattgatgaggcgcacttattgtttgaaggctgcccagcaagtttgcttaaacgcatagagcagattatgcggcttatccgctccaagggtgtcggggtgtatttttgctcgcagtttcctgacgatattcccaacgagatcttaggtcagctcggtaatcggattcagcatgccctcagggcgtataccccaagggatcaaaaagccgttaaaaccgcggcagagacctttgtgcccaaccctaaattggtggtcagcgaggtaatttcacaactcgccgtgggcgaagctttagtctcgacactcgccgagaaaggcgtgcccactatggtggaacgcgccctgattgcaccgccccgctgtcgcatggggccagcaagcgcggaggagttaaacgccattcgagccaagagccccatcggcggcaagtacgacactttaatcaaccgagagtccgcctacgaacggctcaatcaacggcacgccgaagcggccaatggcgcagctagcacccaaaccgcgagtacgcccgccgcccaagaagcggatcaaggctggtttagtgaactgatcttcggcaataaacgccgccaaggattggccgagacactctccaaacaagccgcgcgaaccgtgggtaatcaactcggcaaacaaatattgcgcggattactcggcggcatactcggcaagtcgacccgcaggtaa

SEQ ID NO: 106639 - protein, 497 aa, Shewanella sp. MR-4
MNTLLLGKGEQQVHLNLKYANRHGLIAGATGTGKTVSLMTLAEGFSRQGVPVFITDIKGDISGLGVAGTPNDKLFQRAAEIGIEEYQTEANPVVFWDLAGEQGHPLRTTVSEMGPTLLGRILELNDTQSSILDIVFQLADDQGLLLLDLDDLRAMLNLVADERKDISAKYGLISAQSLAAIQRSVLGLERDGGKDFFGEPALQLEDLMRTNLQGRGIISLLAANKLILTPNLYSSFLLWLLSELFENLPEVGDLDKPKLVFFIDEAHLLFEGCPASLLKRIEQIMRLIRSKGVGVYFCSQFPDDIPNEILGQLGNRIQHALRAYTPRDQKAVKTAAETFVPNPKLVVSEVISQLAVGEALVSTLAEKGVPTMVERALIAPPRCRMGPASAEELNAIRAKSPIGGKYDTLINRESAYERLNQRHAEAANGAASTQTASTPAAQEADQGWFSELIFGNKRRQGLAETLSKQAARTVGNQLGKQILRGLLGGILGKSTRR

SEQ ID NO: 106640 - DNA, 1494 bp, Shewanella sp. MR-7
  CDS (1)..(1494): transl_table=11
ttgaatactctactcttaggtaaaggtgagcaacaggttcacttaaatcttaaatatgccaaccgccacggactgatcgcaggcgccactgggacgggtaaaaccgtttcgctgatgaccctcgccgaaggcttctcccgccaaggtgtgccggtatttatcaccgacattaaaggcgatatttctgggcttggcgtcgcgggcacaccaaacgacaaactcttccagcgagccgccgaaatcgggattgaggaatatcaaaccgaggccaatccggtggttttctgggatttggcaggagagcaagggcatcccttacgcacaaccgtgagcgagatggggcccaccctgctcgggcgcattctcgaactcaatgacacccaaagcagtattttagacatagtgtttcaactggctgacgaccaaggtttattgttactggatctcgacgatcttcgcgccatgctgaacttagtcgccgatgagcgcaaagatatctccgccaaatatgggcttattagcgcccagtccctcgctgccattcaacgttcggtcctcggcttagagcgcgatggcggcaaagactttttcggcgagccagcgctacaactcgaagacttgatgcgcacaaacttacaagggcgcggcattatcaacctgttagccgccaataagttaatcctgacccctaacctctactccagcttcttactctggctgctatcggaactctttgaaaacctacccgaagtcggcgatctcgataaacccaagttagtcttctttattgatgaggcgcacttattgtttgaaggctgcccagcaagtttgcttaaacgcatagagcagattatgcggcttatccgctccaagggcgtcggggtgtatttttgctcgcagtttcctgacgatattcccaacgagatcttaggtcagctcggtaatcggattcagcatgccctcagggcgtacacccctagggatcaaaaagccgttaaaactgcggcagagacctttgtgcccaaccctaaattggtggtcagcgaggtaatttcacaactcgccgtgggcgaagctttagtctcgacactcgccgagaaaggtgtgcccactatggtggaacgcgccctgattgcaccgccccgctgtcgcatggggccagcaagcgcggaggagttaaacgccattcgagccaagagccccatcggcggcaagtacgacaccttaatcaaccgagagtccgcctacgaacggctcaatcaacggcacgccgaagcggccaatggcgcagctagcaccaaaaccgcgaatacgcccgccgcccaagaggcggaacagggctggtttagcgaactgatcttcggcaataaacgccgccaaggattggccgagacactctccaaacaagcggcgcgaaccgtgggtaatcaactcggcaaacaaatattgcgcggattactcggcggcatactcggcaagtcgacccgcaggtaa

SEQ ID NO: 106641 - protein, 497 aa, Shewanella sp. MR-7
MNTLLLGKGEQQVHLNLKYANRHGLIAGATGTGKTVSLMTLAEGFSRQGVPVFITDIKGDISGLGVAGTPNDKLFQRAAEIGIEEYQTEANPVVFWDLAGEQGHPLRTTVSEMGPTLLGRILELNDTQSSILDIVFQLADDQGLLLLDLDDLRAMLNLVADERKDISAKYGLISAQSLAAIQRSVLGLERDGGKDFFGEPALQLEDLMRTNLQGRGIINLLAANKLILTPNLYSSFLLWLLSELFENLPEVGDLDKPKLVFFIDEAHLLFEGCPASLLKRIEQIMRLIRSKGVGVYFCSQFPDDIPNEILGQLGNRIQHALRAYTPRDQKAVKTAAETFVPNPKLVVSEVISQLAVGEALVSTLAEKGVPTMVERALIAPPRCRMGPASAEELNAIRAKSPIGGKYDTLINRESAYERLNQRHAEAANGAASTKTANTPAAQEAEQGWFSELIFGNKRRQGLAETLSKQAARTVGNQLGKQILRGLLGGILGKSTRR

SEQ ID NO: 106642 - DNA, 1557 bp, Hyphomonas neptunium ATCC 15444
  CDS (1)..(1557): transl_table=11
atgagcacgacgattttcctgggcggcgcggacgccgatggctccgggacacccgatgacgcccaggcattgttgctgaaagcggccaaccggcacggcattgttgcgggcgccacaggcaccggcaagacggtgaccctgcaggtcatggcgcaggcctttgccgatgcgggcgttccggtatttgccgccgatgtgaaaggcgacctttccggcatcgccttccccggcacggacacccacaaagcccatggcagctttaccagccgcgcggaaagcatcgcgatgggaccgctgacctacagcgccgcgccggtgatcttctgggatgtgttcggcgaaaagggccaccccgtgcgcaccaccatcgccgagatggggccggtcctgctctccagcctgatggggctgaccgatgtgcaggaaggcattctcaacattgcctttcagtatgcggatgatcactgcgtggataatcccgacttcctgatcctggacctcaaagacctgcgcaagctgctcgcacatctgggggagccgggggttcgcgaagaggtgagccgcaaatacggcaatgtcgcgccagcctccctggccgccgtgcagcgcgaattgctggtgctggagcgggcgggcgctgaagccttcttcggtgaaccggcattgcagctgtctgacttcatgcgcacgacgacggacgggcgtggctatgtgaacattctcgacgcgaccaaactgatcaacagcccgaagctctattccaccttcctgctttggctgctttcggagctgttcgagcagctgcccgagatcggtgacccggagaaaccgcgcctggtcttcttctttgatgaagcccaccttctgttcaacgacacgccgcctgccctgttgcagaagatcgaacaggtggtgcgcctgatccgctccaaaggggtcggcgtctattttgtgacccagaacccgcgggacgtgcccgagagcgtgctggcccagctcggcaaccgcattcagcacgcgctgcgcgcctatacgccaatggagcagaaggcggtgaaatctgcggccgcctccttccgccccaatcctggcttcaagaccgaaacggtgatcaccgagctgggcgtgggggaagcgctggtctcgaccctggaccccaaaggcacaccatcggtcgtgcagcgcacgctgatccgcccgcccgcctcgcgtcttggaccggtgaccgatgccgaacgcgccgagatcctcaaggcaagccctgtccttggccagtatgacaagatggtcgaccgggaatcggcctatgaaatcctgaccaaaaaggaagccgatgccgcaaagctcgccgagaaggcgcgcctggaagcggagaaggaaaaggaagccgccgccaaagcgaaggccaaggcaaaggcgccagccaaaggccgcaccacgacccgttcgcgacggatgtcgccgaccgaacgcgccaccaacaccgccgcaaccacgatcagccgggaagtcacccgatatatcctgcgcggcatcttcgggaatatgaagaaatga

SEQ ID NO: 106643 - protein, 518 aa, Hyphomonas neptunium ATCC 15444
MSTTIFLGGADADGSGTPDDAQALLLKAANRHGIVAGATGTGKTVTLQVMAQAFADAGVPVFAADVKGDLSGIAFPGTDTHKAHGSFTSRAESIAMGPLTYSAAPVIFWDVFGEKGHPVRTTIAEMGPVLLSSLMGLTDVQEGILNIAFQYADDHCVDNPDFLILDLKDLRKLLAHLGEPGVREEVSRKYGNVAPASLAAVQRELLVLERAGAEAFFGEPALQLSDFMRTTTDGRGYVNILDATKLINSPKLYSTFLLWLLSELFEQLPEIGDPEKPRLVFFFDEAHLLFNDTPPALLQKIEQVVRLIRSKGVGVYFVTQNPRDVPESVLAQLGNRIQHALRAYTPMEQKAVKSAAASFRPNPGFKTETVITELGVGEALVSTLDPKGTPSVVQRTLIRPPASRLGPVTDAERAEILKASPVLGQYDKMVDRESAYEILTKKEADAAKLAEKARLEAEKEKEAAAKAKAKAKAPAKGRTTTRSRRMSPTERATNTAATTISREVTRYILRGIFGNMKK

SEQ ID NO: 106644 - DNA, 1566 bp, Rhizobium leguminosarum bv. viciae 3841
  CDS (1)..(1566): transl_table=11
atgatcgaggaaggcaagattttcatcggcgcgagccgcaatcccgatgacagtatcaacaagccggaatatctcgacctgaaattcggcaatcgccacggcctcgtcaccggcgcaaccggcaccggcaagacggtgacgctgcaggtgctggccgaaggtttctcgcgggccggcgttccggtgtttgcggccgacatcaagggcgatctttccggcatcgccgccaagggcgagcccaaggacttcctgacgaagcgcgccgagcagatcggctttgccgactacgaattcgaccagtttccggtgatcttctgggatctgttcggggagaagggccaccgggtgcgcactaccatcgccgagatgggaccgctgctgctcgcccgcctgatggatgcctccgaaccgcaggaaggcgtcatcaacatcgccttcaagatcgccgaccagggtgggctgccgttgctcgacctcaaggatttcagctcgctgctcaactatatgggcgagaacgccagccaactttccaaccagtacgggctgatctccaaggcttcggtcggctcgattcagcgggcgctgctcgttctcgaacagcagggtgcggagcacttcttcggcgaaccggcgctgaagatcaccgacatcatgcgcaccagcaataatggctacggccagatctcggtgctggccgccgacaagctgatgatgaacccgcggctttacgccactttcctgctctggctgctttccgagctcttcgaggaattgcccgaggtgggcgatcccgaaaagccgaagctcgtcttcttcttcgacgaggcgcacctgctcttcaacgacgcgccgaaggtgctgaccgaacgcgtcgagcaagtggtacggttgattcgttccaagggcgtcggcgtctacttcgtgacgcagaacccgctcgacgtgccggaaacggtgctcgcccagctcggcaaccgggcgcagcacgcgcttcgcgcctattcgccgcgcgagcagaaggcagtgaggacggcggccgacaccttccgtgccaatccggccttcgattgcgccaccgtcatcaccaatctcggcaccggcgaggcgctggtctcgacgctggaggccaagggcgcgccttcgatcgtcgagcgcacgctggtccgcccaccatccggccgcgtcggcccggtgacggatgccgagcgccggcagatcatggacaggagcccggttctcggtgtctatgacgaggatgtcgaccgcgaatccgccttcgagctgttggcggcgcgggcaaagaaggcggccgatgccgaggccgccaagcgagcgcaggaagaagcaccacagcaacagggcaacacgacctccggctggaatctgccgggcttcggcggcggcaatgacgacgacaaccagggccgcggccaatctcgcggccggacgtccggctatcagcgcgaaacggtggtggaagcggcgatgaagagcgtggcgcgcacggttgcgacccaagtcggccgggcgctggtgcgtgggatattggggagcttgaagcggtag

SEQ ID NO: 106645 - protein, 521 aa, Rhizobium leguminosarum bv. viciae 3841
MIEEGKIFIGASRNPDDSINKPEYLDLKFGNRHGLVTGATGTGKTVTLQVLAEGFSRAGVPVFAADIKGDLSGIAAKGEPKDFLTKRAEQIGFADYEFDQFPVIFWDLFGEKGHRVRTTIAEMGPLLLARLMDASEPQEGVINIAFKIADQGGLPLLDLKDFSSLLNYMGENASQLSNQYGLISKASVGSIQRALLVLEQQGAEHFFGEPALKITDIMRTSNNGYGQISVLAADKLMMNPRLYATFLLWLLSELFEELPEVGDPEKPKLVFFFDEAHLLFNDAPKVLTERVEQVVRLIRSKGVGVYFVTQNPLDVPETVLAQLGNRAQHALRAYSPREQKAVRTAADTFRANPAFDCATVITNLGTGEALVSTLEAKGAPSIVERTLVRPPSGRVGPVTDAERRQIMDRSPVLGVYDEDVDRESAFELLAARAKKAADAEAAKRAQEEAPQQQGNTTSGWNLPGFGGGNDDDNQGRGQSRGRTSGYQRETVVEAAMKSVARTVATQVGRALVRGILGSLKR

SEQ ID NO: 106646 - DNA, 1491 bp, Pseudomonas aeruginosa UCBPP-PA14
  CDS (1)..(1491): transl_table=11
atgtcgcaagcgaatgagttgttgatcggcgctggccccgatggccagccggtagggcaggcctggcgcctggccaaccgtcatggattgatcgccggcgccaccggtaccggcaagacggtgaccttgcagcacctcgccgaatccttcagcgatgccggtgtcgcggtgttcgccgccgacatcaagggcgacctgtgcggcatcgccgcgccgggcaacccgcagggcaaggtcgccgaacgcatcgccagcatgccgtggctgaactaccagccgaaggcctacccgaccacgctctgggacatcgccgggaagaccggccacccgttgcgcaccaccatcagcgagatgggcccgctgctgctggccaacctcctggagttgaccgatagccagcaggccgcgctgttcgccgccttccaggtggccgaccgggaaggcctgctgctgctcgacctgaaggacctgaaggcgctgctcaaccacctgaaggacaatccggagatcctcggcaaggaccgggcgctgttcaccggcgcttccgggcaggcgctgctgcgccgcctggccactctggagcagcagggcgccgaggccttcttcggcgagcctgccctgcaactggaagacatcctccgccccgagccggacgggcgggggcgcatccacctgctcgacgccagccgcctggtgcacgaggcgccgaaggtctacgcgactttcctgctctggctgctggccgagctgttcgagcaactgccggagcgcggcgatgccgacaagccggtgctggcactgttcttcgacgaggcccacctgctgttcaacggcacgccgaaagccttgcgcgaccgcctggaacaggtggtccggctgatccgctcgaaaggcgtcggggtgtacttcgtcacccagtcgccgggcgacctgccggacgatgtcctggcccagctcggcctgcgtatccagcatggcctgcgcgccttcaccgccaaggaacagaaatcgctgcgcgcggtggccgacggtttccgcccgaacccggcgttcgacaccctgggggtgctgaccgaactgggtatcggcgaggcgctggtcggcaccctggaggaaaagggcacgccggccatggtccagcgcgtcgcggtggcgccgccctattcgcggatcggcccgctgagcgacagcgaacgcgccgaactggtccagcggtcgccgttgaaggggcgctacgaccagccgatcgatcgcgagtcggcctacgaggtgctggcgagcaaggcggacgccaagcccgaggtgcagggccaggcgcctgcacagcaggaaagcgcgtccggcgtcggcggcatggccgggcagattctcggcagcctgctgtccaattcgacggtgaagagcgccatgcgccaggcggccaaccagttgagccgggagctggtgcgtggcctgctcggctcgttgatgggcgggaagaagcggcgctga

SEQ ID NO: 106647 - protein, 496 aa, Pseudomonas aeruginosa UCBPP-PA14
MSQANELLIGAGPDGQPVGQAWRLANRHGLIAGATGTGKTVTLQHLAESFSDAGVAVFAADIKGDLCGIAAPGNPQGKVAERIASMPWLNYQPKAYPTTLWDIAGKTGHPLRTTISEMGPLLLANLLELTDSQQAALFAAFQVADREGLLLLDLKDLKALLNHLKDNPEILGKDRALFTGASGQALLRRLATLEQQGAEAFFGEPALQLEDILRPEPDGRGRIHLLDASRLVHEAPKVYATFLLWLLAELFEQLPERGDADKPVLALFFDEAHLLFNGTPKALRDRLEQVVRLIRSKGVGVYFVTQSPGDLPDDVLAQLGLRIQHGLRAFTAKEQKSLRAVADGFRPNPAFDTLGVLTELGIGEALVGTLEEKGTPAMVQRVAVAPPYSRIGPLSDSERAELVQRSPLKGRYDQPIDRESAYEVLASKADAKPEVQGQAPAQQESASGVGGMAGQILGSLLSNSTVKSAMRQAANQLSRELVRGLLGSLMGGKKRR

SEQ ID NO: 106648 - DNA, 1494 bp, Shewanella sp. ANA-3
  CDS (1)..(1494): transl_table=11
ttgaatactctactcttaggtaaaggtgagcaacaggttcacttaaatcttaaatatgccaaccgccacggactgatcgccggcgccacagggacggggaaaaccgtttcgctgatgacccttgccgaaggtttctcccgccaaggtgtgccagtatttattaccgacattaaaggcgatatctctgggcttggcgttgccggcacaccaaacgacaagctattgcagcgggcggccgaaatcggcattgaagattatcaaaccgaggcaaatcccgtggtttgctgggatctcgcaggagagcaagggcacccattacgcacaaccgtgagtgagatggggccgactttactcgggcgtattctcgaactcaatgacacccaaagcagtattctagatatcgtctttcaactggctgatgaccaaggtttattgttactcgatctcgacgatcttcgcgccatgctcaacttagtcgccgatgaacgcaaagaggtctccgccaaatacgggcttatcagcgcccagtccctcgccgcgattcaacgttcggtcctcggcttagagcgcgatggtggcaaagattttttcggcgagccagccctacaactcgaagacttgatgcgcactaacttacaagggcgtggcattatcaacctgttagccgccaataagttaatcctgacccctagcctctactccagcttcttgctctggctgctatcagaactgtttgaaaacctgcccgaagtcggcgatctcgataaacccaagttagtcttcttcatcgatgaggcgcatttattgtttgaaggctgcccagcaagtttgcttaaacgcatagaacaaattatgcggcttattcgctccaagggcgttggagtgtatttttgctcgcaattccctgacgatattcccaatgagatcttaggtcagctcggtaatcgcattcagcatgcccttcgggcgtataccccaagggatcaaaaagccgttaaaaccgcggcagagacctttgtgcccaaccctaaattggtggtcagtgaggtgatatcacaactcgccgtgggggaagctttagtctcgacactcgccgagaaaggcgtgcccactatggtggaacgcgccctaattgcgccgcctcgctgtcgtatggggcccgcaagcccagaggagttaagcgccattagggccaagagtcccattggtggcaagtacgataccttaatcaaccgagagtccgcctacgagcgactcaatcagcggcacgccgaagtggccaatggcgccaatagcaccaaaacggcgagtacgcccgccgcccaagaggcggagcaaggctggtttagcgaactgatctttggcaataaacgccgccaagggttagccgaaacactctctaaacaagcggctcgaaccgtgggtaatcaactgggcaaacaaatattgcgcggactactcggcggcatactcggcaagtcgacccgcaggtaa

SEQ ID NO: 106649 - protein, 497 aa, Shewanella sp. ANA-3
MNTLLLGKGEQQVHLNLKYANRHGLIAGATGTGKTVSLMTLAEGFSRQGVPVFITDIKGDISGLGVAGTPNDKLLQRAAEIGIEDYQTEANPVVCWDLAGEQGHPLRTTVSEMGPTLLGRILELNDTQSSILDIVFQLADDQGLLLLDLDDLRAMLNLVADERKEVSAKYGLISAQSLAAIQRSVLGLERDGGKDFFGEPALQLEDLMRTNLQGRGIINLLAANKLILTPSLYSSFLLWLLSELFENLPEVGDLDKPKLVFFIDEAHLLFEGCPASLLKRIEQIMRLIRSKGVGVYFCSQFPDDIPNEILGQLGNRIQHALRAYTPRDQKAVKTAAETFVPNPKLVVSEVISQLAVGEALVSTLAEKGVPTMVERALIAPPRCRMGPASPEELSAIRAKSPIGGKYDTLINRESAYERLNQRHAEVANGANSTKTASTPAAQEAEQGWFSELIFGNKRRQGLAETLSKQAARTVGNQLGKQILRGLLGGILGKSTRR

SEQ ID NO: 106650 - DNA, 1566 bp, Mycobacterium avium 104
  CDS (1)..(1566): transl_table=11
atgagcaccgattcagcggcaacaccggcgacgcggatcgcggacggctacgccgtcgcgggccaggcattggaattgggcacggtcgtcatcgacggtgcggccgacccgtcggcgcagatccgcatcccgctggcgacggtgaaccggcacggcctggtggccggtgcgacgggcaccggcaagaccaagacgctgcagctgatcgccgagcagctcagcgccgcgggcgtgccggtgctgatggccgacgtcaagggcgacctgtccgggctgtcgcggccggggcagggcgacgaccgaaccgccgcgcgcgccaaggacaccggtgacgactggcaggccacggcgtttccggtggagttcctgtcgttgggcaccaacggaatcggcgtgccgatccgcgcgacggtcgagagcttcgggccggtgctgctgtcgaaagtgttggggctcaacgccactcaagaatcgacgcttgggctgatcttccactgggccaaggagcggaactggccgctggtcaccaccgacaatctacgcggtgccatcagccacctcaccagcgacgagggcaaggaagatctgaagtccctgggcggcgtgtcggcgacgacggcgggcgtgatcctgcgggcgctggtgaacctcgatgccgagggcggggacaccttcttcggcgaacccaagctcgaccccaacgacttgctgcgcaccaacgatcaaggccaaggcgtcatttcgctgctggagttcaccggccagtcggtgcgcccggtcatcttctccaccttcctgatgtggttgctcgccgacctgtacacccaactgcccgaggtcggcgacatcgacaaacccaagctggtcttcttcttcgacgaggcgcacctgctgttcgccgacgcgtccaaggccttcctggaacaggtcgaacagacggtgaagctgatccgctccaagggcgtcggggtgttcttctgcacccagttacccaccgacattcccaacgacgtgctgtctcagttgggtgcgcgaattcagcacgcgctgcgggctttcacgcccgacgaccagaaggcgctgtccaagaccgtgcgcacctacccgaaaaccgatgtctacgacctggagtcggcgttgacgtcgctgggaatcggcgaggccgtcgtgaccgtgctctccgagaagggcgcacccacgccggtggcctggacccggatgcgggtgccccgctcgctgatggcgtcgatcgggacagaggagatcacgaaggcagccaaacgcagtgagctgcaagcgaagtacggccaaacggtgcaacaaccggcccagcccccgccgggcccgcaagcaccgaccggatcgcggtcgccgcaagcccagtccgactacccgcccgtcccgccgaatggcccggttccgccgatgccggaacccgcggagcccaaaggcccgggcctgctggaaaggctctggcacgaccgcgacgtacagagcgcggtgaacaccgggatccgggagatcattcggctcaagttcggcggcggaggccgtcgccgcaagtaa

SEQ ID NO: 106651 - protein, 521 aa, Mycobacterium avium 104
MSTDSAATPATRIADGYAVAGQALELGTVVIDGAADPSAQIRIPLATVNRHGLVAGATGTGKTKTLQLIAEQLSAAGVPVLMADVKGDLSGLSRPGQGDDRTAARAKDTGDDWQATAFPVEFLSLGTNGIGVPIRATVESFGPVLLSKVLGLNATQESTLGLIFHWAKERNWPLVTTDNLRGAISHLTSDEGKEDLKSLGGVSATTAGVILRALVNLDAEGGDTFFGEPKLDPNDLLRTNDQGQGVISLLEFTGQSVRPVIFSTFLMWLLADLYTQLPEVGDIDKPKLVFFFDEAHLLFADASKAFLEQVEQTVKLIRSKGVGVFFCTQLPTDIPNDVLSQLGARIQHALRAFTPDDQKALSKTVRTYPKTDVYDLESALTSLGIGEAVVTVLSEKGAPTPVAWTRMRVPRSLMASIGTEEITKAAKRSELQAKYGQTVQQPAQPPPGPQAPTGSRSPQAQSDYPPVPPNGPVPPMPEPAEPKGPGLLERLWHDRDVQSAVNTGIREIIRLKFGGGGRRRK

SEQ ID NO: 106652 - DNA, 1572 bp, Mycobacterium smegmatis str. MC2 155
  CDS (1)..(1572): transl_table=11
atgaccaccgaatcgacagctactcccgcgcagcagatcgccgccggatatgccgtcgaagggcaggctctcgaactgggcaccgtcgtcgtcgacggtgccgtcgaccccaccgcccaggtgcgcatcccgctcgccacggtcaaccggcacggtctgatcgccggggccaccggcaccggcaagacgaagtccctgcaggtgctcgccgagcagctctccgccgcgggcgtgccggtgctgatggccgacgtcaagggcgacctgtccgggctggccaaaccgggggagtcgaacgacaaggtcacccagcgcgccgccgacaccggggacgactggacacccacgggcttcccggtcgagttcctgtcgctgggcaccgagggcatcggcgtgccggtgcgcgcgacgatcaccagcttcggcccgatcctgctgtcgaaagtgctggggctcaaccagacccaggagtccaccctggggctgatcttccactgggccgaccagaagggtctgccgctgctggacatcaaggatctgcgctcggtcatccagtacctgaccagcgacgagggcaagcccgagctcaaggcgctcggcgcggtgtcgacgacgaccgcgggcgtgatcctgcgtgcgctggtcaacctcgaggccgagggtgcggacacgttcttcggtgagcccgagctggagcccaaggatctgctgcgcgtcgacgatcaggggcgcggcgtcatcacgctgctggagctcggggcccaggccgcgcgcccggtgatgttctcgacgttcctcatgtgggtgctggccgatctgttcacgacgctgcccgaggtcggcgacgtcgacaagcccaagctggtgttcttcttcgatgaggcgcacctgctgttcaacgacgcatccaaggcgttcctcgagcaggtcgagcagaccgtgaaactgatccgctccaagggcgtcggcgtcttcttctgcacccagctgcccaccgacgtccccaacgacgtcctctcgcagttgggtgcccggatccagcacgcgctgcgcgccttcacgcccgacgaccagaaggcgctcaccaagaccgtgcgcacctatcccaagaccaaggtctacgacctcgaagaggcgctcacctcgctgggcatcggcgaggccgtggtgaccgtgctctcggagaagggtgcgcccaccccggtggcgtggacgcggatgcgcgcgccgcgctcgctgatggacacgatcggcgccgacgcgatctcggcggcggccaaggcgagcccgctgcaggccacctacgggcagaccgtcgaccgggattcggcctacgagcgtctggccgccaagctggctccgccggagggcggtgacgcgggcggcttcgccggcgtcgaggccaccggagaggccgccccgatgccggccccggcgcagcccgaggagcccgggttcttcgagaagatggtcgcgagccccgcgttcaagagcgcgatgcgctcggcgggcaccgtgatcggccgcgagatcacccgcagcatcttcggtaccggccgtcgccgccgctga

SEQ ID NO: 106653 - protein, 523 aa, Mycobacterium smegmatis str. MC2 155
MTTESTATPAQQIAAGYAVEGQALELGTVVVDGAVDPTAQVRIPLATVNRHGLIAGATGTGKTKSLQVLAEQLSAAGVPVLMADVKGDLSGLAKPGESNDKVTQRAADTGDDWTPTGFPVEFLSLGTEGIGVPVRATITSFGPILLSKVLGLNQTQESTLGLIFHWADQKGLPLLDIKDLRSVIQYLTSDEGKPELKALGAVSTTTAGVILRALVNLEAEGADTFFGEPELEPKDLLRVDDQGRGVITLLELGAQAARPVMFSTFLMWVLADLFTTLPEVGDVDKPKLVFFFDEAHLLFNDASKAFLEQVEQTVKLIRSKGVGVFFCTQLPTDVPNDVLSQLGARIQHALRAFTPDDQKALTKTVRTYPKTKVYDLEEALTSLGIGEAVVTVLSEKGAPTPVAWTRMRAPRSLMDTIGADAISAAAKASPLQATYGQTVDRDSAYERLAAKLAPPEGGDAGGFAGVEATGEAAPMPAPAQPEEPGFFEKMVASPAFKSAMRSAGTVIGREITRSIFGTGRRRR

SEQ ID NO: 106654 - DNA, 1590 bp, Nocardioides sp. JS614
  CDS (1)..(1590): transl_table=11
atgactgcggacatgacgtcgccgatcgccgagcaggtcgccgcgggctaccgcttcgagggtccggccctcgagctcggcgccctgatgctcgccgccgaccagctggtcgacgtaccggtccggattccgttggcgatgctgaaccggcacggcctggtggccggggcgaccggcaccggcaagaccaggactcttcagctgctcgtcgagcagctcagcgcccagggcgtcccggtcttcgccgcggacatcaagggcgacctgtccgggctggcccagccgggcaccgcgagcgagaagctcagcgcccgggccgccaccgtcggccaggagtgggcggccgccggcttccccgtggagttctacgcgatcggcggcgtcgggcccgggctgccgctgcgggtcaccatgagcgcgttcgggccgaccctgctgagcaaggtgctgggcctcaacgacacccaggagtccagcctggggctggtcttccactacgccgaccgggccggcctgccgctgctcgacctcgccgacctccgcgcggtgctcgcgcacctgctcagcgacgagggcaaggccgagctcaaggcgctgggtgggctgtcgtcggcgaccgccggggtgatcctgcgcgagctgatcggcctggaggaccagggcggcgacgtgttcttcggcgagccggagttcgagtcggcggacctgctccagctcgcccccgacggccgcggcctcgtctcgctggtcgagctgccgcagctgcaggaccggccggcgatcttctcgacgttcctgatgtggctgctcgccgacctgttccacgaccttcccgaggtcggggacgtggacaagccgaggctggtgttcttcttcgacgaggcgcacctgctcttcgccgacgcgtccaaggcgttcctcgaccaggtcgcccagaccgtgcggctgatccggtcgaagggggtcggggtgttcttcgtgacccagagccccaccgacgtgcccgacgcggtgctcgcccagctcggttcgcggatccagcaccagctgcgcgcgcacacccccaacgacgccaaggcgctcaaggcgaccgtggcgacctacccgaccagtgggtacgacgacctcgggcaggtcatcaccggcctcgggatcggcgaggccgtggtgaccgtgatgaacgagcgcggtgcgccgacgccggtggcctggacccgcctgcgggcgccccagtcgcggatggatccgtgcgatcccgacgtcctcaccgccaccgtcgcggccagcccgcgggccgcgaagtaccaggccgcgatcgaccgggagtccgcgcgcgagatcctcgccgaccggctcgagcagggtgccgcgaagcaggaccgcgagcaggcgggcgcccccggcccggaccctgatccggcgccgcgcccggtgccggtcccgaagcccagcaccgacaagcccagcagcaggcccccgaaggacgacagcgtggtcgagcaggtcgtgaagtccgacgcgttcaaggacttcatgcgtaccgccgcccgcgagatcgcgcgggggatgttcaagaccggccggcgctga

SEQ ID NO: 106655 - protein, 529 aa, Nocardioides sp. JS614
MTADMTSPIAEQVAAGYRFEGPALELGALMLAADQLVDVPVRIPLAMLNRHGLVAGATGTGKTRTLQLLVEQLSAQGVPVFAADIKGDLSGLAQPGTASEKLSARAATVGQEWAAAGFPVEFYAIGGVGPGLPLRVTMSAFGPTLLSKVLGLNDTQESSLGLVFHYADRAGLPLLDLADLRAVLAHLLSDEGKAELKALGGLSSATAGVILRELIGLEDQGGDVFFGEPEFESADLLQLAPDGRGLVSLVELPQLQDRPAIFSTFLMWLLADLFHDLPEVGDVDKPRLVFFFDEAHLLFADASKAFLDQVAQTVRLIRSKGVGVFFVTQSPTDVPDAVLAQLGSRIQHQLRAHTPNDAKALKATVATYPTSGYDDLGQVITGLGIGEAVVTVMNERGAPTPVAWTRLRAPQSRMDPCDPDVLTATVAASPRAAKYQAAIDRESAREILADRLEQGAAKQDREQAGAPGPDPDPAPRPVPVPKPSTDKPSSRPPKDDSVVEQVVKSDAFKDFMRTAAREIARGMFKTGRR

SEQ ID NO: 106656 - DNA, 1512 bp, Azoarcus sp. BH72
  CDS (1)..(1512): transl_table=11
atgaccgaaccgctgctgatcgccaagacccacgacaaggacctctgcctgctgccgcggctggccaaccgccacggcctcatcaccggcgccaccggcaccggcaagaccgtgaccctgcagcgcatggcggaatccttcgccagcatcggcgtgccggtgttcatggccgacgtgaagggcgacctctccggcatcggcgccgccggcgtcgcctccgacaagctgatgcagcggctggccgcgatcggcatcaccgaattcaccccgcgcgccaacaccacggtgttctgggatgtgtacggcgccgccggccatccggtgcgggcgacgatctccgacatggggccgctgttgctggcgcgcctgctcaacctcaacgacacccaggccggcgtgctgcaactggtgttcaagatcgccgacgacaacggcctgctgctgctcgacctcaaagacctgcgggcgatgatccagcacgtgggcgagaacgcgaagagtttcaccaccgagtacggcaacgtctccgcggcttcgatcggcgccatccagcgcaacctgctggcgctcgaggagcagggcggcgacgtgttcttcggcgagccgatgctcgacatcgccgacctgatgcagaccgatgccgacggccgcggcgtcatcaatgtgctcgccgccgacaagctctaccactcgcccaagctctactccaccttcctgctgtggatgctgtccgaactcttcgagcagctgccggaagtgggcgacctcgacaagcccaagctggtgttcttcttcgacgaggcccacttgctgttcgccgacgcgcccaaggcgctggtggaaaaggtggagcaggtggtacggctgatccgttccaagggcgtcggcgtctatttcgtcacccagaacccgctcgacgtgccggaaaccgtgctcggccagctcggcaaccgcgtccagcacgcgctgcgcgccttcaccccgcgcgaccagaaggcggtgaagaccgccgccgagaccatgcgcgccaaccccgccttcgacgccgccaccgcgatcaccgaactgggcgtcggcgaggcgctggtgtccttcctcgatgacaagggccgcccggaagtcgtggaacgcggcttcgtcgtggcgccggcctcgcggctgggtccgctggcgccggcggagcgcgacgcggcgatccgcgcctcggtgctctacggccattacgagaaggcggtggatcgcgaatccgcctacgagatcctgcgtggcaaggctgccgccgccgcgcagccggaaggcgcacccgccggaaacggcggcggtgctgcgggcggcgcagcgggcggaatcgacatgaacgacatcctgttcggctccaccggcccgcgcggcggcaagcgcgacgggctggtgcagatcgccgccaagaccatcacccgcaccatcggcagctcgctcggccgccagatcgtgcgtggtgtgctcggctcgctgctgggcagcaagcgctga

SEQ ID NO: 106657 - protein, 503 aa, Azoarcus sp. BH72
MTEPLLIAKTHDKDLCLLPRLANRHGLITGATGTGKTVTLQRMAESFASIGVPVFMADVKGDLSGIGAAGVASDKLMQRLAAIGITEFTPRANTTVFWDVYGAAGHPVRATISDMGPLLLARLLNLNDTQAGVLQLVFKIADDNGLLLLDLKDLRAMIQHVGENAKSFTTEYGNVSAASIGAIQRNLLALEEQGGDVFFGEPMLDIADLMQTDADGRGVINVLAADKLYHSPKLYSTFLLWMLSELFEQLPEVGDLDKPKLVFFFDEAHLLFADAPKALVEKVEQVVRLIRSKGVGVYFVTQNPLDVPETVLGQLGNRVQHALRAFTPRDQKAVKTAAETMRANPAFDAATAITELGVGEALVSFLDDKGRPEVVERGFVVAPASRLGPLAPAERDAAIRASVLYGHYEKAVDRESAYEILRGKAAAAAQPEGAPAGNGGGAAGGAAGGIDMNDILFGSTGPRGGKRDGLVQIAAKTITRTIGSSLGRQIVRGVLGSLLGSKR

SEQ ID NO: 106658 - DNA, 1485 bp, Actinobacillus pleuropneumoniae serovar 1 str. 4074
  CDS (1)..(1485): transl_table=11
atggcacaatacgcactcgcccaaacgaaaacagggcaaattatttcattaaattccaaaatggcaaaccgtcacggcttaatcgcaggtgcaactgggacaggtaaaacggtcacactacgtaaatttgctgaagcattcagcgatgacggcgtgccggttttcttggtcgatgtaaaaggcgatctttcggggcttgcacaagcgggcagtttatccggcaaaattgcggaacgtgtcgaacaattccaattaggcggagaaagctatttaagcggttatccggtttcttattgggacgtgttcggcgaaacggggattccgcttcgtaccacaatttcggaaatgggaccgatgttgctttctcgtttgctcaatttaaacgacacgcaagaaggcttattaaacctagttttccgtgtggcggacgatcgcggtttgttgcttatcgacttaaaagatttacgtgcgttactgaaatttgtggcggaaaacgctaaagaattccaagtggaatatggtaatgtttcggcggcgagtgtcggtgcgattcaacgtgcgttattagcactagaaaatgaaggggcgacaaacttattcggcgagccggcgttaaatttacaagattggatgcaaactcgtgacggcaagggcgtgattaacgtactgaattcagagaagttaattaattcgccgcgtatgtacggtgcgtttttattgtggtttatggcggaattattcgaaaccctaccggaagtcggcgatccggaaaaaccgaaattcgtgttgttctttgacgaagcgcatttattgtttgacgatgcgccgaaagtgttggtggacaaaatcgaacaagtagtgcgtttaattcgttcgaaaggagtaggcgtatattttgtgacgcaaaatccgttagatttgccggactcggtattaggtcagttaggtaaccgtgtgcagcacgctttacgtgcgtttactccacgtgatcaaaaagcggtgaaatcggcggcagaaaccttccgtgccaataaaggtgtggacgtagtggaagcgattacccaactgggtgtgggggaggcattaatttcggtgttagacgaaaaaggtatgccgacaccggtggaagtggcgtatatctatccgccgaaaagccaattaaccccgttagtcgtagcggaacgtgatgcgttagtgaaacaagatgacctgtatgcatattacagccagtatgtggataacgaatcggcatacgaattactgaatgcgcaagttgctcaacaaccagccgaagcggaaaaagcggaagaagaaaatgatttcttcggcggtatgattgcttcgattttcggtacgaaaaagaaaaaagatcaaaccgttgccgagcaagtggtaagtgaagtgacgaagtcggtagcgaaaaagctcaccaaccaagtgtctaaacaaattatgcgtggaatcttaggcgcgattactaagtaa

SEQ ID NO: 106659 - protein, 494 aa, Actinobacillus pleuropneumoniae serovar 1 str. 4074
MAQYALAQTKTGQIISLNSKMANRHGLIAGATGTGKTVTLRKFAEAFSDDGVPVFLVDVKGDLSGLAQAGSLSGKIAERVEQFQLGGESYLSGYPVSYWDVFGETGIPLRTTISEMGPMLLSRLLNLNDTQEGLLNLVFRVADDRGLLLIDLKDLRALLKFVAENAKEFQVEYGNVSAASVGAIQRALLALENEGATNLFGEPALNLQDWMQTRDGKGVINVLNSEKLINSPRMYGAFLLWFMAELFETLPEVGDPEKPKFVLFFDEAHLLFDDAPKVLVDKIEQVVRLIRSKGVGVYFVTQNPLDLPDSVLGQLGNRVQHALRAFTPRDQKAVKSAAETFRANKGVDVVEAITQLGVGEALISVLDEKGMPTPVEVAYIYPPKSQLTPLVVAERDALVKQDDLYAYYSQYVDNESAYELLNAQVAQQPAEAEKAEEENDFFGGMIASIFGTKKKKDQTVAEQVVSEVTKSVAKKLTNQVSKQIMRGILGAITK

SEQ ID NO: 106660 - DNA, 1551 bp, Croceibacter atlanticus HTCC2559
  CDS (1)..(1551): transl_table=11
atgactaaaagagacgagtttaaagcggttatagataacggcaatacatttaaaggtgatagtattaatcttggcgcagctatgctggatggcgaaactattaccaatgcccttgtaaaaattccgcttaaaacgatgaaccgtcacggtcttattgctggtgctactggaactggtaagactaaatctttacaagtactggcagaaaacctaagtgataaaggtgtacctgttttacttatggatatgaagggtgacttaagtggcttggcagcagcaagtgaaggccacccgaaaatagatgaacgtcatgaaaaaataggattaccttttaatgccagtaagtttcctgttgagcttttgagccttagcgaccaagatggcgtgaggttaagagctacggtaagtgagtttggacctgttttattttctagaatattagatgccagtgatgcccaaagtggtattatctctgttatctttaaatattgcgatgacaataaactgcctttactagatcttgaagattttaaaaaagttttgcaatactctacaaatgaaggtaaggaagaattggagaaggattacggtaggatttcatctgcatctaccggcgcaattctcagaaagatagtagagcttgaacaacaaggcgcagatatattttttggtgaacgttcttttgaagttaaagaccttaaacgtacagatagtaatggtaaaggttatataaatattattcgcctaaccgatatacaagacaggcctaagttgttttcaacatttatgttaagtttattagccgagatatactcaacgtttccagaacaaggagatagcggcaaaccagaactcataatttttatagatgaagcacatcttatatttaaagaagcttctaaagcattacactcacaaattgaaagtattgtaaagttaattcgctctaaaggtgtaggtctttattttgtaactcaaaacccaacagatgttccagatggtgtcttaagccaattaggtttaaaggtgcaacatgccttacgtgcatttacagcaaaagatagaaaagccattaagctaactgcagaaaactatcctatatctccgttttatgatacagcagatgttcttacatctttaggaataggagaagccttagtctctgcattagatgaaaaaggaagaccaacacctttagctgctactatgatgcgagctcctatgagccgaatggatatacttacagacaaagaaattaaaacacttaatgaagaatcttacctagcagataagtataatgaagtgatagaccgaaaaagtgccaacgaaatgttggaagaaaaaattgctaaagctgctgaagaagaagcaaaatctaaagcccaagcagaacgcgaagagctagaaaaagaagcaaaaaaagcaacaagcagaagaaaaacacggtcaagaaatacaactagcgatactcaaaaagccataataaaagtgcttaccagtgccacagtaattagaggtgtgctaggcatcttaggtaaaatgattaaataa

SEQ ID NO: 106661 - protein, 516 aa, Croceibacter atlanticus HTCC2559
MTKRDEFKAVIDNGNTFKGDSINLGAAMLDGETITNALVKIPLKTMNRHGLIAGATGTGKTKSLQVLAENLSDKGVPVLLMDMKGDLSGLAAASEGHPKIDERHEKIGLPFNASKFPVELLSLSDQDGVRLRATVSEFGPVLFSRILDASDAQSGIISVIFKYCDDNKLPLLDLEDFKKVLQYSTNEGKEELEKDYGRISSASTGAILRKIVELEQQGADIFFGERSFEVKDLKRTDSNGKGYINIIRLTDIQDRPKLFSTFMLSLLAEIYSTFPEQGDSGKPELIIFIDEAHLIFKEASKALHSQIESIVKLIRSKGVGLYFVTQNPTDVPDGVLSQLGLKVQHALRAFTAKDRKAIKLTAENYPISPFYDTADVLTSLGIGEALVSALDEKGRPTPLAATMMRAPMSRMDILTDKEIKTLNEESYLADKYNEVIDRKSANEMLEEKIAKAAEEEAKSKAQAEREELEKEAKKATSRRKTRSRNTTSDTQKAIIKVLTSATVIRGVLGILGKMIK

SEQ ID NO: 106662 - DNA, 1551 bp, Sulfitobacter sp. EE-36
  CDS (1)..(1551): transl_table=11
gtgacaaatgatatcttcatcggcggcggtggcgaaaactacgcgacgaaacagtttctcaacatcggctatgccaaccgtcatgggctggtcgcgggggccacgggcacaggcaaaaccgtcacgctgcaaatcctggccgaagggttttccgccgcaggggttccggtgtttctgtccgacgtcaaaggcgatctgtcagggctggcgcaggcagggtctgccagccacaagctgcacacccctttttcagagcgcgcccagaccatcggctttgacgatttcgactacagcgcctttccggtcaccttctgggatatgttcggcaaacaagggcatccggtgcggacgacaatctcggaaatggggcccttgctgctggcgcagcttctcgatctgacggaggcccaagaaggtatcctcaacatcgccttccgcgttgctgacgaagacgggcttccgctgctggacctcaaggatctgcaggcgctgctggtctggatcggggaaaacgctgcaaccctggcactgcgctacggcaatgtatcgtcggcctcggtcggcgcgatccagcggcgcttgctggtgctggaaaaccaaggcgcggctgatctcttcggggaacctgcgctggcgctcaccgacctgatgcgcacagacacggacgggcgcggttttatcaacatcctggcggccgaccagctgatgcagtcgcccaagctctacgcgaccttcctgctgtggttgctgtcagaactcttcgaggaactgccagaggtcggggaccccgataaacccaaactggtgttcttcttcgacgaggcgcatctgctgtttgacgacgcccccaaagcgctggtcgacaaggttgaacaggtggcgcggctgatccgctccaagggcgtgggcgtgtatttcatcacacagaaccccgcagacgtgcccgaagatatccttggccaattgggcaaccgcatccagcacgccttgcgcgccttcaccgcgcgtgatcgcaaggcgctgcgccttgccgccgaaacctaccgcgggaacccgcgtttcgaaaccgaagacgcgatccgcgatgtgggcgtgggcgaggcggtgacttccatgctgcagaaaaaagggatccccggcattgtggaacgcaccctgatccggccaccatcctcgcagcttggtccgatcgatccggccacccgcgccgccctgatggcgcaaagcccgatggcggggaaatacgacacccgccttgatcgcgcctccgcgttcgaaatgctggccaaacgcgccgaagacgccgcgaaagaggcagcacaggccgaggaacaagccgagtccgaagacacatcccccgccttgcgcgaattcaacgcagcgcggcgctatgcgggcaaacgggtcacgcgctcgacctcgaaacgcacgaccaaaagcgacgacagctttggcggtgccatcgcgagtgtggtgatcaaggagttgaaaggcacaaccggccggcgcatcgtgcgcggaatcttgggcgggttgttcaaaggacgctga

SEQ ID NO: 106663 - protein, 516 aa, Sulfitobacter sp. EE-36
MTNDIFIGGGGENYATKQFLNIGYANRHGLVAGATGTGKTVTLQILAEGFSAAGVPVFLSDVKGDLSGLAQAGSASHKLHTPFSERAQTIGFDDFDYSAFPVTFWDMFGKQGHPVRTTISEMGPLLLAQLLDLTEAQEGILNIAFRVADEDGLPLLDLKDLQALLVWIGENAATLALRYGNVSSASVGAIQRRLLVLENQGAADLFGEPALALTDLMRTDTDGRGFINILAADQLMQSPKLYATFLLWLLSELFEELPEVGDPDKPKLVFFFDEAHLLFDDAPKALVDKVEQVARLIRSKGVGVYFITQNPADVPEDILGQLGNRIQHALRAFTARDRKALRLAAETYRGNPRFETEDAIRDVGVGEAVTSMLQKKGIPGIVERTLIRPPSSQLGPIDPATRAALMAQSPMAGKYDTRLDRASAFEMLAKRAEDAAKEAAQAEEQAESEDTSPALREFNAARRYAGKRVTRSTSKRTTKSDDSFGGAIASVVIKELKGTTGRRIVRGILGGLFKGR

SEQ ID NO: 106664 - DNA, 1572 bp, Roseovarius nubinhibens ISM
  CDS (1)..(1572): transl_table=11
atgcaggggtatcacgtggcagatcaggtctttatcggcgggggcgggcccgactatggcaccgcgcaggggctgcggctcgattatgccaaccggcacgggttgatcgcgggggccacggggaccggcaagacggtgaccttgcagatcctggccgaagggttttccgccgccggggtgccggtgttcctgtcggatgtgaagggcgatctgtcggggctggcggcctctgggagcgtcgatcacaagctgcatcaggcctttaccaaacgggcggcgacgatcgggtttgacacgttcagctatagcgcctttccggttaccttctgggatctctatggcgcgtctggccatccggtgcgcaccacggtggccgagatggggcctttgctgctcagccggttgatggagctcagcgaggcgcaggaaggcatcatgaacatcgcctttcggatcgccgatgaggaggggatgccgcttctggatctcaaggatctgcaggcgcttctggtctgggtcggcgagaaccgcgaggcgatttcgctgcgctatggcaatgtctcgacccagtctgtcggggccattcagcgacagctcttggtgctcgaaaatcagggcggcaacgcgtttttcggcgagccggcgctggagcttgcggatctgatgcaggtgacgcccgaggggcaggggcggatcaatatcctcgccgctgacaagctcatgggcgcgccgcggctctatgcgaccttcctgctgtggctcttgtccgagctctttgaaacgctgcccgaggtgggcgatccggacaagcccaagctcgtgtttttctttgacgaggcgcatcttctctttgatgacgcgcccaaggcgctggtggaaaaagtcgagcaagtcgcgcggcttatccggtccaaaggggtgggtgtctatttcatcacgcagaaccctgatgatgtgcccgaggatattctcggccagctcggcaaccgggtgcagcatgcgctgcgcgcctttaccgcgcgggatcgcaaggcgctcaaacgggcggcagagacctatcgccccaatgcgcggttcgacactgcggatgccattcgcgatgtcggggttggcgaggcggtgacctcgatgctggccgaaaagggcgtgccgggggtggtcgagcggacgctgatccggccgccgtcgtcgcagctcggcccgatcagtgatgcggcgcgggcgcaggtgatcgcgggctcgccggtggcggggaaatacgagacggtggtcgatcgggtctcggccttcgagatgctcaaggcgcgggccgaagaggcggcgcgcgaggcggatgcggcagaggcgcaggccgaagagcagacggtggccgagcgcgagttcaacgcgggccgtcgctatgccgggcagcgggtcgggcgatccagctcggggcgcagcacgcggaccgaggatggtatcggcagctctatcggcaaggcgatcacggggatggtgatcaaggagctcaagggcaccaccggacgacggatcgtgcgggggattctgggcgggctcttcaaggggcgctag

SEQ ID NO: 106665 - protein, 523 aa, Roseovarius nubinhibens ISM
MQGYHVADQVFIGGGGPDYGTAQGLRLDYANRHGLIAGATGTGKTVTLQILAEGFSAAGVPVFLSDVKGDLSGLAASGSVDHKLHQAFTKRAATIGFDTFSYSAFPVTFWDLYGASGHPVRTTVAEMGPLLLSRLMELSEAQEGIMNIAFRIADEEGMPLLDLKDLQALLVWVGENREAISLRYGNVSTQSVGAIQRQLLVLENQGGNAFFGEPALELADLMQVTPEGQGRINILAADKLMGAPRLYATFLLWLLSELFETLPEVGDPDKPKLVFFFDEAHLLFDDAPKALVEKVEQVARLIRSKGVGVYFITQNPDDVPEDILGQLGNRVQHALRAFTARDRKALKRAAETYRPNARFDTADAIRDVGVGEAVTSMLAEKGVPGVVERTLIRPPSSQLGPISDAARAQVIAGSPVAGKYETVVDRVSAFEMLKARAEEAAREADAAEAQAEEQTVAEREFNAGRRYAGQRVGRSSSGRSTRTEDGIGSSIGKAITGMVIKELKGTTGRRIVRGILGGLFKGR

SEQ ID NO: 106666 - DNA, 1542 bp, Oceanicola batsensis HTCC2597
  CDS (1)..(1542): transl_table=11
atggacggcaggatcttcatcgggggcggcggcgaggcctatggcgaaaagcagggtctggcgctgaaatacgcgaaccggcacgggcttgtcgccggcgccacggggaccggaaagacggtgacgctgcagatcatggccgagggtttctcggccgccggggttccggtcttcctgtcggacgtcaagggcgacctctcgggcctggccgagccgggatccgagacgttcaagcttcatgaggcattcatggaacgtgccggcaagatcggcttcgacggctattcctacgacaagttcccggtgctcttctgggaccttttcggcgagcaggggcaccccgtgcgcaccacggtttccgagatggggccgcttctgctgtcgcggctgatggagttgtccgaggcgcaggaggggatcctgaacatcgccttccgcgtggccgacgacgagggcatggcgctgctcgacctcaaggatctgcaggcgctgctggtctgggtgggcgagaaccgtgccgacctcggcctgcgctacggcaacatctctccggcctcgatcggcgcgatccagcggcggcttctggtgctcgagaatcagggcggggccaagctcttcggcgaaccggcgctggagcttgcagatctgatgcggtccgataccgacgggcgcggcatgatctcgatcctggccgccgacaagctgatggggtcgccgcgcctttacgcgaccttcctgttgtggctgctgtccgagctattcgaagagctgcccgaagtgggcgaccccgacaaaccccggctggtcttcttcttcgacgaggcgcatcttctgttcgacgacgcgcccaaggcactggtggacaaggtggaacaggtggcgcggctgatccggtccaaaggcgtcggcgtctatttcatcacccagaaccccgccgatgtgcccgaggatatcctgggccagctgggcaaccgcgtgcagcacgcgctgcgggcctttaccgcgcgcgaccgcaaggagctgaggctcgccgccgagacctatcgcgacaatccgcggttcgataccgaagaggccatccgcgaagtcggcgtgggcgaggcggtcacctcgttcctggaaccgaagggcgtgcccggggtggtcgaacgcaccctgatccggccaccatcctcgcgcctggggccaatcgacggcgccgcgcgcaccgggatcatcgacgcctctccgatcgccgggaaatacgagacgctcaaggaccgggagagcgcctacgagatcctgacccgtcgcgcggcggacgccgcccgcgcggccgaagaggcggagcgggaagaggaggagcagcccgcaccggaacgcgaataccgatcggcgcgacggtattcgggcaaccgagtgtcgcgttcgacctcgcggtcgcgccggtcgcccgaaacgatcggctcggcgctcggcaaggcggtgatcaaggagctgggcggcaccaccgggcgccgcatcgtgcgcggcatcctgggcgggcttttcaaggcgcgctga

SEQ ID NO: 106667 - protein, 513 aa, Oceanicola batsensis HTCC2597
MDGRIFIGGGGEAYGEKQGLALKYANRHGLVAGATGTGKTVTLQIMAEGFSAAGVPVFLSDVKGDLSGLAEPGSETFKLHEAFMERAGKIGFDGYSYDKFPVLFWDLFGEQGHPVRTTVSEMGPLLLSRLMELSEAQEGILNIAFRVADDEGMALLDLKDLQALLVWVGENRADLGLRYGNISPASIGAIQRRLLVLENQGGAKLFGEPALELADLMRSDTDGRGMISILAADKLMGSPRLYATFLLWLLSELFEELPEVGDPDKPRLVFFFDEAHLLFDDAPKALVDKVEQVARLIRSKGVGVYFITQNPADVPEDILGQLGNRVQHALRAFTARDRKELRLAAETYRDNPRFDTEEAIREVGVGEAVTSFLEPKGVPGVVERTLIRPPSSRLGPIDGAARTGIIDASPIAGKYETLKDRESAYEILTRRAADAARAAEEAEREEEEQPAPEREYRSARRYSGNRVSRSTSRSRRSPETIGSALGKAVIKELGGTTGRRIVRGILGGLFKAR

SEQ ID NO: 106668 - DNA, 1575 bp, Erythrobacter sp. NAP1
  CDS (1)..(1575): transl_table=11
atgagcgagattttccttggactgggcggcaatggcgagaaccagagcctcgcgctgggccgcgcaaaccggcacggcctgattgccggcgcgaccggtaccggcaagaccgtgacgcttcagggtctggcggaaagcttttcggccaatggagtgccggtgttcgtcgccgacgtaaaaggcgacctgtccggcatcgcaatgcccggttcgcccacattcaagcacgccgacaaactggaagggcgtgccaaggaactgggcatggatgactatgcctattctgacaacccggtcattttctgggatctctacggcaagcagggccacccgatccgcaccacgatcaccgagatgggaccgctgctgctgtctcgcctgctcgacctcaacgacacgcaggaaggcgtgcttcagatcgtcttccgccatgctgatgacaacggactgctgctcctcgatttcggagaccttcaatcgctgctgcaatgggcgaacgagaattcgaaggaattgtcgggtgtctacggcaacgtctcgaagcaatcggtcggcgcgatccagcgccagctcttgagtttcgaggcgcaaggggcggatcacttcttcggggagcccgcgctcgagatcgacgattttctcaagaccgacgaaaacgggcgcggctatgtgaacgtgctcgccgccgaccagttgatgcgcagccccaagctttatgccaccttccttttgtggctgctcgccgaactgttcgaaagccttcctgaagtcggcgatccggaaaagcccaaactcgtattcttcttcgatgaggcacacctgctcttcgacgatgcgcccaaggcgttgcaggagaagatcgaacaggtggtgcgcctcatccggtcgaagggcgttggcgtcttcttcgtcacgcagaacccgatcgacatccctgaggacgttgctggccagctcggcaaccgggtgcagcatgcgcttcgtgcattcactaagcgcgaccagcgcgcgatcaaggcggctgccgaaaccttccgcataaacgaggaactcgacgtcgaagaagcgatcaccgaactcaaggtcggtgaggcgctggtttcgacgctcgacgaagatggcgcgccaaccgtggttcagcgtaccttgatcaaaccgccgcgttcacggctgggcccggtgacagcaaaagaacgcgcgattatccagtcggtcagcccgttcgacggcaagtatgacgagcgaatcgatcgcgagagcgccgaagaggtactcgcgcaaaaagccgccgatgcggtagaaaccgcgcaggaggtcgaggaaaagggccgcgaggaagtcggcaagcgatcacgcaagaccaagtcgatctgggaaaaggccatcagccgcggcaccaaggtcgccgccggaggcatggcgggcgctgctgccgctgccgtgctcggcaagaagtcgcgcgccaacccggtcaggagcggaatcacttcggcagcaggctcgatcgcgaccgatctcgcaggtccaatagcggggcgcttcgtcaggaacctgattggcgggttgatgcgctag

SEQ ID NO: 106669 - protein, 524 aa, Erythrobacter sp. NAP1
MSEIFLGLGGNGENQSLALGRANRHGLIAGATGTGKTVTLQGLAESFSANGVPVFVADVKGDLSGIAMPGSPTFKHADKLEGRAKELGMDDYAYSDNPVIFWDLYGKQGHPIRTTITEMGPLLLSRLLDLNDTQEGVLQIVFRHADDNGLLLLDFGDLQSLLQWANENSKELSGVYGNVSKQSVGAIQRQLLSFEAQGADHFFGEPALEIDDFLKTDENGRGYVNVLAADQLMRSPKLYATFLLWLLAELFESLPEVGDPEKPKLVFFFDEAHLLFDDAPKALQEKIEQVVRLIRSKGVGVFFVTQNPIDIPEDVAGQLGNRVQHALRAFTKRDQRAIKAAAETFRINEELDVEEAITELKVGEALVSTLDEDGAPTVVQRTLIKPPRSRLGPVTAKERAIIQSVSPFDGKYDERIDRESAEEVLAQKAADAVETAQEVEEKGREEVGKRSRKTKSIWEKAISRGTKVAAGGMAGAAAAAVLGKKSRANPVRSGITSAAGSIATDLAGPIAGRFVRNLIGGLMR

SEQ ID NO: 106670 - DNA, 1443 bp, Photobacterium sp. SKA34
  CDS (1)..(1443): transl_table=11
atgaaaagtgacataattcttatcggtaagggcgaaaataaaattgggatccatcccaaatatgccaatcgtcatggttttattgctggagcaacaggtacaggcaaaacggtaacacttcagtgtttagctgaagggttctcatctcttggtgtgcctgtgtttcttgctgatgtaaaaggtgacttatcaggtatagcgaaggcaggtactgataatgcagttgttcaaaagcgttgtcgagaaattggaattgatgattttcaatttacttcttttcccgttgagttctgggatttgtttggaaagaaaggggcaaaaatccgtgccacgttagaagacatgggaccgctattattaagtcgtttgttagattgtaatgatgtccaagaaggattaattaatttagcgtttgaatatgcagaagaaaacaaaatgccaatgttggatttggatgatttttctaccgcactaaattacttaggcgataactcaaaacaactgggtgggatgtacggacgtatcagtaagtcctctattgctgctattgaacgtcgtttattgggctttaaacgccaaggtggtagcgaattttttggtgagccagcattggattaccatgatttcatgaaaacggccacagatggtcggggcattataaatattctggatgctagtaccttgatccaatcgccaaagttatactcaaccttcttattatggttgttgtctgagctttatgaaaacctaccggaagtcggtgatcttgataaacctaaatttgtgttctttttcgatgaggctcatctactgtttgatgatgtacctaaagtcttcttagatcagattgaacaagtggtacgtttgattcgctctaaagcggtaggcatctattttgtaagtcaaaatccaaccgatattccagattcagtattagggcaactgggtaatcgcattcaacatgcgttacgtgcttataccccaaaagaaagaaaagtggtaaaagttgcagctgaatcatttagggataacccaaatttagatgttgttaccttgctgggagaattaggcgtaggtgaagcattagtttctgtgttgggggaaggcggtgtcccgtctgtggttgagcatgtcactattcgccctccggagtcgcaaattggtcctattagtgcagataagcgcattgaaatgctaaatgccagccagtattttcagcaatatagagtagcagtgaatcgtgagtcagctcatgaaatattaaacaagcgcacagagcagaaaaagcaacaagcacaagaagctgaacatgagaaacaggaacgtgcaagtattcgaaagcctcgtcgctctcagcgtcaaacatacacagaatcgtttataaaaaccttattaaggcaacttgcgaatgcaatcgtaagagcgttattcaagcggcgttaa

SEQ ID NO: 106671 - protein, 480 aa, Photobacterium sp. SKA34
MKSDIILIGKGENKIGIHPKYANRHGFIAGATGTGKTVTLQCLAEGFSSLGVPVFLADVKGDLSGIAKAGTDNAVVQKRCREIGIDDFQFTSFPVEFWDLFGKKGAKIRATLEDMGPLLLSRLLDCNDVQEGLINLAFEYAEENKMPMLDLDDFSTALNYLGDNSKQLGGMYGRISKSSIAAIERRLLGFKRQGGSEFFGEPALDYHDFMKTATDGRGIINILDASTLIQSPKLYSTFLLWLLSELYENLPEVGDLDKPKFVFFFDEAHLLFDDVPKVFLDQIEQVVRLIRSKAVGIYFVSQNPTDIPDSVLGQLGNRIQHALRAYTPKERKVVKVAAESFRDNPNLDVVTLLGELGVGEALVSVLGEGGVPSVVEHVTIRPPESQIGPISADKRIEMLNASQYFQQYRVAVNRESAHEILNKRTEQKKQQAQEAEHEKQERASIRKPRRSQRQTYTESFIKTLLRQLANAIVRALFKRR

SEQ ID NO: 106672 - DNA, 1698 bp, Xanthobacter autotrophicus Py2
  CDS (1)..(1698): transl_table=11
atggcacgcaccccttccacccgtccgcccgccaccggcccgagaacgggcaaggcgccggtggccgacgccgcgcctcccgcatccgtgggaccgaccgagccgaaggccaatccctgggggccggcggcgcaggaggagggcgacggccgcatcctggtggggcgcagcttccttggccgcagcgaagcggcgaaagcaggcaccagcgccaaggatgaatatctcaccctgcgcctcgccaaccgccacggcctggtgaccggcgccacgggcaccggcaagaccgtgacgctgcaggttctggccgaagggttttcgcgggccggggtgccagtgttcgccgccgacatcaagggcgacctctccggcgtggccgcccttggcgaggccaaggacttcctggtcgagcgggcgcagcaggtgggcatcacctacaccccggacagcttcccggtgatcttctgggacctgttcggcgagcagggccaccccatccgcgccaccgtgtcggagatggggccgctgctgctggcgcgcctcatgggcctcaacgacacccaggagggcgtgctcaacatcgtgttccgcctcgccgacgagcagggcctgccgatcctggatctcaaggacctcagggccatgctggccgaggtcgcccagaccgcctccaccctcaccaccaagtacggcaacgtctcggcgcagagcgtcggggccatccagcgccagcttctggtgctggagaaccagggggcggacaagttcttcggcgagccggcgctgaacatcgccgacctgatgcgggtggatcgctcgggctatggcaccatctcggtgctggccgcggacaagctgatgggcgcaccgcggctttatgcctgcttcctgctgtggcttctgtcggaactcttcgagcgcctgccagaggtgggcgatccggacaaaccgaagctcgtcttcttcttcgacgaggcgcatctgttgttcgatgaggcgcccaaggcgctgctggacaaggtggagcaggtggttcgcctcattcgctccaagggggtgggtgtctatttcgtctcccagaacccgctggacattcccgaaagcgtgctcgcccagctcggcaaccgggtgcagcacgccctgcgcgccttcactccgcgtgaccagaaggcggtgaaggctgcggccgagaccttccggcccaatcccgatctcgacaccgctcaggtcatcatggaactgggcaagggcgaggcactggtctccatgctggagggcaatggcgtgccctctatggtggagcgcacgctcatccgcccgccctgcggccgaatcggcccgttgagcgccgacgagcgcgcggcggtgatggccaggagcccggtggggcacatctatgacacgcccatcgatcgcgaatcggcgttcgagatgctgcagaagcgaatcgaggagaaggccgccccgcaggaggcggcggcctccgacggcggcggatttcttggcggggtgctcgacagcgtgctgggcaccggccaggccgccggcaggacgccatccgggacggcgcggagcggcggccggcccagcacccgcatgaccaccaccgaggtggtggtgaaccaggtggcgcgaaccgtggccacgggtctcggccgggccatcctgcgcggcatcctcggctccatccgacgctga

SEQ ID NO: 106673 - protein, 565 aa, Xanthobacter autotrophicus Py2
MARTPSTRPPATGPRTGKAPVADAAPPASVGPTEPKANPWGPAAQEEGDGRILVGRSFLGRSEAAKAGTSAKDEYLTLRLANRHGLVTGATGTGKTVTLQVLAEGFSRAGVPVFAADIKGDLSGVAALGEAKDFLVERAQQVGITYTPDSFPVIFWDLFGEQGHPIRATVSEMGPLLLARLMGLNDTQEGVLNIVFRLADEQGLPILDLKDLRAMLAEVAQTASTLTTKYGNVSAQSVGAIQRQLLVLENQGADKFFGEPALNIADLMRVDRSGYGTISVLAADKLMGAPRLYACFLLWLLSELFERLPEVGDPDKPKLVFFFDEAHLLFDEAPKALLDKVEQVVRLIRSKGVGVYFVSQNPLDIPESVLAQLGNRVQHALRAFTPRDQKAVKAAAETFRPNPDLDTAQVIMELGKGEALVSMLEGNGVPSMVERTLIRPPCGRIGPLSADERAAVMARSPVGHIYDTPIDRESAFEMLQKRIEEKAAPQEAAASDGGGFLGGVLDSVLGTGQAAGRTPSGTARSGGRPSTRMTTTEVVVNQVARTVATGLGRAILRGILGSIRR

SEQ ID NO: 106674 - DNA, 1518 bp, Flavobacteria bacterium BBFL7
  CDS (1)..(1518): transl_table=11
atgtctgataaagattctttatataaaataattactgaaggttataaccctaaaggcgactcaatcatcatgggtgcagccatgcttaatggtgaaactttaactggtgcccatgtaaaaatcccacttaagaccatgaatagacatgggcttattgctggggcaacaggaactggaaaaacgaaaaccctgcaaatcatagcagagcagctttcacaaaaaggaataccgtctttattaatggatattaaaggtgacttatcgggtatagctgccgctagtgatggacatcctaagattgatgaacgtcatgaaaaaataggccttgattttacggcacacaactctcctgtcgagatcatgactatctctgagcaagaaggaataagaatgagagctacagttagtgagttcggaccagttttgctttcgcgaatattagatgtgacagaaacccaagcaggtattatatctgtagtttttaaatattgtgatgataataaattacctcttttagaccttgacgatctcaaaaaggtcttacaatatgccactggagctgggaaaaaagaatttcaagaagaatatggtagaatatccacctcatccactggagcaattcttaggaagattattgaactagaacaacaaggagccgatcaattcttcggcgaacgcagttttgaagtacaagatttagttcgtagagatcgtgaaggacgaggatatgtcaatgttataaggctgacagacatacaagacagaccaaaactattttcaaccttcatgttaagtctgctggctgagatctatagtacatttccagaacaaggagatgctgatcaaccagaattgatcatgtttattgatgaggcacacttaatttttgatcaagcaagtggagcattgttagaccaaatcgagagtatcgttaaactaatacgttcaaagggaatcggactttattttgtaacacaaaatcctactgacattccagaaggtgttttaagtcagttaggtcttaaggttcaacacgcattgcgtgcatttacagccaaagaccgtaaagctattaaattaacggctcaaaactatccagaaacagaattttatgatactgccgaggtattaacttctttaggaattggtgaggctttaatatctgctctagatgaaaaaggaagacctagcccactggctgcaactcttttaagagctcctgcgagtagaatggacgtattaaccgatagagaacttagtgatcttatcgcagactctgaattaacagataaatacaacgaagaaatcaaccgtgaaagtgctgaagaaatccttcaagaaaagatagaaaaggccaatgaagatgaaataaaagaaaaagctaaagctgaaaaagctaaagctaaaaaaagcacctctagacgtactagcaccagacaaaaccctatcattaaagtccttacaagcgccagctttataagaggtgttatggggattctaggaaaagctcttaagtaa

SEQ ID NO: 106675 - protein, 505 aa, Flavobacteria bacterium BBFL7
MSDKDSLYKIITEGYNPKGDSIIMGAAMLNGETLTGAHVKIPLKTMNRHGLIAGATGTGKTKTLQIIAEQLSQKGIPSLLMDIKGDLSGIAAASDGHPKIDERHEKIGLDFTAHNSPVEIMTISEQEGIRMRATVSEFGPVLLSRILDVTETQAGIISVVFKYCDDNKLPLLDLDDLKKVLQYATGAGKKEFQEEYGRISTSSTGAILRKIIELEQQGADQFFGERSFEVQDLVRRDREGRGYVNVIRLTDIQDRPKLFSTFMLSLLAEIYSTFPEQGDADQPELIMFIDEAHLIFDQASGALLDQIESIVKLIRSKGIGLYFVTQNPTDIPEGVLSQLGLKVQHALRAFTAKDRKAIKLTAQNYPETEFYDTAEVLTSLGIGEALISALDEKGRPSPLAATLLRAPASRMDVLTDRELSDLIADSELTDKYNEEINRESAEEILQEKIEKANEDEIKEKAKAEKAKAKKSTSRRTSTRQNPIIKVLTSASFIRGVMGILGKALK

SEQ ID NO: 106676 - DNA, 1503 bp, Escherichia coli B
  CDS (1)..(1503): transl_table=11
atgagcgaacccctgttaattgcccgcacgccggacacagaactgtttttactgccgggaatggctaaccgtcacgggctgattactggcgcaacggggacgggtaaaaccgttacgctgcaaaaactggcagagtcattgtcggaaatcggcgtgccggtgtttatggctgatgtgaaaggcgatctgaccggtatcgcgcaggcaggaacggcgtcggaaaaactgctcacaaggcttaaaaatatcggcgtcaatgactggcaaccgcatgccaatccggtggtggtgtgggatatctttggcgagaaaggccatccggtgcgggcgacggtttcagacctggggccgctgttgctggcgcggctgttgaatctcaacgatgtgcagtctggcgtgctgaatatcatcttccgcattgctgacgatcaggggctgttactgctcgactttaaagatttgcgggcgattacccagtacatcggcgataacgccaaatctttccagaatcagtacggaaatatcagtagcgcatcggttggtgccatccagcgcggattactgtcgctggagcaacaaggtgcggagcatttctttggcgagccgatgctggatatcaaagactggatgcgcaccgatgccaacggtaaaggcgttatcaatatcctcagcgccgaaaagctttatcagatgccgaaactatatgccgccagcctgttgtggatgctctcggagttgtatgaacaattgccggaagcaggcgatctggagaagccgaaactggtgtttttcttcgacgaagcacatctgctgtttaatgacgcaccgcaggtactgctggataagattgagcaggtgataaggcttattcgctcaaaaggcgtgggcgtctggttcgtttcgcaaaacccgtctgatattccggataacgtgctcgggcagctcggtaatcgcgttcaacacgctttgcgtgcttttacgcccaaagatcagaaagcggtaaaagctgcggcgcaaaccatgcgggccaatccggcgtttgataccgaaaaggcgattcaggaactgggcaccggcgaggcgttaatctcgtttcttgatgtgaaaggaagtccttcagtggtggagcgggcgatggtgatcgcgccttgttcgcgaatggggccggtgacggaagatgagcgtaatggcctgattaatcactccccggtgtatggcaaatatgaggatgaggtggaccgagaatccgcctatgagatgttgcaaaaaggctttcaggccagtaccgagcagcaaaataatcctgccgcgaaagggaaagaggtggcggtggatgacggtattcttggtggattgaaggatattttgtttggcactaccggaccacgcggcgggaagaaagatggtgtggtgcaaacaatggccaaaagcgccgctcgccaggtgacgaatcagattgtacgcgggatgttggggagtttgctgggggggagaagaaggtaa

SEQ ID NO: 106677 - protein, 500 aa, Escherichia coli B
MSEPLLIARTPDTELFLLPGMANRHGLITGATGTGKTVTLQKLAESLSEIGVPVFMADVKGDLTGIAQAGTASEKLLTRLKNIGVNDWQPHANPVVVWDIFGEKGHPVRATVSDLGPLLLARLLNLNDVQSGVLNIIFRIADDQGLLLLDFKDLRAITQYIGDNAKSFQNQYGNISSASVGAIQRGLLSLEQQGAEHFFGEPMLDIKDWMRTDANGKGVINILSAEKLYQMPKLYAASLLWMLSELYEQLPEAGDLEKPKLVFFFDEAHLLFNDAPQVLLDKIEQVIRLIRSKGVGVWFVSQNPSDIPDNVLGQLGNRVQHALRAFTPKDQKAVKAAAQTMRANPAFDTEKAIQELGTGEALISFLDVKGSPSVVERAMVIAPCSRMGPVTEDERNGLINHSPVYGKYEDEVDRESAYEMLQKGFQASTEQQNNPAAKGKEVAVDDGILGGLKDILFGTTGPRGGKKDGVVQTMAKSAARQVTNQIVRGMLGSLLGGRRR

SEQ ID NO: 106678 - DNA, 23 bp, Artificial sequence
  primer
atgagtgaacccctgttaattgc

SEQ ID NO: 106679 - DNA, 22 bp, Artificial sequence
  primer
ttaccttcttctcccccccagc

SEQ ID NO: 106680 - protein, 545 aa, Artificial sequence
  consensus sequence
  Variant (6)..(7): Xaa in position 6 to 7 is any amino acid
  Variant (19)..(21): Xaa in position 19 to 21 is any amino acid
  Variant (24)..(25): Xaa in position 24 to 25 is any amino acid
  Variant (27)..(28): Xaa in position 27 to 28 is any amino acid
  Variant (34)..(35): Xaa in position 34 to 35 is any amino acid
  Variant (37)..(37): Xaa in position 37 is any amino acid
  Variant (42)..(42): Xaa in position 42 is any amino acid
  Variant (44)..(47): Xaa in position 44 to 47 is any amino acid
  Variant (49)..(49): Xaa in position 49 is any amino acid
  Variant (50)..(60): Xaa in position 50 to 60 is any or no amino acid
  Variant (62)..(65): Xaa in position 62 to 65 is any amino acid
  Variant (66)..(76): Xaa in position 66 to 76 is any or no amino acid
  Variant (79)..(80): Xaa in position 79 to 80 is any amino acid
  Variant (83)..(84): Xaa in position 83 to 84 is any amino acid
  Variant (86)..(87): Xaa in position 86 to 87 is any amino acid
  Variant (88)..(88): Xaa in position 88 is any or no amino acid
  Variant (90)..(90): Xaa in position 90 is any amino acid
  Variant (92)..(92): Xaa in position 92 is any amino acid
  Variant (94)..(94): Xaa in position 94 is any amino acid
  Variant (96)..(99): Xaa in position 96 to 99 is any amino acid
  Variant (102)..(102): Xaa in position 102 is any amino acid
  Variant (105)..(107): Xaa in position 105 to 107 is any amino acid
  Variant (109)..(109): Xaa in position 109 is any amino acid
  Variant (111)..(113): Xaa in position 111 to 113 is any amino acid
  Variant (115)..(117): Xaa in position 115 to 117 is any amino acid
  Variant (119)..(121): Xaa in position 119 to 121 is any amino acid
  Variant (123)..(124): Xaa in position 123 to 124 is any amino acid
  Variant (127)..(128): Xaa in position 127 to 128 is any amino acid
  Variant (129)..(133): Xaa in position 129 to 133 is any or no amino acid
  Variant (136)..(136): Xaa in position 136 is any amino acid
  Variant (138)..(138): Xaa in position 138 is any amino acid
  Variant (140)..(141): Xaa in position 140 to 141 is any amino acid
  Variant (144)..(161): Xaa in position 144 to 161 is any amino acid
  Variant (162)..(176): Xaa in position 162 to 176 is any or no amino acid
  Variant (178)..(182): Xaa in position 178 to 182 is any amino acid
  Variant (184)..(186): Xaa in position 184 to 186 is any amino acid
  Variant (188)..(188): Xaa in position 188 is any amino acid
  Variant (190)..(190): Xaa in position 190 is any amino acid
  Variant (192)..(193): Xaa in position 192 to 193 is any amino acid
  Variant (196)..(197): Xaa in position 196 to 197 is any amino acid
  Variant (199)..(202): Xaa in position 199 to 202 is any amino acid
  Variant (207)..(207): Xaa in position 207 is any amino acid
  Variant (209)..(211): Xaa in position 209 to 211 is any amino acid
  Variant (213)..(218): Xaa in position 213 to 218 is any amino acid
  Variant (219)..(220): Xaa in position 219 to 220 is any or no amino acid
  Variant (222)..(222): Xaa in position 222 is any amino acid
  Variant (224)..(227): Xaa in position 224 to 227 is any amino acid
  Variant (229)..(232): Xaa in position 229 to 232 is any amino acid
  Variant (234)..(236): Xaa in position 234 to 236 is any amino acid
  Variant (237)..(237): Xaa in position 237 is any or no amino acid
  Variant (239)..(240): Xaa in position 239 to 240 is any amino acid
  Variant (242)..(243): Xaa in position 242 to 243 is any amino acid
  Variant (248)..(248): Xaa in position 248 is any amino acid
  Variant (250)..(250): Xaa in position 250 is any amino acid
  Variant (253)..(253): Xaa in position 253 is any amino acid
  Variant (255)..(255): Xaa in position 255 is any amino acid
  Variant (259)..(259): Xaa in position 259 is any amino acid
  Variant (262)..(263): Xaa in position 262 to 263 is any amino acid
  Variant (266)..(266): Xaa in position 266 is any amino acid
  Variant (279)..(280): Xaa in position 279 to 280 is any amino acid
  Variant (283)..(284): Xaa in position 283 to 284 is any amino acid
  Variant (286)..(289): Xaa in position 286 to 289 is any amino acid
  Variant (292)..(293): Xaa in position 292 to 293 is any amino acid
  Variant (304)..(304): Xaa in position 304 is any amino acid
  Variant (306)..(307): Xaa in position 306 to 307 is any amino acid
  Variant (309)..(309): Xaa in position 309 is any amino acid
  Variant (311)..(311): Xaa in position 311 is any amino acid
  Variant (313)..(313): Xaa in position 313 is any amino acid
  Variant (315)..(317): Xaa in position 315 to 317 is any amino acid
  Variant (319)..(319): Xaa in position 319 is any amino acid
  Variant (323)..(323): Xaa in position 323 is any amino acid
  Variant (325)..(325): Xaa in position 325 is any amino acid
  Variant (332)..(332): Xaa in position 332 is any amino acid
  Variant (334)..(336): Xaa in position 334 to 336 is any amino acid
  Variant (340)..(343): Xaa in position 340 to 343 is any amino acid
  Variant (345)..(345): Xaa in position 345 is any amino acid
  Variant (347)..(349): Xaa in position 347 to 349 is any amino acid
  Variant (351)..(360): Xaa in position 351 to 360 is any amino acid
  Variant (361)..(361): Xaa in position 361 is any or no amino acid
  Variant (363)..(364): Xaa in position 363 to 364 is any amino acid
  Variant (369)..(369): Xaa in position 369 is any amino acid
  Variant (371)..(371): Xaa in position 371 is any amino acid
  Variant (373)..(374): Xaa in position 373 to 374 is any amino acid
  Variant (377)..(377): Xaa in position 377 is any amino acid
  Variant (379)..(380): Xaa in position 379 to 380 is any amino acid
  Variant (382)..(388): Xaa in position 382 to 388 is any amino acid
  Variant (390)..(390): Xaa in position 390 is any amino acid
  Variant (392)..(399): Xaa in position 392 to 399 is any amino acid
  Variant (401)..(407): Xaa in position 401 to 407 is any amino acid
  Variant (409)..(413): Xaa in position 409 to 413 is any amino acid
  Variant (415)..(418): Xaa in position 415 to 418 is any amino acid
  Variant (421)..(421): Xaa in position 421 is any amino acid
  Variant (423)..(427): Xaa in position 423 to 427 is any amino acid
  Variant (429)..(429): Xaa in position 429 is any amino acid
  Variant (431)..(431): Xaa in position 431 is any amino acid
  Variant (433)..(477): Xaa in position 433 to 477 is any amino acid
  Variant (478)..(540): Xaa in position 478 to 540 is any or no amino acid
  Variant (543)..(544): Xaa in position 543 to 544 is any amino acid
NRHGLXXGATGTGKTVTLXXXAEXXSXXGVPVFXXDXKGDLXGXXXXGXXXXXXXXXXXXRXXXXXXXXXXXXXXXPVXXWDXXGXXXGXPXRXTXXXXGPXLLXXXLXLXXXQXXXLXXXFXXADXXXXXXXGLXLXDXXDLXXXXXXXXXXXXXXXXXXXXXXXXXXXXXXXXXGXXXXXSXXXIXRXLXXLEXXGXXXXFGEPXLXXXDXXXXXXXXGXGXXXXLXXXXLXXXXPXXYXXFLLWXLXELXEXLPEXGDXXKPXLVFFFDEAHLLFXXAPXXLXXXXEQXXRLIRSKGVGVXFXXQXPXDXPXXXLXQLGXRXQHALRAXTXXXQKAXXXXAXTXXXNXXXXXXXXXXXLXXGEALXSXLXXKGXPXXVXXXXXXXPXSXXXXXXXXEXXXXXXXSXXXXXYXXXXDRXSXXXXXAXEXLXXXXXXXXXXXXXXXXXXXXXXXXXXXXXXXXXXXXXXXXXXXXXXXXXXXXXXXXXXXXXXXXXXXXXXXXXXXXXXXXXXXXXXXXXXXXXXXXXXXXXXXXXXXXRGXXG

SEQ ID NO: 106681 - protein, 61 aa, Artificial sequence
  protein pattern
  Variant (2)..(2): Xaa in position 2 is any or no amino acid
  Variant (5)..(5): Xaa in position 5 is any or no amino acid
  Variant (13)..(13): Xaa in position 13 is any amino acid
  Variant (14)..(14): Xaa in position 14 is Asp, Glu, Gly or Asn
  Variant (15)..(15): Xaa in position 15 is any amino acid
  Variant (16)..(16): Xaa in position 16 is Pro or Ser
  Variant (17)..(18): Xaa in position 17 to 18 is any amino acid
  Variant (19)..(19): Xaa in position 19 is Phe, Leu or Met
  Variant (20)..(22): Xaa in position 20 to 22 is any amino acid
  Variant (23)..(23): Xaa in position 23 is Ile or Val
  Variant (24)..(24): Xaa in position 24 is Ala, Glu or Thr
  Variant (25)..(25): Xaa in position 25 is Gln or Thr
  Variant (26)..(27): Xaa in position 26 to 27 is any amino acid
  Variant (28)..(28): Xaa in position 28 is Lys or Arg
  Variant (29)..(29): Xaa in position 29 is Ile or Leu
  Variant (30)..(30): Xaa in position 30 is Ile or Val
  Variant (34)..(34): Xaa in position 34 is Ala or Gly
  Variant (36)..(36): Xaa in position 36 is Ala or Gly
  Variant (37)..(37): Xaa in position 37 is Ile or Val
  Variant (38)..(38): Xaa in position 38 is Phe, Trp or Tyr
  Variant (40)..(40): Xaa in position 40 is any amino acid
  Variant (41)..(41): Xaa in position 41 is Ser or Thr
  Variant (43)..(43): Xaa in position 43 is any amino acid
  Variant (45)..(45): Xaa in position 45 is any amino acid
  Variant (47)..(47): Xaa in position 47 is Ile, Leu or Val
  Variant (49)..(49): Xaa in position 49 is Ala, Asp, Glu or Asn
  Variant (50)..(50): Xaa in position 50 is any amino acid
  Variant (51)..(51): Xaa in position 51 is Ile or Val
  Variant (52)..(52): Xaa in position 52 is any amino acid
  Variant (53)..(53): Xaa in position 53 is Ala, Gly or Ser
  Variant (57)..(57): Xaa in position 57 is Ala, Asn or Ser
  Variant (58)..(58): Xaa in position 58 is Lys or Arg
  Variant (59)..(59): Xaa in position 59 is any amino acid
VXFFXDEAHLLFXXXXXXXXXXXXXXXXXXRSKXVXXXFXXQXPXDXPXXXXXQLGXXXQH

SEQ ID NO: 106682 - protein, 50 aa, Artificial sequence
  protein pattern
  Variant (5)..(5): Xaa in position 5 is any amino acid
  Variant (6)..(6): Xaa in position 6 is Ile or Val
  Variant (7)..(7): Xaa in position 7 is Ala or Thr
  Variant (17)..(17): Xaa in position 17 is Ser or Thr
  Variant (19)..(21): Xaa in position 19 to 21 is any amino acid
  Variant (22)..(23): Xaa in position 22 to 23 is any or no amino acid
  Variant (25)..(28): Xaa in position 25 to 28 is any amino acid
  Variant (29)..(30): Xaa in position 29 to 30 is any or no amino acid
  Variant (32)..(32): Xaa in position 32 is Thr or Val
  Variant (33)..(33): Xaa in position 33 is Ala or Pro
  Variant (34)..(34): Xaa in position 34 is Cys or Val
  Variant (35)..(35): Xaa in position 35 is Phe or Ile
  Variant (36)..(36): Xaa in position 36 is any amino acid
  Variant (37)..(37): Xaa in position 37 is Ala, Ser, Thr or Val
  Variant (39)..(39): Xaa in position 39 is Ala, Ile or Val
  Variant (43)..(43): Xaa in position 43 is Ile, Leu or Val
  Variant (44)..(44): Xaa in position 44 is Ala, Cys, Ser or Thr
  Variant (45)..(45): Xaa in position 45 is Gly, Asn or Ser
  Variant (46)..(46): Xaa in position 46 is Ile, Leu, Met or Val
  Variant (47)..(47): Xaa in position 47 is Ala, Gly, Ser, Thr or Val
  Variant (48)..(49): Xaa in position 48 to 49 is any amino acid
  Variant (50)..(50): Xaa in position 50 is Gly or Pro
NRHGXXXGATGTGKTVXLXXXXXAXXXXXXGXXXXXXDXKGDXXXXXXXX

SEQ ID NO: 106683 - protein, 48 aa, Artificial sequence
  protein pattern
  Variant (2)..(2): Xaa in position 2 is Ala, Thr or Val
  Variant (4)..(4): Xaa in position 4 is Ile, Leu, Met or Val
  Variant (5)..(5): Xaa in position 5 is Ala, Ser or Thr
  Variant (6)..(6): Xaa in position 6 is any amino acid
  Variant (7)..(7): Xaa in position 7 is Phe, Ile, Leu or Met
  Variant (10)..(10): Xaa in position 10 is any amino acid
  Variant (11)..(11): Xaa in position 11 is Leu or Met
  Variant (12)..(12): Xaa in position 12 is Ile or Leu
  Variant (13)..(13): Xaa in position 13 is Ala, Gly or Ser
  Variant (14)..(14): Xaa in position 14 is any amino acid
  Variant (15)..(15): Xaa in position 15 is Ile, Leu, Met or Val
  Variant (16)..(16): Xaa in position 16 is Leu or Met
  Variant (17)..(17): Xaa in position 17 is Asp, Glu, Gly, Asn or Gln
  Variant (18)..(18): Xaa in position 18 is Ala, Ile or Leu
  Variant (19)..(19): Xaa in position 19 is Asn, Ser or Thr
  Variant (20)..(20): Xaa in position 20 is Ala, Asp, Glu or Gln
  Variant (21)..(21): Xaa in position 21 is any amino acid
  Variant (23)..(23): Xaa in position 23 is Ala, Glu, Gln, Ser or Thr
  Variant (24)..(24): Xaa in position 24 is Ala, Gly, Gln or Ser
  Variant (25)..(25): Xaa in position 25 is any amino acid
  Variant (26)..(26): Xaa in position 26 is Leu or Met
  Variant (27)..(27): Xaa in position 27 is any amino acid
  Variant (28)..(29): Xaa in position 28 to 29 is Ala, Ile, Leu or Val
  Variant (31)..(32): Xaa in position 31 to 32 is any amino acid
  Variant (35)..(36): Xaa in position 35 to 36 is any amino acid
  Variant (38)..(38): Xaa in position 38 is any or no amino acid
  Variant (40)..(40): Xaa in position 40 is any or no amino acid
  Variant (42)..(42): Xaa in position 42 is any amino acid
  Variant (43)..(43): Xaa in position 43 is any or no amino acid
  Variant (45)..(46): Xaa in position 45 to 46 is any amino acid
RXTXXXXGPXXXXXXXXXXXXQXXXXXXXFXXADXXGXLXLXXDXXDL

SEQ ID NO: 106684 - protein, 30 aa, Artificial sequence
  protein pattern
  Variant (2)..(3): Xaa in position 2 to 3 is any or no amino acid
  Variant (5)..(6): Xaa in position 5 to 6 is any or no amino acid
  Variant (9)..(9): Xaa in position 9 is Leu or Val
  Variant (10)..(10): Xaa in position 10 is Ile or Val
  Variant (11)..(11): Xaa in position 11 is Gly, Ser or Thr
  Variant (12)..(12): Xaa in position 12 is any amino acid
  Variant (14)..(14): Xaa in position 14 is Ala, Asp, Glu, Asn, Gln or Ser
  Variant (15)..(16): Xaa in position 15 to 16 is any amino acid
  Variant (18)..(18): Xaa in position 18 is any amino acid
  Variant (20)..(22): Xaa in position 20 to 22 is any amino acid
  Variant (23)..(23): Xaa in position 23 is Ala, Glu or Gln
  Variant (24)..(24): Xaa in position 24 is any amino acid
  Variant (25)..(25): Xaa in position 25 is Ala, Gly, Ser, Thr or Val
  Variant (26)..(26): Xaa in position 26 is any amino acid
  Variant (27)..(27): Xaa in position 27 is Ile, Leu, Met or Val
  Variant (28)..(28): Xaa in position 28 is any amino acid
  Variant (29)..(29): Xaa in position 29 is Ala, Leu, Pro or Val
LXXGXXEAXXXXLXXXGXPXXXXXXXXXXP

SEQ ID NO: 106685 - protein, 25 aa, Artificial sequence
  protein pattern
  Variant (2)..(2): Xaa in position 2 is Ala, Gly, Ser or Thr
  Variant (3)..(4): Xaa in position 3 to 4 is any amino acid
  Variant (8)..(8): Xaa in position 8 is Phe, Leu or Met
  Variant (9)..(9): Xaa in position 9 is Leu or Met
  Variant (10)..(10): Xaa in position 10 is Ala or Ser
  Variant (13)..(13): Xaa in position 13 is Phe or Tyr
  Variant (15)..(15): Xaa in position 15 is any amino acid
  Variant (19)..(19): Xaa in position 19 is any amino acid
  Variant (22)..(24): Xaa in position 22 to 24 is any amino acid
YXXXLLWXXXELXEXLPEXGDXXXP

SEQ ID NO: 106686 - protein, 20 aa, Artificial sequence
  protein pattern
  Variant (2)..(2): Xaa in position 2 is any amino acid
  Variant (3)..(3): Xaa in position 3 is Phe, Ile, Leu, Met or Val
  Variant (4)..(6): Xaa in position 4 to 6 is any amino acid
  Variant (8)..(8): Xaa in position 8 is Ala, Asp, Glu, Gly, Asn or Ser
  Variant (9)..(11): Xaa in position 9 to 11 is any amino acid
  Variant (12)..(12): Xaa in position 12 is Asp, Glu or Asn
  Variant (13)..(13): Xaa in position 13 is Arg or Ser
  Variant (14)..(14): Xaa in position 14 is any amino acid
  Variant (17)..(17): Xaa in position 17 is any amino acid
  Variant (19)..(19): Xaa in position 19 is any amino acid
SXXXXXYXXXXXXXSAXEXL

SEQ ID NO: 106687 - protein, 19 aa, Artificial sequence
  protein pattern
  Variant (5)..(5): Xaa in position 5 is Phe or Tyr
  Variant (7)..(7): Xaa in position 7 is Ala, Leu or Pro
  Variant (8)..(8): Xaa in position 8 is any amino acid
  Variant (9)..(9): Xaa in position 9 is Asp or Glu
  Variant (10)..(10): Xaa in position 10 is any amino acid
  Variant (12)..(12): Xaa in position 12 is any amino acid
  Variant (13)..(13): Xaa in position 13 is Ile, Leu or Val
  Variant (14)..(15): Xaa in position 14 to 15 is any amino acid
  Variant (16)..(16): Xaa in position 16 is Ala, Ser or Thr
  Variant (17)..(17): Xaa in position 17 is Ala or Val
  Variant (18)..(18): Xaa in position 18 is any amino acid
  Variant (19)..(19): Xaa in position 19 is Asn, Ser or Thr
ALRAXTXXXXKXXXXXXXX

SEQ ID NO: 106688 - DNA, 516 bp, Glycine max
  CDS (1)..(516)
atgctggctcagctcgtggcagacgtgtgcccgtcgtcggcgtcgtttttcggcttcatgggcgtcgcctccgcgctcgttttcgccaacctgggcgccgcgtacggcacggccaagtcgggcgtgggcatcgcgtcaatgggcgtgatgcggccggagctggccatgcgcaacatcatccccgtggtcatggccggtgtgctgggcatctacgggctgatcgtgccggtgatcatccagggctcgatcgaccccccgaacggcaacgcgcccaagtacggctcgtacacgggcttcgcgcacctggcggcgggtctgtgctgtggcctgagcggcctggcggccggcatggccatcggcgtggtgggcgacgcgggcgtgcgcgccgtgggccagcaggagaagctgttcgtgaacatgatcctgatcctgattttcgcggaggctctgggtctgtacggcctgatcgtggcgctgatcctgtcgcagaagaagagcgactgcccgtcggagtaa

SEQ ID NO: 106689 - protein, 171 aa, Glycine max
MLAQLVADVCPSSASFFGFMGVASALVFANLGAAYGTAKSGVGIASMGVMRPELAMRNIIPVVMAGVLGIYGLIVPVIIQGSIDPPNGNAPKYGSYTGFAHLAAGLCCGLSGLAAGMAIGVVGDAGVRAVGQQEKLFVNMILILIFAEALGLYGLIVALILSQKKSDCPSE

SEQ ID NO: 106690 - DNA, 883 bp, Oryza sativa
  CDS (133)..(636)
gcgccccaccaccacctcttctctttccaccaccaacaccaaccccacgcgaccacccccaatcctcgatcaaacgccctaggatttcatcgcaagcaaggaaggaggagaccaaatccaatccaatcccccatggccggcgcgtcgaccttcagtggcgacgagacggcgcccttcttcggcttcctgggcgccgcggcggcgctcgtcttctcctgcatgggcgccgcctacggcacggccaagagcggcgtcggggtggcgtccatgggcgtcatgcgcccggagctcgtcatgaaatccatcgtgcccgtcgtcatggccggggtgctcgggatctacggcctcatcatcgccgtcatcatcagcaccgggatcaaccccaaggccaagccctacttcctcttcgacggctacgcgcacctctcctccggcctcgcgtgcggcctcgccggcctcgccgccgggatggccaacggcatcgtcggcgacgccggcgtcagggcaaatgctcaacagccaaaactgtttgtgggtatgatcctcatccttatctttgcggaagcgcttgcactctatggtctcattgttggtatcatcttgtcatctcgtgctggtcaatcccgagcggactaatttatcaggctataatgcctgtaacacttgtctgtcatgaatataatggcatgtcaatattcttttgctgtatctttgtggttacgtactgttgttcagactacgttttcttttgcttatttttgagatagtacaaccaacttataattttgactcaccccagagccatggctacatttgttgcatgggaacatggacttatatggtgctagacgatttggtgaataaacaacaaatttttgtactg

SEQ ID NO: 106691 - protein, 167 aa, Oryza sativa
MAGASTFSGDETAPFFGFLGAAAALVFSCMGAAYGTAKSGVGVASMGVMRPELVMKSIVPVVMAGVLGIYGLIIAVIISTGINPKAKPYFLFDGYAHLSSGLACGLAGLAAGMANGIVGDAGVRANAQQPKLFVGMILILIFAEALALYGLIVGIILSSRAGQSRAD

SEQ ID NO: 106692 - DNA, 886 bp, Sorghum bicolor
  CDS (212)..(709)
gccggccgggccggggcagcgccgtggccctctcgtcttcttccccacggccggcccggcgctccctcagatcagatcggcaaggccaatcccgagcagaggaccgaaacctcgagcgctcgcgccggcgaccacacgacgaagaggaggcagcggcacgagagcgccccagggttcccgctctcgtcgcagcagcaacagtaaggggaagatgtcgtcggcgttcagcggcgatgagactgcccccttcttcggcttccttggcgccgccgccgcgctcgtcttctcatgcatgggggcggcgtacgggacggccaagagtggcgtcggcgtggcgtccatgggtgtcatgcgccccgagctcgtcatgaagtccatcgtgcccgtggtcatggctggtgtgctcggtatctatggcctcatcatcgctgtcattatcagcactggaatcaaccccaaggccaagccgtactacctctttgacggctacgcccacctgtcgtctggccttgcctgtggtcttgctgggcttgctgcaggcatggccattggcatcgttggtgatgctggtgtcagggcgaatgctcagcagccaaagttgtttgtgggcatgatcctcatccttattttcgccgaagcgcttgccctctacggtctcattgtcggcatcatcctttcatcccgtgctggccaatcccgtgcagattaggcacacatttcagatgtcaacgccgtgcggactgttaccgttacctggtcgtagctgggtcatgttctatatccatgagacaagaagctggagcactttttagaggcttatttttttatgctgtctaggttcgttcttctgttgagtcgagaaacaagaaaacttgtgtagccaagg

SEQ ID NO: 106693 - protein, 165 aa, Sorghum bicolor
MSSAFSGDETAPFFGFLGAAAALVFSCMGAAYGTAKSGVGVASMGVMRPELVMKSIVPVVMAGVLGIYGLIIAVIISTGINPKAKPYYLFDGYAHLSSGLACGLAGLAAGMAIGIVGDAGVRANAQQPKLFVGMILILIFAEALALYGLIVGIILSSRAGQSRAD

SEQ ID NO: 106694 - DNA, 489 bp, Zea mays
  CDS (1)..(489)
atggccaccgaactttgccccgtctacgcgcccttctttggcgccatgggttgcacctgtgccatcgtcttcacctgtctgggtgcctcatacggtaccgccaagtctggtgttggtatcgctgctatgggtgtcctccgtcctgatctgatcgtcaagaacattgtacccgtcattatggctggtatcattggtatctacggtctggtcgtctccgtcctcatctccgatggtctgcgacaagaccttcctctctacactggtttcatccagttcggtgctggtctgtctgtcggtctcgctggtcttgctgctggatttgccattggtatcgttggtgatgccggtgtccgaggaactgctcaacaacctcgtcttttcgtcggaatgattctgattcttattttcgccgaagtcttgggtctttacggtcttatcgtcgctcttctgatgaactctaaggccacccaggacgctgtctgcgcataa

SEQ ID NO: 106695 - protein, 162 aa, Zea mays
MATELCPVYAPFFGAMGCTCAIVFTCLGASYGTAKSGVGIAAMGVLRPDLIVKNIVPVIMAGIIGIYGLVVSVLISDGLRQDLPLYTGFIQFGAGLSVGLAGLAAGFAIGIVGDAGVRGTAQQPRLFVGMILILIFAEVLGLYGLIVALLMNSKATQDAVCA

SEQ ID NO: 106696 - DNA, 873 bp, Glycine max
  CDS (93)..(587)
ggaagaaaaagtaaaacacagagagcaaccaccaatcgaagaagaaacaaccgtaacagatctccgtttctcgccaaacaaaaaacaaaaaaatggctgccttcagcggtgacgaaaccgctcctttctttggcttcctcggagccgccgctgccctcgttttttcctgtatgggcgcggcgtacggcaccgcgaagagcggcgtcggggttgcgtcgatgggcgtgatgaggccggagctggtgatgaaatcgatcgtgccggttgtgatggcgggtgtgttgggtatctacggtttgatcattgcggttatcataagtacgggaattaaccctaaggccaaatcgtactatctctttgacggttacgcgcacctctcttcgggtctcgcttgtggcctcgctggcctctccgctggcatggccatcggcatcgttggcgatgccggtgttagagcaaatgctcagcagcctaaactttttgttggaatgattctcatcctcatttttgctgaggcattggcattatatggtctcatcgttggcatcatcctctcttcccgtgctggccaatccagggctgactaataaactttccagttggatgtggtacacagccacagattgtgaatgttactgtggagtccgggtgggtaatgttagtacacagactgctgctttggcttgctcatgtgattctatttatgtccgcattataaaattgaggctatccaggaagagagtcagtcgaactttccttagccattcattatttttagttatatgctcaaatccaaactagaatagagatatgcacaataagactgatgtatgttttgattccatttactttcaatattgttttctactcttc

SEQ ID NO: 106697 - protein, 164 aa, Glycine max
MAAFSGDETAPFFGFLGAAAALVFSCMGAAYGTAKSGVGVASMGVMRPELVMKSIVPVVMAGVLGIYGLIIAVIISTGINPKAKSYYLFDGYAHLSSGLACGLAGLSAGMAIGIVGDAGVRANAQQPKLFVGMILILIFAEALALYGLIVGIILSSRAGQSRAD

SEQ ID NO: 106698 - DNA, 471 bp, Apis mellifera
  CDS (1)..(471)
atgtccgacgaagatcatcctatttatgcgcccttctttggagtaatgggcgctgcctcagccattatattttctgctttaggagcagcatacggcacagcaaagtcaggtacaggaattgcagccatgtctgttatgaggccagaacttatcatgaaatcaattattcctgttgttatggctggtatcattgccatttatggtcttgtagtagctgttctaattgctggtggtctagaagaacctaaaggatatactttattcaagggttttgtacatctgggtgctggtttagccgtaggtttttctggtttagctgctggatttgctattggtattgttggtgatgcaggtgtaagaggtaccgcacaacaacctcgcctgtttgtcggtatgatcttgattctaatcttcgcagaagtattgggtctctatggtctcatcgttgccatctacttgtacaccaagtaa

SEQ ID NO: 106699 - protein, 156 aa, Apis mellifera
MSDEDHPIYAPFFGVMGAASAIIFSALGAAYGTAKSGTGIAAMSVMRPELIMKSIIPVVMAGIIAIYGLVVAVLIAGGLEEPKGYTLFKGFVHLGAGLAVGFSGLAAGFAIGIVGDAGVRGTAQQPRLFVGMILILIFAEVLGLYGLIVAIYLYTK

SEQ ID NO: 106700 - DNA, 618 bp, Bombyx mori; identical to SEQ ID NO: 45807
  CDS (1)..(618)

SEQ ID NO: 106701 - protein, 205 aa, Bombyx mori; identical to SEQ ID NO: 45808

SEQ ID NO: 106702 - DNA, 498 bp, Oryza sativa (japonica cultivar-group)
  CDS (1)..(498)
atgtcgtcggtgttcagcggcgatgagaccgcccccttcttcggcttcctcggcgccgcctccgccctcgtcttctcatgcatgggggcggcgtacgggacggcgaagagcggcgtcggggtggcgtcgatgggggtgatgcgcccggagctcgtgatgaagtccatcgtgcccgtggtcatggctggtgtgctgggtatctacggcctcatcatcgcagtcatcatcagcacggggatcaaccccaaggccaagccctactacctcttcgacggctacgcgcacctctcatctggcctcgcctgtggtctcgccggtctcgctgccggaatggccattggcatcgttggtgacgccggagtcagggcgaacgcccagcaaccaaagctgttcgtgggtatgatcctcatcctcatttttgccgaagcgcttgctctctatgggctcatcgtcggcatcatcctgtcatcccgcgctggccaatctcgtgcggattag

SEQ ID NO: 106703 - protein, 165 aa, Oryza sativa (japonica cultivar-group)
MSSVFSGDETAPFFGFLGAASALVFSCMGAAYGTAKSGVGVASMGVMRPELVMKSIVPVVMAGVLGIYGLIIAVIISTGINPKAKPYYLFDGYAHLSSGLACGLAGLAAGMAIGIVGDAGVRANAQQPKLFVGMILILIFAEALALYGLIVGIILSSRAGQSRAD

SEQ ID NO: 106704 - DNA, 468 bp, Bombyx mori
  CDS (1)..(468)
atggctgaaaataatccaatctacggacccttctttggagttatgggggcggcgtctgctatcatcttcagcgccttgggagctgcctatggaactgccaagtcaggaactggtattgccgccatgtcggtgatgaggcctgagctgatcatgaagtcgatcattcctgtcgtcatggcgggtattattgccatctacggtctggtcgtggctgtcctgattgctggtgccctccaggagccagccaactaccccctttacaaagggttcatccacttgggtgctggtttggctgtaggattctctggtctggctgccggtttcgccataggcatcgtgggagatgcaggcgtgcgtggtactgctcagcagcctaggttattcgtcggaatgattcttattcttattttcgctgaagtattgggtctttacggacttatcgtcgccatctacctgtacacaaaataa

SEQ ID NO: 106705 - protein, 155 aa, Bombyx mori
MAENNPIYGPFFGVMGAASAIIFSALGAAYGTAKSGTGIAAMSVMRPELIMKSIIPVVMAGIIAIYGLVVAVLIAGALQEPANYPLYKGFIHLGAGLAVGFSGLAAGFAIGIVGDAGVRGTAQQPRLFVGMILILIFAEVLGLYGLIVAIYLYTK

SEQ ID NO: 106706 - DNA, 477 bp, Pyrococcus abyssi GE5
  CDS (1)..(477): transl_table=11
gtgaatgttatggagccgatagtttacgttgcccttggaatggctctcggagctggactagctggagccgcctcatcgtttggtgtcggtatagctggagctgctgccgctggagccgttgccgaggatgagaagaacttcagaaatgcactaatcctccagggtctaccaatgacccagagtatctacggtctaattacgctcttcctgataggaatgaccgcagggataataggtggaggtggctttaagttctcaaatgaccttatcagtagtgcaatactctttggagcaggactacttgtaggtttgactggcctctccgcaatcccccagggaatcatagccagctctggaattggtgcggtaagtaagaatccaagaacattcacgcagaacttgatatttgctgctatggctgagacgatggctatcttcggtttggtaggtgctataatcctaataatgagcctctga

SEQ ID NO: 106707 - protein, 158 aa, Pyrococcus abyssi GE5
MNVMEPIVYVALGMALGAGLAGAASSFGVGIAGAAAAGAVAEDEKNFRNALILQGLPMTQSIYGLITLFLIGMTAGIIGGGGFKFSNDLISSAILFGAGLLVGLTGLSAIPQGIIASSGIGAVSKNPRTFTQNLIFAAMAETMAIFGLVGAIILIMSL

SEQ ID NO: 106708 - DNA, 489 bp, Pyrococcus horikoshii OT3
  CDS (1)..(489): transl_table=11
gtgaagattatggatccgatagtttacgtatcccttggaatggccctgggagcaggtttagctggagcagcatcttcctttggtgtcggtatagcaggtgctgctgcagcaggtgctgtagctgaggatgaaaggaacttcagaaatgctctaatacttgaaggtcttccaatgacccagagtatctatggattaataacgctcttcctgattggaatggccgctgggataattggtggaggaggtttcaaatttgctgaaccaactaccgagaatataattaagagtgcaatcctctttggcgctgggctactcgttggccttactggattttcagcaattccccagggaattattgcaggttcaggtataggggccgttagtaagaatcccaggacgtttactcagaacttaatattcgctgcaatggccgagactatggcaatctttggtctcgtaggtgcaataattctaataatgagcctctga

SEQ ID NO: 106709 - protein, 162 aa, Pyrococcus horikoshii OT3
MKIMDPIVYVSLGMALGAGLAGAASSFGVGIAGAAAAGAVAEDERNFRNALILEGLPMTQSIYGLITLFLIGMAAGIIGGGGFKFAEPTTENIIKSAILFGAGLLVGLTGFSAIPQGIIAGSGIGAVSKNPRTFTQNLIFAAMAETMAIFGLVGAIILIMSL

SEQ ID NO: 106710 - DNA, 582 bp, Drosophila melanogaster
  CDS (1)..(582)
atggaaatggattactatctgccagtgtataacggatcaaattcggtggacgtgccggggctgattgaaagtctcaagctgaaggaaaccagtatatcgccaatcgtgctggatcgctatccgccgtactccccgttctatggcgtgatgggcgtcgtattctccagtgtgctgacctccgctggagcggcctacggaactgctgtttccggaactggaatcgccgccacagcggtgatgcgtcccgagctggtgatgaagtccatcattccggtggtcatggcgggcatcattgccatatacggtctggtggtatccgtgctcctatctggggaactagcgcctgctcccaaatactcgctgcccaccggctatgtacacctggccgctggactttcggtgggatttgctggactggctgccggatatgcagtgggtgaagtcggcgaagtgggcgtgcggcacattgccctgcagccacgcctctttatcggcatgatcctgatccttattttcgccgaggtgctcggtctctacggcctgatcattgggatttatttgtacacggtcaacattaagtag

SEQ ID NO: 106711 - protein, 193 aa, Drosophila melanogaster
MEMDYYLPVYNGSNSVDVPGLIESLKLKETSISPIVLDRYPPYSPFYGVMGVVFSSVLTSAGAAYGTAVSGTGIAATAVMRPELVMKSIIPVVMAGIIAIYGLVVSVLLSGELAPAPKYSLPTGYVHLAAGLSVGFAGLAAGYAVGEVGEVGVRHIALQPRLFIGMILILIFAEVLGLYGLIIGIYLYTVNIK

SEQ ID NO: 106712 - DNA, 468 bp, Drosophila melanogaster
  CDS (1)..(468)
atggagctctcgttggatgaaccgcaatgcgcatccttcttttgcatcctgggtgccgtgtgcgccattgtcttttcgacattgggagccgcctacggaacagcgaaggcttctgtgggaatctcttcgatgtcaatcaagcatccgcagctgatcatgaaggcgattgttccagtggttatggctggcattatagccatttatggactggtgatcgcggtcctgcttgctggatcacttagcagcccctatagcgcctacaagggtttcctaaacctcagtgctggactggcggtgggagtctctgggatgggggctggaattgctattggcgtggtgggcgaagctggagtccgtgcatctgcccagcagccaaaactctttgtggccatcattttaatattgatatttgccgaggtcttgggtctgtatggtctcatagtggccatttatttgttttccaagtag

SEQ ID NO: 106713 - protein, 155 aa, Drosophila melanogaster
MELSLDEPQCASFFCILGAVCAIVFSTLGAAYGTAKASVGISSMSIKHPQLIMKAIVPVVMAGIIAIYGLVIAVLLAGSLSSPYSAYKGFLNLSAGLAVGVSGMGAGIAIGVVGEAGVRASAQQPKLFVAIILILIFAEVLGLYGLIVAIYLFSK

SEQ ID NO: 106714 - DNA, 606 bp, Drosophila melanogaster; identical to SEQ ID NO: 45813
  CDS (1)..(606)

SEQ ID NO: 106715 - protein, 201 aa, Drosophila melanogaster; identical to SEQ ID NO: 45814

SEQ ID NO: 106716 - DNA, 639 bp, Drosophila melanogaster; identical to SEQ ID NO: 45815
  CDS (1)..(639)

SEQ ID NO: 106717 - protein, 212 aa, Drosophila melanogaster; identical to SEQ ID NO: 45816

SEQ ID NO: 106718 - DNA, 477 bp, Drosophila melanogaster
  CDS (1)..(477)
atggcaacagatgcagctgacaaggataagccggcgtactcgttcttctttggttcgatgggagcggcatcggccatcatcttttcagccttgggagcggcatatggaacggccaagtcgggcactgggattgcagccatggccgtaatgcgacccgaattgatcatgaaatcgattattcccgttgtgatggctggtatcattgcgatctatggcctggtggtctccgttctgattgccggatctctgtcggattcgtataccattcgcaagggatacatccacctggcagccggattatcggtgggtttcgccggattggcggctggatttgccattgggattgtgggtgatgccggagtgcggggcactgcccagcagccacgcctttttgtgggcatgatcctgatcctgatcttcgccgaggtactgggtctgtatgggctgatcgtcgccatttacctgtacaccaagtaa

SEQ ID NO: 106719 - protein, 158 aa, Drosophila melanogaster
MATDAADKDKPAYSFFFGSMGAASAIIFSALGAAYGTAKSGTGIAAMAVMRPELIMKSIIPVVMAGIIAIYGLVVSVLIAGSLSDSYTIRKGYIHLAAGLSVGFAGLAAGFAIGIVGDAGVRGTAQQPRLFVGMILILIFAEVLGLYGLIVAIYLYTK

SEQ ID NO: 106720 - DNA, 477 bp, Drosophila melanogaster
  CDS (1)..(477)
atggttactgccgctttaaatgaagagccatcatacgccttcttcttgggatgcacgggggctgcagttgcgattatattcacgaccttgggagcgtcttacggaacagcagtttccggtgtcggaatcgccaagatggcggtcaatcgaccggatatgatcatgaaggccatcattccggtcgtaatggcgggaattattgcgatctacggattggtggtatccgtcctgatagccggatcgattggcgatgattatacgatggaagacagttatgtgcatctgggcgccggattgtccgtcggacttccaggactcaccgcaggagtagccattggaatcgcaggcgatgctggagtccggggtaccgccgaacagccacgccttttcgtgggcatggtcctgatcctgatcttcgccgaggtcctggctctatacggcctcattgtggccatctatttgtacactaagctttag

SEQ ID NO: 106721 - protein, 158 aa, Drosophila melanogaster
MVTAALNEEPSYAFFLGCTGAAVAIIFTTLGASYGTAVSGVGIAKMAVNRPDMIMKAIIPVVMAGIIAIYGLVVSVLIAGSIGDDYTMEDSYVHLGAGLSVGLPGLTAGVAIGIAGDAGVRGTAEQPRLFVGMVLILIFAEVLALYGLIVAIYLYTKL

SEQ ID NO: 106722 - DNA, 468 bp, Strongylocentrotus purpuratus; identical to SEQ ID NO: 45817
  CDS (1)..(468)

SEQ ID NO: 106723 - protein, 155 aa, Strongylocentrotus purpuratus; identical to SEQ ID NO: 45818

SEQ ID NO: 106724 - DNA, 630 bp, Strongylocentrotus purpuratus; identical to SEQ ID NO: 45819
  CDS (1)..(630)

SEQ ID NO: 106725 - protein, 209 aa, Strongylocentrotus purpuratus; identical to SEQ ID NO: 45820

SEQ ID NO: 106726 - DNA, 489 bp, Nasonia vitripennis
  CDS (1)..(489)
atgagcgacggtcattggcctgagggcaacacgatctacggaccgttcttcggcgtcatgggtgccgcatcggccatcatcttctccgccctgggggcggcgtatggtactgccaagtcaggtaccggaattgcagctatgtctgtaatgaggcctgagctcatcatgaaatccatcattcctgttgttatggcgggtatcattgccatttacggtctagtcgtggccgtacttatcgctggatctcttgaagaacccatgaaatactccctttacaagggattcatccacctgggtgctggtttagctgtcgggttctccggtcttgcagctggtttcgccatcggaatcgttggtgacgccggtgtcaggggtacagctcagcagccacgtctgttcgttggtatgatcctgattctcatcttcgccgaggtattgggtctctacggtctcatcgtcgccatctacctgtacactaagcaaaattga

SEQ ID NO: 106727 - protein, 162 aa, Nasonia vitripennis
MSDGHWPEGNTIYGPFFGVMGAASAIIFSALGAAYGTAKSGTGIAAMSVMRPELIMKSIIPVVMAGIIAIYGLVVAVLIAGSLEEPMKYSLYKGFIHLGAGLAVGFSGLAAGFAIGIVGDAGVRGTAQQPRLFVGMILILIFAEVLGLYGLIVAIYLYTKQN

SEQ ID NO: 106728 - DNA, 636 bp, Nasonia vitripennis; identical to SEQ ID NO: 45823
  CDS (1)..(636)

SEQ ID NO: 106729 - protein, 211 aa, Nasonia vitripennis; identical to SEQ ID NO: 45824

SEQ ID NO: 106730 - DNA, 489 bp, Magnaporthe grisea 70-15; identical to SEQ ID NO: 45825
  CDS (1)..(489)

SEQ ID NO: 106731 - protein, 162 aa, Magnaporthe grisea 70-15; identical to SEQ ID NO: 45826

SEQ ID NO: 106732 - DNA, 507 bp, Magnaporthe grisea 70-15
  CDS (1)..(507)
atgccaggagtagtaccggatgactcggagctcgcgcccaagtttgcgccctttgtcggcatggccggcattgcggctgcaatgattttcggatgtgctggcgcagcattcggaaccgccaagtcgggcatcggtatcgcgggagttggaacctttaggccagacctcatcatgaagtgcttgattcctgtcatcatgtctggaatcatcgctgtctacgccctcgtcgtcgccgtcttgatcgcccaggatctcaacgctccgactgcaggcacgagttacgacctttttagaggcatcatgcacctcgcttgcggcctgtccgtcggtcttactggtcttgctgccggttactgcatcggcattgttggtgataagggtgtcagggcttacatggagcagtcaagaatctttgttggcatggtgctgattctgattttcggcgaggttttgggtctttatgggcttattgttgcgctcattctcaacaccaggagccaggaataa

SEQ ID NO: 106733 - protein, 168 aa, Magnaporthe grisea 70-15
MPGVVPDDSELAPKFAPFVGMAGIAAAMIFGCAGAAFGTAKSGIGIAGVGTFRPDLIMKCLIPVIMSGIIAVYALVVAVLIAQDLNAPTAGTSYDLFRGIMHLACGLSVGLTGLAAGYCIGIVGDKGVRAYMEQSRIFVGMVLILIFGEVLGLYGLIVALILNTRSQE

SEQ ID NO: 106734 - DNA, 606 bp, Magnaporthe grisea 70-15; identical to SEQ ID NO: 45827
  CDS (1)..(606)

SEQ ID NO: 106735 - protein, 201 aa, Magnaporthe grisea 70-15; identical to SEQ ID NO: 45828

SEQ ID NO: 106736 - DNA, 501 bp, Gibberella zeae PH-1
  CDS (1)..(501)
atgcatacgccgcaaaatcaggcagcacaccaaagaagagtcttatttgagaagtgcaaaatacgcagaactcgccccaaagtttgcacccttccttggtatggtataggcgctgcatataggacggccaagtctggtatcagtattattggtgtcagtacctttcaaccagatatcgtactacgatgcatcatcccagtcattatgtctcgaataattgccgtatactcacttgtcattgccgttcttatcgccgatgatctcgatccttccaaaacctacactttgttctcgggagttttacatctcgcaagtggtctgacggtcggtcttactggtattgctgctggttattgtattggaattgtcggtgatgctggagttcgagcttttatggaacaaccgaaagtatatacgggtatggtcctcattctcatttttgccgaggtccttggtctctatgggctgattgtcgctattctgcttaatcaaaaaaagtag

SEQ ID NO: 106737 - protein, 166 aa, Gibberella zeae PH-1
MHTPQNQAAHQRRVLFEKCKIRRTRPKVCTLPWYGIGAAYRTAKSGISIIGVSTFQPDIVLRCIIPVIMSRIIAVYSLVIAVLIADDLDPSKTYTLFSGVLHLASGLTVGLTGIAAGYCIGIVGDAGVRAFMEQPKVYTGMVLILIFAEVLGLYGLIVAILLNQKK

SEQ ID NO: 106738 - DNA, 606 bp, Gibberella zeae PH-1; identical to SEQ ID NO: 45829
  CDS (1)..(606)

SEQ ID NO: 106739 - protein, 201 aa, Gibberella zeae PH-1; identical to SEQ ID NO: 45830

SEQ ID NO: 106740 - DNA, 510 bp, Gibberella zeae PH-1
  CDS (1)..(510)
atggatgctgagcttatcgcaagtatggaccgttgtcccatgtatgcttccttctttggagctataggctgcgcatgttccatcgtcttcaccaccttcggggcatcctacggcaccgcaaagtccgcaggtgccatctttcagtccggcattcttcgcccagacatgttgatgcagaacacgctatgcgccatcatggcccagatcctgtccatatacggactcgtcgcaagcgtcattatgtctaacaacatcaaagaaaagatgcctattcacacagctttcttgcagctgggagctggtatctctgtcggactttgtggcatggccgctggttttgctattggtatcgttggtgatgctggagtccgtgccagctcgcagcagccacgtctctacatcggcatggttctcatcctcatctttgcagaagttctcggcctatacggtgtcatcgtctctatcctcatgctcacccgttctacagaggctgcagagtgccggtactag

SEQ ID NO: 106741 - protein, 169 aa, Gibberella zeae PH-1
MDAELIASMDRCPMYASFFGAIGCACSIVFTTFGASYGTAKSAGAIFQSGILRPDMLMQNTLCAIMAQILSIYGLVASVIMSNNIKEKMPIHTAFLQLGAGISVGLCGMAAGFAIGIVGDAGVRASSQQPRLYIGMVLILIFAEVLGLYGVIVSILMLTRSTEAAECRY

SEQ ID NO: 106742 - DNA, 483 bp, Gibberella zeae PH-1
  CDS (1)..(483)
atggcagaatcagagctcgcccccaagtttgccccctttattgggatggccggaattgcagctgcaatgatcttcggatgtattggagctgcctacggcacagcgaagtccggcattggcattgctggtgtcggtacctttcgaccagatctcatcatgaagtgtctgattccagtcgtcatgtccggtatcatcgccgtctactcgctagtcatctccgtcctaatcgctgaggatctcgacccttccaagaactacagcttgttttcgggctttatgcatctcggatgcggtattgcagtcggcatgactggtcttgccgctggttactgtatcggaatcgttggcgacaccggtgttcgtgcttatatggaacagtcccggattttcgtcggcatggtcctgattctcattttcggcgaagttctcggtctctacggcctcattgttgccctgattcttaacaccaagagcaagggttaa

SEQ ID NO: 106743 - protein, 160 aa, Gibberella zeae PH-1
MAESELAPKFAPFIGMAGIAAAMIFGCIGAAYGTAKSGIGIAGVGTFRPDLIMKCLIPVVMSGIIAVYSLVISVLIAEDLDPSKNYSLFSGFMHLGCGIAVGMTGLAAGYCIGIVGDTGVRAYMEQSRIFVGMVLILIFGEVLGLYGLIVALILNTKSKG

SEQ ID NO: 106744 - DNA, 486 bp, Gibberella zeae PH-1; identical to SEQ ID NO: 45831
  CDS (1)..(486)

SEQ ID NO: 106745 - protein, 161 aa, Gibberella zeae PH-1; identical to SEQ ID NO: 45832

SEQ ID NO: 106746 - DNA, 624 bp, Apis mellifera; identical to SEQ ID NO: 45833
  CDS (1)..(624)

SEQ ID NO: 106747 - protein, 207 aa, Apis mellifera; identical to SEQ ID NO: 45834

SEQ ID NO: 106748 - DNA, 483 bp, Candida glabrata CBS 138; identical to SEQ ID NO: 45835
  CDS (1)..(483)

SEQ ID NO: 106749 - protein, 160 aa, Candida glabrata CBS 138; identical to SEQ ID NO: 45836

SEQ ID NO: 106750 - DNA, 483 bp, Kluyveromyces lactis NRRL Y-1140; identical to SEQ ID NO: 45841
  CDS (1)..(483)

SEQ ID NO: 106751 - protein, 160 aa, Kluyveromyces lactis NRRL Y-1140; identical to SEQ ID NO: 45842

SEQ ID NO: 106752 - DNA, 537 bp, Debaryomyces hansenii CBS767; identical to SEQ ID NO: 45843
  CDS (1)..(537)

SEQ ID NO: 106753 - protein, 178 aa, Debaryomyces hansenii CBS767; identical to SEQ ID NO: 45844

SEQ ID NO: 106754 - DNA, 483 bp, Debaryomyces hansenii CBS767
  CDS (1)..(483)
atgtctgatttatgtcctgtttacgctcctttctttggatccatgggttgtgctgcagccattgtgttcacctgttttggtgcctcttacggtactgctaagtcaggagttggtatttgtgccacctgtgtgttgagaccagatttattggttaaaaacattgttccagttattatggcgggtattattgccatttatgggttggttgtgtcagtgttagttaccgactcattgaagcaaaaacaagccttatacaccggtttcattcaattaggagctggtttgtcagtcggattatctggattggcagctggtttcgccattggaattgttggtgatgccggtgtcagaggtactgcgcaacaaccaagattattcgttggtatgattttaattttgattttcgccgaagtcttaggtttatacggtttgattgtcgctttattgttgaactctagagctactcaagatgtcacttgttaa

SEQ ID NO: 106755 - protein, 160 aa, Debaryomyces hansenii CBS767
MSDLCPVYAPFFGSMGCAAAIVFTCFGASYGTAKSGVGICATCVLRPDLLVKNIVPVIMAGIIAIYGLVVSVLVTDSLKQKQALYTGFIQLGAGLSVGLSGLAAGFAIGIVGDAGVRGTAQQPRLFVGMILILIFAEVLGLYGLIVALLLNSRATQDVTC

SEQ ID NO: 106756 - DNA, 417 bp, Yarrowia lipolytica CLIB122
  CDS (1)..(417)
atggtgctgtcctctgccggagccgctattggaaccgccaagtccggtatcggtattgccggtatcggtgtgttcaagcctgaattgatcatgaagtctctcattcccgtcgtcatgagtggtattctgtccgtttacggcctcgtggtgtctgtactgattgccggctcgctgtcccccacagaaaactactcgttgttcaacggcttcatgcatctggcctgtggtctctcggtaggcttcgctgccctggcctcgggttacgccattggtattgtcggtgacgagggtgtgcgaaacttcatgctgcagccccgtctgtttgtcggcattgtgctgattctcattttcgctgaagtgttgggtctctacggtatgattatcgccctgattctcaacaccaagggctctggttag

SEQ ID NO: 106757 - protein, 138 aa, Yarrowia lipolytica CLIB122
MVLSSAGAAIGTAKSGIGIAGIGVFKPELIMKSLIPVVMSGILSVYGLVVSVLIAGSLSPTENYSLFNGFMHLACGLSVGFAALASGYAIGIVGDEGVRNFMLQPRLFVGIVLILIFAEVLGLYGMIIALILNTKGSG

SEQ ID NO: 106758 - DNA, 495 bp, Yarrowia lipolytica CLIB122
  CDS (1)..(495)
atggctctgactgctactgaattctgccccgtctatgctcccttctttggagccatcggctgcactgccgccattgtcttcacctgtttcggcgcttcttacggaaccgccaagtctggtgttggtatttgcgctacctccgtccttcgacctgacctgctcatcaagaacacagtccccgtgattatggctggtattcttgccatttacggtctcgttgtttccgtccttatctccggatctctccagcagcaatcttctctgtacgccggtttcatccagctcggtgctggtctgtccgtcggtctgtccggtctcgctgccggcttcgctattggcattgttggtgacgctggtgtccgaggtaccgcacagcagcctcgacttttcgttggtatgattcttattctcattttcgccgaagtcctgggtctctatggtcttattgttgctcttctgctcaactccaaggccggtgctgacgtgcagtgctaa

SEQ ID NO: 106759 - protein, 164 aa, Yarrowia lipolytica CLIB122
MALTATEFCPVYAPFFGAIGCTAAIVFTCFGASYGTAKSGVGICATSVLRPDLLIKNTVPVIMAGILAIYGLVVSVLISGSLQQQSSLYAGFIQLGAGLSVGLSGLAAGFAIGIVGDAGVRGTAQQPRLFVGMILILIFAEVLGLYGLIVALLLNSKAGADVQC

SEQ ID NO: 106760 - DNA, 486 bp, Aspergillus nidulans FGSC A4
  CDS (1)..(486)
atggacttgatagctgataatcttcttcagccattctttggctcccttggctgcacttcagccattgttttcacttgctttggagctgcttatggaaccgctaaagcgggtgtcggtgtctgctccatgggtgtcctccgccccgacctgattgttaaaaacatcgttcctgtcgtcatggctggtattatcggtatctacgggctggtcgtgtccgtccttatcgcaaacaacctcggccagaaggttcccctctacacagcgcttgtccagctgggagctggtcttgcggtcggtcttgctggtttggctgctggtttcgccattggtattgtcggagacgccggtgtccgcggaacggctcaacagccaagactctacgtcggaatgattcttattctcattttcgctgaagttctgggtctttacggtctcatcgttgcccttctcatgaactcccgtgccaccctcgaggccagctgctag

SEQ ID NO: 106761 - protein, 161 aa, Aspergillus nidulans FGSC A4
MDLIADNLLQPFFGSLGCTSAIVFTCFGAAYGTAKAGVGVCSMGVLRPDLIVKNIVPVVMAGIIGIYGLVVSVLIANNLGQKVPLYTALVQLGAGLAVGLAGLAAGFAIGIVGDAGVRGTAQQPRLYVGMILILIFAEVLGLYGLIVALLMNSRATLEASC

SEQ ID NO: 106762 - DNA, 603 bp, Aspergillus nidulans FGSC A4; identical to SEQ ID NO: 45847
  CDS (1)..(603)

SEQ ID NO: 106763 - protein, 200 aa, Aspergillus nidulans FGSC A4; identical to SEQ ID NO: 45848

SEQ ID NO: 106764 - DNA, 492 bp, Candida albicans SC5314
  CDS (1)..(492): transl_table=12
atgtcagaaacattgggagacgaatattacccatcatttgctccatttttagggtttgctggctgtgctgctgctatgatattatcctgtgcaggagctgctataggtacagcaaaatcaggtattggtattgctggtatcggtactttcaaaccagaattgatcatgaaatcattgattcccgtagttatgtcgggtattttatcggtgtatggattggttgtttcagtgttgattgccggtggattatcgccgcaagaaaattactcattatttaatgggtgcatgcatttagcctgtggattggccgtggggtttgcttgtcttgcctcaggctatgctattgggattgttggtgacgaaggggtgagacaatttatgcaccaaccccgtttatttgttgggattgtgttaatattgatttttgctgaagttttgggattatatgggatgattattgccttgattttgaatactaagggaagtggttaa

SEQ ID NO: 106765 - protein, 163 aa, Candida albicans SC5314
MSETLGDEYYPSFAPFLGFAGCAAAMILSCAGAAIGTAKSGIGIAGIGTFKPELIMKSLIPVVMSGILSVYGLVVSVLIAGGLSPQENYSLFNGCMHLACGLAVGFACLASGYAIGIVGDEGVRQFMHQPRLFVGIVLILIFAEVLGLYGMIIALILNTKGSG

SEQ ID NO: 106766 - DNA, 591 bp, Candida albicans SC5314
  CDS (1)..(591): transl_table=12
atgtctgttccatcaatattagcaacaacagcattattaactgttggaggatatatgttattcactggagcaggagaatcattcaatattggagaatttttagaatcaacatcaccttatatgtgggcatcattaggaattggatcatgtattggattctctgttgttggagccgcatgggggattttcattacggggacatcaattttaggtgctggtgtaaaagcaccaagaattactactaaaaatttaatttcaattattttttgtgaagttgtagctatttatggattgattatggccattgttttttctgctaaattaactagtgtaccatcgaaaagtttatatactaaagaaaatttatatacgggttattcattattttgggctggattaactgttggaatatcgaatttgatttgtggtattgctgttggaattacggggtctactgctgctattagtgatgctgctgattcttcactttttgtgaaaatattggtggtggagatttttggatctgttttagggttatttggattgattgttggattattaatgactggtaaagctcaagaatttagttaa

SEQ ID NO: 106767 - protein, 196 aa, Candida albicans SC5314
MSVPSILATTALLTVGGYMLFTGAGESFNIGEFLESTSPYMWASLGIGSCIGFSVVGAAWGIFITGTSILGAGVKAPRITTKNLISIIFCEVVAIYGLIMAIVFSAKLTSVPSKSLYTKENLYTGYSLFWAGLTVGISNLICGIAVGITGSTAAISDAADSSLFVKILVVEIFGSVLGLFGLIVGLLMTGKAQEFS

SEQ ID NO: 106768 - DNA, 591 bp, Candida albicans SC5314; identical to SEQ ID NO: 45849
  CDS (1)..(591): transl_table=12

SEQ ID NO: 106769 - protein, 196 aa, Candida albicans SC5314; identical to SEQ ID NO: 45850

SEQ ID NO: 106770 - DNA, 513 bp, Ustilago maydis 521
  CDS (1)..(513)
atggatccatccaagatcaacacggagctctgccccgtctacgcccccttcttcggcgctatgggatgcactgctgctatcgtcttcacttgtctcggtgcctcgtacggtacttccaagtccggtgtcggtatctcggccatgggtgttcttcgacctgatcttctgatcaagtgtgttattcccgtcatcatggctggtatcattgccatttacggtcttgtggtcagcgtgctcatctcgggcgacatcaagacacccatgtcgctctacgctggtttcatccagctcggcgctggtctttcggtcggtctcgctggtcttgccgctggtttcgccatcggcatcgtcggtgacgccggtgtgcgcggtaccgctcagcaaccccgactcttcattggtatgatcttgatcctgattttcgccgaagtgctgggtctctatggtctcattgttgcacttatcctcaacactcgttcgcaagacgaccctcttggatgcttgctcaagtaa

SEQ ID NO: 106771 - protein, 170 aa, Ustilago maydis 521
MDPSKINTELCPVYAPFFGAMGCTAAIVFTCLGASYGTSKSGVGISAMGVLRPDLLIKCVIPVIMAGIIAIYGLVVSVLISGDIKTPMSLYAGFIQLGAGLSVGLAGLAAGFAIGIVGDAGVRGTAQQPRLFIGMILILIFAEVLGLYGLIVALILNTRSQDDPLGCLLK

SEQ ID NO: 106772 - DNA, 504 bp, Cryptococcus neoformans var. neoformans B-3501A
  CDS (1)..(504)
atgtccaccgtcgcagagctttgtccagtctacgcacccttcttcggcgccatgggctgcacctccgccatcgtattcacctgtatcggcgcagcctacggcaccgccaagtctggcgtcggaatctccgccatggccgtcctccggccagacctcatgatgaagtgtgccatccctgtcgttatggctggtatcatcggtatctacggtctcgtcgtctctgtcctcatttccggtaacctcgcctcccccatgcccctctacaccggctttatccaactcggcgccggtctctctgtcggtctcgccggtctcgccgccggctttgccatcggtatcgtcggtgatgccggtgtcaggggtacggcccagcagcctaggttgtttgtcgggatgatccttatcctcattttcgccgaagttcttggtctttacgggctcatcgtcgcgctcatcttgaacaccaactctgctgttgactatacctgttctatcgcagcttaa

SEQ ID NO: 106773 - protein, 167 aa, Cryptococcus neoformans var. neoformans B-3501A
MSTVAELCPVYAPFFGAMGCTSAIVFTCIGAAYGTAKSGVGISAMAVLRPDLMMKCAIPVVMAGIIGIYGLVVSVLISGNLASPMPLYTGFIQLGAGLSVGLAGLAAGFAIGIVGDAGVRGTAQQPRLFVGMILILIFAEVLGLYGLIVALILNTNSAVDYTCSIAA

SEQ ID NO: 106774 - DNA, 762 bp, Cryptococcus neoformans var. neoformans B-3501A; identical to SEQ ID NO: 45851
  CDS (1)..(762)

SEQ ID NO: 106775 - protein, 253 aa, Cryptococcus neoformans var. neoformans B-3501A; identical to SEQ ID NO: 45852

SEQ ID NO: 106776 - DNA, 498 bp, Cryptococcus neoformans var. neoformans B-3501A
  CDS (1)..(498)
atgccccccatgggctccattcttcggctcacagacaacagcttcgcaggcgtcacaagcgcaatagtgttttctacagttggagcagcttacgggacttctaaagctggcatagggatcgcgggcttgggtacttttaggcccgaccttatcatgaagtctttaattcctgtcgttatgtccggtattatcgcggtatatggtctcgttgtgtcagtactcattgccggtaacatctcgccttccgagccttactctttgttcgcggggttcgtccatcttgctgctggattggcttgtggtttcactgggctagcggcagggtacgctatagggattgtcggggatgcttgtgtgcgcgcatacctttatgagtcaaaggtgtttgtttcaatggttcttatacttatctttgccgaagttatcggtctttatggtcttattgtagctttgatcctcaacacagcggtcggagaagcggtctgtggtgctaactga

SEQ ID NO: 106777 - protein, 165 aa, Cryptococcus neoformans var. neoformans B-3501A
MPPMGSILRLTDNSFAGVTSAIVFSTVGAAYGTSKAGIGIAGLGTFRPDLIMKSLIPVVMSGIIAVYGLVVSVLIAGNISPSEPYSLFAGFVHLAAGLACGFTGLAAGYAIGIVGDACVRAYLYESKVFVSMVLILIFAEVIGLYGLIVALILNTAVGEAVCGAN

SEQ ID NO: 106778 - DNA, 480 bp, Tribolium castaneum
  CDS (1)..(480)
atgtcaggcatcagtgaagagaatcccgtctacggcccctttttcggcgtcatgggagcggcagccgcgattattttcagttcactgggagcagcctatggcacagcaaaatcaggcaccggaatagcagcgatgtctgtgatgaggccagaacttattatgaaatctattatccccgttgtcatggcgggtattattgccatttatggtctagttattgctgttcttatcgctggaggtatcgactctgccgccaataactactcgttgtacaaaggtttcgtgcatttgggtgccggactttcggtgggtttctccggtttggcggccggtttcgccattggcattgtgggcgacgccggtgtgagaggaacggcgcaacaacctcgtctcttcgtcggaatgatcctcatcctcattttcgctgaagtcttgggtctttacggccttatcgtagccatctacctctacacaaaataa

SEQ ID NO: 106779 - protein, 159 aa, Tribolium castaneum
MSGISEENPVYGPFFGVMGAAAAIIFSSLGAAYGTAKSGTGIAAMSVMRPELIMKSIIPVVMAGIIAIYGLVIAVLIAGGIDSAANNYSLYKGFVHLGAGLSVGFSGLAAGFAIGIVGDAGVRGTAQQPRLFVGMILILIFAEVLGLYGLIVAIYLYTK

SEQ ID NO: 106780 - DNA, 630 bp, Tribolium castaneum; identical to SEQ ID NO: 45853
  CDS (1)..(630)

SEQ ID NO: 106781 - protein, 209 aa, Tribolium castaneum; identical to SEQ ID NO: 45854

SEQ ID NO: 106782 - DNA, 492 bp, Clostridium difficile 630
  CDS (1)..(492): transl_table=11
atggaatttttaaacgcgttaggaaatggtcaatttttggcaatatcaggagctgctatagcagcattatttgcaggtatgggttctgctaaaggtacttcaatagcaggtcaagccgcagcaggtgttgtaacagaagaccctagtaaattcggtcaacttctagttttacaacttcttcctggtacacaaggtctgtatggatttatcatagctttccttattttatcaaaagcagggattattggtggagatgcaataccaacatcagctcaaggtttacaacttcttatggcaggacttccaattggtttagttggtttagtatcaggtatagcacaaggtaaagcagcagcagcaggagttggaatagttgcaaaaagacctgaagaacttggtaaagctataacatttgcagcaatagttgaaacatatgctcttttaggactacttgtttctttcttagcttacaatggaattgcaattggttaa

SEQ ID NO: 106783 - protein, 163 aa, Clostridium difficile 630
MEFLNALGNGQFLAISGAAIAALFAGMGSAKGTSIAGQAAAGVVTEDPSKFGQLLVLQLLPGTQGLYGFIIAFLILSKAGIIGGDAIPTSAQGLQLLMAGLPIGLVGLVSGIAQGKAAAAGVGIVAKRPEELGKAITFAAIVETYALLGLLVSFLAYNGIAIG

SEQ ID NO: 106784 - DNA, 486 bp, Thermococcus kodakarensis KOD1
  CDS (1)..(486): transl_table=11
atggatccgatagtttacgtcgtgttgggcgccgcactcgcggcgggaatagcgggtatagcctcagctttcggtataggaatcgctggagctgcagcggcaggagcggttgcggaggacgagaagaacttcaagaacgccctcatccttgagggtctgccgatgacccagagcatctacggtctcatcaccctgttcctcattatgctcagcgctgggatcatcggcggcggattcaagtttgccgaagcgaccacagagaaccttgtgaagagcgccatactattcggcgccggtcttaccgttggcctcaccggtctctcagctatacctcagggtatcatcgccagcgcaggaataggcgccgctgccaagaacccgaagaccttcactcagggcgtcatattcgcggctatggccgagaccacggcgatcttcggtctcgtcggtgcgcttatcatgatcgccactggagttggcttctga

SEQ ID NO: 106785 - protein, 161 aa, Thermococcus kodakarensis KOD1
MDPIVYVVLGAALAAGIAGIASAFGIGIAGAAAAGAVAEDEKNFKNALILEGLPMTQSIYGLITLFLIMLSAGIIGGGFKFAEATTENLVKSAILFGAGLTVGLTGLSAIPQGIIASAGIGAAAKNPKTFTQGVIFAAMAETTAIFGLVGALIMIATGVGF

SEQ ID NO: 106786 - DNA, 498 bp, Acanthus ebracteatus
  CDS (1)..(498)
atgtcgttgaccttcagtggcgatgagacggcccctttcttcggattcctcggcgctgccgcagcactcgtcttttcatgtatgggagctgcctatgggacggccaagagtggcgtcggcgtggcttcgatgggcgtcatgaggcctgagctggttatgaagtcgattgtgccggtggttatggctggtgttctgggtatttacggtttgattattgctgtgattattagtacaggtattaaccctaaggccaagtcctactacctgtttgatggttacgctcacctttcatctggactcgcctgcggtctcgccggacttgctgccggtatggctattgggatcgtcggagatgctggtgttagagccaatgcacaacagcccaagctctttgttgggatgattcttatcctcatttttgcggaggccttggcctggtatggcctcattgtcggtatcatcctttcttctcgtgctggtcagtctagagctgagtag

SEQ ID NO: 106787 - protein, 165 aa, Acanthus ebracteatus
MSLTFSGDETAPFFGFLGAAAALVFSCMGAAYGTAKSGVGVASMGVMRPELVMKSIVPVVMAGVLGIYGLIIAVIISTGINPKAKSYYLFDGYAHLSSGLACGLAGLAAGMAIGIVGDAGVRANAQQPKLFVGMILILIFAEALAWYGLIVGIILSSRAGQSRAE

SEQ ID NO: 106788 - DNA, 495 bp, Vitis vinifera
  CDS (1)..(495)
  misc_feature (321)..(321): r is g or a
  misc_feature (375)..(375): r is g or a
  misc_feature (438)..(438): y is t or c
atgactacattcagcggcgatgaaacggcaccgtttttcggattcctcggcgccgctgctgccctcgtcttctcctgtatgggagctgcgtatggaacggcgaagagtggcgtcggagtggcgtcgatgggagtgatgaggccggagctggtgatgaagtcgattgtaccagttgttatggctggagttttaggtatttacgggcttatcattgctgttatcatcagtactgggattaaccctaaggccaaatcgtactaccttttcgatggctatgcgcatctctcgtcgggtttggcgtgtggtctggccgggctctcrgccggaatggcaatcgggattgttggcgatgccggtgtcagggctaatgcgcarcagcctaaactttttgttggtatgatcctcattctcatctttgctgaagcactggccctatayggccttattgttggcattatcttgtcatcccgagctggccagtccagagcagaataa

SEQ ID NO: 106789 - protein, 164 aa, Vitis vinifera
MTTFSGDETAPFFGFLGAAAALVFSCMGAAYGTAKSGVGVASMGVMRPELVMKSIVPVVMAGVLGIYGLIIAVIISTGINPKAKSYYLFDGYAHLSSGLACGLAGLSAGMAIGIVGDAGVRANAQQPKLFVGMILILIFAEALALYGLIVGIILSSRAGQSRAE

SEQ ID NO: 106790 - DNA, 534 bp, Vitis vinifera; identical to SEQ ID NO: 45857
  CDS (1)..(534)
  misc_feature (21)..(21): w is a or t
  misc_feature (25)..(25): k is g or t
  misc_feature (29)..(29): r is g or a

SEQ ID NO: 106791 - protein, 177 aa, Vitis vinifera; identical to SEQ ID NO: 45858
  misc_feature (9)..(9): The Xaa at location 9 stands for Ala, or Ser.
  misc_feature (10)..(10): The Xaa at location 10 stands for Arg, or His.

SEQ ID NO: 106792 - DNA, 471 bp, Triatoma infestans
  CDS (1)..(471)
atggcctcccctaataatccaatctacagcccattttttggtgtgatgggagccgcatcagccatgattttcagtgcacttggagcagcatatggtacagcaaaatctggaacaggaattgccgccatgtcggtaatgaggcctgaattgatcatgaaatccatcatccccgtggttatggctggtattattgctatttacggcttggtagtagcagtcctgattgctggaagtcttgacaactatgaccaatatcccctgtacaaaggtttcatgcacttgggagccggtctggccgttggattttctggtttagcggcaggatttgctattggaatagtaggagatgctggtgtaagggggaccgctcaacaaccacgtcttttcgtaggaatgattcttatacttattttcgctgaagtacttggtctttacggcttgattgtagccatttatctttattcaaagtaa

SEQ ID NO: 106793 - protein, 156 aa, Triatoma infestans
MASPNNPIYSPFFGVMGAASAMIFSALGAAYGTAKSGTGIAAMSVMRPELIMKSIIPVVMAGIIAIYGLVVAVLIAGSLDNYDQYPLYKGFMHLGAGLAVGFSGLAAGFAIGIVGDAGVRGTAQQPRLFVGMILILIFAEVLGLYGLIVAIYLYSK

SEQ ID NO: 106794 - DNA, 495 bp, Acetabularia acetabulum
  CDS (1)..(495): transl_table=6
atggcagacgaaatttatggccccgttcaattgacagcatctttctatggctttttgggtgctgcgttcgcccttatattctcttgtatgggtgccgcttatggtactgcgaagtccggtattggtattgcttaaatgggtgttatgagacccgagttggtgatgaaatcaattgtccctgttgtcatggctggtgttttgggaatttatggattgattattgctgtcattatctccacaaatgttaaaaaaacaggctatactttgtatgatggatatgcacatattggtgctggtattgcgtgcggtatggctggtatgcctgcaggaatggcaattggtattgtgggagatgccggtgttcgagccaatgcttaacaacccaagctgtttgtgggtgtgattttaattcttatttttgctgaggcattggctttgtacggtttgattgttggaatcattcttgcttcaaaggcatctggaggaagttcatga

SEQ ID NO: 106795 - protein, 164 aa, Acetabularia acetabulum
MADEIYGPVQLTASFYGFLGAAFALIFSCMGAAYGTAKSGIGIAQMGVMRPELVMKSIVPVVMAGVLGIYGLIIAVIISTNVKKTGYTLYDGYAHIGAGIACGMAGMPAGMAIGIVGDAGVRANAQQPKLFVGVILILIFAEALALYGLIVGIILASKASGGSS

SEQ ID NO: 106796 - DNA, 504 bp, Acetabularia acetabulum
  CDS (1)..(504): transl_table=6
atggcaactgctgagactccttctgccacccctgctgctggaaatgatacggctccattttttggctttatgggtgcagcttctgctttggtttttgcttgtatgggagctgcctatggtactgctaaatctggagtgggtattgcttccatgggggttatgagaccggaattggttatgaagtctattgtccctgttgtcatggcgggtgtgttgggtatttacggtttaatcattgccgtgatcatcagtacaaacgtgaagcgtgacgtgtacaagttgtacgacgggtatgctcacttgtctgcaggtttggcatgcggccttgccggtttgccggccggaatggccatcggaatcgtaggtgatgccggagttcgcgcaaacgcacagcaacccaaattgttcgtcggtatgatccttattctaatttttgccgaggcactggcactgtacggattgattgtgggaattatcttggcttccaaagcttccgcttcttga

SEQ ID NO: 106797 - protein, 167 aa, Acetabularia acetabulum
MATAETPSATPAAGNDTAPFFGFMGAASALVFACMGAAYGTAKSGVGIASMGVMRPELVMKSIVPVVMAGVLGIYGLIIAVIISTNVKRDVYKLYDGYAHLSAGLACGLAGLPAGMAIGIVGDAGVRANAQQPKLFVGMILILIFAEALALYGLIVGIILASKASAS

SEQ ID NO: 106798 - DNA, 507 bp, Acetabularia acetabulum
  CDS (1)..(507): transl_table=6
atgtctgcaaccccgtctgaaaccctgtcaactgctagtgccggtaacgataccgcacctttctttgggttcatgggagcagcttctgctttggtcttcgcttgtatgggtgccgcgtatggtaccgcaaagtccggcgtgggtattgcctctatgggtgtaatgagacccgagttggttatgaagagtattgttcccgttgttatggcgggtgtgttgggtatctacggacttattattgctgtcattattagtaccaatgttaaaagggacgtttataaattatatgatggatatgcccacttgtctgctggacttgcttgtggacttgcaggtttacctgctggtatggctattggaattgtgggtgatgctggtgtgcgtgctaatgcctaacaacctaagctgtttgtcggtatgattttgattttgattttcgctgaggcattggctctgtacggattgattgttggaatcattttggcttccaaggcttccgcatcttga

SEQ ID NO: 106799 - protein, 168 aa, Acetabularia acetabulum
MSATPSETLSTASAGNDTAPFFGFMGAASALVFACMGAAYGTAKSGVGIASMGVMRPELVMKSIVPVVMAGVLGIYGLIIAVIISTNVKRDVYKLYDGYAHLSAGLACGLAGLPAGMAIGIVGDAGVRANAQQPKLFVGMILILIFAEALALYGLIVGIILASKASAS

SEQ ID NO: 106800 - DNA, 495 bp, Medicago truncatula
  CDS (1)..(495)
atggctccattcagcggcgacgaaactgctcctttattcggcttcctcggtgccgcagcggcactcgttttctcatgtatgggagcggcatacggaacagcgaagagtggtgtaggagtagcatcgatgggagtgatgagacctgaacttgttatgaaatctattgttcctgttgttatggctggtgttttgggtatttatggtttgattattgctgttattattagtactgggattaatcctaaggctaaatcttattatctctttgatggttacgctcatctttcttctggtcttgcttgtggtcttgctggtctttctgctggtatggctattggaatcgtcggtgatgccggtgttagagcaaatgctcaacagccaaagctttttgttggaatgattctcatcctcattttcgccgaggcgttggcgttgtacggacttattgttggcatcatcctctcttcccgcgctggccaatccagggctgagtaa

SEQ ID NO: 106801 - protein, 164 aa, Medicago truncatula
MAPFSGDETAPLFGFLGAAAALVFSCMGAAYGTAKSGVGVASMGVMRPELVMKSIVPVVMAGVLGIYGLIIAVIISTGINPKAKSYYLFDGYAHLSSGLACGLAGLSAGMAIGIVGDAGVRANAQQPKLFVGMILILIFAEALALYGLIVGIILSSRAGQSRAE

SEQ ID NO: 106802 - DNA, 495 bp, Medicago truncatula
  CDS (1)..(495)
atggctccattcagcggcgatgaaactgcacccttctttggcttccttggagccgcagctgctctcgtcttctcatgtatgggagctgcatacggaacagcgaagagtggcgttggtgtggcttccatgggtgtgatgagaccggaactcgtgatgaagtcgattgtaccagttgttatggctggtgttttgggtatttatggtcttattattgctgttattatcagtactggaattaacccaaaggccaaatcttattacctttttgatggctatgcacatctttcatccggtcttgcttgtgggcttgctgggctttctgctggtatggctattgggattgttggtgatgctggtgttagagccaatgcacagcagccaaaacttttcgttggaatgatccttatcctcatctttgctgaagctcttgccctttacggtctcattgttggtattatcttgtcttcacgtgccggccagtctagagccgagtaa

SEQ ID NO: 106803 - protein, 164 aa, Medicago truncatula
MAPFSGDETAPFFGFLGAAAALVFSCMGAAYGTAKSGVGVASMGVMRPELVMKSIVPVVMAGVLGIYGLIIAVIISTGINPKAKSYYLFDGYAHLSSGLACGLAGLSAGMAIGIVGDAGVRANAQQPKLFVGMILILIFAEALALYGLIVGIILSSRAGQSRAE

SEQ ID NO: 106804 - DNA, 480 bp, Aspergillus oryzae
  CDS (1)..(480)
atgcaactgaagcccgatcctttttttggtaccgtaggctgtgcgagtgctatcgtctttacttccttcggtgcggcctatggcactgcgaaagctggtgttgggatctgctccatgggtgttctgagacctgatctaatcgtgaagaacatcgtccccgtcgtcatggccggaatactcggtatttacggactggtcgtttccgtattgattgcaaacaatcttgcgcagaaagtaaccatctacacgagcctcgtccagatgggtgcagggctcgctgttggtcttgcagggttggctgcagggttcgctatcggaatcgtgggtgatgctggtgtgaggggaacagcgcaacaacctcgactctatgtgggcatgattctaattctaatttttgcagaggtcttgggtctttacgggttgatagtcgcactcttgatgaactctagggcgggcatagtggagcatacatgtgagtga

SEQ ID NO: 106805 - protein, 159 aa, Aspergillus oryzae
MQLKPDPFFGTVGCASAIVFTSFGAAYGTAKAGVGICSMGVLRPDLIVKNIVPVVMAGILGIYGLVVSVLIANNLAQKVTIYTSLVQMGAGLAVGLAGLAAGFAIGIVGDAGVRGTAQQPRLYVGMILILIFAEVLGLYGLIVALLMNSRAGIVEHTCE

SEQ ID NO: 106806 - DNA, 597 bp, Aspergillus oryzae; identical to SEQ ID NO: 45867
  CDS (1)..(597)

SEQ ID NO: 106807 - protein, 198 aa, Aspergillus oryzae; identical to SEQ ID NO: 45868

SEQ ID NO: 106808 - DNA, 498 bp, Plantago major
  CDS (1)..(498)
atgtcgtctactttcagcggcgatgaaactgctcctttcttcggcttcctcggcgctgctgctgcccttgtcttctcctgcatgggagcagcttatgggacagctaagagtggtgtaggagtggcttctatgggtgtgatgagaccagagcttgtcatgaaatcgattgtgccagtggtcatggctggtgtgttgggtatctacggtttgattattgctgttattatcagcactggtatcaacccaaaggccaagtcatactacctgtttgatggatatgcccatctctcatctgggcttgcttgtggccttgctggcttggctgctggtatggctattggaattgtgggagatgctggtgtgagggctaatgcacaacaaccaaagcttttcgttggaatgatcctcatccttattttcgctgaagctttggctctctatggcctcattgttggaattattttgtcttcacgtgctggccagtcaagagctgactag

SEQ ID NO: 106809 - protein, 165 aa, Plantago major
MSSTFSGDETAPFFGFLGAAAALVFSCMGAAYGTAKSGVGVASMGVMRPELVMKSIVPVVMAGVLGIYGLIIAVIISTGINPKAKSYYLFDGYAHLSSGLACGLAGLAAGMAIGIVGDAGVRANAQQPKLFVGMILILIFAEALALYGLIVGIILSSRAGQSRAD

SEQ ID NO: 106810 - DNA, 495 bp, Suaeda salsa
  CDS (1)..(495)
atggctgtcttcaatggcgatgaaactgctcccttcttcggcttcctcggcgctgctgccgctcttgtcttctcctgtatgggagcagcatacggaacagccaagagtggagtaggagtagcatcaatgggagtgatgagaccagaattggtgatgaaatcgattgtaccagttgttatggctggagttttgggtatttatggtttgattattgctgtcatcattagtactggtattaaccctaaggccaaatcatactacctttttgatggttatgctcatctttcttctggtcttgcttgtggtcttgctggtctttctgctggtatggctatcggtattgtcggtgatgctggtgtcagagccaatgcccagcagcccaagcttttcgttggaatgatcctcatcctcattttcgctgaagctttggctttgtatggtctcattgttggtatcattctgtcttcccgtgctgggcaatcaagagccgattag

SEQ ID NO: 106811 - protein, 164 aa, Suaeda salsa
MAVFNGDETAPFFGFLGAAAALVFSCMGAAYGTAKSGVGVASMGVMRPELVMKSIVPVVMAGVLGIYGLIIAVIISTGINPKAKSYYLFDGYAHLSSGLACGLAGLSAGMAIGIVGDAGVRANAQQPKLFVGMILILIFAEALALYGLIVGIILSSRAGQSRAD

SEQ ID NO: 106812 - DNA, 498 bp, Pennisetum americanum
  CDS (1)..(498)
atgtcgtcggtgttcagcggcgatgaaacggcccccttcttcggcttcctcggcgccgccgccgccctcgtcttctcatgcatgggcgcggcctacgggacggccaagagcggtgtcggcgtggcgtccatgggtgtgatgcggccggagctcgtgatgaagtccatcgtgcccgtggtcatggctggtgtgctcggtatctacggactcatcattgccgtcatcatcagtaccgggatcaaccccaaggccaagccatactacctcttcgatggctacgcgcacctctcgtctgggctcgcttgtggtctcgcggggcttgccgctggcatggccatcggcatcgtcggtgacgctggagtcagggcaaacgcacaacagccgaagctatttgtgggaatgattctcattctcattttcgcagaggcgcttgctctctacggtctcatcgtgggcatcatcctctcgtcccgtgctggccaatcccgtgccgattag

SEQ ID NO: 106813 - protein, 165 aa, Pennisetum americanum
MSSVFSGDETAPFFGFLGAAAALVFSCMGAAYGTAKSGVGVASMGVMRPELVMKSIVPVVMAGVLGIYGLIIAVIISTGINPKAKPYYLFDGYAHLSSGLACGLAGLAAGMAIGIVGDAGVRANAQQPKLFVGMILILIFAEALALYGLIVGIILSSRAGQSRAD

SEQ ID NO: 106814 - DNA, 504 bp, Tortula ruralis; identical to SEQ ID NO: 45873
  CDS (1)..(504)

SEQ ID NO: 106815 - protein, 167 aa, Tortula ruralis; identical to SEQ ID NO: 45874

SEQ ID NO: 106816 - DNA, 486 bp, Aspergillus oryzae; identical to SEQ ID NO: 45875
  CDS (1)..(486)

SEQ ID NO: 106817 - protein, 161 aa, Aspergillus oryzae; identical to SEQ ID NO: 45876

SEQ ID NO: 106818 - DNA, 498 bp, Avicennia marina
  CDS (1)..(498)
atggtgtcaaccttcagcggcgatgaaacggctcccttcttcggctttctcggcgccgcttctgctctcgtattttcctgtatgggagcagcttatggaacggctaagagtggggtcggtgtggcatcgatgggtgtgatgaggccggagctggtgatgaagtctattgtgcctgtggtcatggctggtgttttgggtatttatgggttgattattgctgtgattattagtacaggtattaaccctaaggccaagtcctactacttgtttgatggctatgctcacctttcctctggactagcttgtggtctcgctggcctggccgctggtatggctattggaatcgttggagatgctggtgttcgagccaacgcacaacaaccgaagctctttgttgggatgattcttatccttatttttgctgaggccttggctctgtatggtctcattgttggtatcatcctttcttctcgcgctggtcagtctagggctgactaa

SEQ ID NO: 106819 - protein, 165 aa, Avicennia marina
MVSTFSGDETAPFFGFLGAASALVFSCMGAAYGTAKSGVGVASMGVMRPELVMKSIVPVVMAGVLGIYGLIIAVIISTGINPKAKSYYLFDGYAHLSSGLACGLAGLAAGMAIGIVGDAGVRANAQQPKLFVGMILILIFAEALALYGLIVGIILSSRAGQSRAD

SEQ ID NO: 106820 - DNA, 474 bp, Solenopsis invicta
  CDS (1)..(474)
atgagtgccacggaaggtgccccggtatactcgccgttcttcggcgttatgggcgccgcctctgccatcgtattttctgctctgggagcagcatatggcacagcaaaggctggtacaggtatcgcagcgatgtctgtcatgaggccagagttaatcatgaaatccatcattcccgttgtcatggcaggtattattgccatttatggtcttgtggtggctgtactcatcgccggctctcttggtagagcccctacgtacgacctgtataatggtttcacccacttgggtgccggtttagctgtaggcttctccggtctagcagccggatttgctatcggcatcgtgggcgatgctggggtgagaggcaccgctcagcaacctcgtctcttcgtcggcatgatcttgattctgatcttcgccgaagtattgggtctctacggcctgattgtcgccatttacctgtacaccaagtaa

SEQ ID NO: 106821 - protein, 157 aa, Solenopsis invicta
MSATEGAPVYSPFFGVMGAASAIVFSALGAAYGTAKAGTGIAAMSVMRPELIMKSIIPVVMAGIIAIYGLVVAVLIAGSLGRAPTYDLYNGFTHLGAGLAVGFSGLAAGFAIGIVGDAGVRGTAQQPRLFVGMILILIFAEVLGLYGLIVAIYLYTK

SEQ ID NO: 106822 - DNA, 495 bp, Dendrobium crumenatum
  CDS (1)..(495)
atggttggatttagcggcgatgaaactgctcccttcttcgggttcctcggcgccgcagcagcgcttgtcttctcctgtatgggggccgcctacgggacggcaaagagcggcgtcggcgtggcctcgatgggggtcatgcggccggagcttgttatgaagtcaattgtgcccgtggtcatggctggtgttctcggtatttacggattgattattgcggtgattattagcacgggaattaatcccaaggccaagtcttattacctttttgacggatacgctcacctatcttccggccttgcgtgtggccttgctggtctatcagctggtatggctattgggatcgtcggtgatgctggtgtgagggctaatgctcagcagccaaaactctttgtaggcatgattcttattcttatttttgctgaagctcttgccctctatggtctcattgttggcatcattctctcttctcgggctggccaatctcgtgcggattaa

SEQ ID NO: 106823 - protein, 164 aa, Dendrobium crumenatum
MVGFSGDETAPFFGFLGAAAALVFSCMGAAYGTAKSGVGVASMGVMRPELVMKSIVPVVMAGVLGIYGLIIAVIISTGINPKAKSYYLFDGYAHLSSGLACGLAGLSAGMAIGIVGDAGVRANAQQPKLFVGMILILIFAEALALYGLIVGIILSSRAGQSRAD

SEQ ID NO: 106824 - DNA, 501 bp, Citrus unshiu
  CDS (1)..(501)
atgtcttcaacattattcagtggcgatgaaaccgctccattcttcggctttctcggcgccgctgccgccctagtcttttcctgtatgggagctgcgtacggaacggcgaagagtggcgtcggtgtggcgtcgatgggagtgatgaggccggagcttgtgatgaaatcgatcgtgcccgttgttatggcgggagttttgggtatttacggtttgattattgctgttattattagtaccggaattaaccctaaggccaaatcttattaccttttcgatggctacgcgcatctctcttctggcctcgcttgtggccttgctggtctctccgctggtatggcaattgggatcgtcggtgatgctggtgtcagagctaatgctcaacagccgaagcttttcgttgggatgatcctcattctgatctttgccgaagcgctggcactttatggacttattgttggtatcattctttcttctcgtgctggtcagtcaagagcagactag

SEQ ID NO: 106825 - protein, 166 aa, Citrus unshiu
MSSTLFSGDETAPFFGFLGAAAALVFSCMGAAYGTAKSGVGVASMGVMRPELVMKSIVPVVMAGVLGIYGLIIAVIISTGINPKAKSYYLFDGYAHLSSGLACGLAGLSAGMAIGIVGDAGVRANAQQPKLFVGMILILIFAEALALYGLIVGIILSSRAGQSRAD

SEQ ID NO: 106826 - DNA, 495 bp, Arabidopsis thaliana
  CDS (1)..(495)
atgtctacgttcagcggcgatgaaacagctcccttcttcggcttcctcggcgctgcagccgcactcgttttctcctgtatgggagctgcttatggaaccgcaaagagtggtgttggtgtggcttctatgggagttatgagacctgagttggtgatgaaatctattgtccctgttgttatggctggagtgttgggtatctatggattgatcattgctgttatcatcagtaccgggattaaccccaaggctaagtcttactacctctttgatggatacgcacatctctcgtctggtcttgcttgtggtcttgctggtctctcagctggaatggccattgggattgttggtgatgccggtgtcagggcaaatgctcagcagcctaagctctttgttgggatgattcttatccttattttcgcagaagcgcttgctctttacgggcttattgtaggaatcattctttcctcacgagctggccagtctagagctgaatga

SEQ ID NO: 106827 - protein, 164 aa, Arabidopsis thaliana
MSTFSGDETAPFFGFLGAAAALVFSCMGAAYGTAKSGVGVASMGVMRPELVMKSIVPVVMAGVLGIYGLIIAVIISTGINPKAKSYYLFDGYAHLSSGLACGLAGLSAGMAIGIVGDAGVRANAQQPKLFVGMILILIFAEALALYGLIVGIILSSRAGQSRAE

SEQ ID NO: 106828 - DNA, 483 bp, Saccharomyces cerevisiae; identical to SEQ ID NO: 45877
  CDS (1)..(483)

SEQ ID NO: 106829 - protein, 160 aa, Saccharomyces cerevisiae; identical to SEQ ID NO: 45878

SEQ ID NO: 106830 - DNA, 495 bp, Ashbya gossypii
  CDS (1)..(495)
atgacggatgacctagttaatgagtatgcgcctgcatttgcgcccttcttcgggtttgcagggtgcgccgctgcgatgattctatcttctttgggggcagctattggaacggccaagtccggtatcgggatttccggtatcggtacgttcaggcccgaactcatcatgaagtcgctgattcctgtggtgatgagcggtattctggcagtgtacggtctggtggtggcggtgttggtcgcgggaggcctttcgccgacagaagaatatacacttttcaacggtttcatgcatttggcggccgggctctgcgtcgggtttgcctgtctcagcagcggctacgccatcggaattgtgggcgacgtgggcgtccgcaagttcatgcaccagccgcggctgttcgtgggcattgttttgattttgatttttgcagaggtcttgggcttgtacgggatgatcatcgcccttatcctgaacaccaggggctctggcaactga

SEQ ID NO: 106831 - protein, 164 aa, Ashbya gossypii
MTDDLVNEYAPAFAPFFGFAGCAAAMILSSLGAAIGTAKSGIGISGIGTFRPELIMKSLIPVVMSGILAVYGLVVAVLVAGGLSPTEEYTLFNGFMHLAAGLCVGFACLSSGYAIGIVGDVGVRKFMHQPRLFVGIVLILIFAEVLGLYGMIIALILNTRGSGN

SEQ ID NO: 106832 - DNA, 495 bp, Candida glabrata
  CDS (1)..(495)
atggatatggtggcttctgataacgtgtatgcccctctctatgcaccattctttggttttgcaggctgtgctttagcaatgattctgtcatgtttgggtgcagccatcggtacagcaaaatctggtataggtattgcaggtataggtacattcaagccagaacttataatgaaatctttgattccggttgttatgagtggtattttggccatttacgggcttgtggtagctgtacttatcgcaggtaatttatcccctactgaagagtatacgttgtttaacggttttatgcatctaagctgcgggttgtgtgtaggatttgcatgcctaagcagcggctatgccattggtattgtcggcgatgtgggtgttagaaagtatatgcatcagccaagattgtttgtcggtattgttttaatccttatcttttctgaagtcttgggactttacggtatgattattgctctgatattaaataccaaaggatcagaataa

SEQ ID NO: 106833 - protein, 164 aa, Candida glabrata
MDMVASDNVYAPLYAPFFGFAGCALAMILSCLGAAIGTAKSGIGIAGIGTFKPELIMKSLIPVVMSGILAIYGLVVAVLIAGNLSPTEEYTLFNGFMHLSCGLCVGFACLSSGYAIGIVGDVGVRKYMHQPRLFVGIVLILIFSEVLGLYGMIIALILNTKGSE

SEQ ID NO: 106834 - DNA, 492 bp, Debaryomyces hansenii
  CDS (1)..(492)
atgtcggatagtttaggtgacgagtacgcaccagcatttgctccattccttggatttgctggatgtgccgcagccatgatattatcttgcgctggagcagctattggtaccgccaagtcaggtattggtatttcaggtattggtacatttaaaccagaattaattatgaaatcgttaatcccagtcgttatgtcgggtattttgtctgtgtatgggttggttgtgtctgttttgatagcaggaggattgtcaccaacagagaactattcactttttaatggatttatgcatttagcatgcggattgtccgttggatttgcatgtttggcgtcgggatattcgattgggattgtaggtgatgaaggggttagacaatttatgcatcagccaagactctttgtcggtattgtcttgattttaatttttgctgaagttttgggattatacggtatgattattgccttgattttgaacactaagggtagtggttaa

SEQ ID NO: 106835 - protein, 163 aa, Debaryomyces hansenii
MSDSLGDEYAPAFAPFLGFAGCAAAMILSCAGAAIGTAKSGIGISGIGTFKPELIMKSLIPVVMSGILSVYGLVVSVLIAGGLSPTENYSLFNGFMHLACGLSVGFACLASGYSIGIVGDEGVRQFMHQPRLFVGIVLILIFAEVLGLYGMIIALILNTKGSG

SEQ ID NO: 106836 - DNA, 498 bp, Kluyveromyces lactis
  CDS (1)..(498)
atgtcacaggccatttcagaggatcaatatgctcctttgttcgccccattctttgggtttgccggttgtgcatttgctatgattctatcgtgtcttggtgctgccattgggacggccaagtctggtatcggtatctcaggtatcggtactttcaaaccagaattgattatgaagtctttaattcctgtggttatgagtggtattctagcggtgtatggacttgtggtggcagtcttgatcgcaggtggtctttcacctactgaagactataccctctttaatgggttcatgcacttgagttgcgggctttgtgttgggttcgcgtgtctaagtagtggttatgcgattggaatcgtgggagatgttggagtgaggaagtatatgcatcaaccaaggctatttgttggaatagttctaattctaattttttcagaagttttgggtctttatggtatgattgttgccttgatcttgaacactagaggctcgggaaactag

SEQ ID NO: 106837 - protein, 165 aa, Kluyveromyces lactis
MSQAISEDQYAPLFAPFFGFAGCAFAMILSCLGAAIGTAKSGIGISGIGTFKPELIMKSLIPVVMSGILAVYGLVVAVLIAGGLSPTEDYTLFNGFMHLSCGLCVGFACLSSGYAIGIVGDVGVRKYMHQPRLFVGIVLILIFSEVLGLYGMIVALILNTRGSGN

SEQ ID NO: 106838 - DNA, 504 bp, Neurospora crassa
  CDS (1)..(504)
atggccgaaatcatggccgattcggaacttgcccccaagttcgcgccgttcattggcatggccggcatcgcagccgccatgatctttggcagcgcgggcgctgcatatggcacagccaagtctggcatcggtatcgccggcgtgggtaccttccggccggacctcatcatgaagtgcttgattcccgtcgtcatgtccggtattattgccgtttacgccctcgttgtagctgtcctgattgcacaagatctcgggccgccaggatccggccaacattacagcttgttcaatggcttcatgcatcttgcatgcggtctttcagtcggcctcaccggtctcgccgcgggctattgcattggtatcgtaggcgacaagggcgtccgttcgttcatgctacagtcgaggatctttgtcggcatggttctgatcctcattttcggcgaagtccttggtctttatggcctcattgttgccctcatcctcaacaccaagagcaagggctaa

SEQ ID NO: 106839 - protein, 167 aa, Neurospora crassa
MAEIMADSELAPKFAPFIGMAGIAAAMIFGSAGAAYGTAKSGIGIAGVGTFRPDLIMKCLIPVVMSGIIAVYALVVAVLIAQDLGPPGSGQHYSLFNGFMHLACGLSVGLTGLAAGYCIGIVGDKGVRSFMLQSRIFVGMVLILIFGEVLGLYGLIVALILNTKSKG

SEQ ID NO: 106840 - DNA, 489 bp, Schizosaccharomyces pombe
  CDS (1)..(489)
atgtcaagtaatttatgtcctatatattcttctttttttggttttgcaggtgtttgtgcctcaatggttttttcatgcctcggagcaggctatggaacagcattggctggaagagggatagctgccgtaggtgcttttcgtcctgagattgttatgaagtctttgattccagttgttatgagcggtattatcggcgtctatggtttggtaatgtcggtattgattgctggtgatatgtctcccgataatgattattccctattcagcggatttattcatctctctgctggattggcagttggtttgacgggtgtggctgctggttacgctataggagttgttggtgatcgtggtgttcaaagttttatgagacaagatcgcatatttgttagtatggttcttattttaattttcgctgaagttttgggattgtatggacttattgttggccttattttacaaacaaagacttcaaacgtttgttattag

SEQ ID NO: 106841 - protein, 162 aa, Schizosaccharomyces pombe
MSSNLCPIYSSFFGFAGVCASMVFSCLGAGYGTALAGRGIAAVGAFRPEIVMKSLIPVVMSGIIGVYGLVMSVLIAGDMSPDNDYSLFSGFIHLSAGLAVGLTGVAAGYAIGVVGDRGVQSFMRQDRIFVSMVLILIFAEVLGLYGLIVGLILQTKTSNVCY

SEQ ID NO: 106842 - DNA, 495 bp, Saccharomyces cerevisiae
  CDS (1)..(495)
atgtcaacgcaactcgcaagtaacatatatgctccattgtacgctccctttttcgggttcgcaggttgtgcagctgccatggtgctttcctgtttgggagctgccattggtacagctaagtcaggtattggtatcgccggtataggtactttcaagccggaattgatcatgaagtctttgattcctgtggttatgagtggtatcttagccatttatgggcttgttgtggccgttttaattgcaggtaatttatctcctaccgaagactatactctcttcaatgggttcatgcacttgagttgtgggctctgtgtgggatttgcctgtttgagtagtggctacgccattggtatggtcggtgacgttggtgttagaaagtatatgcaccaaccaaggctttttgtcggtatcgttttgattctaattttctctgaagttttagggttatatggtatgattgtagctttgattttgaacactagaggctctgaatga

SEQ ID NO: 106843 - protein, 164 aa, Saccharomyces cerevisiae
MSTQLASNIYAPLYAPFFGFAGCAAAMVLSCLGAAIGTAKSGIGIAGIGTFKPELIMKSLIPVVMSGILAIYGLVVAVLIAGNLSPTEDYTLFNGFMHLSCGLCVGFACLSSGYAIGMVGDVGVRKYMHQPRLFVGIVLILIFSEVLGLYGMIVALILNTRGSE

SEQ ID NO: 106844 - DNA, 501 bp, Arabidopsis thaliana
  CDS (1)..(501)
atggcttcttcaggtttcagcggcgatgaaactgcgcctttcttcggattcctcggcgccgccgctgcgctcgttttctcctgtatgggagcagcgtacgggacggcgaagagtggagttggagttgcgtcgatgggagtgatgagacctgaacttgttatgaaatcgattgttcctgttgtcatggctggtgtgttaggtatttatggtttgatcatcgctgttatcatcagtactgggattaaccccaaggccaagtcttattacctattcgatggctatgctcatctctcttctgggctagcttgtggtcttgctggtctctctgctggtatggctattggaatcgtcggtgatgctggtgttagagcgaatgcgcaacaaccgaagctgtttgtgggaatgattctgattctcatctttgcggaagcgcttgcactgtatggtctcattgttggtatcatcctctcatctcgagctggtcagtctagagctgagtga

SEQ ID NO: 106845 - protein, 166 aa, Arabidopsis thaliana
MASSGFSGDETAPFFGFLGAAAALVFSCMGAAYGTAKSGVGVASMGVMRPELVMKSIVPVVMAGVLGIYGLIIAVIISTGINPKAKSYYLFDGYAHLSSGLACGLAGLSAGMAIGIVGDAGVRANAQQPKLFVGMILILIFAEALALYGLIVGIILSSRAGQSRAE

SEQ ID NO: 106846 - DNA, 498 bp, Avena sativa
  CDS (1)..(498)
atgtcgtcggtgttcagcggcgatgagaccgcccccttcttcggcttcctcggcgccgccgcggcgctcgtcttctcatgcatgggggcggcctacgggacggccaagagcggcgtcggcgtggcgtctatgggagtcatgcgcccggagctcgtcatgaagtccatcgtgcccgtcgtcatggctggtgtgctcggtatctacgggctcattatcgccgtcatcatcagtaccgggatcaaccccaaggccaagccctacttcctcttcgacggctacgcccacctctcatccgggctcgcatgtggcctcgccgggcttgctgctggaatggccatcggcatcgttggtgatgctggagtcagggcaaatgctcagcagccgaagttgtttgttggcatgatcctcatcctcatcttcgcagaggcgctcgctctgtatggcctcattgtcggcatcatcctatcatcccgagctggccaatcccgtgccgattag

SEQ ID NO: 106847 - protein, 165 aa, Avena sativa
MSSVFSGDETAPFFGFLGAAAALVFSCMGAAYGTAKSGVGVASMGVMRPELVMKSIVPVVMAGVLGIYGLIIAVIISTGINPKAKPYFLFDGYAHLSSGLACGLAGLAAGMAIGIVGDAGVRANAQQPKLFVGMILILIFAEALALYGLIVGIILSSRAGQSRAD

SEQ ID NO: 106848 - DNA, 498 bp, Beta vulgaris
  CDS (1)..(498)
atgtctactgtcttcaatggcgatgaaactgctcccttcttcggcttccttggtgccgctgccgctctcgtcttctcctgtatgggagcagcatacggaacagcgaagagtggagtaggagtggcgtctatgggagtgatgagaccagaattggtgatgaaatcaattgttccagttgttatggctggagttttgggtatttatggattgattattgctgtgattattagtactggtattaaccctaaggctaaatcgtactatctttttgatggatatgctcatctctcttctggtctcgcttgtggtcttgctggtctctctgctggcatggccatcggtattgtcggcgatgccggtgtcagagcaaacgcccagcagcccaagcttttcgttggaatgatcctcattctcattttcgctgaagctttggctttgtacggtcttattgttggtatcatcctctcttcccgtgctggtcaatcaagagccgattag

SEQ ID NO: 106849 - protein, 165 aa, Beta vulgaris
MSTVFNGDETAPFFGFLGAAAALVFSCMGAAYGTAKSGVGVASMGVMRPELVMKSIVPVVMAGVLGIYGLIIAVIISTGINPKAKSYYLFDGYAHLSSGLACGLAGLSAGMAIGIVGDAGVRANAQQPKLFVGMILILIFAEALALYGLIVGIILSSRAGQSRAD

SEQ ID NO: 106850 - DNA, 483 bp, Candida tropicalis; identical to SEQ ID NO: 45879
  CDS (1)..(483): transl_table=12

SEQ ID NO: 106851 - protein, 160 aa, Candida tropicalis; identical to SEQ ID NO: 45880

SEQ ID NO: 106852 - DNA, 480 bp, Drosophila melanogaster
  CDS (1)..(480)
atgtcttctgaagtgagcagcgacaaccccatctatggccccttcttcggagttatgggagccgcctccgccatcatcttctcggccctgggcgctgcttatggcactgctaagtctggtaccggtattgctgccatgtcagtgatgcggcctgaactgatcatgaaatccatcattcctgtggtcatggcgggtatcattgccatttacggtctggtggtggctgtgcttattgccggcgcgctggaagagccatcaaagtactcactatacaggggcttcattcacttgggagccggtctggcggtgggcttctctggtctggcagctggttttgcgatcggcatcgtgggagacgccggtgtccgtggcacagcacagcagcctagactgttcgtgggcatgatcctgattctcatcttcgccgaagtgttgggtctctacggcttgattgtggccatttacctgtacacgaaataa

SEQ ID NO: 106853 - protein, 159 aa, Drosophila melanogaster
MSSEVSSDNPIYGPFFGVMGAASAIIFSALGAAYGTAKSGTGIAAMSVMRPELIMKSIIPVVMAGIIAIYGLVVAVLIAGALEEPSKYSLYRGFIHLGAGLAVGFSGLAAGFAIGIVGDAGVRGTAQQPRLFVGMILILIFAEVLGLYGLIVAIYLYTK

SEQ ID NO: 106854 - DNA, 498 bp, Gossypium hirsutum
  CDS (1)..(498)
atgtcttctactttcagcggcgatgaaacggcaccgttcttcggcttcctcggcgccgctgctgctctcgtcttctcctgtatgggagctgcatatgggacggctaagagtggtgttggtgtggcttcaatgggtgtgatgaggcctgaattggtgatgaaatctattgtaccagttgttatggctggtgttttgggtatttatggcttgattatcgctgtcattattagtactgggatcaatcctaaggccaaatcgtattaccttttcgatggttacgcccatctttcttctggtcttgcttgtggccttgctgggctttctgctggaatggcaattggaattgtcggcgatgctggtgtcagagctaacgcacagcagccaaagctttttgttggaatgatccttatcctcatctttgctgaagctttggctctttatggtcttattgtcggcattatcttgtcatctcgggctggacaatcccgagcagaataa

SEQ ID NO: 106855 - protein, 165 aa, Gossypium hirsutum
MSSTFSGDETAPFFGFLGAAAALVFSCMGAAYGTAKSGVGVASMGVMRPELVMKSIVPVVMAGVLGIYGLIIAVIISTGINPKAKSYYLFDGYAHLSSGLACGLAGLSAGMAIGIVGDAGVRANAQQPKLFVGMILILIFAEALALYGLIVGIILSSRAGQSRAE

SEQ ID NO: 106856 - DNA, 471 bp, Heliothis virescens
  CDS (1)..(471)
atggccgaaaatccaatctacggacccttctttggagttatgggggcggcgtctgctatcatctttagcgcgctgggagctgcctatggaactgccaagtcaggcaccggtatcgccgccatgtcggtgatgcggcctgagctcatcatgaagtccatcattcccgtcgtcatggcgggtatcattgccatctacggtctcgtagtggctgtcctgattgcgggttcgttggacgccccctccaacaactacaccctttacaaagggttcatccaccttggcgctggtctcgccgtaggtttctccggtctagcggctggtttcgccataggcatcgttggtgatgcaggcgtacgtggtaccgcgcaacagcccaggttattcgtcggaatgatccttatcctcattttcgctgaagtattgggtctatacggtctcatcgtcgccatctacctttacacgaaacagtaa

SEQ ID NO: 106857 - protein, 156 aa, Heliothis virescens
MAENPIYGPFFGVMGAASAIIFSALGAAYGTAKSGTGIAAMSVMRPELIMKSIIPVVMAGIIAIYGLVVAVLIAGSLDAPSNNYTLYKGFIHLGAGLAVGFSGLAAGFAIGIVGDAGVRGTAQQPRLFVGMILILIFAEVLGLYGLIVAIYLYTKQ

SEQ ID NO: 106858 - DNA, 498 bp, Kalanchoe daigremontiana
  CDS (1)..(498)
atgtcttctacattcagcggcgatgaaactgcccccttcttcggcttcctcggcgccgctgccgccctcgtcttctcctgcatgggagcggcttacgggacggcgaagagtggggtgggagtggcgtcaatgggggtgatgaggccagagctggtgatgaagtccattgtgccggtggtcatggcaggagtgttgggtatttatggtctgattatcgccgttatcatcagtaccgggattaaccccaaggccaagtcctactacctgttcgacggatatgcccacttgtcgtctggcttggcttgtggccttgctggactctccgctggaatggccattggaatcgttggtgacgctggtgtcagggccaacgctcagcaaccgaaactcttcgtgggaatgatcctcatcctcatctttgcggaagcgctggccctctacggcctcatcgtgggcatcatcttgtcctcccgagccggccagtccagagccgactga

SEQ ID NO: 106859 - protein, 165 aa, Kalanchoe daigremontiana
MSSTFSGDETAPFFGFLGAAAALVFSCMGAAYGTAKSGVGVASMGVMRPELVMKSIVPVVMAGVLGIYGLIIAVIISTGINPKAKSYYLFDGYAHLSSGLACGLAGLSAGMAIGIVGDAGVRANAQQPKLFVGMILILIFAEALALYGLIVGIILSSRAGQSRAD

SEQ ID NO: 106860 - DNA, 471 bp, Manduca sexta
  CDS (1)..(471)
atggccgaaaatccaatctacggacccttctttggagttatgggggcggcgtctgctattatcttcagcgccctgggagccgcctatggcacagccaagtcgggcaccggtatcgccgccatgtcggtgatgcggcccgagctgatcatgaagtccatcatccccgtcgtcatggcgggtatcattgccatttacgggctggtcgtggctgtacttattgcgggttccctggactcgccctccaataactacaccctgtacagagggttcatccaccttggcgccggccttgccgtcggattctccggtctcgcggccggtttcgccataggcatcgttggtgatgcgggcgtccgcggcacagctcagcagcctaggttattcgtcggaatgatccttatcctcattttcgccgaagtattgggtctgtacggtctcatcgtcgccatctacctgtacacgaaacagtaa

SEQ ID NO: 106861 - protein, 156 aa, Manduca sexta
MAENPIYGPFFGVMGAASAIIFSALGAAYGTAKSGTGIAAMSVMRPELIMKSIIPVVMAGIIAIYGLVVAVLIAGSLDSPSNNYTLYRGFIHLGAGLAVGFSGLAAGFAIGIVGDAGVRGTAQQPRLFVGMILILIFAEVLGLYGLIVAIYLYTKQ

SEQ ID NO: 106862 - DNA, 480 bp, Nephrops norvegicus
  CDS (1)..(480)
atgtctgaagagggtagtcctatgtattccccattctttggcgtcatgggggctgcttctgccatggtatttagcgcccttggtgcagcatatggcactgccaaatcaggagtgggaatttcagccatgtcagtaatgcggccggagttgatcatgaagtgcatcattcctgttgtcatggcaggtatcattgctatctatggcttagtggtggctgtgctaattgctggcaagctggacgaagcgcctacctacactctttaccaaggttttgtgcatatgggtgctggtctgtctgtggggctctctggcttggcagctgggtttgctattggaattgttggagatgccggtgtgaggggaactgctcaacaacctcgtctgtatgttggcatgattctcattcttatctttgctgaggtacttggtctttatggtctgattgttgccattttcctgtacaccaagacctccagctaa

SEQ ID NO: 106863 - protein, 159 aa, Nephrops norvegicus
MSEEGSPMYSPFFGVMGAASAMVFSALGAAYGTAKSGVGISAMSVMRPELIMKCIIPVVMAGIIAIYGLVVAVLIAGKLDEAPTYTLYQGFVHMGAGLSVGLSGLAAGFAIGIVGDAGVRGTAQQPRLYVGMILILIFAEVLGLYGLIVAIFLYTKTSS

SEQ ID NO: 106864 - DNA, 486 bp, Neurospora crassa
  CDS (1)..(486)
atgtccgatctctgccctgtttacgcgcccttcttcggtgccatgggctgcacagcagccatcgtcttcacctgccttggtgcctcgtacggtactgccaagtctggtgttggtatcgctgccatgggtgtcctccgccctgacctcatcgtcaagaacattgttcccgtcattatggctggtatcatcggtatctacggtctcgtcgtctccgtattgatttccgatgctctcacacaggaccactacgctctctacactggcttcatccaactcggtgctggtctcgccgtcggtcttgctggtcttgctgctggtttcgcgattggtattgtcggtgatgctggtgtccgtggaactgctcaacaacccagactcttcgtcggcatgattcttattctcattttcgccgaagtcttgggtctttacggtttgatcgttgctctcttgatgaactccaaggctacgctcaacacctcatgctag

SEQ ID NO: 106865 - protein, 161 aa, Neurospora crassa
MSDLCPVYAPFFGAMGCTAAIVFTCLGASYGTAKSGVGIAAMGVLRPDLIVKNIVPVIMAGIIGIYGLVVSVLISDALTQDHYALYTGFIQLGAGLAVGLAGLAAGFAIGIVGDAGVRGTAQQPRLFVGMILILIFAEVLGLYGLIVALLMNSKATLNTSC

SEQ ID NO: 106866 - DNA, 495 bp, Phaseolus aureus
  CDS (1)..(495)
atggcttccttcagtggcgatgagacggcaccgtttttcggcttccttggggccgcagctgcactcgtcttctcctgtatgggagctgcctatggcacagcaaagagtggtgtgggcgtggcttcgatgggtgtgatgagaccggagctggtgatgaagtctattgttcctgttgttatggctggagttttgggtatttatggtcttattattgctgtcatcatcagtactggcattaatcccaaggccaaatcttattacctctttgatggttatgcacatctctcctctggtcttgcctgtgggctggctgggctctctgctggcatggctattggtattgttggtgatgctggtgttagagccaatgcacagcagccaaagcttttcgttggaatgattctcatcctcatctttgccgaagctcttgccctgtatggtctcattgttggtatcatcctgtcttctcgtgccggtcagtctagagctgattaa

SEQ ID NO: 106867 - protein, 164 aa, Phaseolus aureus
MASFSGDETAPFFGFLGAAAALVFSCMGAAYGTAKSGVGVASMGVMRPELVMKSIVPVVMAGVLGIYGLIIAVIISTGINPKAKSYYLFDGYAHLSSGLACGLAGLSAGMAIGIVGDAGVRANAQQPKLFVGMILILIFAEALALYGLIVGIILSSRAGQSRAD

SEQ ID NO: 106868 - DNA, 486 bp, Schizosaccharomyces pombe; identical to SEQ ID NO: 45881
  CDS (1)..(486)

SEQ ID NO: 106869 - protein, 161 aa, Schizosaccharomyces pombe; identical to SEQ ID NO: 45882

SEQ ID NO: 106870 - DNA, 495 bp, Solanum lycopersicum
  CDS (1)..(495)
atgtcgaactttgccggagatgaaactgctcccttcttcggcttccttggcgccgccgctgccctcgtcttctcatgtatgggggcagcttatggaacagcaaagagtggtgttggagtggcgtcaatgggagtgatgaggccagagttggtgatgaagtccattgtgccagtggttatggctggtgtgttaggtatttatggcttgattattgctgtgatcatcagtactgggattaaccccaaaacaaagtcgtattacctatttgatggctatgctcatctctcatctggtcttgcttgtggtcttgctggtctttctgctggaatggctattggtattgttggagatgctggtgttagggctaatgcacaacaacccaagctttttgtcggaatgatcctcattctcattttcgctgaagccttggctctttatgggcttattgttggcattatcttgtcttcccgagctgggcagtctagagccgagtga

SEQ ID NO: 106871 - protein, 164 aa, Solanum lycopersicum
MSNFAGDETAPFFGFLGAAAALVFSCMGAAYGTAKSGVGVASMGVMRPELVMKSIVPVVMAGVLGIYGLIIAVIISTGINPKTKSYYLFDGYAHLSSGLACGLAGLSAGMAIGIVGDAGVRANAQQPKLFVGMILILIFAEALALYGLIVGIILSSRAGQSRAE

SEQ ID NO: 106872 - DNA, 498 bp, Nicotiana tabacum
  CDS (1)..(498)
atgccttcgactttcagcggcgatgaaactgctcccttcttcggcttcctcggcgctgctgctgccttagtcttctcctgtatgggagcagcttatggtacagcaaagagtggcgtaggggtggcatcaatgggtgtgatgaggccggagttggtgatgaagtcaattgtgccagttgttatggctggtgttttgggtatttatggattgattatagctgtgattattagtacagggattaacccgaaaaccaagtcttactatctttttgatggatatgctcacctttcttctggtcttgcttgtggtcttgctggcctttctgctggtatggccattggaatcgttggtgacgctggtgttagagccaatgcacaacagccaaagctttttgtcgggatgattttgattcttatttttgctgaagccctggctttgtatggccttattgttggaatcatcctctcttctcgtgctggtcagtctagagcagagtag

SEQ ID NO: 106873 - protein, 165 aa, Nicotiana tabacum
MPSTFSGDETAPFFGFLGAAAALVFSCMGAAYGTAKSGVGVASMGVMRPELVMKSIVPVVMAGVLGIYGLIIAVIISTGINPKTKSYYLFDGYAHLSSGLACGLAGLSAGMAIGIVGDAGVRANAQQPKLFVGMILILIFAEALALYGLIVGIILSSRAGQSRAE

SEQ ID NO: 106874 - DNA, 600 bp, Schizosaccharomyces pombe; identical to SEQ ID NO: 45883
  CDS (1)..(600)

SEQ ID NO: 106875 - protein, 199 aa, Schizosaccharomyces pombe; identical to SEQ ID NO: 45884

SEQ ID NO: 106876 - DNA, 531 bp, Oryza sativa; identical to SEQ ID NO: 45887
  CDS (1)..(531)

SEQ ID NO: 106877 - protein, 176 aa, Oryza sativa; identical to SEQ ID NO: 45888

SEQ ID NO: 106878 - DNA, 498 bp, Oryza sativa
  CDS (1)..(498)
atgtcttccacgttcaacggcgacgagttcgccccgttcttgggcttcatcggcgccgccctcgccctcgtcttctcatgcatgggggcggcgtacgggacggctcggagcggcgtcggggtggcgcacatgggggtgatgcggccggagctggtgatgaagtcgatcgtgccggtggtgatggccggagtgctggggatctacggcctcatcatcgctgtcatcatcaccaccggcatcaacccgacggcgatgccgtactaccacttcgacggctccgtccacctcgccgcggggctcgccacggggctctgcgccctcgccgccggcctcgccatcggcgtcgtcggcgacgccggcgtcagggccaacgcgcagcagcccaagctgttcgtcggcatgatcctcatcctcatcttcgccgaggcgcttggcctctacggcctcatcgtcggcatcatcctctcctcccgcgccggccagtcgcgcgcccactaa

SEQ ID NO: 106879 - protein, 165 aa, Oryza sativa
MSSTFNGDEFAPFLGFIGAALALVFSCMGAAYGTARSGVGVAHMGVMRPELVMKSIVPVVMAGVLGIYGLIIAVIITTGINPTAMPYYHFDGSVHLAAGLATGLCALAAGLAIGVVGDAGVRANAQQPKLFVGMILILIFAEALGLYGLIVGIILSSRAGQSRAH

SEQ ID NO: 106880 - DNA, 504 bp, Oryza sativa
  CDS (1)..(504)
atggccggcgcgtcgaccttcagtggcgacgagacggcgcccttcttcggcttcctgggcgccgcggcggcgctcgtcttctcctgcatgggcgccgcctacggcacggccaagagcggcgtcggggtggcgtccatgggcgtcatgcgcccggagctcgtcatgaaatccatcgtgcccgtcgtcatggccggggtgctcgggatctacggcctcatcatcgccgtcatcatcagcaccgggatcaaccccaaggccaagccctacttcctcttcgacggctacgcgcacctctcctccggcctcgcgtgcggcctcgccggcctcgccgccgggatggccatcggcatcgtcggcgacgccggcgtcagggcaaatgctcaacagccaaaactgtttgtgggtatgatcctcatccttatctttgcggaagcgcttgcactctatggtctcattgttggtatcatcttgtcatctcgtgctggtcaatcccgagcggactaa

SEQ ID NO: 106881 - protein, 167 aa, Oryza sativa
MAGASTFSGDETAPFFGFLGAAAALVFSCMGAAYGTAKSGVGVASMGVMRPELVMKSIVPVVMAGVLGIYGLIIAVIISTGINPKAKPYFLFDGYAHLSSGLACGLAGLAAGMAIGIVGDAGVRANAQQPKLFVGMILILIFAEALALYGLIVGIILSSRAGQSRAD

SEQ ID NO: 106882 - DNA, 501 bp, Oryza sativa
  CDS (1)..(501)
atgtcctcctccaccttcagcggcgatgagaccgcccctttcttcggcttcctcggcgccgcctccgccctcgtattctcctgcatgggcgccgcctacggcaccgccaagagcggcgtgggcgtggcgtccatgggggtgatgcgcccggaactggtgatgaagtccatcgtccccgtcgtcatggccggagtgctcggtatctacggcctcatcatcgccgtcatcatctccaccggcatcaaccccaaggccaagccctacttcctcttcgacggttacgcccacctctcctccggtctcgcctgcggcctcgccggtctcgccgccggcatggccatcggcatcgtcggcgacgccggagtcagggccaatgcgcagcagccaaagttgttcgtgggcatgatcctcatccttatctttgcagaagctcttgctctgtatggcctgattgttggtatcatcctctcgtctcgtgcgggccaatctcgagcggattag

SEQ ID NO: 106883 - protein, 166 aa, Oryza sativa
MSSSTFSGDETAPFFGFLGAASALVFSCMGAAYGTAKSGVGVASMGVMRPELVMKSIVPVVMAGVLGIYGLIIAVIISTGINPKAKPYFLFDGYAHLSSGLACGLAGLAAGMAIGIVGDAGVRANAQQPKLFVGMILILIFAEALALYGLIVGIILSSRAGQSRAD

SEQ ID NO: 106884 - DNA, 498 bp, Oryza sativa
  CDS (1)..(498)
atgtcgtcggtgttcagcggcgatgagacggcgcccttcttcggcttcctcggcgccgcctccgccctcatcttctcatgcatgggtgcggcgtacgggacggcgaagagcggcgtcggcgtggcgtccatgggcgtgatgcgcccggagctcgtgatgaagtccatcgtgcccgtggtcatggctggtgtgctcggtatctacggcctcatcatcgccgtcatcatcagtacagggatcaaccccaaggctaagccgtactacctctttgacggctacgcgcatctgtcgtccgggctcgcctgtggcctcgccggtctcgctgccggaatggccatcggcatcgtcggtgatgctggtgtcagggcaaatgcacagcaaccaaagcttttcgtgggcatgatcctcatcctcattttcgcagaagcgcttgccctgtatggtctcattgtgggcatcatcctctcatcccgtgccggccaatctcgtgcagattag

SEQ ID NO: 106885 - protein, 165 aa, Oryza sativa
MSSVFSGDETAPFFGFLGAASALIFSCMGAAYGTAKSGVGVASMGVMRPELVMKSIVPVVMAGVLGIYGLIIAVIISTGINPKAKPYYLFDGYAHLSSGLACGLAGLAAGMAIGIVGDAGVRANAQQPKLFVGMILILIFAEALALYGLIVGIILSSRAGQSRAD

SEQ ID NO: 106886 - DNA, 495 bp, Oryza sativa
  CDS (1)..(495)
atggcaggcttcagtggcgacgaaaccgctcctttcttcggcttcctcggtgccgctgcggccctcgtcttctcctgtatgggagcggcgtatggaacggcgaagagtggggtgggggtggcgtcgatgggagtgatgaggccggagctggtgatgaagtcgatcgtgccggtggttatggcgggagtgttggggatttacgggttgattattgcggttattatcagcactgggataaacccaaaggctaagtcttactatctctttgatggatatgctcatttgtcctctggccttgcctgtggcctagctggcctctctgctggaatggccattgggattgttggtgatgctggtgtcagagctaatgcccagcaaccgaagctgtttgttggcatgattcttatcttgattttcgctgaagctcttgctctgtatggcctcattgtgggtatcatcctctcatctcgggcaggccaatctcgtgccgattaa

SEQ ID NO: 106887 - protein, 164 aa, Oryza sativa
MAGFSGDETAPFFGFLGAAAALVFSCMGAAYGTAKSGVGVASMGVMRPELVMKSIVPVVMAGVLGIYGLIIAVIISTGINPKAKSYYLFDGYAHLSSGLACGLAGLSAGMAIGIVGDAGVRANAQQPKLFVGMILILIFAEALALYGLIVGIILSSRAGQSRAD

SEQ ID NO: 106888 - DNA, 495 bp, Brassica napus
  CDS (1)..(495)
atgtctacgttcagcggcgacgaaacagctcccttcttcggtttcctcggcgccgcagccgcactcgtcttctcctgtatgggagctgcttatggaacggcaaagagtggtgttggtgtggcttccatgggagtgatgagacccgagcttgtgatgaaatctatcgtccctgttgttatggctggtgtgttgggtatttacggattgattattgctgttatcatcagtaccgggattaaccccaaggctaagtcttacttcctcttcgacggatacgcccatctctcttccggtcttgcttgtggtcttgctggtctttccgctggaatggccattggtattgtcggagatgctggtgtcagggcaaatgctcagcagcctaagctctttgtcgggatgattcttatccttatcttcgcagaagcgcttgcgctttacgggcttattgtaggaatcatcctctcctctagagctggccagtctagagctgaatga

SEQ ID NO: 106889 - protein, 164 aa, Brassica napus
MSTFSGDETAPFFGFLGAAAALVFSCMGAAYGTAKSGVGVASMGVMRPELVMKSIVPVVMAGVLGIYGLIIAVIISTGINPKAKSYFLFDGYAHLSSGLACGLAGLSAGMAIGIVGDAGVRANAQQPKLFVGMILILIFAEALALYGLIVGIILSSRAGQSRAE

SEQ ID NO: 106890 - DNA, 498 bp, Brassica napus
  CDS (1)..(498)
atggcttcaggtttcagcggcgatgaaactgctcctttcttcggattcctcggcgctgccgccgctctcgttttctcatgtatgggagcagcgtacgggacagcgaagagcggggtcggcgtggcgtcgatgggtgtgatgagaccagagcttgtgatgaaatcgattgttcccgtggtcatggctggtgtgttaggtatctatggtctcatcattgctgtcatcatcagtactggaatcaaccctaaggccaagtcttactacctcttcgacggctatgctcatctctcttccggtctcgcttgtggtctcgccggtctctccgccggtatggctattggtatcgtcggcgacgcctgtgttagagcgaatgcacaacaaccgaagctgtttgtgggaatgattttgattctcatctttgctgaagcacttgcgctgtacggtctcattgttggtatcatcctctcgtctcgtgctggtcagtctagagccgagtga

SEQ ID NO: 106891 - protein, 165 aa, Brassica napus
MASGFSGDETAPFFGFLGAAAALVFSCMGAAYGTAKSGVGVASMGVMRPELVMKSIVPVVMAGVLGIYGLIIAVIISTGINPKAKSYYLFDGYAHLSSGLACGLAGLSAGMAIGIVGDACVRANAQQPKLFVGMILILIFAEALALYGLIVGIILSSRAGQSRAE

SEQ ID NO: 106892 - DNA, 534 bp, Triticum aestivum
  CDS (1)..(534)
atgtcgtcggactactcgtcgtcgtgggcgcgcgcgctcgtgcatatctcgccctacaccttctccgccatcggcatcgccgtctccatcggcgtctctgtactcggcgcagcatgggggatcttcatcacggggagcagcctcatcggggccgccatcaaggcgcccaggatcacctccaagaacctcatcagtgtcatcttctgtgaggccgttgcaatttatggtgtaatcgtggcgatcatcctccaaacaaagcttgaaagtgtgccaacatcccgaatgcatgatccagagtctatgcgagctggttatgcaatctttgcctcaggtcttattgtcggctttgctaatcttgtttgcggggtatgcgtgggaataatcggaagcagctgtgcactgtctgatgcccagaattcaacactctttgtaaagatcctggtgattgagatctttggcagtgctttgggcctctttggagtgatcgtgggcataatcatgtcagctcaagcaacatggccaacgaaagtctaa

SEQ ID NO: 106893 - protein, 177 aa, Triticum aestivum; identical to SEQ ID NO: 45804

SEQ ID NO: 106894 - DNA, 498 bp, Zea mays
  CDS (1)..(498)
atgtcgtcggcgttcagcggcgatgagaccgcccctttcttcggcttccttggcgcctccgctgcgctcgtcttctcatgcatgggggcggcgtacgggacagccaagagtggcgtcggcgtggcgtccatgggtgtcatgcgcccagagctcgtcatgaagtccatcgtgcccgtggtcatggctggtgtgctcggtatctacggcctcatcatcgccgtcatcatcagcactgggatcaaccccaaggccaagccatactacctctttgacggctatgcccacctgtcgtctggccttgcctgtggtcttgctgggcttgctgcaggcatggccattggcatcgttggtgatgctggtgtcagggcgaacgctcagcagccgaagttgtttgttggcatgatcctcatccttatttttgctgaagcacttgccctctatggtctcatcgtcggcattatcctctcgtctcgtgccggccagtcccgcgcagattag

SEQ ID NO: 106895 - protein, 165 aa, Zea mays
MSSAFSGDETAPFFGFLGASAALVFSCMGAAYGTAKSGVGVASMGVMRPELVMKSIVPVVMAGVLGIYGLIIAVIISTGINPKAKPYYLFDGYAHLSSGLACGLAGLAAGMAIGIVGDAGVRANAQQPKLFVGMILILIFAEALALYGLIVGIILSSRAGQSRAD

SEQ ID NO: 106896 - DNA, 501 bp, Zea mays
  CDS (1)..(501)
atggcggcctccaccttcagcggcgacgagacggcgcccttcttcggcttcctcggcgccgccgccgcgctcgtcttctcctgcatgggcgccgcctacgggacggccaagagcggcgtcggcgtcgcctccatgggcgtcatgcgccccgagctcgtcatgaagtccatcgtccccgtcgtcatggcgggagtactcggcatctacggcctcatcatcgccgtcatcatctccaccgggatcaaccccaaggccaagccctacttcctcttcgacggctacgcgcacctctcctccggactcgcctgcggcctcgctggcctcgctgccggcatggccatcggcatcgtcggagacgccggagttagggcgaatgcacagcagccaaagttgtttgtgggcatgattctgatccttatcttcgcagaagctcttgctctgtacggtctcatcgtcggtatcattctctcatcccgtgcaggccaatctcgcgccgattag

SEQ ID NO: 106897 - protein, 166 aa, Zea mays
MAASTFSGDETAPFFGFLGAAAALVFSCMGAAYGTAKSGVGVASMGVMRPELVMKSIVPVVMAGVLGIYGLIIAVIISTGINPKAKPYFLFDGYAHLSSGLACGLAGLAAGMAIGIVGDAGVRANAQQPKLFVGMILILIFAEALALYGLIVGIILSSRAGQSRAD

SEQ ID NO: 106898 - DNA, 498 bp, Linum usitatissimum
  CDS (1)..(498)
atggcgtcaacgtttagtggcgacgagactgctcctttcttcggcttccttggagctgctgccgccctcgtcttctcctgcatgggagctgcctatggaacggccaagagcggtgtcggagtggcgtccatgggagtgatgaggcccgagctggtgatgaaatctatcgttccggtggttatggctggtgtgttgggtatctacgggttgattattgctgtcatcatcagtactgggattaaccctaaggccaaatcttactacctgttcgatggttatgctcacctctcctccggccttgcctgtggtcttgctggtctttctgctggtatggccattggcatcgttggcgatgctggtgttagggcgaatgcgcagcagcctaagctttttgttgggatgatcctcatcctcatttttgcagaagctcttgcactgtacgggctcattgttggcatcatcctttcatcaagagctggacaatcaagagccgactga

SEQ ID NO: 106899 - protein, 165 aa, Linum usitatissimum
MASTFSGDETAPFFGFLGAAAALVFSCMGAAYGTAKSGVGVASMGVMRPELVMKSIVPVVMAGVLGIYGLIIAVIISTGINPKAKSYYLFDGYAHLSSGLACGLAGLSAGMAIGIVGDAGVRANAQQPKLFVGMILILIFAEALALYGLIVGIILSSRAGQSRAD

SEQ ID NO: 106900 - DNA, 498 bp, Hordeum vulgare
  CDS (1)..(498)
atggacgtttcagagagcttagtttattgcccggtctatgcgccgttttttggcgccatgggctgcacagctgccatcgtattcacctgctttggcgcagcatacggaaccgccaaatctggtgttggtatttgtgcaatgggtgtcctcagacctgatctcattgttaagaacatcgttcctgttatcatggctggtattatcggtatctacggtctcgtcgtatccgttttgatatcagatggattgaaacaacaactgccactgtacaccggcttcatacagctcggtgctggtctcagtgtaggcttagcaggtctggctgctggatttgctattgggattgttggagatgcaggtgtcagaggcactgcgcagcagccaaggctattcgtcggcatgattcttattctaattttcgctgaagtgttgggtctatacggattaattgttgcacttctcatgaattcaaaagcaagcttagatgtttcatgttaa

SEQ ID NO: 106901 - protein, 165 aa, Hordeum vulgare
MDVSESLVYCPVYAPFFGAMGCTAAIVFTCFGAAYGTAKSGVGICAMGVLRPDLIVKNIVPVIMAGIIGIYGLVVSVLISDGLKQQLPLYTGFIQLGAGLSVGLAGLAAGFAIGIVGDAGVRGTAQQPRLFVGMILILIFAEVLGLYGLIVALLMNSKASLDVSC

SEQ ID NO: 106902 - DNA, 534 bp, Brassica napus; identical to SEQ ID NO: 45889
  CDS (1)..(534)

SEQ ID NO: 106903 - protein, 177 aa, Brassica napus; identical to SEQ ID NO: 45890

SEQ ID NO: 106904 - DNA, 534 bp, Brassica napus; identical to SEQ ID NO: 45891
  CDS (1)..(534)

SEQ ID NO: 106905 - protein, 177 aa, Brassica napus; identical to SEQ ID NO: 45892

SEQ ID NO: 106906 - DNA, 498 bp, Brassica napus
  CDS (1)..(498)
atggcttcaggtttcagcggcgatgaaactgctcctttcttcggattcctcggcgctgccgccgctctcgttttctcctgtatgggagcagcgtacgggacagcgaagagcggggtcggtgtggcgtcgatgggtgtgatgagaccagagcttgtaatgaaatcgattgttccggtggttatggctggtgtgttaggtatctatggtctcatcattgctgtcatcatcagtactggaatcaacccaaaggccaagtcttactatctcttcgatggctatgctcatctctcttccggtctcgcttgtggtctcgccggtctctccgccggtatggctatcggcatcgtcggcgatgccggtgttagagcgaatgcacaacagccaaagctgtttgtgggaatgattttgattctcatctttgctgaagcacttgcgctgtacggtctcattgttggtatcatcctctcttctcgtgctggtcagtctagagccgagtga

SEQ ID NO: 106907 - protein, 165 aa, Brassica napus
MASGFSGDETAPFFGFLGAAAALVFSCMGAAYGTAKSGVGVASMGVMRPELVMKSIVPVVMAGVLGIYGLIIAVIISTGINPKAKSYYLFDGYAHLSSGLACGLAGLSAGMAIGIVGDAGVRANAQQPKLFVGMILILIFAEALALYGLIVGIILSSRAGQSRAE

SEQ ID NO: 106908 - DNA, 495 bp, Glycine max
  CDS (1)..(495)
atggctccgttcagcggcgatgagacggcaccgtttttcggcttccttggagccgcagctgccctcgtcttctcctgtatgggagctgcctatggcacagcgaagagtggcgttggcgtggcttcgatgggtgtgatgagaccagagctggtgatgaagtctattgtccctgttgttatggctggagttttgggtatttatggccttattattgctgttattatcagtactggcattaatcccaaggccaaatcttattacctctttgatggttatgcacatctctcctctggtcttgcctgtgggctggctggcctctctgctggcatggctattggtattgttggtgatgctggtgttagagccaatgcacagcagccaaagctttttgttggaatgattcttattctcatttttgctgaagctcttgctctctatggtctcattgttggtattatcctgtcttcacgtgctggtcagtctagagctgattaa

SEQ ID NO: 106909 - protein, 164 aa, Glycine max
MAPFSGDETAPFFGFLGAAAALVFSCMGAAYGTAKSGVGVASMGVMRPELVMKSIVPVVMAGVLGIYGLIIAVIISTGINPKAKSYYLFDGYAHLSSGLACGLAGLSAGMAIGIVGDAGVRANAQQPKLFVGMILILIFAEALALYGLIVGIILSSRAGQSRAD

SEQ ID NO: 106910 - DNA, 495 bp, Glycine max
  CDS (1)..(495)
atggctggtttcagcggcgatgaaactgctccgttcttcggcttcctgggcgcggcggccgccttagtattctcctgtatgggagcggcgtacggcacggccaagagcggtgtcggcgttgcttcgatgggcgtcatgagaccggagctggtcatgaaatccatcgttccggttgttatggccggagtgttgggaatctacggcttgatcatcgccgtcatcatcagcaccggcattaaccctaaagccaaatcctattacctcttcgacggctacgctcacctctcctccggcctctcttgcggtcttgctggcctctccgctggcatggccattggcattgttggcgatgccggtgttagagcaaatgcccaacagccaaagctttttgttgggatgattctcattctcatctttgctgaggcgttggcattgtatggactcattgttggcatcatcctctcttcacgtgctggccaatccagagctgattag

SEQ ID NO: 106911 - protein, 164 aa, Glycine max
MAGFSGDETAPFFGFLGAAAALVFSCMGAAYGTAKSGVGVASMGVMRPELVMKSIVPVVMAGVLGIYGLIIAVIISTGINPKAKSYYLFDGYAHLSSGLSCGLAGLSAGMAIGIVGDAGVRANAQQPKLFVGMILILIFAEALALYGLIVGIILSSRAGQSRAD

SEQ ID NO: 106912 - DNA, 531 bp, Glycine max
  CDS (1)..(531)
atggtggcacattcgagttcttggggaagggcactcgtcgcgatctcgccctacaccttctccgccatcggcatcgccgtcgctatcggcgtctccgtcctcggcgccgcctgggggatctacatcaccggaagcagcttgatcggcgctgcaatcagggctcctcgaatcacttccaaaaatctcattagtgtaatcttctgtgaagctgttgctatatatggtgttattgtggctattattcttcaaaccaaattagaaagtgttccagcatcaaatatttatgcaccagagtctcttagggctggatatgcaatctttgcatcgggattaatcgtgggcttcgcaaatcttgtttgtgggttgtgtgtaggaataattggaagcagctgtgcattgtctgatgcccagaactcctctctctttgtgaaaattcttgtgatcgagatctttggtagtgcgctggggctatttggagttattgttggaataattatgtcagctcaagcaacatggccgacaaaagtttag

SEQ ID NO: 106913 - protein, 176 aa, Glycine max; identical to SEQ ID NO: 45802

SEQ ID NO: 106914 - DNA, 531 bp, Zea mays
  CDS (1)..(531)
atgtcgtcggactcctcgtcgtgggcgcgcgccctggtgcagatctcgccctacaccttctccgccatcggcatcgctgtctccatcggcgtctcggtcctcggcgcggcatggggtatcttcatcacggggagcagcctcatcggggctgccatcaaggcgcccaggatcacatctaagaacctcatcagtgtcatcttctgtgaggctgttgcaatttatggtgtaattgtggcaatcatcctccagacaaagcttgaaagtgtgccaacatcccaaatgtacgatccggagtctcttcgagctggctatgcgatctttgcatctggtcttatcgttggcttcgctaatcttgtttgcggggtatgtgtggggataatcggaagcagctgtgcactgtctgatgctcagaactcatcactctttgtaaagattttggtgattgagatcttcggcagcgctctgggactgttcggagtcattgtgggcatcattatgtcatctcaggcgacatggccagcaaaagcttga

SEQ ID NO: 106915 - protein, 176 aa, Zea mays; identical to SEQ ID NO: 45798

SEQ ID NO: 106916 - DNA, 20 bp, Artificial sequence
  primer
atgctggctcagctcgtggc

SEQ ID NO: 106917 - DNA, 20 bp, Artificial sequence
  primer
ttactccgacgggcagtcgc

SEQ ID NO: 106918 - protein, 144 aa, Artificial sequence
  consensus sequence
  Variant (2)..(11): Xaa in position 2 to 11 is any amino acid
  Variant (15)..(15): Xaa in position 15 is any amino acid
  Variant (17)..(20): Xaa in position 17 to 20 is any amino acid
  Variant (22)..(31): Xaa in position 22 to 31 is any amino acid
  Variant (33)..(36): Xaa in position 33 to 36 is any amino acid
  Variant (38)..(41): Xaa in position 38 to 41 is any amino acid
  Variant (43)..(49): Xaa in position 43 to 49 is any amino acid
  Variant (54)..(71): Xaa in position 54 to 71 is any amino acid
  Variant (72)..(84): Xaa in position 72 to 84 is any or no amino acid
  Variant (86)..(91): Xaa in position 86 to 91 is any amino acid
  Variant (94)..(95): Xaa in position 94 to 95 is any amino acid
  Variant (97)..(99): Xaa in position 97 to 99 is any amino acid
  Variant (101)..(102): Xaa in position 101 to 102 is any amino acid
  Variant (104)..(104): Xaa in position 104 is any amino acid
  Variant (106)..(106): Xaa in position 106 is any amino acid
  Variant (111)..(117): Xaa in position 111 to 117 is any amino acid
  Variant (119)..(122): Xaa in position 119 to 122 is any amino acid
  Variant (126)..(129): Xaa in position 126 to 129 is any amino acid
  Variant (131)..(131): Xaa in position 131 is any amino acid
  Variant (134)..(136): Xaa in position 134 to 136 is any amino acid
  Variant (138)..(138): Xaa in position 138 is any amino acid
  Variant (140)..(140): Xaa in position 140 is any amino acid
GXXXXXXXXXXGAAXGXXXXGXXXXXXXXXXPXXXXKXXXXVXXXXXXXIYGLXXXXXXXXXXXXXXXXXXXXXXXXXXXXXXXGXXXXXXGLXXGXXXLXXGXAXGIVGXXXXXXXAXXXXLFVXXXXIXIFXXXLXLXGLIV

SEQ ID NO: 106919 - protein, 23 aa, Artificial sequence
  protein pattern
  Variant (2)..(2): Xaa in position 2 is any amino acid
  Variant (3)..(3): Xaa in position 3 is Ala, Gly or Thr
  Variant (4)..(4): Xaa in position 4 is any amino acid
  Variant (5)..(5): Xaa in position 5 is Ala, Cys, Ser or Thr
  Variant (6)..(6): Xaa in position 6 is Ile, Leu, Met or Val
  Variant (7)..(7): Xaa in position 7 is any amino acid
  Variant (8)..(8): Xaa in position 8 is Phe, Leu or Val
  Variant (9)..(9): Xaa in position 9 is Ala, Gly, Ser or Thr
  Variant (10)..(10): Xaa in position 10 is Ala, Cys, Asn, Ser, Thr or Val
  Variant (11)..(11): Xaa in position 11 is any amino acid
  Variant (15)..(15): Xaa in position 15 is any amino acid
  Variant (17)..(19): Xaa in position 17 to 19 is any or no amino acid
  Variant (21)..(21): Xaa in position 21 is Ala, Gly, Ser or Thr
  Variant (22)..(22): Xaa in position 22 is any amino acid
  Variant (23)..(23): Xaa in position 23 is Ala or Ser
GXXXXXXXXXXGAAXGXXXTXXX

SEQ ID NO: 106920 - DNA, 537 bp, Synechocystis sp.
  CDS (1)..(537): transl_table=11
atggcggcccagatcattgaaattctttccccggaggaaatccgacgtacccttacccgtctggcttcccaggtaattgagaaaaatagtgacctgtcggagttggtcttactggggatctacaccaggggagtacccctcgcccatcagcttgcccagcaaattgaaatgttggaacaagttaaagtccccgttggggcgatcgatgtgactctctaccgggacgatttaaaacggatcaaaacccgcaccccggctaaaaccaaaattcccctcagtttgactggcaaaagggttgtattggtggatgacgtaatttataaaggccgcactatccgggcggcactcaatgcggtgacagaatatggtcgtccccaggtaattcgtttattaactttggtagaccggggtcatcgagagttacccatccatcctgattttgttggcaaaatcctgcctacagcggcggaggaacaggtgaaagtatatttacaggatcccgatggtcgggacacggtggagttaattaaaggttaa

SEQ ID NO: 106921 - protein, 178 aa, Synechocystis sp.
MAAQIIEILSPEEIRRTLTRLASQVIEKNSDLSELVLLGIYTRGVPLAHQLAQQIEMLEQVKVPVGAIDVTLYRDDLKRIKTRTPAKTKIPLSLTGKRVVLVDDVIYKGRTIRAALNAVTEYGRPQVIRLLTLVDRGHRELPIHPDFVGKILPTAAEEQVKVYLQDPDGRDTVELIKG

SEQ ID NO: 106922 - DNA, 549 bp, Dehalococcoides sp. BAV1
  CDS (1)..(549): transl_table=11
atggcacaaaaagtaatactgggcgccgaagatatccgccggactttagcccgcattgcccatgaaatactggaaagaaaccagtccagccgggatttggtgattatcggcatgtatacccggggcgtaccgctggcaaaccgcttggccgaaaatattctccgctttgaagggcttgaaatcccggtggggacactggatttttctctctaccgtgatgaccttgattcccagcgtttccatcccactatcaaaaacacggatatacctttcagcataaataacaagatagtggtgctggtagatgacgttctctttacagggcgttccacccgggcggctatggatgcactgatagattacggacgccccaaagccatccagctggcggtactggtagacaggggtcaccgcgaactgccggtaagggcagattacataggtaaaaatatacccagcgcacgggacgagaagataaaagtccgcctgactgaaactgacggacaggacgaggtactgatactggatgacgaagcaggtgaggtataa

SEQ ID NO: 106923 - protein, 182 aa, Dehalococcoides sp. BAV1
MAQKVILGAEDIRRTLARIAHEILERNQSSRDLVIIGMYTRGVPLANRLAENILRFEGLEIPVGTLDFSLYRDDLDSQRFHPTIKNTDIPFSINNKIVVLVDDVLFTGRSTRAAMDALIDYGRPKAIQLAVLVDRGHRELPVRADYIGKNIPSARDEKIKVRLTETDGQDEVLILDDEAGEV

SEQ ID NO: 106924 - DNA, 543 bp, Oceanobacillus iheyensis HTE831
  CDS (1)..(543): transl_table=11
atgaaaaagaaaacggaaatactggatgcagcatccatacaacgagcactaacaagaatgtctcatgaaatattggaaaaaaataaaggtggagaaaatctcgtcttgattggaataaaaacaagaggtgttccactagcaaagcgtatccagcagaaaattaagcaaatcgaatctattgaggttcctttaggtgaattagatattaccatgtatcgagatgatcttgacaaagtatctgaacaagaggacccgaagattaactctgtttcaattggaatggatataaccgataaacatgttattttgatagatgatgtattatttactggaagaacggttcgagcagcaatggatgctgttatggacgttggtcgcccctctacaatccagcttggttcactcgtggatagagggcatcgtgagttacctatccgtgctgattatgttgggaagaacataccaacatcggatcgagaaattgttgttgttcaactaagtgaacaagatcaagaagatcgtgtatctttatatgaaaaataa

SEQ ID NO: 106925 - protein, 180 aa, Oceanobacillus iheyensis HTE831
MKKKTEILDAASIQRALTRMSHEILEKNKGGENLVLIGIKTRGVPLAKRIQQKIKQIESIEVPLGELDITMYRDDLDKVSEQEDPKINSVSIGMDITDKHVILIDDVLFTGRTVRAAMDAVMDVGRPSTIQLGSLVDRGHRELPIRADYVGKNIPTSDREIVVVQLSEQDQEDRVSLYEK

SEQ ID NO: 106926 - DNA, 522 bp, Streptococcus agalactiae NEM316
  CDS (1)..(522): transl_table=11
atgaaaagaaaagaaattattgatgatgtgaccatgaaacgtgctattacacgtattacctacgaaattatagaacgtaacaaaaatttagataatattgtcttagcaggcattaaaacaagaggtgtttttttagccaaacgcattcaagaacgtttgaagcaattagaaaatttagatattcccgttggagaattggatactaaacctttccgtgatgatatgaaagttgaagttgacaccacaactatgccagttgacatcactgataaagatattatattaattgatgatgttctctatacaggtcgcactattcgagctgctatcgataatcttgttagtttggggcgtccgagtcgtgtcagtttagctgtattaattgaccgtgggcatcgtgaactacccattcgtgcagattatgtggggaaaaatattccaacaagtcaatttgaagaaattctagttgaagtgatggaacatgatggttacgatcgtgtgagtattattgatccgagttaa

SEQ ID NO: 106927 - protein, 173 aa, Streptococcus agalactiae NEM316
MKRKEIIDDVTMKRAITRITYEIIERNKNLDNIVLAGIKTRGVFLAKRIQERLKQLENLDIPVGELDTKPFRDDMKVEVDTTTMPVDITDKDIILIDDVLYTGRTIRAAIDNLVSLGRPSRVSLAVLIDRGHRELPIRADYVGKNIPTSQFEEILVEVMEHDGYDRVSIIDPS

SEQ ID NO: 106928 - DNA, 579 bp, Corynebacterium efficiens YS-314
  CDS (1)..(579): transl_table=11
atgagcgaacgtaggaatactgtggtcgaactcctgggggagaacgacgtcagccgtaccgtcgcgcgcatcgcgcaccagattattgaaaagaccgctcttgattctgagggagcggatcgtgtcatgctgttgggaatcccctcaggtggtgttcccctggcggaacgcctggcagccaagattgaagaattctcgggcgtccgtgtggataccggcgccattgacatcaccctctaccgtgatgatctcaggaataagccacaccgtgcacttcagcccacatccatcccctctggtggcatagacaagaccaccgttgtcctggttgatgatgtgttgttctccggacgcaccgtccgcgccgcacttgatgcgctgcgtgacctgggtcgtcccaactacatccagctcgctgtcctcgttgaccgtggacaccgccagctgcccatccgtgccgattatgtgggcaagaacctgcccaccgcacgtgctgaggatgtcaccgtgatgctccgggagatcgacggccgtgacgccgtcaccctcacccgtgaagagggcgaaggggataattga

SEQ ID NO: 106929 - protein, 192 aa, Corynebacterium efficiens YS-314
MSERRNTVVELLGENDVSRTVARIAHQIIEKTALDSEGADRVMLLGIPSGGVPLAERLAAKIEEFSGVRVDTGAIDITLYRDDLRNKPHRALQPTSIPSGGIDKTTVVLVDDVLFSGRTVRAALDALRDLGRPNYIQLAVLVDRGHRQLPIRADYVGKNLPTARAEDVTVMLREIDGRDAVTLTREEGEGDN

SEQ ID NO: 106930 - DNA, 519 bp, Pseudomonas putida KT2440
  CDS (1)..(519): transl_table=11
atgagcctacccaatcccgccgagctgatccggcagatggctgtcgaccttcgtgcccacctggcgcgccgggcaatcaccgagccccgttacatcggtatccgcaccggcggcgtctgggttgcccaggccctgcaggatgccatgggcgacaccagcccaatgggcaccctggacgtgtcgttctaccgcgacgacttcagccagaacggcctgcacccacaagtgcgcccgtccgagttgccgttcgaggtcgaaggccagcacctggtgctggtggatgacgtgctgatgagcggtcgcaccatccgcgcggcgctcaacgaactgttcgattacggccgcccggccagcgtcaccctggtctgcctgctggacctggatgccggcgaactgccgattcgcccgaacgtgctcggcgccaccctgtcgctgggcgcccatgaacgggtaaaattgaccggacccgcaccgctcgccctcgagcgccaggacctcgcctccgcttccgccctttaa

SEQ ID NO: 106931 - protein, 172 aa, Pseudomonas putida KT2440
MSLPNPAELIRQMAVDLRAHLARRAITEPRYIGIRTGGVWVAQALQDAMGDTSPMGTLDVSFYRDDFSQNGLHPQVRPSELPFEVEGQHLVLVDDVLMSGRTIRAALNELFDYGRPASVTLVCLLDLDAGELPIRPNVLGATLSLGAHERVKLTGPAPLALERQDLASASAL

SEQ ID NO: 106932 - DNA, 579 bp, Streptomyces avermitilis MA-4680
  CDS (1)..(579): transl_table=11
atggacacccagcagtacgagtccgatgcgcggcccgttctcgaaggctccgacatcgcgcgggtactgacccgcatcgcccacgagatcgtcgagcgcgccaagggcgccgacgacgtggtgctcctcggcattccgacccgaggcgtcttcctcgcccagcggctcgccgccaagctcgaggagatcaccgaccgcaaagtgccggtcggctcgctcgacatcaccatgtaccgcgacgacctgcgcatgcatccgccgcgtgcgctggcccgcacggacatccccggtgacggcatcgacggccgcctggtcgtcctcgtcgacgacgtcctcttctccggccgcaccatccgcgccgccctcgacgcgctgaacgacatcggccgcccgcgcgccgtacagctcgcggtcctcgtcgaccgcggtcaccgcgaactgcccatccgcgccgactacgtcggcaagaacctccccacgtcgttgcgggagacggtcaaggtcctgctcgccgaggaggacggtcgcgacaccgtgctgctcggtgcgaagcggacctcctcgggcgcgcagcagtag

SEQ ID NO: 106933 - protein, 192 aa, Streptomyces avermitilis MA-4680
MDTQQYESDARPVLEGSDIARVLTRIAHEIVERAKGADDVVLLGIPTRGVFLAQRLAAKLEEITDRKVPVGSLDITMYRDDLRMHPPRALARTDIPGDGIDGRLVVLVDDVLFSGRTIRAALDALNDIGRPRAVQLAVLVDRGHRELPIRADYVGKNLPTSLRETVKVLLAEEDGRDTVLLGAKRTSSGAQQ

SEQ ID NO: 106934 - DNA, 546 bp, Prochlorococcus marinus subsp. marinus str. CCMP1375
  CDS (1)..(546): transl_table=11
atgacagatcagaatacccctgagagggtggagatactttcaaaagaagagttagatcgaactcttacaagacttgcatctcaaatcctagagaatatttctgatagcaataagcttttgctattaggtattcccacaaggggtattcaacttgcggaagttttggcaagtgagttgcagagtaaaacaggtcataaaatcgaacaagggactattgaccccactttttatagagatgatctagcccgtgtaggaacaagaatgtcgcctgctactgaaatttcatccagcctagaaggacgtcaagttgttttagttgatgatgtgatttttaccgggagaactgtgcgagctgctcttgaatcacttcaagcttggggccggccacaacgagtaatgcttttagttatggttgatagaagtggacatagggaattaccaattcagcccgatttttgtggtcggcaagtgcctactagaagaactgaatcaattgaactaagacttaaagagattgatggagaggaaggagtctttttagaatag

SEQ ID NO: 106935 - protein, 181 aa, Prochlorococcus marinus subsp. marinus str. CCMP1375
MTDQNTPERVEILSKEELDRTLTRLASQILENISDSNKLLLLGIPTRGIQLAEVLASELQSKTGHKIEQGTIDPTFYRDDLARVGTRMSPATEISSSLEGRQVVLVDDVIFTGRTVRAALESLQAWGRPQRVMLLVMVDRSGHRELPIQPDFCGRQVPTRRTESIELRLKEIDGEEGVFLE

SEQ ID NO: 106936 - DNA, 543 bp, Prochlorococcus marinus subsp. pastoris str. CCMP1986
  CDS (1)..(543): transl_table=11
atgtccaaaccagataaaaaaatcataatacttactgaagatgagctaagaaaaactttctctagactaactttcgaaattatagaaaagatctcaaatttagaaaatctcttattggttggtatccctacgagaggagttcatctcgctgaagttttgagaaaagaaatgttggataaaacaggcgttgatgtaaaaaaaggaataattgacccaactttttatagagatgatcaaaatagagttggaactcgtttaatagaggcaactgattttcctacatctatagaaaaaaaagatattgttttaattgatgatgtcatttatacaggaagaacaattcgagctgcaattgaggctcttcttttatggggaagaccaaaaagtattatgttattggtaatgattgatagaggtcatagagaattaccaattcagcctgatttttgcggaagaaaagttccgactagcaaaaaggaaattgtttatttaagtttaaaagaagttgatggagaagatggtgtctacttggataaaatttaa

SEQ ID NO: 106937 - protein, 180 aa, Prochlorococcus marinus subsp. pastoris str. CCMP1986
MSKPDKKIIILTEDELRKTFSRLTFEIIEKISNLENLLLVGIPTRGVHLAEVLRKEMLDKTGVDVKKGIIDPTFYRDDQNRVGTRLIEATDFPTSIEKKDIVLIDDVIYTGRTIRAAIEALLLWGRPKSIMLLVMIDRGHRELPIQPDFCGRKVPTSKKEIVYLSLKEVDGEDGVYLDKI

SEQ ID NO: 106938 - DNA, 552 bp, Prochlorococcus marinus str. MIT 9313
  CDS (1)..(552): transl_table=11
atgatcgacaaaggtagtgatgaacgggttgagatcctctctgaacaggagctcggtcgcaccctttcgcgccttgcttctcaagtactcgagtctgttgctgatagccgggagcttttgttcctgggaattcctacgcgaggggtgcatctgtctcgtgtcttggccaaagagttggaacccattgctggccatagcattgatcagggaagtttggaccccacctttcatcgtgatgatctgggtcgagtcggtactcggatggtgcaacccaccgatctccccaacagcgttgaggggcgagaggttgtgttggtggatgatgtgatttttaccggacgcacagtgcgcgctgctcttgaagctcttcaggcctggggcaggcctcagcgggtgatgctgttggtgatggtggatcgcgggcatcgggaagtgccgattcaaccagatttctgtggtcgcaaagttccgactcgtcgcacggaaagcatcgaattgcgcctctctgatgtggatggagaagagggtgtttacttgcgccagttgccttga

SEQ ID NO: 106939 - protein, 183 aa, Prochlorococcus marinus str. MIT 9313
MIDKGSDERVEILSEQELGRTLSRLASQVLESVADSRELLFLGIPTRGVHLSRVLAKELEPIAGHSIDQGSLDPTFHRDDLGRVGTRMVQPTDLPNSVEGREVVLVDDVIFTGRTVRAALEALQAWGRPQRVMLLVMVDRGHREVPIQPDFCGRKVPTRRTESIELRLSDVDGEEGVYLRQLP

SEQ ID NO: 106940 - DNA, 777 bp, Synechococcus sp. WH 8102
  CDS (1)..(777): transl_table=11
atggcgttgtgttcgctgtcgttgcggtgtccccagccatccagaatggtgagaacgactggggctacacccacgtcacgtcctgaacccttgccactgctctggtccacgtaccccccgcgctcgtcggttcttaaggacttttgcagattcaacctaacgctccatggggcgccaggctcgtctttccagagatcaccacaccgtcaccgcttcatgacagaaccgccggacaccgatcgggttgagattctttcggaacgggaactgggccggaccctggcccgcctggccacccaggtgctggaaaccgtggatgacagccgcaccctgatgcttctgggcatccccacccgcggggttcagttgtccaaggtgctggcccgagagctggagcggctcagcggccatgccattgcccaaggcgccatcgatcccacctttcaccgggatgatctggagcggatcggcacacgcttaccccagatcaccaccctgcctaacagcgttgaaggccgccaggtggtgctggtggacgatgtgatcttcaccggacgaacggtgcgggccgcccttgaagcgttacagagctggggacgcgctcagcgggtgatgctgctggcaatggtggatcgcggccatcgggagctgccgattcagccggatttctgtggccgcgtggtgccaacccgccgcagtgaaacgatcgaactgcgcttgcgggatgtggacggggaggaaggggtcttcttgaggcggatcacccggccgtcgtga

SEQ ID NO: 106941 - protein, 258 aa, Synechococcus sp. WH 8102
MALCSLSLRCPQPSRMVRTTGATPTSRPEPLPLLWSTYPPRSSVLKDFCRFNLTLHGAPGSSFQRSPHRHRFMTEPPDTDRVEILSERELGRTLARLATQVLETVDDSRTLMLLGIPTRGVQLSKVLARELERLSGHAIAQGAIDPTFHRDDLERIGTRLPQITTLPNSVEGRQVVLVDDVIFTGRTVRAALEALQSWGRAQRVMLLAMVDRGHRELPIQPDFCGRVVPTRRSETIELRLRDVDGEEGVFLRRITRPS

SEQ ID NO: 106942 - DNA, 531 bp, Gloeobacter violaceus PCC 7421
  CDS (1)..(531): transl_table=11
atgagtcgcgagcctgtcgagatcctctccgccgccgagttgcgacgcacgctccagcggcttgccacccaaattatcgagaacaaccgcggtgtagaagatctggtgctgttgggcatctacacgcggggggtacccctggccgaacggctcggtcggctcatcgacggcctggagaacaccagcgtgccggtgggtgccctcgatatcaccctctaccgcgacgatctgcgcgacatcggtgtcaggcccctcagccgcagcgaaatcccctgcgacgtcaccgagcgcaacgtctatcttgtcgacgatgtcatctaccggggacgcaccgtgcgcgccgccctcgacgcgctcaccgactacggccgtcccgccgccattcgcctcgcggtcctcgtcgatcgcggctggcgggatctgcccatccacccggatctggtgggccgccaattgcccaccgcccgccacgaacaggtcaaggtgctgctcgaagagatcgacggccgcgacggcgtgctgctgtactga

SEQ ID NO: 106943 - protein, 176 aa, Gloeobacter violaceus PCC 7421
MSREPVEILSAAELRRTLQRLATQIIENNRGVEDLVLLGIYTRGVPLAERLGRLIDGLENTSVPVGALDITLYRDDLRDIGVRPLSRSEIPCDVTERNVYLVDDVIYRGRTVRAALDALTDYGRPAAIRLAVLVDRGWRDLPIHPDLVGRQLPTARHEQVKVLLEEIDGRDGVLLY

SEQ ID NO: 106944 - DNA, 573 bp, Corynebacterium diphtheriae NCTC 13129
  CDS (1)..(573): transl_table=11
atgagtgaaaacaatggcgacaatatcgaacttctttcggaaaacgatgttgctcgtactattgcacgcatcgcgcaccaaattattgaaaaaactgcgctcgacgcaccaggtacaaagcccgttttgctgctcggtattccttctggtggagtgcctatcgcgtctcaaattgcgcagaaaatcaaagaatttaccggagttgatgtcccggttggttcactagatgtaaccctgtaccgtgacgatctgagaaaaaatccccatcgtgcgttacagccaactaacctcccgctagatggaataaatgggcatcatattattttggtagatgatgttctttattctggccgcacaattcgtgccgctcttgatgcacttcgcgatatcggtcgaccagatattattcagctcgctgtattggtggataggggccaccgacagttgcctatccgcgcagattatgttggcaagaatttgcctacttctcgtggcgaagatgttcaagtgtttatcaaagaaattgatggccgaacagccgttgtcttaactcgtggcacggaggaagcatag

SEQ ID NO: 106945 - protein, 190 aa, Corynebacterium diphtheriae NCTC 13129
MSENNGDNIELLSENDVARTIARIAHQIIEKTALDAPGTKPVLLLGIPSGGVPIASQIAQKIKEFTGVDVPVGSLDVTLYRDDLRKNPHRALQPTNLPLDGINGHHIILVDDVLYSGRTIRAALDALRDIGRPDIIQLAVLVDRGHRQLPIRADYVGKNLPTSRGEDVQVFIKEIDGRTAVVLTRGTEEA

SEQ ID NO: 106946 - DNA, 534 bp, Geobacter sulfurreducens PCA
  CDS (1)..(534): transl_table=11
gtggcagacggaacggtgattcttgacacggctggggtgaaacgggcgctgacccgcatcgcccacgaaatcctggaacgtaacaagggggtcgacggcctggtgctggttggcatcaggaccggcggtgtccatctggcgcgggagatcgtcgcgcggctcgaagagatcgagggtgctaccgtgccggtgggagaggtggatatcaccctctatcgtgacgatttcaaggggcatgctccccatctgccggttggcaagaccgacattcccttctccctcgaaaccaagagggtggttctggtcgacgacgtcctctttaccggccgcaccattcgtgccgccatggacgccatcatggaccacggtcgccccgcctgcatccaactggccgtcctcgtggaccgcgggcaccgtgaactgccgatccgggccgacttcgtgggccgcaacgtacccaccagtctcaaggagaagatcgcggtcctgttcgatgcagccaaccggcccactgatgttgtgctggagaagtga

SEQ ID NO: 106947 - protein, 177 aa, Geobacter sulfurreducens PCA
MADGTVILDTAGVKRALTRIAHEILERNKGVDGLVLVGIRTGGVHLAREIVARLEEIEGATVPVGEVDITLYRDDFKGHAPHLPVGKTDIPFSLETKRVVLVDDVLFTGRTIRAAMDAIMDHGRPACIQLAVLVDRGHRELPIRADFVGRNVPTSLKEKIAVLFDAANRPTDVVLEK

SEQ ID NO: 106948 - DNA, 567 bp, Lactobacillus johnsonii NCC 533
  CDS (1)..(567): transl_table=11
atgggcaaaatcaggaggaaaaatatggcaaaggaaatttgggatgcactcgcaatgaagcgtgcattaactcgaattacttatgaaattattgagcaaaataagggtactgataatcttgttttaattggaatcaagacaagaggagtttatttagccaagagaattcatgaacgaattcaaaaattagaaaatgttgatgtgccaatcgatgagctagatattactctttatcgtgatgatcgtcatgatgcttcattaaaacaagatccagtagtcaattctaaccaaattgacgttgatattaccgataagaaagtaattttaattgacgatgtaatctatactgggcgaacaattagagcagcgatggatgctttgatggatgatggacgccctagttcaattaaagttgcagttttggtagatcgcggtcaccgtgaattaccaattagagctgactttgtcggtaagaatatcccaactgcagctaacgaacaagttgctgttaacatggtagaaaaagatggtaaggattcagttgaactgaaatctctatcaaaataa

SEQ ID NO: 106949 - protein, 188 aa, Lactobacillus johnsonii NCC 533
MGKIRRKNMAKEIWDALAMKRALTRITYEIIEQNKGTDNLVLIGIKTRGVYLAKRIHERIQKLENVDVPIDELDITLYRDDRHDASLKQDPVVNSNQIDVDITDKKVILIDDVIYTGRTIRAAMDALMDDGRPSSIKVAVLVDRGHRELPIRADFVGKNIPTAANEQVAVNMVEKDGKDSVELKSLSK

SEQ ID NO: 106950 - DNA, 543 bp, Bacillus cereus ATCC 10987
  CDS (1)..(543): transl_table=11
  misc_feature (37)..(37): w is a or t
atgcaagagaaagctgtcgttttagatgaccaaatgwttcgccgcgctttaacacgaattagtcatgaaatcgtggaacgaaataaaggtgtcgataattgtgttcttgtcggaattaaaactcgtggaatttttattgcacaacgtttggcagaacgaattggtcaaattgaaggaaaagaaatagaagttggagagctagacattacgttatatcgtgatgatttaacgctacaatcgaaaaataaagaaccacttgtaaaaggttctgatatccctgtagatattacgaagaaaaaagttatccttgtagatgatgtattatatacaggcagaacagttcgagcagcaatggatgctctgatggatttaggtagaccatcacaaatccaattggcggttcttgttgatagaggtcatcgtgaactaccaattcgcgctgattatgtaggaaagaacattccaacatcaagtgaagagcgtatcgaagttgatttgcaagagacagatcaacaagatcgagtaagcatatacgataagtaa

SEQ ID NO: 106951 - protein, 180 aa, Bacillus cereus ATCC 10987
  misc_feature (13)..(13): The Xaa at location 13 stands for Ile, or Phe.
MQEKAVVLDDQMXRRALTRISHEIVERNKGVDNCVLVGIKTRGIFIAQRLAERIGQIEGKEIEVGELDITLYRDDLTLQSKNKEPLVKGSDIPVDITKKKVILVDDVLYTGRTVRAAMDALMDLGRPSQIQLAVLVDRGHRELPIRADYVGKNIPTSSEERIEVDLQETDQQDRVSIYDK

SEQ ID NO: 106952 - DNA, 540 bp, Prochlorococcus marinus str. AS9601
  CDS (1)..(540): transl_table=11
atgtccaagaaaacaaaaaaaatcgtaatactttctgaagttgagcttagaaagaccgtttcacgtctaacttccgaaattatcgaaaaagtaaataacctggataaccttctattggttggtatcccgactagaggaattgagttggccgaagttcttgaaaaagaattattcttaaaaacaggtttaagagttagcaaaggaacaattgatccaactttttatagagatgaccaaaatagagttggaactcgtttaataaaaattactgatattccaactcctattgaaaaaaaagaaattcttttaatagatgatgtaatttacacaggaagaacaattagagctgctatggatgctttatattcttggggcagacctcaaagagttatgttattagtaatggtagatagaggtcatagagaattacctattcaaccagatttttgtggtaaaaaagtgcctactagtaaaattgaaagtattagtttacgtttaaatagagttgataatgaagaaggagtcttcttgaatagctag

SEQ ID NO: 106953 - protein, 179 aa, Prochlorococcus marinus str. AS9601
MSKKTKKIVILSEVELRKTVSRLTSEIIEKVNNLDNLLLVGIPTRGIELAEVLEKELFLKTGLRVSKGTIDPTFYRDDQNRVGTRLIKITDIPTPIEKKEILLIDDVIYTGRTIRAAMDALYSWGRPQRVMLLVMVDRGHRELPIQPDFCGKKVPTSKIESISLRLNRVDNEEGVFLNS

SEQ ID NO: 106954 - DNA, 534 bp, Clostridium difficile 630
  CDS (1)..(534): transl_table=11
atggtagaaaaagctcaattaatggatgaaaaggcaatagcaagagcaattactagaataagtcatgaaataattgaaagaaataaaggtgtagaaaatctagttttagttggaataaagactagaggtgtgccaattgcaaatagaatttctaagaaaatagaacaaatagaaggaacaaaagtagatacaggagatattgatataactttgtatagagatgatttggaaaaaattcatgttgaacctgtagttaaaggaacttatttagattttaatgtaaatgataagacagtagttttagttgatgatgttttatacactggaagaactgtgagagcttcactagatgctattatagatataggaagacctaaatcaatacaattagcagtgctagtggacagagggcatagagagttgcctataagagcagattatgtaggaaaaaatgtacctacttctagacatgaaattatatctgtcagtttattagaaattgatggagaagattcagttacaatcaaagaataa

SEQ ID NO: 106955 - protein, 177 aa, Clostridium difficile 630
MVEKAQLMDEKAIARAITRISHEIIERNKGVENLVLVGIKTRGVPIANRISKKIEQIEGTKVDTGDIDITLYRDDLEKIHVEPVVKGTYLDFNVNDKTVVLVDDVLYTGRTVRASLDAIIDIGRPKSIQLAVLVDRGHRELPIRADYVGKNVPTSRHEIISVSLLEIDGEDSVTIKE

SEQ ID NO: 106956 - DNA, 522 bp, Streptococcus pyogenes str. Manfredo
  CDS (1)..(522): transl_table=11
atgaaaactaaggaaattgttgatgacgtgaccatgaaacgcgccattacccgtattacttatgaaattatcgaacgcaacaaacaattagacaatgtggttttggcaggaatcaaaacgcgaggtgtttttttagcccgtcgtattcaagaaagactgcatcaattagaagggttggatttaccaattggtgagttagacatcaagccttttagagatgacatgagagttgaggaagacacaactctcatgtcagtagatattacaggcaaggatgtgattttgattgatgatgtgctttatactggtcgtaccatccgcgcagccatcgataacttagtgagtttaggtcgaccagcccgtgttagtttagctgttttagtcgatcgtggtcatcgggaattgccgattcgtgcggattatgtcggaaagaatattccgactagcagcgtggaagaaattgttgttgaggttgtcgaagttgatggccgtgatcgcgttagcattgttgacccaacataa

SEQ ID NO: 106957 - protein, 173 aa, Streptococcus pyogenes str. Manfredo
MKTKEIVDDVTMKRAITRITYEIIERNKQLDNVVLAGIKTRGVFLARRIQERLHQLEGLDLPIGELDIKPFRDDMRVEEDTTLMSVDITGKDVILIDDVLYTGRTIRAAIDNLVSLGRPARVSLAVLVDRGHRELPIRADYVGKNIPTSSVEEIVVEVVEVDGRDRVSIVDPT

SEQ ID NO: 106958 - DNA, 561 bp, Synechococcus sp. WH 7803
  CDS (1)..(561): transl_table=11
atggggacgggcggccatgatgaacggatcgagattctttcgtccgacgaactgagaagaacgttgatgcgcctggcctctcaagtgcttgagagcgttggtgggcttgatgatctcgtcttgctcggcatcccgacgcggggtgtccagctggctgcggttttggcgcgtgctctggaagaacaagctggtcggccggtggccagaggaaccttggatcccacctttcacagggacgatctcgagcgcgtggccatgcgaccggtgacaggcaccgaccttcctgtgggtgtggaagggcgggatgtggtgcttgtggatgacgtgattttcaccggtcgtacggtgagagcggcgcttgaggcgattcaggcctggggacgtccccgcagggttctgctgttggtgatggtggatcgcggacatcgcgaactgccgattcagcctgatttctgtgggcgcaccgttccgacgcgtcgctgtgaaacgatcgaactgcgtctgatggacgtggatggtgaagaaggggtgtttctgcgcagaactcaggacgcaacctga

SEQ ID NO: 106959 - protein, 186 aa, Synechococcus sp. WH 7803
MGTGGHDERIEILSSDELRRTLMRLASQVLESVGGLDDLVLLGIPTRGVQLAAVLARALEEQAGRPVARGTLDPTFHRDDLERVAMRPVTGTDLPVGVEGRDVVLVDDVIFTGRTVRAALEAIQAWGRPRRVLLLVMVDRGHRELPIQPDFCGRTVPTRRCETIELRLMDVDGEEGVFLRRTQDAT

SEQ ID NO: 106960 - DNA, 537 bp, Desulfovibrio vulgaris subsp. vulgaris str. Hildenborough
  CDS (1)..(537): transl_table=11
atgcaatccactgttatcctcgaccacgacgccatggggcgtaccatcgaacgcctcgcctatcaggtcctcgaacggcatggcgactgctcctctctgatgcttgtgggcatacggcggcgtggtgtcgacattgccgggcgccttggcaaggtgctggccgaccgtctcggttgtgcgcctccagaaggtgctctcgacatcaatctctatcgcgatgactggacgaccctatcaggcaagcccgccataggtcagtcgtcgatgccgtgcgaccttgaagggcgcgatgtgctgctggtcgacgatgtgctcttcactggacgcaccattcgggcggcactcgaagcccttctcgattatggcagaccgcggcgcgtcgagcttctcgtgctcatcgaccgaggccatcgtgagttgcccatccatgccgactatgtcggcaaggtcgttcctacctcgcgtacggagcaggtggatgtgttgctcgccgagcacgatggatgcgacgaggtgcgtctgtcgcatatggcatga

SEQ ID NO: 106961 - protein, 178 aa, Desulfovibrio vulgaris subsp. vulgaris str. Hildenborough
MQSTVILDHDAMGRTIERLAYQVLERHGDCSSLMLVGIRRRGVDIAGRLGKVLADRLGCAPPEGALDINLYRDDWTTLSGKPAIGQSSMPCDLEGRDVLLVDDVLFTGRTIRAALEALLDYGRPRRVELLVLIDRGHRELPIHADYVGKVVPTSRTEQVDVLLAEHDGCDEVRLSHMA

SEQ ID NO: 106962 - DNA, 543 bp, Bacillus thuringiensis serovar konkukian str. 97-27
  CDS (1)..(543): transl_table=11
atgcaagagaaagctgtcgttttagatgaccaaatgattcgccgcgctttaacacgaattagtcatgaaatcgtggaacgaaataaaggtgtcgataattgtgttcttgtcggaattaaaactcgtggaatttttattgcacaacgtttggcagaacgaattggtcaaattgaaggaaaagaaatagaagttggagagttagacattacgttatatcgagatgatttaacactacaatcgaaaaataaagaaccacttgtaaaaggttctgatatccctgtagatattacgaagaaaaaagttatccttgtggatgatgtattatatacaggcagaactgttcgagcagcaatggatgctcttatggatttaggtagaccatcacaaatccaactagcggttcttgttgatagaggtcatcgtgaactaccaattcgcgctgattatgtaggaaagaacattccaacatcaagtgaagagcgtatcgaagttgatttgcaagagacagatcaacaagatcgagtaagcatatacgataagtaa

SEQ ID NO: 106963 - protein, 180 aa, Bacillus thuringiensis serovar konkukian str. 97-27
MQEKAVVLDDQMIRRALTRISHEIVERNKGVDNCVLVGIKTRGIFIAQRLAERIGQIEGKEIEVGELDITLYRDDLTLQSKNKEPLVKGSDIPVDITKKKVILVDDVLYTGRTVRAAMDALMDLGRPSQIQLAVLVDRGHRELPIRADYVGKNIPTSSEERIEVDLQETDQQDRVSIYDK

SEQ ID NO: 106964 - DNA, 552 bp, Leifsonia xyli subsp. xyli str. CTCB07
  CDS (1)..(552): transl_table=11
gtggtgacacgtgtcgtgttgcagcaggctgacatctcccgggcgttgactcggatctcgcacgagattctggagtccaaccggggcatcgacggtctggcgatcctgggtatcccgacgcgcggcgtcgtgctcgcccggaggatcgccgagagcatccagcggatcgagcaggaggcggtcggggcgtccgctgacatcgtgggggcgctcgatgtgaccatgtatcgcgacgatctggcgcggaaccccacgcgggccccgcagccgacctcgctgccggggccgatcgacggcaagaccgtggtgttggtggacgatgtgctcttctccgggcgcaccatccgggcggcgttggatgcgctgagcgatctggggcggccgcgggcggtccggttggcggtgctggtggatcgggggcatcgggagctgccgatccgggcggacttcgtggggaagaacctgccctccgccgcgtcggagcggatcttcgtgcggttcgcggaggtggacggccaggacgctgtgacaatcgaggagggtggcgcatga

SEQ ID NO: 106965 - protein, 183 aa, Leifsonia xyli subsp. xyli str. CTCB07
MVTRVVLQQADISRALTRISHEILESNRGIDGLAILGIPTRGVVLARRIAESIQRIEQEAVGASADIVGALDVTMYRDDLARNPTRAPQPTSLPGPIDGKTVVLVDDVLFSGRTIRAALDALSDLGRPRAVRLAVLVDRGHRELPIRADFVGKNLPSAASERIFVRFAEVDGQDAVTIEEGGA

SEQ ID NO: 106966 - DNA, 537 bp, Desulfotalea psychrophila LSv54
  CDS (1)..(537): transl_table=11
atgagagagcagaagcgaattttgatgcaggcccaggatattgatatggctcttgagcgtatctctttgcaaattctggaaaaaaacaaaaacagagagcatcttgctgttattgggattcatacctgtggtgtccacctcggtcgccgtattcatgccctgctctccgaaaaacttggccgtaagattccctttggtagtctcgatattaatctgtatcgtgatgactggagtcttgtcagtcaaaatcccgtggttaagaccaccaatctgccctttgaggttgatggtactactattattcttgtcgatgatgtgatcttctctggcaggactgtccgggcggggatggatgctatttttgattacggcagaccggcaagtctgcagttggcgacccttattgatcggggtgaacgcgagttacccatctctcccgactatgtgggaatggctacggagatactgcctcaggagcgtatcgaggtggttgtggatggggagaacaactgtattgaggtggtggtggaaagttaa

SEQ ID NO: 106967 - protein, 178 aa, Desulfotalea psychrophila LSv54
MREQKRILMQAQDIDMALERISLQILEKNKNREHLAVIGIHTCGVHLGRRIHALLSEKLGRKIPFGSLDINLYRDDWSLVSQNPVVKTTNLPFEVDGTTIILVDDVIFSGRTVRAGMDAIFDYGRPASLQLATLIDRGERELPISPDYVGMATEILPQERIEVVVDGENNCIEVVVES

SEQ ID NO: 106968 - DNA, 552 bp, Symbiobacterium thermophilum IAM 14863
  CDS (1)..(552): transl_table=11
gtgaccaagcctgagcccaaggcgatcctgatggacgccaaccagatgcggagggcgctgtcccgcatcgcccacgagatcatcgagcggaacaaggggacggaacacgtggccctggtgggcatccgccgccggggcatccccctggcgcagcggctggccgagcggctgaaggagttcgaaggccgggacgtgcccgtaggcagcctggacatcaccctgtaccgggacgacctgacggagctgggcaccctgccggtggtccacaagagcgaggtcaacttcacgctgcccggccgggtggtggtgctggtcgacgacgtgatctacaccggccgcacggtccgggcggccctggacgcgctgctggacatcggccggccgtccgccatccagctcgcggtcctggtggaccgcggccatcgggagctgcccatccggcctgactacgtcggcaagaacgtgcccacttcccgccgggagcgggtggaggtcaacgtggtggagatcgacggcgaggattacgtcgccctcttcgacaacgaggggtag

SEQ ID NO: 106969 - protein, 183 aa, Symbiobacterium thermophilum IAM 14863
MTKPEPKAILMDANQMRRALSRIAHEIIERNKGTEHVALVGIRRRGIPLAQRLAERLKEFEGRDVPVGSLDITLYRDDLTELGTLPVVHKSEVNFTLPGRVVVLVDDVIYTGRTVRAALDALLDIGRPSAIQLAVLVDRGHRELPIRPDYVGKNVPTSRRERVEVNVVEIDGEDYVALFDNEG

SEQ ID NO: 106970 - DNA, 540 bp, Mannheimia succiniciproducens MBEL55E
  CDS (1)..(540): transl_table=11
atggaaaaaattattatcgatgaaagtcagttcatgcgcacaatttctcgtatttcccatgagatcattgaaaaacatcagaatttaaatgatctcgtgatcgtgggaatcaagcgtcgcggtgccgaaatcgccgatctgattaagcgtaaaatcaatgaattgagcgggcaaagtctgccttcgattgatcttgatatcaccttttatcgtgatgatttagagtatgtggaacctgccagtcagtcgccggtatatagcggcgcatcggaatttatcagcgtacaaaataaaacggtgattcttattgacgacgtattattcaccggtcgcaccattcgtgccgcgttagacgctttggtggattttggtcgggcggcaaaggtcgaattagtgatttttgtggatcgcgggcatcgcgaattgccgattcgtgccgattatgtgggaaaaaacgtaccgaccagccgtagtgaaaaagtacaagtacgtactatgaagtttgacggttgctacgaagtggcgcttatttcaaaataa

SEQ ID NO: 106971 - protein, 179 aa, Mannheimia succiniciproducens MBEL55E
MEKIIIDESQFMRTISRISHEIIEKHQNLNDLVIVGIKRRGAEIADLIKRKINELSGQSLPSIDLDITFYRDDLEYVEPASQSPVYSGASEFISVQNKTVILIDDVLFTGRTIRAALDALVDFGRAAKVELVIFVDRGHRELPIRADYVGKNVPTSRSEKVQVRTMKFDGCYEVALISK

SEQ ID NO: 106972 - DNA, 549 bp, Bacillus licheniformis ATCC 14580
  CDS (1)..(549): transl_table=11
atgcaagagcaggaaaaggctgttgtgcttgacgaacaggcgatcagaagggcgctgacaagaatcgcccacgaaatgattgaacgaaacaaaggaatgaacaactgtatccttgtcggaatcaaaacgagaggcatctatctggccaaacggcttgccgaacggattgagcaaatcgaaggaaacaaagtcaccgtaggagagctggacatcaccctttaccgggatgatctctccaaaaaaacgtccaataaagagccgcttgtcaaaggagcggacattccggcggacatcaccgatcaaaaggtgatcctcgtcgatgacgtgctttacacgggacggacggtcagagcggccatggatgcgctcgtcgatgtcgggcggccttcatccatccagcttgcggtgcttgtcgaccgcggccacagagagctgccgatcagagccgactttatcgggaaaaacatcccgacgtcgaaaaccgaaaaggtcatggttcaattggaggaagttgacggacgcgaccttgcggcgatttataaaaagtga

SEQ ID NO: 106973 - protein, 182 aa, Bacillus licheniformis ATCC 14580
MQEQEKAVVLDEQAIRRALTRIAHEMIERNKGMNNCILVGIKTRGIYLAKRLAERIEQIEGNKVTVGELDITLYRDDLSKKTSNKEPLVKGADIPADITDQKVILVDDVLYTGRTVRAAMDALVDVGRPSSIQLAVLVDRGHRELPIRADFIGKNIPTSKTEKVMVQLEEVDGRDLAAIYKK

SEQ ID NO: 106974 - DNA, 513 bp, Methylococcus capsulatus str. Bath
  CDS (1)..(513): transl_table=11
atgaaccaagcggatttcgacgtcgaaacgctgctggcgcgcctggagaactccctgcgtgaggaactcgccaggcgccggctcgacgatccggccatgatcggtgtccataccggcggggcctggatcgccgaagtcctgcatcggcgtttgggattgtccgagccgctagggtatctggacatctcgttctaccgggacgattacccgcaatcgggcatgaatccggacgtgcgggcgagcaagctgccgttccgggtcgacggccgcaacatcgtgctgatcgacgacgtgctgtacaccggccgtaccgtgcgcgccgcactgaacgagatcttcgattacggccggcccgcggagattgtgctcggtgtgctgatcgaccgtaacggccggcagattccgatccaggccgattgcatcggcggacgggtggagctggagccggggcggcgcatcaagctcaccggccccgagcctctgcaactgacgatgcgtgcgggggggcgatga

SEQ ID NO: 106975 - protein, 170 aa, Methylococcus capsulatus str. Bath
MNQADFDVETLLARLENSLREELARRRLDDPAMIGVHTGGAWIAEVLHRRLGLSEPLGYLDISFYRDDYPQSGMNPDVRASKLPFRVDGRNIVLIDDVLYTGRTVRAALNEIFDYGRPAEIVLGVLIDRNGRQIPIQADCIGGRVELEPGRRIKLTGPEPLQLTMRAGGR

SEQ ID NO: 106976 - DNA, 549 bp, Dehalococcoides ethenogenes 195
  CDS (1)..(549): transl_table=11
atggcacaaaaagtaatactgggcgccgaagatatccgccgcactctggcccgtattgcccatgaaatactggaaagaaaccattccagccgtgaccttgttattatcggcatgtatacccggggcgtacctctggcaaaccgcctggccgaaaatatcctccgctttgaagggctggaaataccggtggggacactggacttttcactctaccgtgatgaccttgattcccagcgtttccaccccaccatcaaaaatactgacatacctttcagcataaacaacaaaatagtggtactggtagatgacgtcctctttaccgggcgttccacccgggcggctatggatgccctgatagattacggacgccccaaagctatccagctggcagtgctggtagacagaggccaccgcgaactgccggtacgggcggattatataggcaagaatatacccagctcacgtgacgagaagataaaagtacgcctgaccgaaacagacggacgggacgaaatacttatactggataatgaagcaggtgaggtataa

SEQ ID NO: 106977 - protein, 182 aa, Dehalococcoides ethenogenes 195
MAQKVILGAEDIRRTLARIAHEILERNHSSRDLVIIGMYTRGVPLANRLAENILRFEGLEIPVGTLDFSLYRDDLDSQRFHPTIKNTDIPFSINNKIVVLVDDVLFTGRSTRAAMDALIDYGRPKAIQLAVLVDRGHRELPVRADYIGKNIPSSRDEKIKVRLTETDGRDEILILDNEAGEV

SEQ ID NO: 106978 - DNA, 636 bp, Corynebacterium glutamicum ATCC 13032
  CDS (1)..(636): transl_table=11
ttgcaaaattggacatcctttaacggaccgcacagagaggcggggaaggaggtcacgatgagcgaacgtaatagtgctgtactagaactccttaatgaggacgacgtcagccgtaccatcgcacgcatcgcgcaccagattattgagaaaaccgcgcttgattccaaagacgcggatcgggtcatgttgttaggtattccctcaggtggagtcccattggcccgtaggctcgctgaaaagatcgaagaattttccggcgtttcggtagataccggcgctgttgatatcaccttgtacagggatgatcttcgaaacaaaccacaccgcgcactgcagcccacctctattccagcaggtggtatcgataacaccaccgtgattttggtggatgatgtgctgttttccggtcgtaccatccgcgctgcacttgatgctttgcgcgacgttggacgccccaactacatccagttagctgtgttggttgaccgcggtcatcgccagctgcccattcgcgctgactatgtgggcaaaaatctccccaccgcacgcgcggaagacgtttccgtcatgcttacagaaatcgacggccgcgatgcagtcacgctcacccgagaagactctgaaggggattcctag

SEQ ID NO: 106979 - protein, 211 aa, Corynebacterium glutamicum ATCC 13032
MQNWTSFNGPHREAGKEVTMSERNSAVLELLNEDDVSRTIARIAHQIIEKTALDSKDADRVMLLGIPSGGVPLARRLAEKIEEFSGVSVDTGAVDITLYRDDLRNKPHRALQPTSIPAGGIDNTTVILVDDVLFSGRTIRAALDALRDVGRPNYIQLAVLVDRGHRQLPIRADYVGKNLPTARAEDVSVMLTEIDGRDAVTLTREDSEGDS

SEQ ID NO: 106980 - DNA, 624 bp, Thermobifida fusca YX
  CDS (1)..(624): transl_table=11
gtgcatgcccacaaccatgccggcggtgagcgaccagaccagcgacgagcggttctggaaggccccgagatctcccgggcgctgacccgcatcgcccacgagatcctcgaacgcaccaaagggggccacgacctcacccttctgggcatccgcaccggaggcgtgcccctcgcgcagcggctcgccgaacgcatcgaacgcgtcgaacagcgcccggtcccctggggcgccctcgacatcaccatgtaccgcgacgacctgcggctcgccccggcccgcgccctcggcagcaccgacattccccccgaaggcgtcgacgggcggaccgtagtcctcgtcgacgacgtgctcttctccggccgcacggtccgcgccgccctggacgccctcaacgacctgggacgcccgcgcgccgtgcaactggcggtcctcgtcgaccgcggccaccgggaactccccatccgcgccgactacgtggggaagaacctgcccacctcgctccgcgaaagcgtcaccgtgctgctcgaagaactccacgggcgcgacgcggtcctcatcggccccgccaagccccgtcccggagcgcccgagtccgccgcagccaccccgggaggagcacgctga

SEQ ID NO: 106981 - protein, 207 aa, Thermobifida fusca YX
MHAHNHAGGERPDQRRAVLEGPEISRALTRIAHEILERTKGGHDLTLLGIRTGGVPLAQRLAERIERVEQRPVPWGALDITMYRDDLRLAPARALGSTDIPPEGVDGRTVVLVDDVLFSGRTVRAALDALNDLGRPRAVQLAVLVDRGHRELPIRADYVGKNLPTSLRESVTVLLEELHGRDAVLIGPAKPRPGAPESAAATPGGAR

SEQ ID NO: 106982 - DNA, 543 bp, Anabaena variabilis ATCC 29413
  CDS (1)..(543): transl_table=11
atggctacgcctgtcaaagtggttgaaattctttccgccgaagacctccgccgtactttaacgcgattggcatctcaaattgttgaaagaacacgggatttatctcaattagtcctactaggtatttacactaggggcgtgccactagcggaactactagcacgtcaaattgaaaccctagaaggtattaatgtcggtgtaggagctttagacattaccttctatcgggacgaccttgaccaaattggtttacgaacgccagctaaaaccagcattacgctcgacttgactggaaaaacagttgttttggtagatgatgtcatctttaaaggacggacaattcgtgcagctttaaatgccgttaacgagtacggtaggccagaagtaattcgtctagcggtgttggttgacaggggtcatagggaagtccccatccatccagattttgttggtaagcagttacccacagcgaaagaagaagtggtcaaagtttatttacaagattgggatggcagagatgcggtggaattagttggttattaa

SEQ ID NO: 106983 - protein, 180 aa, Anabaena variabilis ATCC 29413
MATPVKVVEILSAEDLRRTLTRLASQIVERTRDLSQLVLLGIYTRGVPLAELLARQIETLEGINVGVGALDITFYRDDLDQIGLRTPAKTSITLDLTGKTVVLVDDVIFKGRTIRAALNAVNEYGRPEVIRLAVLVDRGHREVPIHPDFVGKQLPTAKEEVVKVYLQDWDGRDAVELVGY

SEQ ID NO: 106984 - DNA, 504 bp, Pseudomonas fluorescens PfO-1
  CDS (1)..(504): transl_table=11
atgagcctgcccaatcccgccgatctgatcagccagatggcgacccgcctcaaggcgcaccttgcccagcgtaatatcagcgaaccgcgttacatcggcatccgcaccggcggcgtctgggtcgcccaggccctgctcgcagagctgggtagcgacgcgccattgggcacgctggatgtttccttctaccgcgacgacttcagccagaacggcctgcacccgcaggtgcgcccgtccgccctgcccttcgaaatcgaaggccagcatctggtgctgatcgacgacgtactgatgagcggccggaccatccgcgccgccatgaacgaactgttcgactacggccgcccggccagcgtgacgctggtctgcctgctggacctggatgccggcgaactgccgatccgcccgaacgtggtcggcgcgaccctgtcgctggccgcccacgagcgggtcaagctgtccgggccggagctggccctcgaactgcaagaccttgccctttaa

SEQ ID NO: 106985 - protein, 167 aa, Pseudomonas fluorescens PfO-1
MSLPNPADLISQMATRLKAHLAQRNISEPRYIGIRTGGVWVAQALLAELGSDAPLGTLDVSFYRDDFSQNGLHPQVRPSALPFEIEGQHLVLIDDVLMSGRTIRAAMNELFDYGRPASVTLVCLLDLDAGELPIRPNVVGATLSLAAHERVKLSGPELALELQDLAL

SEQ ID NO: 106986 - DNA, 552 bp, Synechococcus sp. CC9605
  CDS (1)..(552): transl_table=11
atggccgaccctgaccggatcgaaattctttcggagcgtgagcttggtttgaccctggcgcggttggcgtctcaggtgcttgaaagtgccgaagacagccgtcgattgatgctgttggggatccccacccgtggtgttcagctgtccagggtgttggcacgtgaattggagcggttgacaggccatgccatctcccaggggtccattgatcccacgttccatcgcgatgatctggagcgcatcggcacccgtctgccccagctcacgactctgcccaccagcattgaagatcgtcaggtgatcttggttgacgatgtgatcttcacggggcgtacggtgcgtgccgcgttggaagcgatgcagagctgggggcggccgcaacgggtgatgctgttggcaatgatggatcgaggccatcgggagcttccgattcagcctgatttctgtggccgtgttgttcccacccggcgcagcgagactatcgagctgcgcctgagggatgttgatggtgaggagggggttttccttagccgaatcagtcggcagccttga

SEQ ID NO: 106987 - protein, 183 aa, Synechococcus sp. CC9605
MADPDRIEILSERELGLTLARLASQVLESAEDSRRLMLLGIPTRGVQLSRVLARELERLTGHAISQGSIDPTFHRDDLERIGTRLPQLTTLPTSIEDRQVILVDDVIFTGRTVRAALEAMQSWGRPQRVMLLAMMDRGHRELPIQPDFCGRVVPTRRSETIELRLRDVDGEEGVFLSRISRQP

SEQ ID NO: 106988 - DNA, 534 bp, Desulfovibrio desulfuricans G20
  CDS (1)..(534): transl_table=11
atgcagaaaaagtgcattctttcggcacaggacatagccagaacgcttgagcggctggcctgtgaggtacttgaacgccacggagacgcggacaatcttgctctggtgggcatccagcgccgcggggtggacatagcgggcagactgcgtggtcttttgtccgcccggctgggcagagaggttgctctgggcagtctggatatcaatctttaccgggatgactggaccagtctggacacccagcccatgatcaaccgcacggagctgccttttgccgtggatgacgcccggatagtgctggtggacgatgtgctctatacaggcagaaccatccgttccgcacttgaagctattcttgattacggccggccggagagggtcgagctgctggttctggtggacagagggcatagagagctgcctatacatgctgattatgtgggcaagtcactcacaacaggcagggacgagcaggtcaatgtccttgtgtcggagcgtgacggcgacgatgctgtgatgctgttgcgccgctag

SEQ ID NO: 106989 - protein, 177 aa, Desulfovibrio desulfuricans G20
MQKKCILSAQDIARTLERLACEVLERHGDADNLALVGIQRRGVDIAGRLRGLLSARLGREVALGSLDINLYRDDWTSLDTQPMINRTELPFAVDDARIVLVDDVLYTGRTIRSALEAILDYGRPERVELLVLVDRGHRELPIHADYVGKSLTTGRDEQVNVLVSERDGDDAVMLLRR

SEQ ID NO: 106990 - DNA, 540 bp, Synechococcus elongatus PCC 7942
  CDS (1)..(540): transl_table=11
atgagcccttctcaaatcgaattgctgtctgccgacgagcagcgccgcaccctcaatcgtctcgcttcgcagattgttgagagtgcccgacaggtcgatcgcctagtcttaatcgggattcatacccgaggcgtttatctggcagaaggactggcgcaagcgatcgcccagctcgaaggtcagccaatcgcctggggcagtttggacatcaccttctatcgcgatgacctcgatcgcatcggggctcgccaaccggagcgcagccgcatcccccaggacttatcgggttgcaccgtggttctggtcgatgacgtgatcttcaccggtcgaacgattcgcgccgccatggatgccttgaatgactacggccgccctgcgatcgtccgcctcgcagttctgatcgatcgcggcaatcgggaactaccgatccagcccgatttcgtcggcaaggttgtgccgacgcggcgcagtgagcgggtggaagtctacttccagtccgttgatggtcacgaaggggtggcactgatccggcccgactga

SEQ ID NO: 106991 - protein, 179 aa, Synechococcus elongatus PCC 7942
MSPSQIELLSADEQRRTLNRLASQIVESARQVDRLVLIGIHTRGVYLAEGLAQAIAQLEGQPIAWGSLDITFYRDDLDRIGARQPERSRIPQDLSGCTVVLVDDVIFTGRTIRAAMDALNDYGRPAIVRLAVLIDRGNRELPIQPDFVGKVVPTRRSERVEVYFQSVDGHEGVALIRPD

SEQ ID NO: 106992 - DNA, 567 bp, Moorella thermoacetica ATCC 39073
  CDS (1)..(567): transl_table=11
atggagctgatggttaaagccaggatcatggacgccgataagctgcgccgtaccctgacccgcatcgcccatgagatcctggagcgcaaccgcggcaccgagaatctggtcttgatcggcatccggcggcggggagtgcccctggcggaacgcctgcagaaactgatccgggagattgaaggagtagaggtgcccctggggattctggacatcaccctttatcgggacgatctcacgaccttaagcgtccagccagtcatccaccggacggaaatcccctttaatattaacggcaaaaaggtggtcctggtagatgacgttctctttaccggccgcaccctgcgggcggccctggatgcccttatcgacctgggccggccccagaacatccagctggcggtgatcatcgaccggggccaccgggaactgcccgttcgcgccgactatgtagggaaaaacgtcccgacttcacggaaagaggaaatagccgtccagctggtggaaatcgacggcgtggatcaggtattgatcagggaattacccgaagaagccgatgtcaatccttga

SEQ ID NO: 106993 - protein, 188 aa, Moorella thermoacetica ATCC 39073
MELMVKARIMDADKLRRTLTRIAHEILERNRGTENLVLIGIRRRGVPLAERLQKLIREIEGVEVPLGILDITLYRDDLTTLSVQPVIHRTEIPFNINGKKVVLVDDVLFTGRTLRAALDALIDLGRPQNIQLAVIIDRGHRELPVRADYVGKNVPTSRKEEIAVQLVEIDGVDQVLIRELPEEADVNP

SEQ ID NO: 106994 - DNA, 546 bp, Syntrophus aciditrophicus SB
  CDS (1)..(546): transl_table=11
atgatgacacccaaaaaagtggtcatggatgcagcggaaatcgaccgatctttgacccggatcgcctatgaaatcctggaaaaaaacaagggcgtagaagatctggttcttgtgggcatcagaaccggcggtgtttttctcgcggaacggctcaggagaaagattcttgatatcgagggcgcggaagttccttgcggcattctggatattactctttatcgcgatgatcttcttttggcgaataaaaagcccaagataaaaaaaacggacatccctttctctcttgataagaagaaagtgatccttgtcgacgatgttctctttaccggccgaacgatccgggcggccatggatgcccttattgactttggccgtcccaggtcgattcagcttgccgtcctgattgacagaggccatcgtgaactgccgatacgcgctgattttgtcggcgagaatcttccctctcttctctgggaggacatcagtgtcaacctgattgaaaaaaacggctgcgatgaagtggtcattgaggacagcggccattag

SEQ ID NO: 106995 - protein, 181 aa, Syntrophus aciditrophicus SB
MMTPKKVVMDAAEIDRSLTRIAYEILEKNKGVEDLVLVGIRTGGVFLAERLRRKILDIEGAEVPCGILDITLYRDDLLLANKKPKIKKTDIPFSLDKKKVILVDDVLFTGRTIRAAMDALIDFGRPRSIQLAVLIDRGHRELPIRADFVGENLPSLLWEDISVNLIEKNGCDEVVIEDSGH

SEQ ID NO: 106996 - DNA, 621 bp, Frankia sp. CcI3
  CDS (1)..(621): transl_table=11
gtggccccggctgccgcgagcgaccccgcatcgcgccgtcccggcaccgcccgggcagtactgtccgcagacgacatcacccggatcgtcagccggatggcgcatcagattctcgagaagacctccggtggcgccggggtcgtcctgctcggagtacccacccgaggggtaccccttgcgcaccggctggcacagcgggtgcaggccgtcgagggggtgcgtctcccggttggctcccttgacccgaccatgtaccgcgacgatctgcgactgcgcggcgtgcgtcccctcgaggtgaccgacattcccgagggtggtgtcgacggccgcgtggtgatcctcgtcgacgacgtcctctactccgggcgcacggtgcgggcggcgctggacgccttggccgcctacggccggccgcgtgccgtccagctcgcggtcctggtcgaccggggccatcgcgagctgccgatccgcgccgactacgtcgggaagaacatgccgacctcgcgccgggagtcggtggcagtccggctgcgggagatcgacggcgccgacggcgtgctgatcctctcggccgccgggggggacggcgccgacgacgcgccccccgggaaccagccatga

SEQ ID NO: 106997 - protein, 206 aa, Frankia sp. CcI3
MAPAAASDPASRRPGTARAVLSADDITRIVSRMAHQILEKTSGGAGVVLLGVPTRGVPLAHRLAQRVQAVEGVRLPVGSLDPTMYRDDLRLRGVRPLEVTDIPEGGVDGRVVILVDDVLYSGRTVRAALDALAAYGRPRAVQLAVLVDRGHRELPIRADYVGKNMPTSRRESVAVRLREIDGADGVLILSAAGGDGADDAPPGNQP

SEQ ID NO: 106998 - DNA, 552 bp, Desulfitobacterium hafniense Y51
  CDS (1)..(552): transl_table=11
ttggaaggaatcacaaagagcaagatccttgacgcggatggaattcgtcgggcgatcacccggatagctcatgaaattgtggaaaaaaataaagggaccgacggagtggtcttagtgggaatccgccggcggggtgttcctctggctgagcggattcagcagagaatcgaggaatttgaaggggttaagcttcctttgggaattctggatatcaccctatatcgggatgatttaagcctgattgatgttcagcctgtggttcatcagaccgaagtgccctttactattgaaggaaaaacagtggtcctggtggatgacgttctctacacgggacgtacagcccgggcggctctggatgccactatggacttagggcgggcggaaaaaatacagctggccgttctcgtggacaggggacatcgggaactcccgattcgcgcggattatgtggggaaaaacctgcctacctcaagacgtgagattgtctccgtctgcattcaggagattgatgagacggaagaggtccttttgctggagcgtgtggataagtaa

SEQ ID NO: 106999 - protein, 183 aa, Desulfitobacterium hafniense Y51
MEGITKSKILDADGIRRAITRIAHEIVEKNKGTDGVVLVGIRRRGVPLAERIQQRIEEFEGVKLPLGILDITLYRDDLSLIDVQPVVHQTEVPFTIEGKTVVLVDDVLYTGRTARAALDATMDLGRAEKIQLAVLVDRGHRELPIRADYVGKNLPTSRREIVSVCIQEIDETEEVLLLERVDK

SEQ ID NO: 107000 - DNA, 525 bp, Acidobacteria bacterium Ellin345
  CDS (1)..(525): transl_table=11
atgtcggcctccgagatcgagcgcacgctggtgcgtcttgcccacgaaattgtcgagaagaacaacggggtgcagaacctcgctctggtggggatacgccggcgtggcgttccgctggccgagcgggttgcgacgatcctcgagcgcattgagaagaccccggttccagtgggcacgctcgatatcaccctctaccgtgacgacctctctaccgtagacgcgaccccccaggtaaaaccgaaggcgttggagtgcgacatagtcggcaaggatgtcgtgctggtggacgatgtgctttacaccggacgcacgattcgcgccgcactggatgcgctgattgattgtgggcgtccgcggcgggtgcagttgctggtgctggtggaccgcggtcatcgcgagctgccgattgaagcgacgttcgtcggtcggcgcgtgcccactacagaagacgaagtggttgaggtgaagctacaggagctggatggctccgagaaagtgatgctggcggaacgcatcaacccatag

SEQ ID NO: 107001 - protein, 174 aa, Acidobacteria bacterium Ellin345
MSASEIERTLVRLAHEIVEKNNGVQNLALVGIRRRGVPLAERVATILERIEKTPVPVGTLDITLYRDDLSTVDATPQVKPKALECDIVGKDVVLVDDVLYTGRTIRAALDALIDCGRPRRVQLLVLVDRGHRELPIEATFVGRRVPTTEDEVVEVKLQELDGSEKVMLAERINP

SEQ ID NO: 107002 - DNA, 555 bp, Rubrobacter xylanophilus DSM 9941
  CDS (1)..(555): transl_table=11
atgagccgattaggcttcggcgagcgcgtccgcgcttgcgtactcaccggcgaccagatctcccgctccctgcggcgcatctcgcacgagatcctggagcgcaacgcctcctccctcgaggagctggcgttggtggggatcctcacccgcggcgtgcccctggcgcaccggatcgcggggaacatccggcgcttcgaggggctggaggtcccggtgggggcgctggacatcacgctgcaccgggacgacctggacggggaggacccggaggtgaagggcagccacatccccttcgaggtggcgggcaggaccgtcgtcatggtggacgacgtgctcttcaccggcaggacggcccgggcggcgatggatgccctcctggagagggggcgcccggcggcgatccagctcgccgtcctggtcgaccgcgggcaccgggagctgcccatccgggcggactacgtgggcaagaacatcccgacctccctcggcgagagcgtgcgggtcgggcttgtggagaccgacggagaggacggggtggtcgtcgttgggagctag

SEQ ID NO: 107003 - protein, 184 aa, Rubrobacter xylanophilus DSM 9941
MSRLGFGERVRACVLTGDQISRSLRRISHEILERNASSLEELALVGILTRGVPLAHRIAGNIRRFEGLEVPVGALDITLHRDDLDGEDPEVKGSHIPFEVAGRTVVMVDDVLFTGRTARAAMDALLERGRPAAIQLAVLVDRGHRELPIRADYVGKNIPTSLGESVRVGLVETDGEDGVVVVGS

SEQ ID NO: 107004 - DNA, 540 bp, Cytophaga hutchinsonii ATCC 33406
  CDS (1)..(540): transl_table=11
atgtccaaacgcattataatcgacaacgatttgctgcaggtcatgttggatcggctttgtcagcaattgatcgagtcccacgacgatttctccaatactgttattttagcccttcagcccagaggagttgctacagggcagcgtattcataaaaaattagaaaaggctacaaaaaagaagatcaatctgggctacctggatgcgacttttttcagagatgatttcagaagacacgatggtccgttgagagcaaacgctacaaaaattccgtttctgattgaagggaaacgtgtgatcctggtggacgatgtattatacaccggccgcacggtgcgcgctgcaatggatgccatgatggcttttggcaggccgaaagatgtagagctgttggtagtgattgatcgcaagtacagtcgtgatgtgccgattcagcccaattatgtagggagagaagttatttgtctggaatctgaaaaagtagttgtagacattaacgaagttgaagataagaaagaattaatctggttagtaaagaaataa

SEQ ID NO: 107005 - protein, 179 aa, Cytophaga hutchinsonii ATCC 33406
MSKRIIIDNDLLQVMLDRLCQQLIESHDDFSNTVILALQPRGVATGQRIHKKLEKATKKKINLGYLDATFFRDDFRRHDGPLRANATKIPFLIEGKRVILVDDVLYTGRTVRAAMDAMMAFGRPKDVELLVVIDRKYSRDVPIQPNYVGREVICLESEKVVVDINEVEDKKELIWLVKK

SEQ ID NO: 107006 - DNA, 630 bp, Rhodococcus sp. RHA1
  CDS (1)..(630): transl_table=11
atgcgtgtgcccgaagggtctcgccccgccggggaaccggcggattcaacaccagagtcgtccccgtccgtagaacccgcacgcgagctgctgtccgcagccgatgtgggacggaccattgcgcgaatcgcgcaccagatcatcgagaagaccgcgctggacgccgccgacggtgacgcgccgcgggtcgtcctgatcggcatccccactcggggcacgacgctcgcggcccgcctcgccgggaagatcgaggaattctccggggtgcgcccatcggtcggctccctcgacatcaccctctaccgcgacgacctgcgcaccaaaccgcaccgtcccctcgaacgcacgtcggtgcccgagggcggcgtcgacaacaccctggtggtactcgtcgacgacgtgctgttctccggccgcaccgtccgctcggctctcgacgccctccgcgatctcgggcggccccgcgccgttcagctggccgtcctcgtcgaccgcggccaccgggaactgccgctgcgcgccgactacgtgggcaagaacgtgcccaccgcccgcaccgaggacgtcaaggtgctcctgagcgaacacgacggccgcgacgcggtcatgatctccggggggaagagctaa

SEQ ID NO: 107007 - protein, 209 aa, Rhodococcus sp. RHA1
MRVPEGSRPAGEPADSTPESSPSVEPARELLSAADVGRTIARIAHQIIEKTALDAADGDAPRVVLIGIPTRGTTLAARLAGKIEEFSGVRPSVGSLDITLYRDDLRTKPHRPLERTSVPEGGVDNTLVVLVDDVLFSGRTVRSALDALRDLGRPRAVQLAVLVDRGHRELPLRADYVGKNVPTARTEDVKVLLSEHDGRDAVMISGGKS

SEQ ID NO: 107008 - DNA, 531 bp, Trichodesmium erythraeum IMS101
  CDS (1)..(531): transl_table=11
atgagcaagacagtagaaattttatcggcaaaagagttacggcgtagtgttactcgtctggcttcccaagtaattgaaaagtcaggagatttatctcaattgctgttattaggtattcatactagaggagtgccactagcaaaagttttaggaaatcaaattgaattactagaacaagttaaagtacctgtgggagcattagatattaccttttatcgagatgatttggaccaagtgggaatgcgaaccccggcaaaaacagaaattcctgtggatattactggtaagattgtggtgttagttgatgatgtgatttataaaggtcgaacagttcgagctgctttgaatgcagttgttgagtatggtcgcccagaggtaattagattagttgttttagtggataggggtcatcgagagttgcctattcatccagattttacaggtaaaaaattacccacttctaaggaagaacaggtgaaggtttatatgcaagctattgatggaagagatggggtagagttatttcgatag

SEQ ID NO: 107009 - protein, 176 aa, Trichodesmium erythraeum IMS101
MSKTVEILSAKELRRSVTRLASQVIEKSGDLSQLLLLGIHTRGVPLAKVLGNQIELLEQVKVPVGALDITFYRDDLDQVGMRTPAKTEIPVDITGKIVVLVDDVIYKGRTVRAALNAVVEYGRPEVIRLVVLVDRGHRELPIHPDFTGKKLPTSKEEQVKVYMQAIDGRDGVELFR

SEQ ID NO: 107010 - DNA, 570 bp, Synechococcus sp. CC9311
  CDS (1)..(570): transl_table=11
atggctgatcgaaacgctggtgatgatcggattgaaattctctctgcggatgagttgcgaaaaaccgtaacgcgtctggcgtctcaggttttggagtctgtgccaaccgttgaatctttggtgcttctggggatcccaacccgcggcgttcaattggctggtgtcattgccagctccttaaaagatcagagcggacacgttgtggccactggcaccctcgaccccaccttccatcgtgatgatttaggtcgagtgggtgtgcgcatggtccaggccaccgacctacccgtgagcgtggaaggaagagatgttgtgctcgtggatgacgttgtcttcacggggcgaaccgtaagagcagcgttggaggccatccaggcctggggtagaccacgccgagtttccttgctcgtgatggtggaccgaggccatcgggaattgccaattcagccggatttttgcggcagggtcgtgccgacgcgtcgatcggaaaccatcgagctgcgtcttcttggcttggatggagaggagggagttttccttcgacgcgtgaatgaaaacatccctgaataa

SEQ ID NO: 107011 - protein, 189 aa, Synechococcus sp. CC9311
MADRNAGDDRIEILSADELRKTVTRLASQVLESVPTVESLVLLGIPTRGVQLAGVIASSLKDQSGHVVATGTLDPTFHRDDLGRVGVRMVQATDLPVSVEGRDVVLVDDVVFTGRTVRAALEAIQAWGRPRRVSLLVMVDRGHRELPIQPDFCGRVVPTRRSETIELRLLGLDGEEGVFLRRVNENIPE

SEQ ID NO: 107012 - DNA, 534 bp, Pediococcus pentosaceus ATCC 25745
  CDS (1)..(534): transl_table=11
atggaaaaagaaattatggatgccatggcaatgaaaagggctttaacaagaattacttatgaaattatcgaacgtaataaaggggtcgaagacatcgtattgattggtataaaaacgcgtggtgtttttattgctaagcgaattgctgaacgtctgaaacaacttgaaaattttgacattccagttggtgaattggatatagctgaataccgtgatgatcaacgtaattcagctgaaccacgttcaactaaagctaattctagtcttgctaaacttgatttaaaggatcgaaaagtgattttgattgatgatgttctctatactggacgaacaatccgcgctgctatggacgcaattatggatattaaccgtccagctcaaattagtttagcggttcttgtcgatcgtggacatcgggaattaccaattcgtgctgattttgtgggtaagaatattccaacagcacaaaacgagaaaattaacgtttttgtccgcgaaattgatgatgaagacgttgttctcttagaaaattaa

SEQ ID NO: 107013 - protein, 177 aa, Pediococcus pentosaceus ATCC 25745
MEKEIMDAMAMKRALTRITYEIIERNKGVEDIVLIGIKTRGVFIAKRIAERLKQLENFDIPVGELDIAEYRDDQRNSAEPRSTKANSSLAKLDLKDRKVILIDDVLYTGRTIRAAMDAIMDINRPAQISLAVLVDRGHRELPIRADFVGKNIPTAQNEKINVFVREIDDEDVVLLEN

SEQ ID NO: 107014 - DNA, 528 bp, Leuconostoc mesenteroides subsp. mesenteroides ATCC 8293
  CDS (1)..(528): transl_table=11
atgccaaataaagaagttttagataatgcctcattacagcgcgcgttaactcgtattacatacgagataattgagcgtaataagggcggtaaaaatttggttctggtgggaatcaaaacacgtggcgagtatcttgcacgccgtattgcagatcgtttagaacaattagaaggcgttcaaattccggtcatggccattgacattactaactttcgggatgataaacctgatcagcataacgatttaggtttgaactcagaagagcgattgaacatttccgaacagaatattgttttgattgacgatgtattgtttacaggacgaactattcgagcagcattggatgcactgattcatattggtcgtcctaaaacgatttcactagctgttttggtggatcgtggacacagagaattgcctattcgagcagacttcgttggaaaaaatattcccaccgcacagaatgaaaagattaaagtctttgtgcaagaaattgatggaaaagatgcagttgaaattgttcattaa

SEQ ID NO: 107015 - protein, 175 aa, Leuconostoc mesenteroides subsp. mesenteroides ATCC 8293
MPNKEVLDNASLQRALTRITYEIIERNKGGKNLVLVGIKTRGEYLARRIADRLEQLEGVQIPVMAIDITNFRDDKPDQHNDLGLNSEERLNISEQNIVLIDDVLFTGRTIRAALDALIHIGRPKTISLAVLVDRGHRELPIRADFVGKNIPTAQNEKIKVFVQEIDGKDAVEIVH

SEQ ID NO: 107016 - DNA, 564 bp, Solibacter usitatus Ellin6076
  CDS (1)..(564): transl_table=11
atggccattacgcgcgagaaagcacagctcatgagtgcgtccgaaatcgaccggacgctggttcgactggctcacgaagttctggaaaagacgaaagacctggatcagcttgcctttatcggcattcgccgccgcggagttcccctcgcgcagcggctctccaccaagatctccagcctcgaagaccgccacattccggtcggcattctggatatcaatctttaccgcgacgacctcagcaccgtggacgtcaagcccgtcgtcagtgccaccgagatcccctttagcgtcgccggcaaggacatcatccttatggatgacgtcctctacaccggccgtaccatccgcgccgcgctggacgcgctgttcgatcacggccgtcccgcgcgcgttcaactgctcgtcctgatcgatcgcggccaccgcgaactgcccatcgaagcgcgcttcatcggccgcaccgtgcagaccaccgacaccgaaatcatcgaagtcaaattccaggagatagacggcatggaaaaagtactgatggtggagaaagtggcgggcgaggcggcatag

SEQ ID NO: 107017 - protein, 187 aa, Solibacter usitatus Ellin6076
MAITREKAQLMSASEIDRTLVRLAHEVLEKTKDLDQLAFIGIRRRGVPLAQRLSTKISSLEDRHIPVGILDINLYRDDLSTVDVKPVVSATEIPFSVAGKDIILMDDVLYTGRTIRAALDALFDHGRPARVQLLVLIDRGHRELPIEARFIGRTVQTTDTEIIEVKFQEIDGMEKVLMVEKVAGEAA

SEQ ID NO: 107018 - DNA, 573 bp, Mycobacterium avium 104
  CDS (1)..(573): transl_table=11
atgggtgctgcgggcaacaccggctcgtccggtgattcccgggagttgatgtcggcggccgacgtcggccgcaccgtttcccgcatcgcgcatcagatcatcgaaaagaccgcgctggacggtccggacgggccgcgggtggtgctgctgggcatcccgacccgcggcgtcaccctggccgaccggctggcccgcaacatcggcgaatacagcggggtcgaggtcggccacggcgccctggacatcaccctgtatcgcgacgacctgatgcaaaaacccccgcggccgctggaggccacctcgatcccggccggcggcatcgacgacgcgctggtgatcctggtcgacgacgtgctctactccggccgctcggtgcgctcggcactggacgcgctgcgcgacgtgggccgcccccgggtggtgcaactggcggtgctggtcgaccgcggtcaccgcgagctgccgctgcgcgccgaatacgtcggcaagaacgtccccacctcgcgcagcgagagcgtgcacgtgctgctggccgagcacgacggcgccgacggggtggtgatctcgcgatga

SEQ ID NO: 107019 - protein, 190 aa, Mycobacterium avium 104
MGAAGNTGSSGDSRELMSAADVGRTVSRIAHQIIEKTALDGPDGPRVVLLGIPTRGVTLADRLARNIGEYSGVEVGHGALDITLYRDDLMQKPPRPLEATSIPAGGIDDALVILVDDVLYSGRSVRSALDALRDVGRPRVVQLAVLVDRGHRELPLRAEYVGKNVPTSRSESVHVLLAEHDGADGVVISR

SEQ ID NO: 107020 - DNA, 558 bp, Mycobacterium smegmatis str. MC2 155
  CDS (1)..(558): transl_table=11
atgggctcttcaagtaccgaccgggagttgctgtccgcggcggacgtcggccggacagtttcccgcatcgcccatcagatcatcgagaagaccgctctggatgatcccgccgagcgcacccgcgtcgtattgctgggcatccccacccgcggcgtgatcctcgccacccggctggccgccaagatcaaggaattcgcgggcgaggacgtgccgcacggcgcactcgatatcacgctgtatcgcgacgatctcaatttcaagccgccgcgtccgctggaggccacctccattcccgcgggcggtgtcgacgacgcgatcgtcatcctcgtcgacgacgtcctgtactcgggccgctcggtccgctcggcgctggacgcgctgcgcgacatcggtcgcccccgcatcgtgcagctggcggtgctggtcgaccgcgggcaccgcgagctgcccatccgggccgactacgtgggcaagaacgtcccgacctcacgcagcgaaagcgtccacgtgctgctcagcgaacacgacgaccgcgacggagtggtgatctcgaagtga

SEQ ID NO: 107021 - protein, 185 aa, Mycobacterium smegmatis str. MC2 155
MGSSSTDRELLSAADVGRTVSRIAHQIIEKTALDDPAERTRVVLLGIPTRGVILATRLAAKIKEFAGEDVPHGALDITLYRDDLNFKPPRPLEATSIPAGGVDDAIVILVDDVLYSGRSVRSALDALRDIGRPRIVQLAVLVDRGHRELPIRADYVGKNVPTSRSESVHVLLSEHDDRDGVVISK

SEQ ID NO: 107022 - DNA, 615 bp, Nocardioides sp. JS614
  CDS (1)..(615): transl_table=11
atgcctgcgcaccctcaagccgtgccccccggtccgtcgtccagcacggaccgcgcccaccccgtccgcaccgtcctcgacgagcgtgacatcggccgggccctgacccggatctcccacgagatcctcgagcgcaacaagggcgccaccgacctggttctgctcggcatccccagccgcggggtcccgctcgccgagcggatcgccgagcggatcagcaccgtcgaggggtacgccgtccccgtcggctccctcgacgtcaccatgtaccgcgacgacctgcggatgaagccggcccgcacgctgctgcccacgcagatcccggccggcggcatcgacgggcgcaccgtcgtgctcgtcgacgacgtgctgttctccggacgcaccatccgggccgcgctcgacgcgctcaacgacctgggccgcccgcgagcggtccagctggccgtgctcgtcgaccgcggccaccgggagctgccgatccgtgccgacttcgtcggcaagaacctcccgacgtcgctcgtcgagcgggtccgggtcagcctggtgggcatcgacgacgtcgatgcggtcaccatccagggcacggcgcccgccggggaggtgaccgcatga

SEQ ID NO: 107023 - protein, 204 aa, Nocardioides sp. JS614
MPAHPQAVPPGPSSSTDRAHPVRTVLDERDIGRALTRISHEILERNKGATDLVLLGIPSRGVPLAERIAERISTVEGYAVPVGSLDVTMYRDDLRMKPARTLLPTQIPAGGIDGRTVVLVDDVLFSGRTIRAALDALNDLGRPRAVQLAVLVDRGHRELPIRADFVGKNLPTSLVERVRVSLVGIDDVDAVTIQGTAPAGEVTA

SEQ ID NO: 107024 - DNA, 537 bp, Nostoc punctiforme PCC 73102
  CDS (1)..(537): transl_table=11
atgtctgccaaagtagttgaaattctctcatccgaagaaatccgtcgtaccctaactcgcctggcctctcaaattgtggaaaggacgcgtgatttgtcccaactggtgcttcttggtatttataccaggggtgcgttattagccgaattgttggcgcgtcagattgagacactggaaggtgtagctgtgtcagttggcgctttggacattacattttatcgagatgacctcgacacaattggattgcggactccaacgaaaagtgaaattccttttgaccttacgggaaaaacggttgtactagtagatgatgtgatttttaaaggacggacaattcgcgctgctttgaacgcagtcaacgattacggtaggccagaggtgattcgtttagctgtgttagtagacaggggtcatcgagaattaccaatccacccagattttattggaaagaagttgcctactgctaaagaagaagttgtgaaagtttacttacaaaattacgatggacgagatgcagtagagttgattggagattaa

SEQ ID NO: 107025 - protein, 178 aa, Nostoc punctiforme PCC 73102
MSAKVVEILSSEEIRRTLTRLASQIVERTRDLSQLVLLGIYTRGALLAELLARQIETLEGVAVSVGALDITFYRDDLDTIGLRTPTKSEIPFDLTGKTVVLVDDVIFKGRTIRAALNAVNDYGRPEVIRLAVLVDRGHRELPIHPDFIGKKLPTAKEEVVKVYLQNYDGRDAVELIGD

SEQ ID NO: 107026 - DNA, 540 bp, Haemophilus influenzae R2866
  CDS (1)..(540): transl_table=11
atggaaaaaattattatcgaccacgatcgttttcttcgcacgatttcgcgtatttctcacgaaattattgaaaagcatcaatctttggatgatcttattattgttgggattaaacgccgtggtgcggaaattgctgaattattacaacgtcgagttgaagaattaagtggtataaatttaccctcaatggagctggatatcactttttatcgcgatgatttaactttggtggatcaggaagataaaatgccagtttatagtggttcatcacaatatttgaatattcaagataaaaccgtcattttggttgatgatgtgttgtttactggtcgaaccattcgagcggcaatggatgcactgactgattttggacgagcggcaaaaattgaattaatgatttttgttgatcgtggtcatcgtgaattaccaattcgtgctgattacgtaggtaaaaatgtgccaacaagtcgtgatgaacttgtccaagttcgcactgaaaaacaagatggcagttacgaagtcgttatattagggaaataa

SEQ ID NO: 107027 - protein, 179 aa, Haemophilus influenzae R2866
MEKIIIDHDRFLRTISRISHEIIEKHQSLDDLIIVGIKRRGAEIAELLQRRVEELSGINLPSMELDITFYRDDLTLVDQEDKMPVYSGSSQYLNIQDKTVILVDDVLFTGRTIRAAMDALTDFGRAAKIELMIFVDRGHRELPIRADYVGKNVPTSRDELVQVRTEKQDGSYEVVILGK

SEQ ID NO: 107028 - DNA, 540 bp, Crocosphaera watsonii WH 8501
  CDS (1)..(540): transl_table=11
atggtcaaaaagatactatcatctgaaaaaatacgacgggtaatcactcgtttagcttctcagattatcgaaaaatctggggatttatcggagattatcttattaggaattcacacgagaggggttcctatagctaatatgttagctcaacaaattgaactactagaagatataaaagtgccagtgggtgctattgatgtaaccttttatcgagatgatttagatcgcattaaaacccgtacccctgctaaaaccaaagttccttttgatctcacaggaaagaccgttattttagtggatgatgtcatctacaaagggagaactattcgggctgccttaaacgcagtaaccgagtatggaagaccaaaaatgatccgtttattggtattagtggatcggggtcatcgtgagttacccattcatcctgattttacaggaaaaaaattacctacctcttccagtgaacaagtcaaggtttacttacaagaaatcgatggccgtgatgccgtagaattattaagtggtcctaccagacaataa

SEQ ID NO: 107029 - protein, 179 aa, Crocosphaera watsonii WH 8501
MVKKILSSEKIRRVITRLASQIIEKSGDLSEIILLGIHTRGVPIANMLAQQIELLEDIKVPVGAIDVTFYRDDLDRIKTRTPAKTKVPFDLTGKTVILVDDVIYKGRTIRAALNAVTEYGRPKMIRLLVLVDRGHRELPIHPDFTGKKLPTSSSEQVKVYLQEIDGRDAVELLSGPTRQ

SEQ ID NO: 107030 - DNA, 531 bp, Exiguobacterium sibiricum 255-15
  CDS (1)..(531): transl_table=11
atgaaaccatccgtcattttagatgaagcggcaatcagtcgtgcgttgacacgcatcgcccatgaaatcatcgaacgcaacaaaggaatcgaccaactgatgattgtcggcatcaaaacacgcggtgagacactcgcccgccgtctcgcccgccggattgaagaaattgaaggaaaaccggtcttgctcggtgtcgttgacatctcgatgtaccgggacgacttatcgaaaaaaagtctcgagccggaaatcaaaggaacggatatgccggagacggtgaccggaaaaatcatcgtcctcgtcgatgacgtcctgtacaccggacgaaccgtccgcgccgcaatggatgcgctcgttgaccacggtcgcccgagtatgatccagctcgcggtcctcgttgaccggggacaccgggaactgccgatccgcccggatttcatcgggaagaatgtcccgacctcacgcgaagaacaagttgtcgtcgctttatccgaagtcgatgacgccgatcaagtattcatcaaacgttaa

SEQ ID NO: 107031 - protein, 176 aa, Exiguobacterium sibiricum 255-15
MKPSVILDEAAISRALTRIAHEIIERNKGIDQLMIVGIKTRGETLARRLARRIEEIEGKPVLLGVVDISMYRDDLSKKSLEPEIKGTDMPETVTGKIIVLVDDVLYTGRTVRAAMDALVDHGRPSMIQLAVLVDRGHRELPIRPDFIGKNVPTSREEQVVVALSEVDDADQVFIKR

SEQ ID NO: 107032 - DNA, 576 bp, Kineococcus radiotolerans SRS30216
  CDS (1)..(576): transl_table=11
gtgagcgctgccccggaccaggcagaccctcccgcgcagggcagggtgctcctcaccggagccgacgtgtcccgcgccgtgacgcgcatcgcgcacgagctgctggagagcaacaggggagcggacgacctcgtcctgctcggcatccccacccgcggggtccccctcgcccggcgcctcgcgcgccgcctcgccgaggtcgagggacgcgccgtccccgccggggccctggacgtcacgatgtaccgcgacgacctgcgccggcaccccacccgcgagctgctccccaccgaggtcccgcccggcgggatcgacgacaaggtcgtggtcctcgtcgacgacgtcctctactccgggcgcaccatccgcgccgccctcgacgccctcagcgacctcggccgcccccgcgccgtccgcctcgccgtcctcgtcgaccgcggccaccgcgagctgccgatccgcgccgaccacgtcgggaagaacctccccacctcctccgccgagcgcgtcagcgtcctgctcgaggagctcgacgggcgcgacgcggtcctcatcaccggaggtgcccccgcgtga

SEQ ID NO: 107033 - protein, 191 aa, Kineococcus radiotolerans SRS30216
MSAAPDQADPPAQGRVLLTGADVSRAVTRIAHELLESNRGADDLVLLGIPTRGVPLARRLARRLAEVEGRAVPAGALDVTMYRDDLRRHPTRELLPTEVPPGGIDDKVVVLVDDVLYSGRTIRAALDALSDLGRPRAVRLAVLVDRGHRELPIRADHVGKNLPTSSAERVSVLLEELDGRDAVLITGGAPA

SEQ ID NO: 107034 - DNA, 549 bp, Croceibacter atlanticus HTCC2559
  CDS (1)..(549): transl_table=11
atgagtcagaaagtattattaaatgctaaggaagtcaatattattcttcataggttgacttgtcaattaatagagaatcataaagatttttcagaaaccgttttaataggtattcaaccaagaggaatttatttagcacaacgtataaagtcacttttagaagaagattataaaattcctaatattaaattaggagaactagatataacgttttttagagatgattttagaaggtcaacaaaaatacttgaagctaacaaaacacgtatagacttcctaattgaagacaaaagggtagtgctggtagacgatgttctgtatacaggaagaagtattaactctgccttaactgcgttacaaagttttggaagaccaagacatgttgagttacttatattaatagacagaagatttagcagacacttaccaatacaaccagattatagaggacgacaggtagacgctataaatgaagaacaagtaaaggtgcattggaaagaaaataaccaagaagacaccatatatttattacaggaaacagagcagtag

SEQ ID NO: 107035 - protein, 182 aa, Croceibacter atlanticus HTCC2559
MSQKVLLNAKEVNIILHRLTCQLIENHKDFSETVLIGIQPRGIYLAQRIKSLLEEDYKIPNIKLGELDITFFRDDFRRSTKILEANKTRIDFLIEDKRVVLVDDVLYTGRSINSALTALQSFGRPRHVELLILIDRRFSRHLPIQPDYRGRQVDAINEEQVKVHWKENNQEDTIYLLQETEQ

SEQ ID NO: 107036 - DNA, 552 bp, Prochlorococcus marinus str. MIT 9211
  CDS (1)..(552): transl_table=11
atgaaagatcaatctagtcaagagaaggtggaaatactttcgaaagaagaactaggtcgcaccctggccagattggcttcgcaaattattgaaaatgtttcagacacacaagaaattttgcttttaggaattcctactaggggagagcaattagcaaaagttcttgggaaaaaattggaagaaaaaactggtcacgcagttgatcaaggagtaatagaccctacttttcatcgagatgatttggttcgtgtaggaacaaggatggttcattccactgaaatcccttcaagtttggaaggtcgccaagtggtgttggttgacgatgtcatttttactggaagaacagttagggctgctcttgaggctctgcaggcctggggaagaagtaaaaaggttatgttattggtgatggttgacagaggacatagagagcttcctattcagcctgatttttgtgggagggaagtaccaactcgtaggtcagaaactattgatgtaaagcttatggaggttgatggtgtagaaggagtcttccttactaagaccacttaa

SEQ ID NO: 107037 - protein, 183 aa, Prochlorococcus marinus str. MIT 9211
MKDQSSQEKVEILSKEELGRTLARLASQIIENVSDTQEILLLGIPTRGEQLAKVLGKKLEEKTGHAVDQGVIDPTFHRDDLVRVGTRMVHSTEIPSSLEGRQVVLVDDVIFTGRTVRAALEALQAWGRSKKVMLLVMVDRGHRELPIQPDFCGREVPTRRSETIDVKLMEVDGVEGVFLTKTT

SEQ ID NO: 107038 - DNA, 570 bp, Synechococcus sp. RS9917
  CDS (1)..(570): transl_table=11
atggccggttctgttgaatccgaacggattgaaattctctcggcccaggagctggcgcgcacgctggcccgcctgtcatcgcaagtgctggaagcggtcgacagcatcgatgatctgttgttgctcggcattcccacccgtggtgttcatctctccagggttctggcccggcagctggaggatctcacaggtcgcaccattgcccagggcaccctggatcccaccttttatcgcgatgatctcgatcgggttggcacccgtcttgtgcaggccaccgatctaccgatcactgtcgagggccgcacggtggtgcttgtggatgatgtgatcttcacgggtcgcacggtgcgggctgctctggaagcgatccagacctgggggcgaccctgtcgcgtgctgctgctggtgatggtggatcgcggccatcgtgagcttccaatccaacccgatttctgtggacgggttgtgccgacacgacgcacggaaaccattgaactgcgcttgctcgacctcgatggtgaggaaggtgtgtatctgcgccgcgatgagtcggtcagttcagcgcggtga

SEQ ID NO: 107039 - protein, 189 aa, Synechococcus sp. RS9917
MAGSVESERIEILSAQELARTLARLSSQVLEAVDSIDDLLLLGIPTRGVHLSRVLARQLEDLTGRTIAQGTLDPTFYRDDLDRVGTRLVQATDLPITVEGRTVVLVDDVIFTGRTVRAALEAIQTWGRPCRVLLLVMVDRGHRELPIQPDFCGRVVPTRRTETIELRLLDLDGEEGVYLRRDESVSSAR

SEQ ID NO: 107040 - DNA, 564 bp, Synechococcus sp. WH 5701
  CDS (1)..(564): transl_table=11
gtgaacacttccacggcgccgtcacccgatcaacggcgggtcgagatcctctcggccgacgatctcgcccgtacggtgcgccgccttgcctcccaggtgctcgagggagttgtcgacagccgccagttgctcctgctgggcatcccgacccgtggggtcgccctggcccgggtgctggcccagcaacttgaggagctctgtggtcacccgatcgaccagggcagtcttgatccaaccttccaccgtgatgacctggagcgggtcggcacccgcctggtggaagccacccacctgccctccgacatcgaagggcgccagcttgtgctggtagatgacgtgatcttcaccggacgcacggtgcgggcggcgctggatgccctgcacacctgggggcgtcccgatctggtgcggctgctggtgatggtcgaccgtggccaccgggaactgccgattcagcccgatttctgtggccgcctggtgcctaccagccgccacgaatcgatcgagctctgcctccgtcagaccgacggggaagacggtgtgttcctgatccgcgccgattga

SEQ ID NO: 107041 - protein, 187 aa, Synechococcus sp. WH 5701
MNTSTAPSPDQRRVEILSADDLARTVRRLASQVLEGVVDSRQLLLLGIPTRGVALARVLAQQLEELCGHPIDQGSLDPTFHRDDLERVGTRLVEATHLPSDIEGRQLVLVDDVIFTGRTVRAALDALHTWGRPDLVRLLVMVDRGHRELPIQPDFCGRLVPTSRHESIELCLRQTDGEDGVFLIRAD

SEQ ID NO: 107042 - DNA, 561 bp, Synechococcus sp. WH 7805
  CDS (1)..(561): transl_table=11
atggggttgggcactcagggcgaacgaatcgagattctctcttccgatgaactgaggagaacgttgatgcgcctcgcctctcaagtgcttgagagcgttggagggcttgatgatcttgtccttcttgggatccccacccgtggagtgcagctggcctcggtcttagcgcgttcgctggaagagcaggtcggccgcccagtggcaaggggaaccctggatcccacttttcacagggacgatctggagcgggtcgctatgcgaccgatgacaggcacagaccttcccgtgagtgttgaggggcgtgaggtggtgctcgttgatgacgtgatttttaccggtcgcacggtgagggctgcccttgaagccattcaggcctggggacggccccgcagagttctgctgttggtgctggtggatcgcgggcatcgagaactgcccatccagcctgatttctgcgggcgaatggttcaaacgcgtcgcagtgaaacgatcgaactgcgtctgctcgacgtggatggtgaagagggggttttcctgcgcagatctcaggacgcaacctga

SEQ ID NO: 107043 - protein, 186 aa, Synechococcus sp. WH 7805
MGLGTQGERIEILSSDELRRTLMRLASQVLESVGGLDDLVLLGIPTRGVQLASVLARSLEEQVGRPVARGTLDPTFHRDDLERVAMRPMTGTDLPVSVEGREVVLVDDVIFTGRTVRAALEAIQAWGRPRRVLLLVLVDRGHRELPIQPDFCGRMVQTRRSETIELRLLDVDGEEGVFLRRSQDAT

SEQ ID NO: 107044 - DNA, 546 bp, Flavobacteria bacterium BBFL7
  CDS (1)..(546): transl_table=11
atgagtcaaaaattacttctcaacgcgcaagaactggatattattcttcacagactggcttgccaattaattgaaaatcataatcgttttgaaaatacagcacttataggtctacaacctagaggtagatttttattaaatagattatccgttatgctacaagagcattatggtattaaggagttaaacacaggtttactagatattacgttctatagagatgattttcgtcgtggtgaagagccgcttaaagcaaattctacagacatacaatttttagtagaaggtaaaaaggtcgttattgtagatgatgtcctttatactggtcgcagtattagagctgcacttaccgcattacagtcctttggtagaccagcgtctattgagttattaactcttatcgatcgcagattctcaaggcatttacctatacaaccagattataatggtagacaagtagatgcgataggtgatcaaaaggtaaaagtaatgtggacagaaaatgctggtgaagatgccgtttacctattaaaaaatgaaaactaa

SEQ ID NO: 107045 - protein, 181 aa, Flavobacteria bacterium BBFL7
MSQKLLLNAQELDIILHRLACQLIENHNRFENTALIGLQPRGRFLLNRLSVMLQEHYGIKELNTGLLDITFYRDDFRRGEEPLKANSTDIQFLVEGKKVVIVDDVLYTGRSIRAALTALQSFGRPASIELLTLIDRRFSRHLPIQPDYNGRQVDAIGDQKVKVMWTENAGEDAVYLLKNEN

SEQ ID NO: 107046 - DNA, 534 bp, delta proteobacterium MLMS-1
  CDS (1)..(534): transl_table=11
atgaagaacaagaccagattgctgggcggtgatgatatcgaccgctccctggcccggatggccatgcagatcgtcgagcataaccacggggtggaaaatttggccattgtcggcatttacaccggcggggtctatctggcgcaacggatccagcagttggtccaggcccagttcgggatcaacctgccggccggcagcctggatatcaccctctaccgtgatgattggagcctggcggcccagaatccggtggtcaaaaagaccaccgtcgatttcgccctccaggacaaggtggtggtgctggtggatgacgtgatttataccggccgcaccacccgggcggccctggacgccatcatggatctgggccggccccgttgcatccaactggccgcgctggttgaccggggtggccgcgagttgccgattcagcccgattacgtggggcttgatgtccaggtcggctatggggagcatgtccatgtcctgctgcgggagcatgacggggccgatgaagtagtgctgacccgttga

SEQ ID NO: 107047 - protein, 177 aa, delta proteobacterium MLMS-1
MKNKTRLLGGDDIDRSLARMAMQIVEHNHGVENLAIVGIYTGGVYLAQRIQQLVQAQFGINLPAGSLDITLYRDDWSLAAQNPVVKKTTVDFALQDKVVVLVDDVIYTGRTTRAALDAIMDLGRPRCIQLAALVDRGGRELPIQPDYVGLDVQVGYGEHVHVLLREHDGADEVVLTR

SEQ ID NO: 107048 - DNA, 522 bp, Oceanobacter sp. RED65
  CDS (1)..(522): transl_table=11
atggccacaacccaatcaaacctgcaacccaccgcgttaatcagtgatatggcaaacgccattcgcaatcaagtggatacaaatagcaacgacgttatcatagttggtattcacacaggtggtgcttgggtagcacaaactcttcatcaagaattgaagctcaataccgagctaggtcttttagatattagtttttatcgcgatgatttcacacaaaaaggcttacacccagaagttaaaagcagtgaacttccggaagtagagggcaaaaccattattcttgttgacgacgttgtaatgtcaggacgaaccattcgcgccgccatgaatgagttatttgattatggccgtccgcaaaaaattctactggcatgcttgatcgatgttggccaacgggacttaccgattcaaccggatattattggctctcaaattgaactccaagccaaacagcgagtaaaactaagcggcccagatcccttgcaactacacctcatgaatattgaagagaaacgctcatga

SEQ ID NO: 107049 - protein, 173 aa, Oceanobacter sp. RED65
MATTQSNLQPTALISDMANAIRNQVDTNSNDVIIVGIHTGGAWVAQTLHQELKLNTELGLLDISFYRDDFTQKGLHPEVKSSELPEVEGKTIILVDDVVMSGRTIRAAMNELFDYGRPQKILLACLIDVGQRDLPIQPDIIGSQIELQAKQRVKLSGPDPLQLHLMNIEEKRS

SEQ ID NO: 107050 - DNA, 552 bp, Desulfitobacterium hafniense DCB-2
  CDS (1)..(552): transl_table=11
ttggaaggaatcacaaagagcaagatccttgatgcggatggaattcgtcgggcgatcacccggatagctcatgaaattgtggaaaaaaacaaagggaccgacggagtggttttagtgggaatccgccggcggggtgttcctctggctgagcggattcaacggcggatcgaggaatttgaaggggttaagcttcctttgggaattctggatatcaccttatatcgggatgatttaagcctgattgatgtgcagcctgtggttcatcagaccgaagtgccctttactatcgagggaaaaacagtggtcctggtggatgacgttctctacacgggacgtacagcccgggcggccctggatgccaccatggacttagggcgggcggaaaaaatacagctggccgttctcgtggaccggggacatcgggaactcccgattcgcgcggactatgtggggaaaaacctgcctacctcaaggcgtgagattgtctccgtctgcattaaggagattgatgagacggaagaggtccttttgttggagcgagtggataagtaa

SEQ ID NO: 107051 - protein, 183 aa, Desulfitobacterium hafniense DCB-2
MEGITKSKILDADGIRRAITRIAHEIVEKNKGTDGVVLVGIRRRGVPLAERIQRRIEEFEGVKLPLGILDITLYRDDLSLIDVQPVVHQTEVPFTIEGKTVVLVDDVLYTGRTARAALDATMDLGRAEKIQLAVLVDRGHRELPIRADYVGKNLPTSRREIVSVCIKEIDETEEVLLLERVDK

SEQ ID NO: 107052 - DNA, 552 bp, Synechococcus sp. RS9916
  CDS (1)..(552): transl_table=11
atgtctgcctctgccaggcccgagagggtagaaattctgtccgctcaggatttggcccgcacggttcagcgcttgtccagccaagtgttggaaagtgtcgatcgcagtcaggatctcttgttgttgggcatccccacgcgtggggtgcatctggcaagtgttcttgcccgtcagcttgaggcgctgaccggccatgccctggccaagggaacccttgatcccacctttcatcgcgatgacctggagcgtgttgggacacgcatggttcaggccactgacctgccgatcagcatcgagggccgggatgtcctgttggtggatgacgtgatcttcacaggacgaacgatccgagccgctttagaggccattcaggcctggggacggccccgcaaggtgatgctgctggtgatggtcgatcgcggtcatcgcgagttgccgattcagcccgatttttgtggtcgtcacgtgccgacccgccgcagcgaaacgatcgagctgcggcttcaggatgtggatggtgaggagggtgtgtatctgcgccaggtgcaatga

SEQ ID NO: 107053 - protein, 183 aa, Synechococcus sp. RS9916
MSASARPERVEILSAQDLARTVQRLSSQVLESVDRSQDLLLLGIPTRGVHLASVLARQLEALTGHALAKGTLDPTFHRDDLERVGTRMVQATDLPISIEGRDVLLVDDVIFTGRTIRAALEAIQAWGRPRKVMLLVMVDRGHRELPIQPDFCGRHVPTRRSETIELRLQDVDGEEGVYLRQVQ

SEQ ID NO: 107054 - DNA, 546 bp, Candidatus Desulfococcus oleovorans Hxd3
  CDS (1)..(546): transl_table=11
atggagatggaaaaacgcaccccggtactggacggccagggcatcaacacggtcctgattcgcttggcccgggagatcatccagcgccacaccaacctggagccgctggtaatcatcggggtccacacccggggggtccacctggcccggcgactggccgacaccattgccgagatcaacggcagggccattcccaccggagacatcgacatcaccctgtaccgggacgactggaccaagatcgggtattcgccggtggtccagtccacccagatcgggtttcccattgatgacaaaaccgtgatcctggtggacgacgtgctgtttaccggccgcaccacccgggcggccctggacgcgctcaccgactttggccggcccgccaaggtggagctggccgtgctggtggaccgggagggcatgcgggagctgcccattcaggctgactacgtgggcatgttcgtaaaaaccgacaaggctgaaatggtcaatgtactgttgtcagaaaccgacggtgaagacgcggtggttgtcaatacaccctga

SEQ ID NO: 107055 - protein, 181 aa, Candidatus Desulfococcus oleovorans Hxd3
MEMEKRTPVLDGQGINTVLIRLAREIIQRHTNLEPLVIIGVHTRGVHLARRLADTIAEINGRAIPTGDIDITLYRDDWTKIGYSPVVQSTQIGFPIDDKTVILVDDVLFTGRTTRAALDALTDFGRPAKVELAVLVDREGMRELPIQADYVGMFVKTDKAEMVNVLLSETDGEDAVVVNTP

SEQ ID NO: 107056 - DNA, 519 bp, Pseudomonas putida GB-1
  CDS (1)..(519): transl_table=11
atgagcctacccaatcccgccgagctgatccggcagatggctgtcgaccttcgcgcccacctggcccgccgtcacatcagcgagccgcgctatatcggtatccgcaccggcggtgtctgggttgcccaggccctgcaggaagccatgggcgacaccagccccatgggcaccctggacgtttcgttctaccgcgatgacttcagccagaacggcctgcacccgcaagtgcgtccgtccgagctgccgttcgaagtcgaaggccaacacctggtgctggtggatgacgtactgatgagcggccgcaccattcgcgctgcgctcaacgagctgttcgattatggccgcccggccagcgttaccctggtctgcctgctggacctggatgccggcgaactgccaatccgtccgaacgtgcttggcgccaccctgtcgctggcggcccatgaacgggtaaaattgaccggacccgcaccgctcgccctcgagcgccaggacctcgcctccgcttccgccctttaa

SEQ ID NO: 107057 - protein, 172 aa, Pseudomonas putida GB-1
MSLPNPAELIRQMAVDLRAHLARRHISEPRYIGIRTGGVWVAQALQEAMGDTSPMGTLDVSFYRDDFSQNGLHPQVRPSELPFEVEGQHLVLVDDVLMSGRTIRAALNELFDYGRPASVTLVCLLDLDAGELPIRPNVLGATLSLAAHERVKLTGPAPLALERQDLASASAL

SEQ ID NO: 107058 - DNA, 612 bp, Streptomyces griseus
  CDS (1)..(612): transl_table=11
gtgaggcggagaaggaggtccgtttcttatggacgcacagcacgacgacaccggcaaggcggcacgcccgttctcgaggcccccgacatcgcccgtgttctgacccgtatcgcccacgagatcgtcgaacgcgccaagggcgccgacgacgtggtgctgctcggcatcccgacccggggcgtcttcctcgcccgccggctggccgagaaactccaggagatcaccggccggaagacgccggtcggctcgctcgacatcaccatgtaccgcgacgacctgcggatgcgcccggcgcgcgccctggcccgtaccgacatccccggcgaggggatcgagggcagcctggtcgtcctggtcgacgacgtcctcttctccggccgcacgatccgcgccgccctcgacgcgctcggcgacatcggccgcccccgcgcggtgcagctcgcggtcctcgtcgaccgcggccacagggaactcccgatccgcgcggactacgtcggcaagaatctccccacgtcgctgcgggagacggtcaaggtccagctcgccgaggaggacggccgcgacgccgtgctgctgggcgtcaagcaggccacccccgcggacacgcagtag

SEQ ID NO: 107059 - protein, 203 aa, Streptomyces griseus
MRRRRRSVSYGRTARRHRQGGTPVLEAPDIARVLTRIAHEIVERAKGADDVVLLGIPTRGVFLARRLAEKLQEITGRKTPVGSLDITMYRDDLRMRPARALARTDIPGEGIEGSLVVLVDDVLFSGRTIRAALDALGDIGRPRAVQLAVLVDRGHRELPIRADYVGKNLPTSLRETVKVQLAEEDGRDAVLLGVKQATPADTQ

SEQ ID NO: 107060 - DNA, 543 bp, Lactobacillus plantarum
  CDS (1)..(543): transl_table=11
atggcacgagaagtcgttgatgcaatgaccatgcgccgcgcgctgacgcggatcacttatgagattattgagcagaataagggtgttggtaacctggtatttatcggtatcaagactcgtgggatttttttggcccagcggttagcgcaacgattgaaacagttggaaggcgttgacgtgccagttggttcgttagatatcacgttatatcgggatgatcatcatgcggttgatgttgccggtcaagcgaagctaaatggtgctgatattccggttgatatcaatggcaaacacgttatcttggtcgatgatgtcttatttacaggtcggacagttcgggctgcgctagatgccttgatggaccatggacgtcccgcaaagatttcgttagcggtcttagtcgatcgtggacatcgtgaattaccgatccggcctgattttattggtaaaaatattccaacggccttggatgaacaagtcagtgtcgcccttgaagaacacgacggacatgatggaattagtattgaaaaattagaagaatga

SEQ ID NO: 107061 - protein, 180 aa, Lactobacillus plantarum
MAREVVDAMTMRRALTRITYEIIEQNKGVGNLVFIGIKTRGIFLAQRLAQRLKQLEGVDVPVGSLDITLYRDDHHAVDVAGQAKLNGADIPVDINGKHVILVDDVLFTGRTVRAALDALMDHGRPAKISLAVLVDRGHRELPIRPDFIGKNIPTALDEQVSVALEEHDGHDGISIEKLEE

SEQ ID NO: 107062 - DNA, 525 bp, Lactobacillus plantarum
  CDS (1)..(525): transl_table=11
atgcaaaaagaagttgttgattcaatggcgatgaaacgggcattgacccggatcacctatgaaattatcgaacagaacaaaggcattaaaaatgtcgtcttagtgggcgttaaaacccgcggcgtctatattgcgcagcggattgcagcccaattacaacagcttgaaggtactgcgattccagttggcgagttagacatcacggcatttcgtgatgatcagccgctggatcaagcacggctttcaacggactatcagttaacgttttcggtggcggataagcgggtcattttagtcgatgatgttctatttaccggccgaacaattcgcgcggctttagacgcattaatgggtggcggtcggccccagagcattgccttggcggtactagtcgatcgtggtcaccgcgaattgccgattcgcgctgattttattggtcgcaacattcccaccgcgcgtcaagaacgcatcaaagtgacggtcaatgaaatcgacggtcacgatggtattgaaattattaactag

SEQ ID NO: 107063 - protein, 174 aa, Lactobacillus plantarum
MQKEVVDSMAMKRALTRITYEIIEQNKGIKNVVLVGVKTRGVYIAQRIAAQLQQLEGTAIPVGELDITAFRDDQPLDQARLSTDYQLTFSVADKRVILVDDVLFTGRTIRAALDALMGGGRPQSIALAVLVDRGHRELPIRADFIGRNIPTARQERIKVTVNEIDGHDGIEIIN

SEQ ID NO: 107064 - DNA, 540 bp, Bacillus caldolyticus
  CDS (1)..(540): transl_table=11
atgcaaaaggcggtcgtgatggacgaacaggcgattcgccgcgctttgacgcgcatcgcccacgaaatcatcgaacgaaacaaaggcattgacggctgcgtgcttgtcggaattaaaacgcgcggcatttacttggcgcgccgcttggcggagcggatcgagcaaattgaaggggcgtccgttcccgtcggtgagcttgacatcaccttgtaccgcgacgatttgaccgtgaagacggacgaccatgaaccgcttgtgaaaggaacgaatgtgccgtttccggtgaccgagcggaatgtcattttagttgatgacgtgctcttcaccggccggacggtgcgggcggcgatggatgcggtcatggatttgggccgcccggcgcgcatccagctcgccgtgcttgttgaccgcggccacagggaactcccgatccgcgctgatttcgtcggcaaaaacgtgccgacctctcgttcggaactgatcgtcgtggagctttcggaagtggacggcatcgatcaagtctccattcatgaaaaatag

SEQ ID NO: 107065 - protein, 179 aa, Bacillus caldolyticus
MQKAVVMDEQAIRRALTRIAHEIIERNKGIDGCVLVGIKTRGIYLARRLAERIEQIEGASVPVGELDITLYRDDLTVKTDDHEPLVKGTNVPFPVTERNVILVDDVLFTGRTVRAAMDAVMDLGRPARIQLAVLVDRGHRELPIRADFVGKNVPTSRSELIVVELSEVDGIDQVSIHEK

SEQ ID NO: 107066 - DNA, 546 bp, Bacillus subtilis
  CDS (1)..(546): transl_table=11
ttgaatcaaaaagctgtcattctcgacgaacaggcaattagacgggcgctgaccaggattgctcacgaaatgatcgaacgcaataaaggaatgaataactgcattcttgtcggcattaagacaagagggatttacctggcaaaacgccttgcggaacgcattgaacagattgagggaaatcctgttacagtcggtgaaattgatattactctttacagagatgatctttctaaaaaaacaagcaacgatgaaccgcttgtaaaaggtgcagatattccggtagatattacagatcaaaaagtcattctcgttgatgatgttctgtataccggaagaacagtcagagcaggaatggatgcgcttgttgatgtaggcagaccttcctccattcagcttgcagtgcttgtggacagaggacaccgggagctgccgatccgagcggattatatcgggaaaaacatcccgacatcaaagtctgaaaaggttatggtacagcttgatgaggtagaccaaaacgatctcgtcgccatttatgaaaacgaataa

SEQ ID NO: 107067 - protein, 181 aa, Bacillus subtilis
MNQKAVILDEQAIRRALTRIAHEMIERNKGMNNCILVGIKTRGIYLAKRLAERIEQIEGNPVTVGEIDITLYRDDLSKKTSNDEPLVKGADIPVDITDQKVILVDDVLYTGRTVRAGMDALVDVGRPSSIQLAVLVDRGHRELPIRADYIGKNIPTSKSEKVMVQLDEVDQNDLVAIYENE

SEQ ID NO: 107068 - DNA, 537 bp, Clostridium acetobutylicum
  CDS (1)..(537): transl_table=11
atgaatttaaaagcaaagattttagatgataaggctatgcaaaggactttgaccagaatagcacatgaaattatagaaaagaataaaggtatagatgatatagtactagtaggaataaagagaagaggagttccaatagccgatagaatagcggatataattgaagaaatagaaggaagtaaggttaagctaggaaaagtagatataaccttatatagagacgatttgtctacggtaagttctcaaccaatagtaaaagatgaggaagtatatgaagatgtaaaggataaggtagtaatacttgttgatgacgttttatatacaggaagaacatgcagagcagccatagaagctattatgcatagaggaagaccaaagatgatacagcttgcagttttgatagataggggacatagagaacttcctataagggcagattatgttggaaaaaatgtacctacatcaaaaagtgaattgatatcggtaaatgttaaaggaatagatgaagaggattcagtaaacatttatgagttgtag

SEQ ID NO: 107069 - protein, 178 aa, Clostridium acetobutylicum
MNLKAKILDDKAMQRTLTRIAHEIIEKNKGIDDIVLVGIKRRGVPIADRIADIIEEIEGSKVKLGKVDITLYRDDLSTVSSQPIVKDEEVYEDVKDKVVILVDDVLYTGRTCRAAIEAIMHRGRPKMIQLAVLIDRGHRELPIRADYVGKNVPTSKSELISVNVKGIDEEDSVNIYEL

SEQ ID NO: 107070 - DNA, 537 bp, Clostridium perfringens
  CDS (1)..(537): transl_table=11
atgcatcttaaggcaagtttattagatgaaaatgctataagaagagcacttacaagactttcacatgagataatagaaaagaataaaggggtagaggatatagttcttgttggaattaagagaagaggatatcctttagcagagagactttcagagtttatagaaaagtttgaaggagttaaaattcctgttgctagtgttgacataacattatatagagatgatttaactaatgttagtgatacgccaaatttaaatgatcctaaaatagatgtggatataagagggaaaaaggttattatagttgatgatgttttatatacttgtagaacagctagagcagctattgatgcaataatggatcaaggaagaccagaatttatacagttagctgttttagtagatagaggacacaaggaattaccaataagagctgactatgttggaaagaatattcctacatcaaaggatgaaataataaaggttcaaatcaaagagattgatggaactgattcagttgaaatatatgaaaattaa

SEQ ID NO: 107071 - protein, 178 aa, Clostridium perfringens
MHLKASLLDENAIRRALTRLSHEIIEKNKGVEDIVLVGIKRRGYPLAERLSEFIEKFEGVKIPVASVDITLYRDDLTNVSDTPNLNDPKIDVDIRGKKVIIVDDVLYTCRTARAAIDAIMDQGRPEFIQLAVLVDRGHKELPIRADYVGKNIPTSKDEIIKVQIKEIDGTDSVEIYEN

SEQ ID NO: 107072 - DNA, 579 bp, Corynebacterium glutamicum
  CDS (1)..(579): transl_table=11
atgagcgaacgtaatagtgctgtactagaactccttaatgaggacgacgtcagccgtaccatcgcacgcatcgcgcaccagattattgagaaaaccgcgcttgattccaaagacgcggatcgggtcatgttgttaggtattccctcaggtggagtcccattggcccgtaggctcgctgaaaagatcgaagaattttccggcgtttcggtagataccggcgctgttgatatcaccttgtacagggatgatcttcgaaacaaaccacaccgcgcactgcagcccacctctattccagcaggtggtatcgataacaccaccgtgattttggtggatgatgtgctgttttccggtcgtaccatccgcgctgcacttgatgctttgcgcgacgttggacgccccaactacatccagttagctgtgttggttgaccgcggtcatcgccagctgcccattcgcgctgactatgtgggcaaaaatctccccaccgcacgcgcggaagacgtttccgtcatgcttacagaaatcgacggccgcgatgcagtcacgctcacccgagaagactctgaaggggattcctag

SEQ ID NO: 107073 - protein, 192 aa, Corynebacterium glutamicum
MSERNSAVLELLNEDDVSRTIARIAHQIIEKTALDSKDADRVMLLGIPSGGVPLARRLAEKIEEFSGVSVDTGAVDITLYRDDLRNKPHRALQPTSIPAGGIDNTTVILVDDVLFSGRTIRAALDALRDVGRPNYIQLAVLVDRGHRQLPIRADYVGKNLPTARAEDVSVMLTEIDGRDAVTLTREDSEGDS

SEQ ID NO: 107074 - DNA, 552 bp, Deinococcus radiodurans
  CDS (1)..(552): transl_table=11
atgaccgcccccaaggccaccattctgagcagtgacgagattcgccgcgccctgacgcgcatcgcccacgagatcatcgagcgcaataaaggcgccgagaacctcgccatcatcggggtgcacacgcgcgggattccgcttgccgagcgcctggcgagcaaactcagcgaactcgaaggcgtcgaggtgccgcgcggcatgctcgacatcacgctctaccgcgacgacctctccgaagtcgcacggcagccgatcatccgcgaaacgcaggtgccgttcgacctcgcggaccgccgggtgattctggtggacgacgtgctctacaccggacgcaccgtgcgcgccgcgctcgacgccctgatcgacctggggcgtccggaagggattcaactcgctgtgctggtggaccgggggcaccgcgagctgccgattcgggccgactacgtgggcaaaaacctgcccaccgccaagcacgaggtcgtgaaggtgaagttgcaggaaaccgacggcaccgacatcgtggagttgttcgacccggaggacctgcaatga

SEQ ID NO: 107075 - protein, 183 aa, Deinococcus radiodurans
MTAPKATILSSDEIRRALTRIAHEIIERNKGAENLAIIGVHTRGIPLAERLASKLSELEGVEVPRGMLDITLYRDDLSEVARQPIIRETQVPFDLADRRVILVDDVLYTGRTVRAALDALIDLGRPEGIQLAVLVDRGHRELPIRADYVGKNLPTAKHEVVKVKLQETDGTDIVELFDPEDLQ

SEQ ID NO: 107076 - DNA, 537 bp, Enterococcus faecalis
  CDS (1)..(537): transl_table=11
atgccaaagaaagaagttgttgacgcagtcacaatgaaacgagcgcttactcgaatctcgtatgaaattattgaaagaaacaaaggaattcaagacattgttttagtaggaattaaaacgcgtgggatatacattgcacaacgtctagccgaacgcttaaaacaattagaagatattgacgtgccagttggtgaattagatattactttgtatcgtgatgatgtgaaagatatggaggaacctgaattacattcttctgacgtaccagtctcaattgaaggtaaagaagttattttagtggatgatgtcttgtacacgggccggaccattcgtgctgcgatggacgctgttatggatttaggtcgtccgagaaaaatctctttagcagtcttagtagatcgtggacatcgggaactaccgattcgtgccgattatgtaggaaaaaatattccaacatcaaaaactgaggaaattattgtggaaatggaagagcgtgacggcgcagatcgtattatgatcagtaaaggaaacgaataa

SEQ ID NO: 107077 - protein, 178 aa, Enterococcus faecalis
MPKKEVVDAVTMKRALTRISYEIIERNKGIQDIVLVGIKTRGIYIAQRLAERLKQLEDIDVPVGELDITLYRDDVKDMEEPELHSSDVPVSIEGKEVILVDDVLYTGRTIRAAMDAVMDLGRPRKISLAVLVDRGHRELPIRADYVGKNIPTSKTEEIIVEMEERDGADRIMISKGNE

SEQ ID NO: 107078 - DNA, 540 bp, Haemophilus ducreyi
  CDS (1)..(540): transl_table=11
atggaaaaaattattattgataccgagcaatttcaacgtactatttcacgaatctctcatcaaattattgagaaacacgctattcttgataatataatcttagttggcattaaacgtcgtggtgctgaaattgcagaaatgttgcaaaaaagaattagtgaacttgcacaaattagtttaccgctaatggctcttgatattaccttttatcgagatgatttaaatttaacgagcaaagatcctgtttatactggagtagaacatcaactcaatatcgaaggtaaaacggttattttaattgatgatgtcctatttactggacgaactattcgtgcggcattagacgcactacttgattttggacgagccaagcgaattgaattggttattttagtcgatcgtggccatcgagaattacctattcgagcagattatgtgggcaaaaatatccccactgcgctaaatgaacaagtacaagttagaactgaacattatgatggtgtaagccaagtcgctttaatccattccactaatggataa

SEQ ID NO: 107079 - protein, 179 aa, Haemophilus ducreyi
MEKIIIDTEQFQRTISRISHQIIEKHAILDNIILVGIKRRGAEIAEMLQKRISELAQISLPLMALDITFYRDDLNLTSKDPVYTGVEHQLNIEGKTVILIDDVLFTGRTIRAALDALLDFGRAKRIELVILVDRGHRELPIRADYVGKNIPTALNEQVQVRTEHYDGVSQVALIHSTNG

SEQ ID NO: 107080 - DNA, 552 bp, Listeria monocytogenes
  CDS (1)..(552): transl_table=11
atgcaaaaacaagtagttgtcatggacgaggcggcaatcaaacgtgcgctcactcgagtaagttacgaaatcatcgagcggaataaaggcacaaagaatttagcgcttgtcggtattaagacgcgtggtatctatcttgccgagcgcttgcataagcggatacttgaaattgagggtattgatgtgccagttggggatattgacattacactttatcgcgatgatttgtctttcaaagatgataaaactcgcgaacccgctgtacatgggacgaacattccatttgatattaatggaaagaaggtcgttcttgtagatgatgtgctttatacaggtcgaactgtgcgtgccgcaatggacgcattaatggatgtaggtagacctgcgcaaattcaccttgcagtgcttgctgatcggggtcatagagagcttccaatcagagcagactacgtagggaaaaacattccaacctcagggaacgagcgagtagaagttcgcttaacagatgtggatcatgcagaagatgcagttattattaacaaaaatgaataa

SEQ ID NO: 107081 - protein, 183 aa, Listeria monocytogenes
MQKQVVVMDEAAIKRALTRVSYEIIERNKGTKNLALVGIKTRGIYLAERLHKRILEIEGIDVPVGDIDITLYRDDLSFKDDKTREPAVHGTNIPFDINGKKVVLVDDVLYTGRTVRAAMDALMDVGRPAQIHLAVLADRGHRELPIRADYVGKNIPTSGNERVEVRLTDVDHAEDAVIINKNE

SEQ ID NO: 107082 - DNA, 582 bp, Mycobacterium bovis
  CDS (1)..(582): transl_table=11
atgggtgctgcgggtgatgccgcaatcggccgggagtcccgcgagttgatgtccgcggccgacgtcggccgcacgatttcgcgcatcgcgcatcagattatcgagaagaccgcgttagatgacccagtcggacccgacgcgccgcgggtggtgctgctgggaatcccgacccgtggcgtgacgctggcgaatcgcctggccggcaatatcaccgaatacagcggcatccacgtcggccatggcgcgctggacatcaccctgtaccgcgacgatctgatgatcaagccgccgcggcccttggcgtcgacgtcgatcccggccggtgggatcgatgacgcgctggtgatcctggtcgatgacgtgctctactccgggcgctcggtgcgttccgccctggacgcgctgcgcgacgtgggccggccgcgggcggtgcaattggcggtgctggtcgacaggggtcaccgggaactgccgctgcgcgccgactatgtgggcaagaacgttccgacctcgcgcagcgagagcgtgcacgtgcggctgcgcgagcacgacggccgtgacggcgtggtgatctcgcgatga

SEQ ID NO: 107083 - protein, 193 aa, Mycobacterium bovis
MGAAGDAAIGRESRELMSAADVGRTISRIAHQIIEKTALDDPVGPDAPRVVLLGIPTRGVTLANRLAGNITEYSGIHVGHGALDITLYRDDLMIKPPRPLASTSIPAGGIDDALVILVDDVLYSGRSVRSALDALRDVGRPRAVQLAVLVDRGHRELPLRADYVGKNVPTSRSESVHVRLREHDGRDGVVISR

SEQ ID NO: 107084 - DNA, 546 bp, Pasteurella multocida
  CDS (1)..(546): transl_table=11
atggaaaaaatcattattgatgaaaaccaatttcttcgcaccatttcccgtatttcacacgagattatcgaaaaacaccaacgtttagacaatattgtcattgtaggcattaaacgacgtggtgcggaaattgcggagttaattaagaaaaaaattgctgacctcgcaaacgttgagttaccctcaattgatctggacatcaccttttaccgtgatgatttagaatatgctgaacctgactccaaatcgcctacctatagcggtgcctccagttttattagtatccacaataaagaagtgattttagtcgatgacgtactttataccggcagaaccattcgcgcagcacttgatgcattagtggatttcggtcgtgccgcgaaaattgagcttgttatttttgtggacagagggcaccgtgaactgccaattcgcgcggattatgtcggtaaaaacgttccaaccagtcgcagtgaagaagtgcaagtacgcaccctgaagttcgacaattgttatgaagttgcactactttcgccgacaaaataa

SEQ ID NO: 107085 - protein, 181 aa, Pasteurella multocida
MEKIIIDENQFLRTISRISHEIIEKHQRLDNIVIVGIKRRGAEIAELIKKKIADLANVELPSIDLDITFYRDDLEYAEPDSKSPTYSGASSFISIHNKEVILVDDVLYTGRTIRAALDALVDFGRAAKIELVIFVDRGHRELPIRADYVGKNVPTSRSEEVQVRTLKFDNCYEVALLSPTK

SEQ ID NO: 107086 - DNA, 519 bp, Pseudomonas putida
  CDS (1)..(519): transl_table=11
atgagcctacccaatcccgccgacctgattcggcagatggctgtcgaccttcgtgcccacctggcgcgccgggcaatcaccgagccccgttacatcggtatccgcaccggcggtgtatgggttgcccaggccctgcaggaagccatgggcgacagcagccccatgggcaccctggacgtctcgttctaccgcgacgacttcagccagaacggcctgcacccgcaagttcgcccgtccgagctgcctttcgaggtcgagggccagcacctggtgctggtggatgacgtactgatgagcggtcgcaccatccgcgcggcgctcaacgaactgttcgattacggccgcccggccagcgtcaccctggtctgcctgctggacctggatgccggcgaattgccgatccgtccgaatgtgctcggtgccaccctgtcgctggccgcccatgaacgggtaaaattgaccggacccgcaccgctcgccctcgagcgccaggacctcgcctcccgttccgccctttaa

SEQ ID NO: 107087 - protein, 172 aa, Pseudomonas putida
MSLPNPADLIRQMAVDLRAHLARRAITEPRYIGIRTGGVWVAQALQEAMGDSSPMGTLDVSFYRDDFSQNGLHPQVRPSELPFEVEGQHLVLVDDVLMSGRTIRAALNELFDYGRPASVTLVCLLDLDAGELPIRPNVLGATLSLAAHERVKLTGPAPLALERQDLASRSAL

SEQ ID NO: 107088 - DNA, 528 bp, Staphylococcus epidermidis
  CDS (1)..(528): transl_table=11
atgtctgaacgaattattttagatgatgcagcgatacaacgtacaattacacgaattgctcatgaaattctagaatataacaagggaaccaaagatttagttctattaggcattaaaactaggggtgcttttttagcacatcgtatacaagataaaataaattcaattgaacaacaattagtaccaacaggtactatcgatattacacattttcgagatgacgttgataaggtagtgcaacaagctgatcaacgcgcttttgatattaatgtagatattaataacaaagtggttgttatcattgatgatgttttgtataccggacgtacagtaagagcctcattagatgcgattttattacatacaagacctattaaaatagggcttgcagcacttgtggatcgcggtcatcgtgaactccctatacgcgcagattttgtaggaaaaaatatacctactgcacgagatgaatctgtttcagtttatttagaagaaattgacgacagaaatgcagtcgtcattgaataa

SEQ ID NO: 107089 - protein, 175 aa, Staphylococcus epidermidis
MSERIILDDAAIQRTITRIAHEILEYNKGTKDLVLLGIKTRGAFLAHRIQDKINSIEQQLVPTGTIDITHFRDDVDKVVQQADQRAFDINVDINNKVVVIIDDVLYTGRTVRASLDAILLHTRPIKIGLAALVDRGHRELPIRADFVGKNIPTARDESVSVYLEEIDDRNAVVIE

SEQ ID NO: 107090 - DNA, 582 bp, Streptomyces coelicolor
  CDS (1)..(582): transl_table=11
atggacaagcaacaggaccagcagcaggaagcccggcccgttctcgaagggcccgacatcgcgcgggtgctgacccgcatcgcccacgagatcgtcgaacgcgccaagggcgccgacgacgtggtgctcctcggcatcccgacccggggcgtcttcctcgcccggcggctcgccgacaagctggagcagatcaccgaacgcaagatgccggtcggctcgctggacatcaccatgtaccgcgacgacctgcgcatgcatccgccgcgcgccctggcccgcaccgagatccccggtgacggcatcgacggccgcctcgtcgtcctcgtcgacgacgtgctcttctccggccgcaccatccgcgccgccctcgacgcgctgaacgacatcggccgcccgcgcgcggtgcagctcgccgtactcgtcgaccgcggccaccgcgaactgcccatccgcgccgactacgtcggcaagaacctcccgacgtcgctgcgggagacggtcaaggtccagctcgccgaggaggacggtcgcgacaccgtgctgctcggtgccaagccggccgccccgggcgcccacccctag

SEQ ID NO: 107091 - protein, 193 aa, Streptomyces coelicolor
MDKQQDQQQEARPVLEGPDIARVLTRIAHEIVERAKGADDVVLLGIPTRGVFLARRLADKLEQITERKMPVGSLDITMYRDDLRMHPPRALARTEIPGDGIDGRLVVLVDDVLFSGRTIRAALDALNDIGRPRAVQLAVLVDRGHRELPIRADYVGKNLPTSLRETVKVQLAEEDGRDTVLLGAKPAAPGAHP

SEQ ID NO: 107092 - DNA, 537 bp, Thermoanaerobacter tengcongensis
  CDS (1)..(537): transl_table=11
atgagagtaaaagcagagataatggacgaaaaagctatagatagagctttgataagaatagctcacgagattgttgaaagaaataaagggatagaggatgtagttttagtaggcattaagacaagaggagtacctctggctaagagaattgcgaggtacatttctagaatagaagggaaagaacctccagtggggtctcttgatattacgctgtatcgggatgacctcaccacagaccttgaacagcctgtagtaaagaagaaagatattggagtggatgtagccaataaaatagtggtcttagtagacgatgtgatatacacaggcaggactgtgagggctgcaatggatgccataattgacctggggcgacccaaagcaatacagcttgctgagcttgtggacagaggtcacagggaacttcctataaggcctgactatgttgggaagaatgttccgacatctagaagcgagataattcaagtgatgctggaagaagtggatggagtgaataaagtagttataactgaaaagtag

SEQ ID NO: 107093 - protein, 178 aa, Thermoanaerobacter tengcongensis
MRVKAEIMDEKAIDRALIRIAHEIVERNKGIEDVVLVGIKTRGVPLAKRIARYISRIEGKEPPVGSLDITLYRDDLTTDLEQPVVKKKDIGVDVANKIVVLVDDVIYTGRTVRAAMDAIIDLGRPKAIQLAELVDRGHRELPIRPDYVGKNVPTSRSEIIQVMLEEVDGVNKVVITEK

SEQ ID NO: 107094 - DNA, 25 bp, Artificial sequence
  primer
atggcggcccagatcattgaaattc

SEQ ID NO: 107095 - DNA, 21 bp, Artificial sequence
  primer
ttaacctttaattaactccac

SEQ ID NO: 107096 - protein, 176 aa, Artificial sequence
  consensus sequence
  Variant (2)..(4): Xaa in position 2 to 4 is any amino acid
  Variant (6)..(11): Xaa in position 6 to 11 is any amino acid
  Variant (13)..(20): Xaa in position 13 to 20 is any amino acid
  Variant (21)..(30): Xaa in position 21 to 30 is any or no amino acid
  Variant (33)..(34): Xaa in position 33 to 34 is any amino acid
  Variant (37)..(39): Xaa in position 37 to 39 is any amino acid
  Variant (41)..(53): Xaa in position 41 to 53 is any amino acid
  Variant (54)..(62): Xaa in position 54 to 62 is any or no amino acid
  Variant (64)..(65): Xaa in position 64 to 65 is any amino acid
  Variant (67)..(67): Xaa in position 67 is any amino acid
  Variant (69)..(69): Xaa in position 69 is any amino acid
  Variant (74)..(91): Xaa in position 74 to 91 is any amino acid
  Variant (92)..(99): Xaa in position 92 to 99 is any or no amino acid
  Variant (101)..(101): Xaa in position 101 is any amino acid
  Variant (107)..(109): Xaa in position 107 to 109 is any amino acid
  Variant (113)..(113): Xaa in position 113 is any amino acid
  Variant (117)..(118): Xaa in position 117 to 118 is any amino acid
  Variant (120)..(123): Xaa in position 120 to 123 is any amino acid
  Variant (127)..(130): Xaa in position 127 to 130 is any amino acid
  Variant (132)..(133): Xaa in position 132 to 133 is any amino acid
  Variant (135)..(135): Xaa in position 135 is any amino acid
  Variant (138)..(138): Xaa in position 138 is any amino acid
  Variant (146)..(147): Xaa in position 146 to 147 is any amino acid
  Variant (149)..(150): Xaa in position 149 to 150 is any amino acid
  Variant (152)..(154): Xaa in position 152 to 154 is any amino acid
  Variant (157)..(159): Xaa in position 157 to 159 is any amino acid
  Variant (161)..(169): Xaa in position 161 to 169 is any amino acid
  Variant (170)..(170): Xaa in position 170 is any or no amino acid
  Variant (172)..(175): Xaa in position 172 to 175 is any amino acid
RXXXRXXXXXXEXXXXXXXXXXXXXXXXXXGIXXRGXXXAXXXXXXXXXXXXXXXXXXXXXXGXXDXTXYRDDXXXXXXXXXXXXXXXXXXXXXXXXXXVXLVDDVXXXGRTXRAAXXAXXXXGRPXXXXLXXLXDRXGHRELPIXXDXXGXXXPTXXXEXXXXXXXXXXDXXXXV

SEQ ID NO: 107097 - protein, 36 aa, Artificial sequence
  protein pattern
  Variant (2)..(2): Xaa in position 2 is Ile or Val
  Variant (6)..(6): Xaa in position 6 is Ile, Leu or Val
  Variant (7)..(8): Xaa in position 7 to 8 is any amino acid
  Variant (11)..(11): Xaa in position 11 is any or no amino acid
  Variant (13)..(13): Xaa in position 13 is any or no amino acid
  Variant (17)..(17): Xaa in position 17 is Ile, Leu or Met
  Variant (18)..(18): Xaa in position 18 is Asp, Glu or Asn
  Variant (19)..(19): Xaa in position 19 is Ala, Glu or Asn
  Variant (20)..(23): Xaa in position 20 to 23 is any amino acid
  Variant (26)..(26): Xaa in position 26 is Ala, Pro or Ser
  Variant (27)..(28): Xaa in position 27 to 28 is any amino acid
  Variant (29)..(29): Xaa in position 29 is Ile or Val
  Variant (30)..(30): Xaa in position 30 is any amino acid
  Variant (32)..(33): Xaa in position 32 to 33 is any amino acid
  Variant (34)..(34): Xaa in position 34 is Phe, Ile, Leu, Met or Val
  Variant (35)..(35): Xaa in position 35 is any amino acid
LXDDVXXXGRXTXRAAXXXXXXXGRXXXXXLXXXXD

SEQ ID NO: 107098 - protein, 26 aa, Artificial sequence
  protein pattern
  Variant (4)..(4): Xaa in position 4 is Glu or Gln
  Variant (7)..(7): Xaa in position 7 is Ile, Leu or Val
  Variant (8)..(8): Xaa in position 8 is any amino acid
  Variant (9)..(9): Xaa in position 9 is Ala or Pro
  Variant (10)..(10): Xaa in position 10 is any amino acid
  Variant (11)..(11): Xaa in position 11 is Phe, His or Tyr
  Variant (12)..(12): Xaa in position 12 is any amino acid
  Variant (14)..(14): Xaa in position 14 is Glu, Lys or Arg
  Variant (15)..(15): Xaa in position 15 is any amino acid
  Variant (16)..(16): Xaa in position 16 is Ile, Leu, Met or Val
  Variant (17)..(17): Xaa in position 17 is Pro, Gln or Thr
  Variant (18)..(18): Xaa in position 18 is Ser or Thr
  Variant (19)..(21): Xaa in position 19 to 21 is any amino acid
  Variant (23)..(23): Xaa in position 23 is any amino acid
  Variant (24)..(24): Xaa in position 24 is Ile or Val
  Variant (25)..(25): Xaa in position 25 is any amino acid
  Variant (26)..(26): Xaa in position 26 is Leu or Val
GHRXLPXXXXXXGXXXXXXXXEXXXX

SEQ ID NO: 107099 - protein, 11 aa, Artificial sequence
  protein pattern
  Variant (2)..(2): Xaa in position 2 is any amino acid
  Variant (3)..(3): Xaa in position 3 is Ile or Leu
  Variant (5)..(5): Xaa in position 5 is Ile, Pro or Val
  Variant (6)..(6): Xaa in position 6 is Ala, Asn, Ser or Thr
  Variant (7)..(7): Xaa in position 7 is any amino acid
  Variant (8)..(8): Xaa in position 8 is Phe, His or Tyr
GXXDXXXXRDD

SEQ ID NO: 107100 - DNA, 468 bp, Synechocystis sp.
  CDS (1)..(468): transl_table=11
atgttttttcaatttgaagctgattttgttgattccctccgctgtattcccatggttgtgcgttataaactagacacctgtggcgttaaattaaaattaagtcattggcatcaactgagtttggaacaaaggcagtatttgactgaagctagttgtgaaacaccaacagaagttagccaatatggggaaaagctgcaaaattggataacggaattaactggcaagccagcttccacattatcagtgccggatttacccgattggttaaatgccaatcaaattccagctcaaatattaacggagttaaataataaattaccgtctttggaatcttccggcattacgttgactcaatggcaatccctgactcctttgcaaagatttgctttaattaaactaagtcgtgctggccacgaaaatcgtaattttctgctggccatcaaagaatttgatctgatgccaagctga

SEQ ID NO: 107101 - protein, 155 aa, Synechocystis sp.
MFFQFEADFVDSLRCIPMVVRYKLDTCGVKLKLSHWHQLSLEQRQYLTEASCETPTEVSQYGEKLQNWITELTGKPASTLSVPDLPDWLNANQIPAQILTELNNKLPSLESSGITLTQWQSLTPLQRFALIKLSRAGHENRNFLLAIKEFDLMPS

SEQ ID NO: 107102 - DNA, 462 bp, Nostoc sp. PCC 7120
  CDS (1)..(462): transl_table=11
atggcagaattctttgaatttgaatcagattttgttgattccctgcgctgcatacctatgcaggtgcgctataaacttgatacctgcggcattaagctaaaattagctgactggaaccagatgactcaagccgaaagagaggctttagttgaattaccttgcacgacagcagcagaaattcaatcttaccaagaatatatccaacatttaattatcaatcgaactggtacaccacctggaaatttaccgattgactctaagccagcttggctagactctagcagcataccagatagcattgaagataaagctcaagaaataggcgtgactttaactttgtcacagtgggtaaatttaacgcccttacaacgttttgctttaattaaactcagccgttcaggacatgaaaacaaaaattttcccaaggcgatcgccgagtttaatataagtagaatagggtag

SEQ ID NO: 107103 - protein, 153 aa, Nostoc sp. PCC 7120
MAEFFEFESDFVDSLRCIPMQVRYKLDTCGIKLKLADWNQMTQAEREALVELPCTTAAEIQSYQEYIQHLIINRTGTPPGNLPIDSKPAWLDSSSIPDSIEDKAQEIGVTLTLSQWVNLTPLQRFALIKLSRSGHENKNFPKAIAEFNISRIG

SEQ ID NO: 107104 - DNA, 456 bp, Thermosynechococcus elongatus BP-1
  CDS (1)..(456): transl_table=11
atgtcctacttctttgagtttgaagctgagtttacggcttccttgcgctgtatcccaatgattgtccgctacaagctggatctgtgtggagtgaaactgaagctgctccactggcatcaactttcccaacaacagcgacaatggcttgttgttgccccctgtaacactccggaagatcaggccacctatcgccagcaactgcgggattgggtgacccacaaccatggaaccccaccaagtgatttagagattccccagaccttcccttgggatatcctcacagagctcccagaaactgtgcagcaacaactgaccaaggtaccccaccacagcctgacggtggaaaaatgggcaaccctgacccccctacaacgctttgcccttgtgaagctcagtcagcccggccacgagaatcgcaatttttggccagcattgcaggaatttggtttggcctaa

SEQ ID NO: 107105 - protein, 151 aa, Thermosynechococcus elongatus BP-1
MSYFFEFEAEFTASLRCIPMIVRYKLDLCGVKLKLLHWHQLSQQQRQWLVVAPCNTPEDQATYRQQLRDWVTHNHGTPPSDLEIPQTFPWDILTELPETVQQQLTKVPHHSLTVEKWATLTPLQRFALVKLSQPGHENRNFWPALQEFGLA

SEQ ID NO: 107106 - DNA, 468 bp, Synechococcus sp. WH 8102
  CDS (1)..(468): transl_table=11
atggccagcacctctgattcatccagccattgttttgctttcgagcaggatttcatcggtacctggcgttgcattcccctttgcgtgcgccgcaagttggatctggccggtgtgaagctcaagctcagccactggttggcactcacgcagaaccagcggcaagagctggtggattggtcggacgctgcaaatgcgctcgatcaactccggcagtacctgcgggatctcacagaggggatggctgatggtgtggtgaaggatttgccgccggctgtgggcgcagcctggcagcagcagtccgttttaccggcagagattcaccgcgctgcggtggcccggggtgtggagttgacgcctgagcaatgggcccacgtcactgagctggaacgtttcgctctctgcaagctggtgcggccgggtcatgaccaccacaacctggatgccgccttcagcgaagtgctggggtga

SEQ ID NO: 107107 - protein, 155 aa, Synechococcus sp. WH 8102
MASTSDSSSHCFAFEQDFIGTWRCIPLCVRRKLDLAGVKLKLSHWLALTQNQRQELVDWSDAANALDQLRQYLRDLTEGMADGVVKDLPPAVGAAWQQQSVLPAEIHRAAVARGVELTPEQWAHVTELERFALCKLVRPGHDHHNLDAAFSEVLG

SEQ ID NO: 107108 - DNA, 480 bp, Burkholderia pseudomallei K96243
  CDS (1)..(480): transl_table=11
atgggactgagcgacgcgccgttgctgttcaatttcgaaatcgaatcgtcggaggatctgacctacattccgatgatcgtccgcttcaacctcgaccgtttcgggctgaggatctcgctcgagcaatggcagatgctgccgctcgaggatcgcaggctgctcgcgcgctttccggccgacgaggacgtcgtgatcgagccgaatttcgatcatgcgctgttcgagatgctgcgcacgcacgcgaacgtcgagccgagctggttccagccggacgagcatccggcgtggcgcagcgtcgacgcggtgccggacgcgctcgtcgcgcaaagcgggctcgccggcctgccggcgccgtccgcgtcgcagtgggcgacgctcacgccgtttcagcgctacgtgctcacgaagctgtcgcgcaagccgaagctcaatcacgatttcgttcccgcgatgcgcgagttcggtctcgccgcgcactga

SEQ ID NO: 107109 - protein, 159 aa, Burkholderia pseudomallei K96243
MGLSDAPLLFNFEIESSEDLTYIPMIVRFNLDRFGLRISLEQWQMLPLEDRRLLARFPADEDVVIEPNFDHALFEMLRTHANVEPSWFQPDEHPAWRSVDAVPDALVAQSGLAGLPAPSASQWATLTPFQRYVLTKLSRKPKLNHDFVPAMREFGLAAH

SEQ ID NO: 107110 - DNA, 486 bp, Synechococcus elongatus PCC 6301
  CDS (1)..(486): transl_table=11
atgacctcttctgccagtccgttttttcaattcgaggctgactttgtgctcggcctacgctgcatccccatgagcgtgcgccgcaaactcgatgactgtggcgtcaagctcaagctagaacactggcaccgtctctcggaagccgagcgccaacaactggttgattggccctgtgagagcgatcgcgatcgccaagcctaccggcagcaactccgtgattggacccagcgcgattggggggagcccgccaaagatttaccgattgatcctcaaccggcttggctgcaacctgagattccagaggcagtggaggccgcctgccaagtgctgcaggtcagtctcagtcctgatgactggcaagggctagaacccctccaacgctttgccttgattaagctggcgcgtcccggccatgaacatcgcaacctttatccagcgctgcaggaatttggcctcaccgagcgatcgccccttgaggctgactga

SEQ ID NO: 107111 - protein, 161 aa, Synechococcus elongatus PCC 6301
MTSSASPFFQFEADFVLGLRCIPMSVRRKLDDCGVKLKLEHWHRLSEAERQQLVDWPCESDRDRQAYRQQLRDWTQRDWGEPAKDLPIDPQPAWLQPEIPEAVEAACQVLQVSLSPDDWQGLEPLQRFALIKLARPGHEHRNLYPALQEFGLTERSPLEAD

SEQ ID NO: 107112 - DNA, 453 bp, Anabaena variabilis ATCC 29413
  CDS (1)..(453): transl_table=11
atggcagacttctttaaatttgaagcagactttgttgattctctacgttgcatacccatgcaggtgcgctacaaacttgatacctgcggcattaaacttaaattatctgattggaaccaaatgactcaagccgaaagagaagctttagtcgaactaccatgcactacaaccgcagaaattcaatattatcaagaatatatccagcagctgattgtaaatcgaactggcacactacccacaacgctaccgattgagtctgaacctgcatggctagactctaaggccataccaattagtattcaggataaagctcaagaaacaggcgtgattgtaactttatcacagtgggagaatttaagcccattacagcgttttgccttgattaaactcagccgttcaggacatgaaaacaaaaatttccccaaggcgatcgcagagtttaatatagtttaa

SEQ ID NO: 107113 - protein, 150 aa, Anabaena variabilis ATCC 29413
MADFFKFEADFVDSLRCIPMQVRYKLDTCGIKLKLSDWNQMTQAEREALVELPCTTTAEIQYYQEYIQQLIVNRTGTLPTTLPIESEPAWLDSKAIPISIQDKAQETGVIVTLSQWENLSPLQRFALIKLSRSGHENKNFPKAIAEFNIV

SEQ ID NO: 107114 - DNA, 483 bp, Burkholderia sp. 383
  CDS (1)..(483): transl_table=11
atgggactcagcgacgctccactgctattcaccttcgaacacgattcatcggaaaacttcacgtacatcccgatgatcgtgcgtttcaatctcgaccgttttggtctgcggatttcactggagcagtggcagttgctgccgctcgaggaccgcaagctgctcgcgcgctttccggccgacgacgacaccgcgatcgagcccaacttcgatcacgcgctgttcgaaatgctgcgcacgcacgcggatctggaaccatcgtggttccagccggacgagcagccgacctggcgcgccaccgacatcgtgccggagtcgctcgtacagcagagcgcgctggccgggctgatggcgcccgagcttgcgcagtggcagcggctcgcgccgttccagcgctacgtgctggtgaagctgtcgcgcaagccgaagctgaaccacgatttcctgcccgcgatgcgggagttcgggctgacggccacgcactga

SEQ ID NO: 107115 - protein, 160 aa, Burkholderia sp. 383
MGLSDAPLLFTFEHDSSENFTYIPMIVRFNLDRFGLRISLEQWQLLPLEDRKLLARFPADDDTAIEPNFDHALFEMLRTHADLEPSWFQPDEQPTWRATDIVPESLVQQSALAGLMAPELAQWQRLAPFQRYVLVKLSRKPKLNHDFLPAMREFGLTATH

SEQ ID NO: 107116 - DNA, 468 bp, Synechococcus sp. CC9605
  CDS (1)..(468): transl_table=11
atgtccagccgtcgtgattccgccagccattgctttgcttttgagcaggacttcatcggcaactggcgctgcatccccctgtgtgtgagacgcaaattggatctatgtggggtgaagttgaagctcagccactggcttgagctttcccaggagcaacgccaagccctggtggattggccggatgcggctgatgccctcgagcagcttcgccaacacctgcgcgattgcacgcgccccatggccgatggcatggccaaggatctgccaccggtgagtggtgccccctggcaacagcaggcagagctgcccgctctggtgcaggaggcggccacagtgcggggtgtggcgctgaccctggagcagtggacccagctcagtgagctggatcgctttgccttgtgcaagttggcccggccggggcacgaccaccacaaccttgatgcagccttcagcgaagtgctggtgtga

SEQ ID NO: 107117 - protein, 155 aa, Synechococcus sp. CC9605
MSSRRDSASHCFAFEQDFIGNWRCIPLCVRRKLDLCGVKLKLSHWLELSQEQRQALVDWPDAADALEQLRQHLRDCTRPMADGMAKDLPPVSGAPWQQQAELPALVQEAATVRGVALTLEQWTQLSELDRFALCKLARPGHDHHNLDAAFSEVLV

SEQ ID NO: 107118 - DNA, 516 bp, Synechococcus elongatus PCC 7942
  CDS (1)..(516): transl_table=11
ttggatgctgtcctgctcggcctgatcgccatgacctcttctgccagtccgttttttcaattcgaggctgactttgtgctcggcctacgctgcatccccatgagcgtgcgccgcaaactcgatgactgtggcgtcaagctcaagctagaacactggcaccgtctctcggaagccgagcgccaacaactggttgattggccctgtgagagcgatcgcgatcgccaagcctaccggcagcaactccgtgattggacccagcgcgattggggggagcccgccaaagatttaccgattgatcctcaaccggcttggctgcaacctgagattccagaggcagtggaggccgcctgccaagtgctgcaggtcagtctcagtcctgatgactggcaagggctagaacccctccaacgctttgccttgattaagctggcgcgtcccggccatgaacatcgcaacctttatccagcgctgcaggaatttggcctcaccgagcgatcgccccttgaggctgactga

SEQ ID NO: 107119 - protein, 171 aa, Synechococcus elongatus PCC 7942
MDAVLLGLIAMTSSASPFFQFEADFVLGLRCIPMSVRRKLDDCGVKLKLEHWHRLSEAERQQLVDWPCESDRDRQAYRQQLRDWTQRDWGEPAKDLPIDPQPAWLQPEIPEAVEAACQVLQVSLSPDDWQGLEPLQRFALIKLARPGHEHRNLYPALQEFGLTERSPLEAD

SEQ ID NO: 107120 - DNA, 510 bp, Burkholderia thailandensis E264
  CDS (1)..(510): transl_table=11
gtgccggcaatcgtcaaagtgagtgcaaacatgggactgagcgacgcgccgttgctgttcaatttcgaaatcgaatcgtcggaggatctgacctacattccgatgatcgtccgcttcaacctcgaccgtttcgggctgaggatctcgctcgagcaatggcagttgctgccgatcgaggatcgcaggctgctcgcgcgctttccggccgacgaagacgtcgtgatcgagccgaatttcgaccacgcgctgttcgagatgctgcgcacgcatgcgaacgtcgagccggcctggttccagccggacgagcatccggcgtggcgcagcgccgaagcggtgccggacgcgctcgtcgcgcagagcgggctcgccggcttgccggcgccgtccggggcgcagtgggcgaagctcacgccgtttcagcgctacgtgctcgcgaagctctcgcgcaagccgaagctcaatcacgacttcgtccccgcgatgcgcgagttcggcctcgccgcgcactga

SEQ ID NO: 107121 - protein, 169 aa, Burkholderia thailandensis E264
MPAIVKVSANMGLSDAPLLFNFEIESSEDLTYIPMIVRFNLDRFGLRISLEQWQLLPIEDRRLLARFPADEDVVIEPNFDHALFEMLRTHANVEPAWFQPDEHPAWRSAEAVPDALVAQSGLAGLPAPSGAQWAKLTPFQRYVLAKLSRKPKLNHDFVPAMREFGLAAH

SEQ ID NO: 107122 - DNA, 477 bp, Burkholderia xenovorans LB400
  CDS (1)..(477): transl_table=11
atgggactcaacgaagcgccgcttctgttcaacttcgaggtcgagtcttcggagaatttcacgtttatcccgatgtcggtgcgcttcaacctcgaccggttcgggctgcgcatctcgctccagcaatggcaactgctgccgctcgaagaccgcaagctgctggcgcgcttcccggtcgaggaagacgcggaaatcgagccgaatttcgatcatgccctgttcgaaatgctgcgcacccacgcgaacgtcgagccggaatggttcacgcccgaagaagcgccggcctggcgtcgcaccgatagcgtgccggagggcattgcgcatcaggcgcaactggccggcatcgccgcgccgggcgtggcccgttgggccgaactggcgccgttcaagcgctacgtgcttgccaagctgtcgcgcaagccggaggccaaccacgacttcgtcccggccatgaaggagttcggtgcggccggctag

SEQ ID NO: 107123 - protein, 158 aa, Burkholderia xenovorans LB400
MGLNEAPLLFNFEVESSENFTFIPMSVRFNLDRFGLRISLQQWQLLPLEDRKLLARFPVEEDAEIEPNFDHALFEMLRTHANVEPEWFTPEEAPAWRRTDSVPEGIAHQAQLAGIAAPGVARWAELAPFKRYVLAKLSRKPEANHDFVPAMKEFGAAG

SEQ ID NO: 107124 - DNA, 456 bp, Trichodesmium erythraeum IMS101
  CDS (1)..(456): transl_table=11
atgagtgaaaattattttgattttgagcaagactttgtagaatctttacggtgtattcctatgatagtacgctataaattagatacctgtggagtaaaattaaaattatcccactggcatcaatttaatcatttaattcgtcaagagttagtgaataaaccttgcagtaaattagaagaaattcaaagttatcgagtatggctacatcagttagtaattgaccatacagatactcctgctaaagatttatctgttgaaaaaaatccggcttggatggatgagactaaaattccagaaatagttcagaaaaaagcacaagaagtaggtattaaaattaagttagatcaatggaaaaatctgacgccactacaaaggtttgttctgattaaacttagtcgttctaaccatgaaaataaaaattttttacctgctgttcaggaatttcagctaatttga

SEQ ID NO: 107125 - protein, 151 aa, Trichodesmium erythraeum IMS101
MSENYFDFEQDFVESLRCIPMIVRYKLDTCGVKLKLSHWHQFNHLIRQELVNKPCSKLEEIQSYRVWLHQLVIDHTDTPAKDLSVEKNPAWMDETKIPEIVQKKAQEVGIKIKLDQWKNLTPLQRFVLIKLSRSNHENKNFLPAVQEFQLI

SEQ ID NO: 107126 - DNA, 456 bp, Synechococcus sp. CC9311
  CDS (1)..(456): transl_table=11
atgaatcaagccagtcattgctttgggtttgagaaagattttgttgggaactggcgttgcattcctctttgtgtacgccggaagctagatctcatcggcgtcaagctgaaattgagccattggcttgagttcactcaggaacagcgccaaatgcttgtggattggcctgatgaattaccagcattgaatgagttgcgtaagcacttgcgacttctgactcggttgatggcagaggggatggctaaagacttgccgattggggttgatgaaccatggcaagtgttgggagagctacccagcattgtgcaggaatcggctcgaaagaaatcgattgagatcagtgttagccaatgggcttctttgttcgaattagagcgttttgctttgtgtaagttggcgcgccctggccatgatcaccacaacttggatgctgctttcaacgaagtgctgggatga

SEQ ID NO: 107127 - protein, 151 aa, Synechococcus sp. CC9311
MNQASHCFGFEKDFVGNWRCIPLCVRRKLDLIGVKLKLSHWLEFTQEQRQMLVDWPDELPALNELRKHLRLLTRLMAEGMAKDLPIGVDEPWQVLGELPSIVQESARKKSIEISVSQWASLFELERFALCKLARPGHDHHNLDAAFNEVLG

SEQ ID NO: 107128 - DNA, 453 bp, Nostoc punctiforme PCC 73102
  CDS (1)..(453): transl_table=11
atgacatatttttttcaatttgaagcagactttgttgattcccttcgttgtatccccatgcaggtgcgttgcaatttagatacttgtggcattaagctaaaactatctgattggaatcaaatgactacagccgagcgtcaagctttagtcgagttaccttgcacaacagaaacggaaattcagtcttaccgcgaacatattcaacaattaattctagaacgcacaggtataccagctacaaaattacccattgagccacatcctgcatggctagactctagcactgtaccacctagcctccaggaaaaagctcaagaaataggtgtaaatctgacaccgcaacattgggcagctttaacacccttacagcgttttgccttaattaaactcagccgcccaggacatgaaagcaaaaactttccaatagcgatcgcagaatttaatctgctttaa

SEQ ID NO: 107129 - protein, 150 aa, Nostoc punctiforme PCC 73102
MTYFFQFEADFVDSLRCIPMQVRCNLDTCGIKLKLSDWNQMTTAERQALVELPCTTETEIQSYREHIQQLILERTGIPATKLPIEPHPAWLDSSTVPPSLQEKAQEIGVNLTPQHWAALTPLQRFALIKLSRPGHESKNFPIAIAEFNLL

SEQ ID NO: 107130 - DNA, 483 bp, Burkholderia vietnamiensis G4
  CDS (1)..(483): transl_table=11
atgggactcagcgacgctccgctgctattcgatttcgaacacgattcgtcggaaaacctgacgtacatcccgatgatcgtgcgcttcaatctcgaccgcttcggtctgcgcatctcgctcgagcagtggcagctgctgccgctggaggaccgcaagctgctcgcacgctttcccgccgacgacgataccgcgatcgagcccaatttcgatcacgcgctgttcgagatgctgcgcacgcacgccgatctcgagccgtcgtggttccagccggacgagcagccgggctggcgcgacaccggctcggtgcccgacgcgctggtgcagcaaagcgcgctggccgggctgccgccgcccgcgctggcgcagtggcagcagctcgcgccgtttcagcgctacgtgctgatgaagctgtcgcgcaagccgacactgaaccacgatttcgtgccggcgatgcgcgagttcgggctggcggccgcgcgctga

SEQ ID NO: 107131 - protein, 160 aa, Burkholderia vietnamiensis G4
MGLSDAPLLFDFEHDSSENLTYIPMIVRFNLDRFGLRISLEQWQLLPLEDRKLLARFPADDDTAIEPNFDHALFEMLRTHADLEPSWFQPDEQPGWRDTGSVPDALVQQSALAGLPPPALAQWQQLAPFQRYVLMKLSRKPTLNHDFVPAMREFGLAAAR

SEQ ID NO: 107132 - DNA, 450 bp, Crocosphaera watsonii WH 8501
  CDS (1)..(450): transl_table=11
atggatcatttttttcgatttgaacaagaatttatcgagtctttacattgtattccgatgattgtccgtttcaagttagatacttgtggggttaaattaaaattaatgcactggaatcagtttacttcccaagaaaaacaagtattaattaatatggcttgtcaaactcaagaagaagtaaaaatatatcgagattttttagaaacattagttactgaaaaaacaggaactcctgcaaaaagtttacccattgatgataatcccccttggtttaatagtgagcatattcctgtagaaattcaagaaaaagcaacagaatttaacaaaaaaattagtctagaaaaatgggataaactgaccccattacaaagatttgctctaattaaattaagtcgtcctagtcatgaaaatagtaacttttttcctgctttagaggagtttaatttataa

SEQ ID NO: 107133 - protein, 149 aa, Crocosphaera watsonii WH 8501
MDHFFRFEQEFIESLHCIPMIVRFKLDTCGVKLKLMHWNQFTSQEKQVLINMACQTQEEVKIYRDFLETLVTEKTGTPAKSLPIDDNPPWFNSEHIPVEIQEKATEFNKKISLEKWDKLTPLQRFALIKLSRPSHENSNFFPALEEFNL

SEQ ID NO: 107134 - DNA, 471 bp, Synechococcus sp. WH 5701
  CDS (1)..(471): transl_table=11
gtgagtctgcacgagcgctgcttcgccttcgaggcggatttcgtcgaggatctgcgctgcctgccgatggccgtgcgccgcaagctcgatctggccggtgtcaagctcaagctgagccactggcatggcctggatcccaatgagcgggcgcgcctgctggtctggtccgacgcgcctgctgccatcgttgacctgcgccagtggctgcagcggcgcaccgcagagctggctgatggtccggcgagggccatcgatccggccatcgccgccgactggcagcagcttgaggctgttcccgaacgcttgcgggcggcctgcgagcagctcggatccggcgtggagctggcccagtggcagagcctcgatgagctgcagcgctttgccctggtcaagctcagccatcccgggcatgaacaccgcaatctgcccagggccctgatggagttcggcctgggcctgggatgtccgtga

SEQ ID NO: 107135 - protein, 156 aa, Synechococcus sp. WH 5701
MSLHERCFAFEADFVEDLRCLPMAVRRKLDLAGVKLKLSHWHGLDPNERARLLVWSDAPAAIVDLRQWLQRRTAELADGPARAIDPAIAADWQQLEAVPERLRAACEQLGSGVELAQWQSLDELQRFALVKLSHPGHEHRNLPRALMEFGLGLGCP

SEQ ID NO: 107136 - DNA, 468 bp, Synechococcus sp. WH 7805
  CDS (1)..(468): transl_table=11
atgcgccggcaacttgatcagtcgcggcattgttatgcctttgaacaggatttcattggttcttggcgctgcattcctctgtgtgtccgccgcaaactcgatctggccggcgtcaagctcaagctcagccactggcttgcgatgtctcaggagcaacgccaggcgttggtggattggaacgatggggcccaagagctgacgcggatgcgcgatcacttgcgcgtctgcaccgctgccatggctgatggggttgtgaaggatctcccgccatgcacgcaggaaccctggcagcaatcagatgctttgcctgagtctctcctggaggctgcgaggacgcggcaggttcaactgtcactgcatcactggagggatctctgcgaattggaccgttttgcgctctgcaagttggcgcggcccggccacgatcaccacaatctggacgccgcattcaacgaagtgctggggtga

SEQ ID NO: 107137 - protein, 155 aa, Synechococcus sp. WH 7805
MRRQLDQSRHCYAFEQDFIGSWRCIPLCVRRKLDLAGVKLKLSHWLAMSQEQRQALVDWNDGAQELTRMRDHLRVCTAAMADGVVKDLPPCTQEPWQQSDALPESLLEAARTRQVQLSLHHWRDLCELDRFALCKLARPGHDHHNLDAAFNEVLG

SEQ ID NO: 107138 - DNA, 483 bp, Synechococcus sp. RS9916
  CDS (1)..(483): transl_table=11
atggctctgaatggcatggattcgcggagtgattgctcaagtcattgcttttcgtttgagcaggatttcattggtaactggcgatgcatccccctttgcgtgcgccgcaaattggatttggtgggcatcaagctgaagctcaatcattggttggccctcgagcagccgcagcgtcagcaactggtggattggtccgatgctccgaccgagtgggcagggtttcgtcagcacctgcgtgatctcaccgtcgggatggcggatgggatggtcaaggatctgccgccagcagtggatgcaccttggcagtgcatggatcaggtgccgctggcgattgccgaagcagccgatcaacgcggtgtggtgctcaatgctgtggcttgggctggtttgtcggagttggaccggtttgcgttgtgcaaactggcccggcccggccatgaccaccacaacctggatgcggcctttactgagctgctgggctga

SEQ ID NO: 107139 - protein, 160 aa, Synechococcus sp. RS9916
MALNGMDSRSDCSSHCFSFEQDFIGNWRCIPLCVRRKLDLVGIKLKLNHWLALEQPQRQQLVDWSDAPTEWAGFRQHLRDLTVGMADGMVKDLPPAVDAPWQCMDQVPLAIAEAADQRGVVLNAVAWAGLSELDRFALCKLARPGHDHHNLDAAFTELLG

SEQ ID NO: 107140 - DNA, 20 bp, Artificial sequence
  primer
atgttttttcaatttgaagc

SEQ ID NO: 107141 - DNA, 24 bp, Artificial sequence
  primer
tcagcttggcatcagatcaaattc

SEQ ID NO: 107142 - protein, 151 aa, Artificial sequence
  consensus sequence
  Variant (2)..(2): Xaa in position 2 is any amino acid
  Variant (5)..(13): Xaa in position 5 to 13 is any amino acid
  Variant (16)..(17): Xaa in position 16 to 17 is any amino acid
  Variant (20)..(21): Xaa in position 20 to 21 is any amino acid
  Variant (24)..(25): Xaa in position 24 to 25 is any amino acid
  Variant (27)..(30): Xaa in position 27 to 30 is any amino acid
  Variant (32)..(33): Xaa in position 32 to 33 is any amino acid
  Variant (35)..(41): Xaa in position 35 to 41 is any amino acid
  Variant (43)..(44): Xaa in position 43 to 44 is any amino acid
  Variant (46)..(61): Xaa in position 46 to 61 is any amino acid
  Variant (62)..(63): Xaa in position 62 to 63 is any or no amino acid
  Variant (65)..(86): Xaa in position 65 to 86 is any amino acid
  Variant (88)..(92): Xaa in position 88 to 92 is any amino acid
  Variant (93)..(93): Xaa in position 93 is any or no amino acid
  Variant (95)..(112): Xaa in position 95 to 112 is any amino acid
  Variant (113)..(117): Xaa in position 113 to 117 is any or no amino acid
  Variant (119)..(120): Xaa in position 119 to 120 is any amino acid
  Variant (122)..(125): Xaa in position 122 to 125 is any amino acid
  Variant (127)..(128): Xaa in position 127 to 128 is any amino acid
  Variant (130)..(130): Xaa in position 130 is any amino acid
  Variant (133)..(133): Xaa in position 133 is any amino acid
  Variant (135)..(144): Xaa in position 135 to 144 is any amino acid
  Variant (146)..(147): Xaa in position 146 to 147 is any amino acid
  Variant (149)..(149): Xaa in position 149 is any amino acid
  Variant (150)..(150): Xaa in position 150 is any or no amino acid
FXFEXXXXXXXXXIPXXVRXXLDXXGXXXXLXXWXXXXXXXRXXLXXXXXXXXXXXXXXXXXXLXXXXXXXXXXXXXXXXXXXXXXWXXXXXXPXXXXXXXXXXXXXXXXXXXXXXXWXXLXXXXRXXLXKLXRXXXXXXXXXXAXXEXXL

SEQ ID NO: 107143 - protein, 44 aa, Artificial sequence
  protein pattern
  Variant (2)..(2): Xaa in position 2 is any or no amino acid
  Variant (4)..(5): Xaa in position 4 to 5 is any or no amino acid
  Variant (7)..(7): Xaa in position 7 is any amino acid
  Variant (8)..(8): Xaa in position 8 is Asp or Glu
  Variant (9)..(11): Xaa in position 9 to 11 is any amino acid
  Variant (12)..(12): Xaa in position 12 is Asp, Gly, Asn or Ser
  Variant (13)..(15): Xaa in position 13 to 15 is any amino acid
  Variant (18)..(18): Xaa in position 18 is Leu or Met
  Variant (19)..(19): Xaa in position 19 is any amino acid
  Variant (22)..(23): Xaa in position 22 to 23 is any amino acid
  Variant (26)..(27): Xaa in position 26 to 27 is any amino acid
  Variant (29)..(29): Xaa in position 29 is Ile, Leu or Val
  Variant (30)..(30): Xaa in position 30 is Lys or Arg
  Variant (31)..(31): Xaa in position 31 is Ile or Leu
  Variant (32)..(32): Xaa in position 32 is any amino acid
  Variant (34)..(35): Xaa in position 34 to 35 is any amino acid
  Variant (37)..(38): Xaa in position 37 to 38 is any amino acid
  Variant (39)..(39): Xaa in position 39 is Phe, Leu or Met
  Variant (40)..(40): Xaa in position 40 is Glu, Asn, Pro, Ser or Thr
  Variant (41)..(43): Xaa in position 41 to 43 is any amino acid
FXFXXEXXXXXXXXXIPXXVRXXLDXXGXXXXLXXWXXXXXXXR

SEQ ID NO: 107144 - protein, 39 aa, Artificial sequence
  protein pattern
  Variant (2)..(3): Xaa in position 2 to 3 is any amino acid
  Variant (4)..(5): Xaa in position 4 to 5 is any or no amino acid
  Variant (7)..(8): Xaa in position 7 to 8 is any amino acid
  Variant (9)..(9): Xaa in position 9 is Leu or Val
  Variant (10)..(10): Xaa in position 10 is any amino acid
  Variant (11)..(11): Xaa in position 11 is Glu or Pro
  Variant (12)..(12): Xaa in position 12 is Phe or Leu
  Variant (13)..(13): Xaa in position 13 is Asp, Glu or Gln
  Variant (15)..(15): Xaa in position 15 is Phe or Tyr
  Variant (16)..(16): Xaa in position 16 is Ala or Val
  Variant (18)..(18): Xaa in position 18 is any amino acid
  Variant (21)..(21): Xaa in position 21 is Ala, Ser or Val
  Variant (22)..(23): Xaa in position 22 to 23 is any amino acid
  Variant (24)..(24): Xaa in position 24 is Gly, Asn, Pro or Ser
  Variant (25)..(28): Xaa in position 25 to 28 is any amino acid
  Variant (29)..(29): Xaa in position 29 is Asp or Asn
  Variant (30)..(30): Xaa in position 30 is Phe or Leu
  Variant (31)..(32): Xaa in position 31 to 32 is any amino acid
  Variant (34)..(34): Xaa in position 34 is Phe, Ile, Leu, Met or Val
  Variant (35)..(35): Xaa in position 35 is any amino acid
  Variant (37)..(37): Xaa in position 37 is Phe, Leu or Val
  Variant (38)..(38): Xaa in position 38 is any amino acid
  Variant (39)..(39): Xaa in position 39 is Gly, Ile, Leu or Val
LXXXXWXXXXXXXRXXLXKLXXXXXXXXXXXXAXXEXXX

SEQ ID NO: 107145 - DNA, 1089 bp, Synechocystis sp.
  CDS (1)..(1089): transl_table=11
atgtcccagacctataacgtaaccctgctccccggtgatggcattggccccgaaattatggcggtggcggtggcggtgttaggcaaagtggccgaccagtttggctttgcgtttaattttcaagaggctttaattggcggagcggccattgatgccacagggcaacccctaccggaggcaaccctagcccaagcaaaggatagtgatgcggtactcttagcggcgatcgggggttatgcctgggacaatttaccccgttctcaaaggccggaaactggtttgcttgccattcgggaagggttggggctatttgccaatttacgtcctgcgacgatcttcccccaattgattgacgcttccagcctgaaacgggaagtggtggaaggggtggatattatggtggtgcgggaactaaccggcggcatttattttggtaaaccgaagggtattttcgagacggaaacgggggaaaaacggggggtcaataccatggcttacaccgtgggagaaattgaccgcattgctaaggttgcttttgaaacggctcgtaaacgacgcgggcaactctgttcagtggataaggctaacgtattagatgtgtcccaactgtggcgggatcgggtcatggcgatcgccgtagattatcccgatgtggaactgtcccatttatatgtggataatgcggccatgcaattggtgcggagtcccagacaatttgacaccattgtgacgggcaatttatttggtgatattctttccgacattgccgccatgttaaccggcagtattggcatgttaccctccgccagtttgggcagtgatggccctgggttatttgagcccgtccacggttccgccccggatattgccggccaggataaagctaaccccctagcccaggtgctcagtgccgccatgatgttgcgctacggtttggatcaaccccaggcggccgatcgccttgaggatgcagtgaaaaaagttttagaacagggttaccgcaccggtgatattctttctcctggcacacaattggtgggctgtcggcaaatgggagagcaattgttgagcatcctagatgaaatgtaa

SEQ ID NO: 107146 - protein, 362 aa, Synechocystis sp.
MSQTYNVTLLPGDGIGPEIMAVAVAVLGKVADQFGFAFNFQEALIGGAAIDATGQPLPEATLAQAKDSDAVLLAAIGGYAWDNLPRSQRPETGLLAIREGLGLFANLRPATIFPQLIDASSLKREVVEGVDIMVVRELTGGIYFGKPKGIFETETGEKRGVNTMAYTVGEIDRIAKVAFETARKRRGQLCSVDKANVLDVSQLWRDRVMAIAVDYPDVELSHLYVDNAAMQLVRSPRQFDTIVTGNLFGDILSDIAAMLTGSIGMLPSASLGSDGPGLFEPVHGSAPDIAGQDKANPLAQVLSAAMMLRYGLDQPQAADRLEDAVKKVLEQGYRTGDILSPGTQLVGCRQMGEQLLSILDEM

SEQ ID NO: 107147 - DNA, 1476 bp, Arabidopsis thaliana
  CDS (20)..(1243)
gtagtctttgttgtagtgaatggcgggagtcatccacgtcagcagtacccagattccggttgcttttatgtccgcaaccaaacagagctttaggagagcttctgtgatcagatgtgccgccaacactccaaagaaacagtacaccatcgcggtgcttcccggcgatggcgtcggtaacgaagtgatcccagtcgctgttgacgttctttgtttagctgggtctcttgaagggatagattttagcttcgaggagttgcctataggaggtgttgctttagatcttgtcggagttccactgcctaaggaaacattgatcagggcaaagcaatcagacgctcttcttctcggagctgttggatggccgaaatgggataacaaccccaagcatttgaagccgataacggccttgttgcagcttcgtgcagctcttcaagtatttgccaatttaagaccgattacagtgttaccacagttggtcgattcgacatatctgagaaaagacacagctcaaggggttgaccttttgataattcgggagcttactgggggtatttacaatgcgcatcctcggggttttaccacaaatgaacaaggtgacgaagttggcttttgtactgagtcctactctgcgagtgaggttgatcacattgctcgtgttgcatttgatattgctaagcaaaggcgcggtaaactttgttctgttgacaaggctactatcttggagggatcaatgttgtggaggaaaagagtcacagcaatagcttcagagtatcctgaggttgaagtgagccatctgctgattgacaccgctgcgatggatcttgttcggcacccaagacagtttgataccattttgactggggtcatgtttggtgatattctgtctgatctcgcggctatgatccccggaagtgtaggattgcttccatctgctgcacttggtgattcagggcctggaattttcgaacctgtgcatggatctgcacctaaacactacgggaaggacacagtgaatcccattgcagctgttctatcagctgcaatgcttttgagatacggattgaaagaagaaaatgcagcaaagagaatagaagaagcagtatcggatgtcttggaccgaggattcagaactcgtgacattcacactcctggaactacgttggtaggttgcaagagaatgggtgaggagatattgagatcccttgatgctaaagtctctgcttcgactggaaacttggtttagctgcaaaaactataaacaaaaatatgcagagagtgacattgagaaattcaatgtttgtttctatccgataaattgataagttatatatacatatattcctaagatcgccgcacttgaactactacgatgagccctccttcttctgtgaggtgctgctaataaatggatatatatgttgtatgcggtaacgtaaggtgtccatttacaaaattaaaaactttggggtcaattcc

SEQ ID NO: 107148 - protein, 407 aa, Arabidopsis thaliana
MAGVIHVSSTQIPVAFMSATKQSFRRASVIRCAANTPKKQYTIAVLPGDGVGNEVIPVAVDVLCLAGSLEGIDFSFEELPIGGVALDLVGVPLPKETLIRAKQSDALLLGAVGWPKWDNNPKHLKPITALLQLRAALQVFANLRPITVLPQLVDSTYLRKDTAQGVDLLIIRELTGGIYNAHPRGFTTNEQGDEVGFCTESYSASEVDHIARVAFDIAKQRRGKLCSVDKATILEGSMLWRKRVTAIASEYPEVEVSHLLIDTAAMDLVRHPRQFDTILTGVMFGDILSDLAAMIPGSVGLLPSAALGDSGPGIFEPVHGSAPKHYGKDTVNPIAAVLSAAMLLRYGLKEENAAKRIEEAVSDVLDRGFRTRDIHTPGTTLVGCKRMGEEILRSLDAKVSASTGNLV

SEQ ID NO: 107149 - DNA, 1241 bp, Oryza sativa
  CDS (24)..(1163)
acacccaaatcacacacgccaacatgagcaagcagacctacaacgtcgtcgtcctccccggtgacggcatcggccccgaggtcgtcgagcaggccacgcgcgtgctcgagctcatctcgtccaagagcgactccttctccatcaacctcaagcccttcgactttggcggcgccgccatcgactcgaccggcaagccgctgccggacgacacgctcgaggcgtgcaagaccgcagatgccatcctcatgggctccgtcggtggtcccaagtggggcgtcggcaaggtgcgtccggagcagggtcttctggcgctgcgcaaggagctcgacctgtacgccaacatccgtccgtgcctcttcccctccgagtcgctgctctcgcactcgccgctcaagcccgaggtggccaagggcgtgtcgttcatcgtggtgcgcgagctcgtcaagggtctctactttggcgaccgccaggaggccaacctggacgacccttcgtccgacggtgcggcgtacgacaccatggtgtacaacaagttcgacgtggagcgcatcaccaagctcgcgtcgtacctcgcgctccagtcgtcgccacccgcgccgctgcactcgatcgacaaggccaacgtgctggccacgtcgcgtctgtggcgcaaggtggtgcaggataccgtagacacccagtttgcatcgcagggcattaccgtcgaccaccagctcgtcgactcggcctcgatggtcatggtctcgaaccctcgcaagctcaacggcatcgtgctcaccgagaacatgtttggcgacattctgtccgacgagtcgtccgtcatccccggtgcgctcggtctgctgccttcggcttcgctctcgggcctgccggatggcaagagcagatgcaacggtctgtacgagcccatccacggctcggcgcccgacattgccggccgcggcatcgccaaccccgtcggcaccatcctctccgccgccatgctgctccgctactcgctccaccagcccgagctcgcagacaaggtcgaggctgccgtcaggaaggtgctcgacgccaaggacattggcggccacgaactcaggaccgccgacctcggcggcaagcacggctccaaggacgttggtgacgccgtcatcgccgccctcgaagccctcctctagatcgacacacacacgtccacttcttctcgacgtgatccaaaaatcccttgacttaatctcaacgaccgcattctcagc

SEQ ID NO: 107150 - protein, 379 aa, Oryza sativa
MSKQTYNVVVLPGDGIGPEVVEQATRVLELISSKSDSFSINLKPFDFGGAAIDSTGKPLPDDTLEACKTADAILMGSVGGPKWGVGKVRPEQGLLALRKELDLYANIRPCLFPSESLLSHSPLKPEVAKGVSFIVVRELVKGLYFGDRQEANLDDPSSDGAAYDTMVYNKFDVERITKLASYLALQSSPPAPLHSIDKANVLATSRLWRKVVQDTVDTQFASQGITVDHQLVDSASMVMVSNPRKLNGIVLTENMFGDILSDESSVIPGALGLLPSASLSGLPDGKSRCNGLYEPIHGSAPDIAGRGIANPVGTILSAAMLLRYSLHQPELADKVEAAVRKVLDAKDIGGHELRTADLGGKHGSKDVGDAVIAALEALL

SEQ ID NO: 107151 - DNA, 1552 bp, Zea mays subsp. mays
  CDS (74)..(1303)
agattgcgagactgtacactgtagagagagacgtcgtcggcctgagcgccgtgcaagcaagcaagcggcggcaatggcggcggctcttcaagccacgccgatcaaaaccctagccacctcccgctggcgcgtcgaaggtgcggaggcgcggccgcggccgcggccgattgcggtgagcttccgttgctccgcggcggcgaggagctacaacatcacgctcttacctggggacggcatcggcccggaggtggtcgccgtcgccaaggacgtgctatccttcgccggagccctcgaaggcgtcgagctccggtttcaggagaagctggtgggcggctcggcgctggacgccaccggcgtgccactccctgacgagacgctcgacgaggccaagggttccgacgctgttctcctcggcgccattggaggctataagtgggataccaatgagaagcacctcaagcctgagaccgggctgctgcagctacgtgccggactcggggtctttgccaatctgcgaccagctgcagttttgccgcagttggtagacgcatccactctgaagaaagaggtagctgaaggtgttgacatcatggttgtcagggagcttactggaggcatctactttggcaaacccaggggttttggaacaaatgacaagggagacgatattggcttcaacacagaagtttattcagcttctgagatcgatcgtattgcacgagttgcatttgaggtcgctcgcaagagaagagggaaactatgctcggttgataaagcaaatgtgctggaggcatccatgctttggaggaaaaaggtgactgcactagcctctgaattccctgacattgagctctcacacatgtatgttgacaatgctgcaatgcagcttgtcaggaatcctaagcagtttgatacaattgtcacaaacaatatttttggtgacatattatctgatgaagcatcaatgattacgggaagcattggaatgcttccatctgcgagtgtcggtgaatcgggacctggtctttttgaacctattcatggctctgcccctgatattgctggacaggacaaggccaatccattagctacaattcttagcgcagcgatgctattgcgatatggcctaggagaagaaaatgctgcgaggagaattgaagctgcagttacagaaacactgaaccatgggttccgaactggggacatatattctcctggaacaacactggttggatgcaagcggatgggggaggaagtcttgaagacagtggagtcactgaaggaagtggctgctgtgaactgatgcatgctggtacttgattcattgcattttattagaagtcgagccgagcgtaagagagcatggtgtctgggttattgttgatgttgaattgaaagtttagtggctgaaccgatagccacttcgcatttctgtggtttgtttgtctccctgtagttttttctttggtacaaggaaaggataggcatatgtttgctcaataaaatgggatagtttatgccgctttgaataaaagatggagttctgttttgg

SEQ ID NO: 107152 - protein, 409 aa, Zea mays subsp. mays
MAAALQATPIKTLATSRWRVEGAEARPRPRPIAVSFRCSAAARSYNITLLPGDGIGPEVVAVAKDVLSFAGALEGVELRFQEKLVGGSALDATGVPLPDETLDEAKGSDAVLLGAIGGYKWDTNEKHLKPETGLLQLRAGLGVFANLRPAAVLPQLVDASTLKKEVAEGVDIMVVRELTGGIYFGKPRGFGTNDKGDDIGFNTEVYSASEIDRIARVAFEVARKRRGKLCSVDKANVLEASMLWRKKVTALASEFPDIELSHMYVDNAAMQLVRNPKQFDTIVTNNIFGDILSDEASMITGSIGMLPSASVGESGPGLFEPIHGSAPDIAGQDKANPLATILSAAMLLRYGLGEENAARRIEAAVTETLNHGFRTGDIYSPGTTLVGCKRMGEEVLKTVESLKEVAAVN

SEQ ID NO: 107153 - DNA, 1519 bp, Zea mays subsp. mays
  CDS (36)..(1259)
agacgtgaatccaagcgtgcaagcaagcggcggtaatggcggcggctctgcaagccacgccgctcaaaaccctatccatctcccgccggcgcgtcggcggcgcgggggcgcggccgcgtccgatggcggcgagcttccgatgctccgcggcggcgaggagctacaatatcacgctcctccccggagacggcatcggccctgaggtggtcgccgtcgccaaggacgtgctgtccctcgccggcgccctcgaaggcgtcgagctccggttccaggagaagcttgtgggtggctcggccctggacgccaccggcgtgccgctccccgacgagacactcgacgcggccaagggttccgacgccgtcctcctcggcgccattggaggctataagtgggataacaatgagaagcacctcaagcctgagaccgggctgctgcagctccgtgccggacttggggtctttgccaatctgcgaccagctgcagtattgccgcagttggtagatgcatccactctgaagaaagaggtagctgaaggtgttgacatcatggttgtcagagagcttactggaggcatctacttcggcaaacccaggggttttggaacaaatgacaatggagatgacattgggttcaacacagaagtttatccagcttctgagattgatcgtatcgcacgagtcgcatttgaggttgctcgcaagagaagagggagactatgctcggttgacaaagcaaatgtcttggaggcatctatgctttggaggaaaagggtgactgcactagcttcggaattccctgatattgagctctcacacatgtatgttgataatgctgcgatgcagcttgttaggaatcctaagcagtttgacacaattgtcacaaacaatatttttggtgacatattatctgatgaagcatcaatgattacgggaagtattggaatgctcccatctgccagtgttggtgaatcgggacctggtctttttgaacctattcatggctctgcccctgatattgctggacaggacaaggccaatccattggctacaattcttagtgcagcgatgctattgagatatggcctaggagaagaaaatgctgcgaacagaattgaagctgcagttactgaaacactgaaccatgggttccgaactggggacatatattctcctggaacaacattggttggatgcaagcggatgggggaagaagtcctgaagacagtgaactcactgaaggaagtggctgctgtaaactgatgcatgttggtacttaatttataaccctacaggatgagatggttgaaagggacttgcattttattagaagttgagcctggtgaaagagagcactgcgtctggttttgaatcgcaactgtagcggctgaaccgacggtcttttttcatttctggtgtttgttggccttcctgtaactcaattttgtacaaggaaggataagcatatgtatgataaaatgggatagtttatgccagttgaataaaatatgttctataacttc

SEQ ID NO: 107154 - protein, 407 aa, Zea mays subsp. mays
MAAALQATPLKTLSISRRRVGGAGARPRPMAASFRCSAAARSYNITLLPGDGIGPEVVAVAKDVLSLAGALEGVELRFQEKLVGGSALDATGVPLPDETLDAAKGSDAVLLGAIGGYKWDNNEKHLKPETGLLQLRAGLGVFANLRPAAVLPQLVDASTLKKEVAEGVDIMVVRELTGGIYFGKPRGFGTNDNGDDIGFNTEVYPASEIDRIARVAFEVARKRRGRLCSVDKANVLEASMLWRKRVTALASEFPDIELSHMYVDNAAMQLVRNPKQFDTIVTNNIFGDILSDEASMITGSIGMLPSASVGESGPGLFEPIHGSAPDIAGQDKANPLATILSAAMLLRYGLGEENAANRIEAAVTETLNHGFRTGDIYSPGTTLVGCKRMGEEVLKTVNSLKEVAAVN

SEQ ID NO: 107155 - DNA, 1113 bp, Bradyrhizobium sp. ORS278
  CDS (1)..(1113): transl_table=11
atggcgacccacaagctcctgctgctgcccggcgacggcatcggccccgaagtgatggccgaggtgaagcggctgatcggctggctcaacggcaagggcctggcctcgttcgagaccgaggacggtttggtcggcggcgccgcctatgacgcgcacggcgcctcgatctcggaaggagacatggacaaggccaaggcggccgacgccatcatcttcggcgccgttggcggtccgaagtgggacggcgttccctacgaggtgcgtcccgaggccggcctgctccgcctgcgcaaggatctcggcctgttcgccaacctgcgtcccgccgtctgctatccggcgctcgccgacgcctccagcctgaagcgcgagatcgtcgagggtctcgacatcatgatcgtgcgcgagctcaccggaggcgtgtatttcggcgagccgaagaccatcaccgatctcggcaacggccagaagcgcgcgatcgacacccaggtctacgacacctatgagatcgaacgcatcgcccgcgtcgccttcgacctcgcgcgcaagcgcaagaacaaggtgacgtcgatggagaagcgcaacgtgatgaagtcgggcgtgctctggaacgaggtcgtcaccgcggtccacgcgcgcgagtacaaggacgtcacgctcgagcaccagctcgccgattccggcggcatgaacctagtgaaatatcccaagatgttcgacgtcatcgtcaccgacaacctgttcggcgacatgctgtccgacatcgccgcgatgctgaccggctcgctcggcatgctgccgtcggcctcgctcggcgaggtcgacgccaagacccacaagcgccgcgcgctgtatgagccggtgcacggctcggcaccggacattgcaggccgaggcctcgccaacccgatcgcgatgctgacctccttcggcatggcgctgcgctactcgttcgacctcggcgcgctggccgacaagctcgacgccgccatcgccgccgtgctggcgagcggcctgcgcaccgccgacatcaaggccgagggctcgacgcccgcgtcgaccacgcagatgggcgaggcgatcatcaaggagctcgagacgctcacggcgtaa

SEQ ID NO: 107156 - protein, 370 aa, Bradyrhizobium sp. ORS278
MATHKLLLLPGDGIGPEVMAEVKRLIGWLNGKGLASFETEDGLVGGAAYDAHGASISEGDMDKAKAADAIIFGAVGGPKWDGVPYEVRPEAGLLRLRKDLGLFANLRPAVCYPALADASSLKREIVEGLDIMIVRELTGGVYFGEPKTITDLGNGQKRAIDTQVYDTYEIERIARVAFDLARKRKNKVTSMEKRNVMKSGVLWNEVVTAVHAREYKDVTLEHQLADSGGMNLVKYPKMFDVIVTDNLFGDMLSDIAAMLTGSLGMLPSASLGEVDAKTHKRRALYEPVHGSAPDIAGRGLANPIAMLTSFGMALRYSFDLGALADKLDAAIAAVLASGLRTADIKAEGSTPASTTQMGEAIIKELETLTA

SEQ ID NO: 107157 - DNA, 1074 bp, Synechococcus sp. WH 7803
  CDS (1)..(1074): transl_table=11
atgactcaccatcgcgtcgtcctgcttccgggtgatggcatcggccctgaaatcacagcagtgactcgccagctgctcgacgtggtggccgatcaccacggcttccagctggactttgatgaccagttgatcggaggggctgcgatcgatgccaccggcgagcctctgcccgacaaaactctggacgcctgccgatcggcggatgcggtgctgatggcggcgatcggcagtccgcggtttgacacgctcccgcgggagaagagacctgaaagcggccttctcgccttgcggtcggggctgaacctgtttgccaatctccggccggtgaagatcgtgcccgccctgatcgaagccagcagcctgaaggccgaagtgattcaaggtgtggatctgatggtggtgcgcgaactcaccggaggcatctacttcggtcagcccaaggggagggtcgaagccgacggagaggaacgcggtttcaacaccatgacgtattcggcatcagaggtggatcgcattgccagggtggcgtttgaactggccagggagcgaggagggcgactttgctctgtggacaaagccaatgtgttggatgtgagccagctgtggcgcgatcgggtggatgccatggccccctcctacgccgatgtggaggtgagtcatctttatgtggacaacgcagccatgcagctggtgcgagcacctcggcagtttgatgtgctgctcaccggcaacctgtttggcgacatcctcagtgacgaggccgccatgctcaccggctccatcggcatgctcccctcagcatccctgggcagcgatggcccgggactgtttgaaccggtgcatggatccgctccggatatcgccggagaagacaaggccaatcccatggccatggtgttgtctgcggccatgatgcttcggattggtctcaagcagaaagccgccgctgatgcccttgaacaggccgtcgaccgtgtgctggccggcggtttccgcaccggtgacctgatggccgagggatgcacacctctgggatgccaggccatgggcgaagagcttcgtaaggcgctctaa

SEQ ID NO: 107158 - protein, 357 aa, Synechococcus sp. WH 7803
MTHHRVVLLPGDGIGPEITAVTRQLLDVVADHHGFQLDFDDQLIGGAAIDATGEPLPDKTLDACRSADAVLMAAIGSPRFDTLPREKRPESGLLALRSGLNLFANLRPVKIVPALIEASSLKAEVIQGVDLMVVRELTGGIYFGQPKGRVEADGEERGFNTMTYSASEVDRIARVAFELARERGGRLCSVDKANVLDVSQLWRDRVDAMAPSYADVEVSHLYVDNAAMQLVRAPRQFDVLLTGNLFGDILSDEAAMLTGSIGMLPSASLGSDGPGLFEPVHGSAPDIAGEDKANPMAMVLSAAMMLRIGLKQKAAADALEQAVDRVLAGGFRTGDLMAEGCTPLGCQAMGEELRKAL

SEQ ID NO: 107159 - DNA, 1167 bp, Arabidopsis thaliana
  CDS (1)..(1167)
atggcggcgtttttgcaaacgaacatcagtctgaatgcgatcaagatcgtcccggggaaatacagttctctcaccgatcatcagtttcgtgcgccgtatcgaattaggtgcgccgccgcttcacctgggaaaaaacggtataacatcgctctgcttcccggagacggtatcggtccagaagttatctctgttgctaagaatgtgcttcagaaagctggatctctcgaaggactggagtttgatttcaaggagatgcctgtcggaggagcagccttggatttggttggagttccattgccggaggaaactttcacggctgcaaaactatctgatgccattcttcttggagctattggagggtacaaatgggacaagaatgagaaacatctgagacctgagatggctctgttttaccttagaagagatctcaaagtctttgctaatttgagacctgctacagttttgccacagctagttgatgcttccacactgaagaaagaagtagcagaaggtgttgatatgatgattgttagggagctcacaggaggtatttactttggagagccaagaggcattacgatcaatgaaaatggcgaagaagtcggcgttagtacagagatctacgctgctcacgagattgacagaattgctcgtgtagcattcgagactgctaggaaaaggcgtggcaaactttgttctgttgacaaagccaatgtgttggatgcatcaatattgtggaggaaaagagtaacagctttagcctctgaatatccagatgttgaactatcacatatgtatgtcgataatgctgcaatgcagcttattcgtgacccgaaacagtttgacacaatcgttaccaataacatttttggtgatatattgtctgatgaagcttcaatgatcactggaagcattggaatgcttccatctgctagtctcggtgaatcgggacctggactctttgaacctatacatggttcagcaccagatatagctggacaagacaaggcaaacccattggccaccattctcagcgcggcgatgcttctgaagtatggacttggagaagaaaaggctgcaaagaggattgaagacgctgtcgtggatgctctgaacaaagggttcagaaccggagacatctactcccctggaaatgtatgtgcatga

SEQ ID NO: 107160 - protein, 388 aa, Arabidopsis thaliana
MAAFLQTNISLNAIKIVPGKYSSLTDHQFRAPYRIRCAAASPGKKRYNIALLPGDGIGPEVISVAKNVLQKAGSLEGLEFDFKEMPVGGAALDLVGVPLPEETFTAAKLSDAILLGAIGGYKWDKNEKHLRPEMALFYLRRDLKVFANLRPATVLPQLVDASTLKKEVAEGVDMMIVRELTGGIYFGEPRGITINENGEEVGVSTEIYAAHEIDRIARVAFETARKRRGKLCSVDKANVLDASILWRKRVTALASEYPDVELSHMYVDNAAMQLIRDPKQFDTIVTNNIFGDILSDEASMITGSIGMLPSASLGESGPGLFEPIHGSAPDIAGQDKANPLATILSAAMLLKYGLGEEKAAKRIEDAVVDALNKGFRTGDIYSPGNVCA

SEQ ID NO: 107161 - DNA, 1089 bp, Oryza sativa (japonica cultivar-group); identical to SEQ ID NO: 36985
  CDS (1)..(1089)

SEQ ID NO: 107162 - protein, 362 aa, Oryza sativa (japonica cultivar-group); identical to SEQ ID NO: 36986

SEQ ID NO: 107163 - DNA, 1170 bp, Oryza sativa (japonica cultivar-group)
  CDS (1)..(1170)
atggcgccgccggcgccggcgacggcgcggcgcccgatggcggccgtccgctgctccgcggcgaagaggagctacaacgtcacgctcctccccggtgacggcatcggcccggaggtggtcgccgtcgccaaggacgtcctctccctcgccggcgctctcgaaggcgtcgagttccgcttccaggagaagctgatgggcggcgcggcggtggatgcgtacggcgtgccgctcccggaggagacgctcgcggcggcgcaggcgtcggacgccgtcctcctcggcgccataggagggtataagtgggataacaatgagaagcacctcaagccagagactgggttgctccagatacgcgctgggcttggcgtctttgctaatctgaggccagctgcagtgttgcctcagttagtagatgcatctactttgaaaaaagaagtagctgaaggagtcgacatcatggttgttagagagcttacaggaggaatatacttcggccaacctaggggttttggaaagaacgacaaaggagaagacactggcttcaacactgaagtatattcagcttctgagattgatcgaatcacacgtgttgcatttgaggttgctcgcaagaggcgcgggaagctttgctcagtagacaaagcgaatgtgcttgaggcatctatgctttggagaaaacgggtgacttcattagcttctgaattccctgacattgagctgtcgcacatgtatgttgataatgcagcaatgcagcttattaggaatcctaagcagtttgacacaattgtcacaaacaatatttttggtgacatattgtctgatgaagcatcaatgcttactggaagcattggaatgctcccatctgccagtgttggtgaatcgggaccaggtctttttgagcctattcatggttctgcgcccgacattgctgggcaggataaggcaaacccattagctacaattcttagtgctgccatgctattgcggtatggccttggagaagaaaatgctgcaaagagagttgaagccgcagttacagagacactaaacaacgggttccgaactggggacatatattctcctggaacgaccttggtcggatgcaagcgaatgggagaggaagtcctgaagactgtagagtcgcagagcgcggttgctctaaactcgtag

SEQ ID NO: 107164 - protein, 389 aa, Oryza sativa (japonica cultivar-group)
MAPPAPATARRPMAAVRCSAAKRSYNVTLLPGDGIGPEVVAVAKDVLSLAGALEGVEFRFQEKLMGGAAVDAYGVPLPEETLAAAQASDAVLLGAIGGYKWDNNEKHLKPETGLLQIRAGLGVFANLRPAAVLPQLVDASTLKKEVAEGVDIMVVRELTGGIYFGQPRGFGKNDKGEDTGFNTEVYSASEIDRITRVAFEVARKRRGKLCSVDKANVLEASMLWRKRVTSLASEFPDIELSHMYVDNAAMQLIRNPKQFDTIVTNNIFGDILSDEASMLTGSIGMLPSASVGESGPGLFEPIHGSAPDIAGQDKANPLATILSAAMLLRYGLGEENAAKRVEAAVTETLNNGFRTGDIYSPGTTLVGCKRMGEEVLKTVESQSAVALNS

SEQ ID NO: 107165 - DNA, 1215 bp, Arabidopsis thaliana
  CDS (1)..(1215)
atggcggcgtttttgcaaactaacatccgtctggagatcataccgggaagatacagttctctcaccgatcataagtttcgtgcgccgtatcgaattaggtgcgccgccgcttcaccggtgaaaaaacggtataacatcactctgcttcccggcgatggtatcggtccagaagttatatctgttgctaagaatgtgcttcagaaagctggatttctccaaggactagagtttgatttccaggagatgcctttcggcggagcagctttggatttggtcggagttccattgccggaggaaacttccactgctgctaaacagtctgatgccattcttcttggagctatcggagggtacaaatgggacaagaatgagaaacatctgagacctgagatgggtctgcttaacattcgaagagatctcaatgtctttgctaatttgagacctgctacagttttaccacagctagttgatgcttccacactgaagaaagaagtagcacaaggtgttgatatgatgattgtaagggagctcactggaggtatttactttggagagccaagaggcattacgatcaacgaaaatggcgaagaagtcggttttaatacagagatctacgctgctcacgagattgacagaattgctcgtgttgcattcgagactgctaggaaaaggcgtggcaagctgtgttctgttgacaaagccaatgtcttggatgcatcaatattgtggaggaaaagagtaacagctttagcctctgaatatccagatgttgaactatcacatatgtatgtcgataatgctgcgatgcagcttgtccgtgacccgaaacagtttgacacaatcgtcaccaataacatttttggtgatatattgtctgatgaagcttcaatgatcactggtagcattgggatgcttccatctgcaagtcttggtgaatcgggacctggactctttgaacctatacatggttcagcaccagatatagctggacaagacaaggcaaacccattggccaccattctcagtgcggcgatgcttctcaagtatggacttggagaagaaaaggctgcaaagatgattgaagacgcggtcgtggatgctctgaacaaaggtttcagaaccggagacatctactcccccggaaataaactggtgggatgcaaggaaatgggtgaggaggttctcaaatcagtggactccaaagttcctgtttaa

SEQ ID NO: 107166 - protein, 404 aa, Arabidopsis thaliana
MAAFLQTNIRLEIIPGRYSSLTDHKFRAPYRIRCAAASPVKKRYNITLLPGDGIGPEVISVAKNVLQKAGFLQGLEFDFQEMPFGGAALDLVGVPLPEETSTAAKQSDAILLGAIGGYKWDKNEKHLRPEMGLLNIRRDLNVFANLRPATVLPQLVDASTLKKEVAQGVDMMIVRELTGGIYFGEPRGITINENGEEVGFNTEIYAAHEIDRIARVAFETARKRRGKLCSVDKANVLDASILWRKRVTALASEYPDVELSHMYVDNAAMQLVRDPKQFDTIVTNNIFGDILSDEASMITGSIGMLPSASLGESGPGLFEPIHGSAPDIAGQDKANPLATILSAAMLLKYGLGEEKAAKMIEDAVVDALNKGFRTGDIYSPGNKLVGCKEMGEEVLKSVDSKVPV

SEQ ID NO: 107167 - DNA, 1095 bp, Escherichia coli O157:H7 EDL933
  CDS (1)..(1095): transl_table=11
gtgatgtcgaagaattaccatattgccgtattgccgggggatggcattggtccggaagtgatgacccaggcgctgaaagtgctggatgccgtgcgcaaccgctttgcgatgcgcatcactaccagccattacgatgtaggcggcgcagccattgataaccacgggcaaccactgccgcctgcgacggttgaaggttgtgagcaagccgatgccgtgctgtttggctcggtaggcggcccgaaatgggaacatttaccaccggaccagcaaccagaacgcggcgcgctgttgcctttgcgtaagcacttcaaattattcagcaacctgcgtccggcaaaactgtatcaggggctggaagcattctgtccgctgcgtgcagacattgccgcaaacggcttcgacatcctgtgcgtgcgcgaactgaccggcggcatctatttcggtcagccaaaaggccgcgaaggtagcggacaatatgaaaaagcgtttgataccgaggtgtatcaccgttttgagatcgagcgtattgcccgcatcgcgtttgaatctgctcgtaaacgtcgccataaagtgacgtcgatcgataaagccaacgtgctgcaatcctctattttatggcgtgaaatcgtcaacgagatcgccacggaatacccggatatcgaactggcgcatatgtacatcgacaacgccaccatgcagctgattaaagatccatcacagtttgacgttctgctgtgctccaacctgtttggcgacattctgtctgacgagtgcgcaatgatcactggctcgatggggatgttgccttccgccagcctgaacgagcaaggttttggactgtatgaaccggcgggcggctcggcaccagatatcgcaggtaaaaacatcgccaacccgattgcgcaaattctgtcgctggcactgctgctgcgttacagcctggatgccgatgatgcggcttccgccattgaacgcgccattaaccgcgcattagaagaaggcattcgcaccggggatttagcccgtggcgctgccgccgttagtaccgatgaaatgggcgatatcattgcccgctatgtggcagaaggggtgtaa

SEQ ID NO: 107168 - protein, 364 aa, Escherichia coli O157:H7 EDL933
MMSKNYHIAVLPGDGIGPEVMTQALKVLDAVRNRFAMRITTSHYDVGGAAIDNHGQPLPPATVEGCEQADAVLFGSVGGPKWEHLPPDQQPERGALLPLRKHFKLFSNLRPAKLYQGLEAFCPLRADIAANGFDILCVRELTGGIYFGQPKGREGSGQYEKAFDTEVYHRFEIERIARIAFESARKRRHKVTSIDKANVLQSSILWREIVNEIATEYPDIELAHMYIDNATMQLIKDPSQFDVLLCSNLFGDILSDECAMITGSMGMLPSASLNEQGFGLYEPAGGSAPDIAGKNIANPIAQILSLALLLRYSLDADDAASAIERAINRALEEGIRTGDLARGAAAVSTDEMGDIIARYVAEGV

SEQ ID NO: 107169 - DNA, 1086 bp, Escherichia coli O157:H7 EDL933
  CDS (1)..(1086): transl_table=11
atgatgaaaacgatgcgtattgctgcgatcccgggagacgggattggcaaagaagtccttcctgaagggattcgcgtgttacaggctgccgctgagcgctggggcttcgccttgagttttgagcaaatggagtgggcgagctgcgagtattacagccatcacggtaaaatgatgccggacgactggcatgagcaacttagccgtttcgacgccatctattttggtgccgtcggctggccggacaccgttccggaccatatttcgttgtggggttcgctgctgaaatttcgtcgtgaattcgaccagtacgtcaacctgcgcccggttcgtctctttcctggcgttccctgcccgctggcgggaaaacagcctggcgacatcgatttttacgtggtcagggaaaacaccgaaggcgaatattcctcgctcggcggtagagtgaatgaaggtacagagcatgaagtcgtcattcaggaatcggtatttacgcgtcgtggtgtcgatcgcattttgcgttatgccttcgaacttgcgcaaagccgcccacgtaagacgctaacttctgccactaaatcaaacggtttagccatcagcatgccgtactgggatgagcgagtggaagcaatggccgagaattacccggagatccgctgggacaagcagcatattgatattctctgcgcgcgttttgtgatgcagccggaacgcttcgatgtggtggtggcgtccaatttgtttggcgatatcctttccgatcttggcccggcctgcaccggcaccattggcattgccccatccgccaacctgaatccggaacgcactttcccctcgctcttcgagcctgtccacggttccgcgccggatatctacgggaaaaatattgctaaccctatcgccacaatttgggccggggcaatgatgctcgattttctcggcaatggcgatgagcgtttccagcaagcgcataacggtattctggcagcgattgaagaagtgattgctcacgggccgaaaacaccggatatgaaaggcagtgccaccacgccacaggttgccgacgcgatttgcaaaattattttgcgttaa

SEQ ID NO: 107170 - protein, 361 aa, Escherichia coli O157:H7 EDL933
MMKTMRIAAIPGDGIGKEVLPEGIRVLQAAAERWGFALSFEQMEWASCEYYSHHGKMMPDDWHEQLSRFDAIYFGAVGWPDTVPDHISLWGSLLKFRREFDQYVNLRPVRLFPGVPCPLAGKQPGDIDFYVVRENTEGEYSSLGGRVNEGTEHEVVIQESVFTRRGVDRILRYAFELAQSRPRKTLTSATKSNGLAISMPYWDERVEAMAENYPEIRWDKQHIDILCARFVMQPERFDVVVASNLFGDILSDLGPACTGTIGIAPSANLNPERTFPSLFEPVHGSAPDIYGKNIANPIATIWAGAMMLDFLGNGDERFQQAHNGILAAIEEVIAHGPKTPDMKGSATTPQVADAICKIILR

SEQ ID NO: 107171 - DNA, 1092 bp, Ralstonia solanacearum GMI1000
  CDS (1)..(1092): transl_table=11
atgcataacaaggacaaacgcatgaccaaaattgcagtgttgccgggtgacggcattggcacggaaatcgtggccgaggccgtcaaggtgctcaagacgctgggcgagacgttcgagatggaaaccgcgcccgtcggcggcgccggctacgaggccaagggtcatccgctgccagaggacacgctcaagctcgccaaggaagccgatgccatcctgttcggcgccgtcggcgactggaagtacgacacgctgccgcgcgaactgcgtcccgagcaggccatcctgggcctgcgcaagcacctgcaactgttcgccaacttccgcccggctatctgctatccggagctggccggtgcatcgagcatgaagcccgaaatcgtggcggggctcgacatcctgatcgtgcgcgaactgaccggcgatatctacttcggccagccgcgcggcgtgcgtgccgcaccggacggcctgttcgccggcgcgcgcgagggcttcgacaccatgcgctacagcgagccggaaatccgtcgcatcgcgcacgtcgccttccaggcggcggccaagcgcggcaagaagctgtgcagcgtcgacaaggccaatgtgctggagaccttccagttctggaaggacattgtcaccgacgtgcacaaggagtaccccgaggtcgagctctcgcacatgtacgtggacaacgccgcgatgcagctggtcaaggcgcccaagaacttcgacgtggttgtcaccggcaacatgttcggcgacatcctgtcggacgaggccgcgatgctgacgggctcgatcggcatgctgccgtcggcctcgctcgatgccaacaacaagggcctgtacgagccgtcgcacggttcggccccggacatcgcgggcaagggcatcgccaacccgctggcgaccatcctgtcggcggcgatgatgctgcgctacacgctgggcaaggccgagcaggcggaccgcatcgagaacgcggtcaagaaggtgctggcccagggctatcgcaccggcgacatcctgacgccgggctgcaagcaggtcggtacggtggagatgggcgacgccgtggtggccgcgctgtaa

SEQ ID NO: 107172 - protein, 363 aa, Ralstonia solanacearum GMI1000
MHNKDKRMTKIAVLPGDGIGTEIVAEAVKVLKTLGETFEMETAPVGGAGYEAKGHPLPEDTLKLAKEADAILFGAVGDWKYDTLPRELRPEQAILGLRKHLQLFANFRPAICYPELAGASSMKPEIVAGLDILIVRELTGDIYFGQPRGVRAAPDGLFAGAREGFDTMRYSEPEIRRIAHVAFQAAAKRGKKLCSVDKANVLETFQFWKDIVTDVHKEYPEVELSHMYVDNAAMQLVKAPKNFDVVVTGNMFGDILSDEAAMLTGSIGMLPSASLDANNKGLYEPSHGSAPDIAGKGIANPLATILSAAMMLRYTLGKAEQADRIENAVKKVLAQGYRTGDILTPGCKQVGTVEMGDAVVAAL

SEQ ID NO: 107173 - DNA, 1044 bp, Agrobacterium tumefaciens str. C58
  CDS (1)..(1044): transl_table=11
ttgaaaacgcatcgcatcgcactcatccccggggacggcatcggccaaagcgtgacggacgcggcgtggcaggtcctcaatgccgtcgccaaaacctccggttttgtgctcgaaggaaccgaattcccctggtcctgcgccttctacaaggaaaccggggcgatgatgccgaaggacggcatcgaaacgctgcgcggattcgacgccatcatgctcggcgcggtcgggtggccggcggaggtgcctgactcggtgtcgctgcacggtctgctgctgccgatccgcaaggctttcgtgcaatatgccaatatccgcccgcaccggctactatcaggcgtacaagggcccttgaaggccgacggcttcgatattctctgcatccgcgaaaacacggaaggcgaatattccggcgccggcggccgcgtgcatcaaggcacggaggacgaggtggccgtcgaaacctcgatcttcacccgcaagggcgtggagcgaatcttgcgcttcggtttcgaacaggcgcaaaaacgtcgcggcaagctcgcctccatcaccaaatccaatgcccagaaatattcgatggtgttctgggacgaagtgacccacaagctcgcggcggaatatcctgacgtggaggtctcaagctatcacatcgacgccatggcggcacgtatggtgatggcgccggaaagcctcgatgtcgtcgtcgcttccaacctcttcggcgatattctgaccgatctcggcgccgccattcagggcggcctcggttttgccgcttccgccaatatcaatcccgaccgcagcgccccctcgatgttcgagccggtgcacggctcggcacctgacatcgcccatctcggcatcgccaacccgatcgccgccatctggtccggcgcgatgatgttcgagcatctcggcgaaaaggatgcagccgcgaaaatcatggcggccctggaaacggcgaccggccgcggcatcggcaccgtgccgggcaaggacaagactgacaccatcaccgccgcggttctcgcggcactcgcctaa

SEQ ID NO: 107174 - protein, 347 aa, Agrobacterium tumefaciens str. C58
MKTHRIALIPGDGIGQSVTDAAWQVLNAVAKTSGFVLEGTEFPWSCAFYKETGAMMPKDGIETLRGFDAIMLGAVGWPAEVPDSVSLHGLLLPIRKAFVQYANIRPHRLLSGVQGPLKADGFDILCIRENTEGEYSGAGGRVHQGTEDEVAVETSIFTRKGVERILRFGFEQAQKRRGKLASITKSNAQKYSMVFWDEVTHKLAAEYPDVEVSSYHIDAMAARMVMAPESLDVVVASNLFGDILTDLGAAIQGGLGFAASANINPDRSAPSMFEPVHGSAPDIAHLGIANPIAAIWSGAMMFEHLGEKDAAAKIMAALETATGRGIGTVPGKDKTDTITAAVLAALA

SEQ ID NO: 107175 - DNA, 1065 bp, Drosophila melanogaster; identical to SEQ ID NO: 37021
  CDS (1)..(1065)

SEQ ID NO: 107176 - protein, 354 aa, Drosophila melanogaster; identical to SEQ ID NO: 37022

SEQ ID NO: 107177 - DNA, 1068 bp, Pyrococcus furiosus DSM 3638
  CDS (1)..(1068): transl_table=11
atgataaagatagctgtgatcccaggtgatgggataggaaaggaggtagtggctgaggggctaaaggttcttcgcaaaatagaggagctgagcaacgttaagttcgactttcaagagtatccattcggagcagaacattacttgaaaactggagaaacccttccagactgggctcttgaggagtttagacactttgatgcaatttactttggagcaattggggatccaagggtaaagccgggaattctagaacacggaattctacttaagctcagattttccctagacctttacgtaaacttaagacctgtaaagttataccacccaaaactaactccgctaaagggaaaggaaaagattgacatggtgttcataagggaaaacactgagggcctatatgcaggagcgggtggttttcttaggaaggggacccctcatgaggtcgctattcaagaaatgataaatactaggtttggagtcgagagaaccattaggtttgcctttgaatatgcaaagactaaggggagaaaaaaggtaactctagtagataaggccaacgttcttacctatgctcacgatctctggcagagagtgtttaaggaagttgcttcggaataccaggaaatagagactgaccactactatgttgatgctatggcaatgaaaatgatccgttctccagagatcttcgaagtagttgtaactccaaacatgtttggagacattctcactgacttgggagcagagattgtgggaggattaggattagcagcttctggaaatatcaatccaaggggagtttccatgtttgagccagtccacggttctgccccagacattgcaggaaagggcattgcaaatccactagctgcgattttaacagcagctctaatgcttgagcacctgggattggacagggaagcctcacttgtggaaaaggccgttgcgaagacaatagaagaaaacaaagtaacaccagacttgggaggagagttgaagactagcgaagttggtaatgaagttgtgaaaaatttagaggtgttatgggatgagggagaggagagttga

SEQ ID NO: 107178 - protein, 355 aa, Pyrococcus furiosus DSM 3638
MIKIAVIPGDGIGKEVVAEGLKVLRKIEELSNVKFDFQEYPFGAEHYLKTGETLPDWALEEFRHFDAIYFGAIGDPRVKPGILEHGILLKLRFSLDLYVNLRPVKLYHPKLTPLKGKEKIDMVFIRENTEGLYAGAGGFLRKGTPHEVAIQEMINTRFGVERTIRFAFEYAKTKGRKKVTLVDKANVLTYAHDLWQRVFKEVASEYQEIETDHYYVDAMAMKMIRSPEIFEVVVTPNMFGDILTDLGAEIVGGLGLAASGNINPRGVSMFEPVHGSAPDIAGKGIANPLAAILTAALMLEHLGLDREASLVEKAVAKTIEENKVTPDLGGELKTSEVGNEVVKNLEVLWDEGEES

SEQ ID NO: 107179 - DNA, 1098 bp, Yersinia pestis KIM
  CDS (1)..(1098): transl_table=11
gtgaacatgacgaagacttatcatattgcagtgttgcccggcgacggtatcggccctgaagtaatggctcaggcaagtaaagtattagatgcggtgcgtcagcgcttcggtctcaagatttcaaccagtgtttacgatgttggtggcgctgccattgaccgccatggtagcccattaccggcagcaacggtcgcgggatgtgaacaggcagatgccattttatttggctccgtaggcggcccaaaatgggaacacctgccaccggcagaacaacctgagcgtggtgccttattgcctttgcgtaaacatttcaaattattcagcaatttgcgccctgcccgtttgtatcaaggattggaggacttctgtccattgcgcagtgatatcgcggccagaggttttgatatcctgtgtgtccgtgaattaaccggcggtatctatttcggccagccgaaaggccgtgaaggccaaggcatgcacgagcgggcctttgacaccgaagtttatcatcgcttcgaaattgaacgtatcgcccgtattgctttcgaatcagcccgcaaacgccgtagtaaagtaacgtccattgataaagccaacgtgttgcaaagttcaatcttgtggcgtgaagtggtcaacgggatcgcggcggattacccagatgttgcgttgtcccatatgtacattgataacgccaccatgcagttaatcaaagacccttcccaatttgacgtgttgctgtgctctaacttgtttggcgatatcttgtccgatgaatgcgccatgatcaccggctccatgggcatgttgccatcagccagtttgaatgaacaaggttttggtctatatgaacccgcaggcggttccgcaccggatatcgcgggtaagaacattgccaaccctatcgctcagatcctgtcattaaccctgttgctgcgttttagcttaggtaaagatgatgccgctgacgccattgagcgcgcgatcaaccaggcattggagcaaggttatcgcactgcggatttagccggggatggtcacgcaatcggcactcacgaaatgggcgatatcatcgctaaattcgtggttgaaggggtataa

SEQ ID NO: 107180 - protein, 365 aa, Yersinia pestis KIM
MNMTKTYHIAVLPGDGIGPEVMAQASKVLDAVRQRFGLKISTSVYDVGGAAIDRHGSPLPAATVAGCEQADAILFGSVGGPKWEHLPPAEQPERGALLPLRKHFKLFSNLRPARLYQGLEDFCPLRSDIAARGFDILCVRELTGGIYFGQPKGREGQGMHERAFDTEVYHRFEIERIARIAFESARKRRSKVTSIDKANVLQSSILWREVVNGIAADYPDVALSHMYIDNATMQLIKDPSQFDVLLCSNLFGDILSDECAMITGSMGMLPSASLNEQGFGLYEPAGGSAPDIAGKNIANPIAQILSLTLLLRFSLGKDDAADAIERAINQALEQGYRTADLAGDGHAIGTHEMGDIIAKFVVEGV

SEQ ID NO: 107181 - DNA, 1077 bp, Thermosynechococcus elongatus BP-1; identical to SEQ ID NO: 37029
  CDS (1)..(1077): transl_table=11

SEQ ID NO: 107182 - protein, 358 aa, Thermosynechococcus elongatus BP-1; identical to SEQ ID NO: 37030

SEQ ID NO: 107183 - DNA, 1104 bp, Bordetella parapertussis 12822
  CDS (1)..(1104): transl_table=11
ttgttttcccgcttacaggaatttttcatgactcatcagatcgcagtccttcccggcgatggcatcggccctgaaatcgtcgagcaggccgagcgcgtgctcaaggcgctggacctgccgctcgaactgcgccaggccccggtgggcggcgcggccttcgaccaattcgagcatcccttgccgccggccacgctggaattggcgcaaggctcgcacgcggtgctgttcggcgccgtgggcgactggaagtacgacacgctgccgcgcgaattccgccccgagcaggcgatcctgggcctgcgcaaggcgctcgggctgttcgccaacctgcgcccggcgattctctatcccgagctggccagcgcctcctcgctcaagcccgagatcgtgtccggtctcgacatcctgatcatccgcgaactgaccggcgacatctatttcggtacgccgcgcggcgtgcgcacggccgccgatggcgccttcgccggcgagcgcgaaggctacgacaccatgcgctacgccgagtcggaagtgcggcgcattgcccgcatcggcttcgagtcggcccgcaagcgcaacaagaagctgtgcagcgtcgacaaggccaacgtgctggaaacctcgcagttctggcgcgacctggtgatcgaggtcagccgggattatcccgacgtggaactgtcgcatatgtatgtcgacaacgccgcgatgcagctggtgcgcaatccgcgccagttcgacgtgatcgtgaccggcaacctgttcggcgacattctttcggatgaggccgccatgctgacgggttcgatcggcatgctgccttcggcctcgctgaacgccgccggccagggcctgtacgagcccagccacggatcggcgcccgacatcgccggccagggcatcgccaatccgctggccaccatcctgtcggccgccatgctgctgcgctattcgctgaatctggccccgcaggccgaccgcgtcgaggccgccgtgcgcaaggtgctggccgacggcctgcgcaccgccgatatccacgaggccggcacgaccaaggtgtccacctcgcagatgggcgacgccgtgctcaaggccctgggctga

SEQ ID NO: 107184 - protein, 367 aa, Bordetella parapertussis 12822
MFSRLQEFFMTHQIAVLPGDGIGPEIVEQAERVLKALDLPLELRQAPVGGAAFDQFEHPLPPATLELAQGSHAVLFGAVGDWKYDTLPREFRPEQAILGLRKALGLFANLRPAILYPELASASSLKPEIVSGLDILIIRELTGDIYFGTPRGVRTAADGAFAGEREGYDTMRYAESEVRRIARIGFESARKRNKKLCSVDKANVLETSQFWRDLVIEVSRDYPDVELSHMYVDNAAMQLVRNPRQFDVIVTGNLFGDILSDEAAMLTGSIGMLPSASLNAAGQGLYEPSHGSAPDIAGQGIANPLATILSAAMLLRYSLNLAPQADRVEAAVRKVLADGLRTADIHEAGTTKVSTSQMGDAVLKALG

SEQ ID NO: 107185 - DNA, 1134 bp, Wolinella succinogenes DSM 1740
  CDS (1)..(1134): transl_table=11
gtggcgggctcatcgaacacgccaaagcgaaaattgcccaaggagtcttataagattatgaaaaaatatgagattgcgatcatcaaaggtgatggaatcggtcctgaaatcgttgatgaggccaaaaaagtcctcgatgccatctcctactcccatggcttcgagctctcctatcacgactatctcatgggtggaatcgccgtggatagggcaggtgtacccctgcctgatgagaccattgaggggtgtttgagggcggatgccgtcctttttggggccatcggaggagagaagtgggattcgcttcccagagagcttcggcctgagagtgggctcttaaaactccgcaaatctttagagatttttgccaatctccgacccaccgtggtctatgatgagctgatcgaagccagcaccctcaaagaatcggtgatcaagggagtggatattctagtggttagagagctcatcggaggaatctactttggggaacccaagggcagagagggagataaggcgttcaacaccatggtctactctgtgcctgaaattgaacggattgcccatgttgcctttaaagccgccatgcgccgccaaaagcgcgtctgctctgtggataaagccaatgtcttggatgtgagccagctttggcgcgaaacagtcacaagaattgccaaagagtatccagaggtggagctaagccatatgtatatcgacaatgccgcgatgcagcttatccgcaaccccaagcagtttgatgtgattctcacaggcaatctttttggggatattctaagcgatgaggcaagcatgctaagcggttctattggactgctcccctccgcctctatcgggggtaaagctgccttgtatgagcctatccatggctctgctcctgatatcgctggacaaggtatcgccaatcccatcgccaccatcgcctcagcctccatgatgctccgccactccctgggagaggtcgaggccgccgatgcgattgataaggcgatcgtcaaaaccctcaaagagggctaccgcaccaaagatatcgccgcctttggagccaaagagatttgcaccacggatgaaatgggctccattatcgccaactacgccgctaaaaaaggtgagtga

SEQ ID NO: 107186 - protein, 377 aa, Wolinella succinogenes DSM 1740
MAGSSNTPKRKLPKESYKIMKKYEIAIIKGDGIGPEIVDEAKKVLDAISYSHGFELSYHDYLMGGIAVDRAGVPLPDETIEGCLRADAVLFGAIGGEKWDSLPRELRPESGLLKLRKSLEIFANLRPTVVYDELIEASTLKESVIKGVDILVVRELIGGIYFGEPKGREGDKAFNTMVYSVPEIERIAHVAFKAAMRRQKRVCSVDKANVLDVSQLWRETVTRIAKEYPEVELSHMYIDNAAMQLIRNPKQFDVILTGNLFGDILSDEASMLSGSIGLLPSASIGGKAALYEPIHGSAPDIAGQGIANPIATIASASMMLRHSLGEVEAADAIDKAIVKTLKEGYRTKDIAAFGAKEICTTDEMGSIIANYAAKKGE

SEQ ID NO: 107187 - DNA, 1107 bp, Strongylocentrotus purpuratus; identical to SEQ ID NO: 37069
  CDS (1)..(1107)

SEQ ID NO: 107188 - protein, 368 aa, Strongylocentrotus purpuratus; identical to SEQ ID NO: 37070

SEQ ID NO: 107189 - DNA, 1080 bp, Nasonia vitripennis; identical to SEQ ID NO: 37071
  CDS (1)..(1080)

SEQ ID NO: 107190 - protein, 359 aa, Nasonia vitripennis; identical to SEQ ID NO: 37072

SEQ ID NO: 107191 - DNA, 1101 bp, Magnaporthe grisea 70-15
  CDS (1)..(1101)
atgtcgtcgttcaacattgtcgtctttgctggtgaccacgctggccccgaggtcgtcgccgaggccgtcaaggtcctcaagactgttgaggagaagagcaagaccggtgtcaagttcaacctgcaggatcatctgctgggtggtgcctcaatcaacgctcacggcaaccccctgaccgatgaggccctcgccgccgccaagtctgccgatgccatcctcttgggcgccatcggcggaccggaatggggtccctcgtcaccggtgaggccggagcagggtctcctcaagctccgcaaggagctcggcacctttggcaacctccgcccgtgctcgttcgcctccgactcgctggtagacttttcacccctcaaggccgacgtctgccgcggcaccgactttgtcgtcgtgcgcgagctgaccggcggcatctactttggcgaccgtacagaggacgacggctccgggtacgcgctcgacacggagccctactcacgccacgagatcgagaggatagcccgcctgggcgcccagctggccctcgcccgcagcccgcccgccaaggtctggagtctggacaaggccaacgtcctggccacgagccgcctgtggaggaaggtggtcgacgagatctttgccaaggagttcccccagctcgagctgggccaccacctcatcgactcggccgccatgctcatggtcaagaacccaagggcgctcaacggcgttgtcatcaccagcaacctgtttggcgacatcatcagcgacgaggccagcgtcatccccggcagcttgggtttgctgcctagtgccagtctgggtaccatcccggacggccagagccgatgcaacggcatttacgagcccattcacggctccgcccccgacatttcaggcaagggcatcgtcaaccccgtgggcacgatcctctcggtcgccatgatgctgcgttactcgctgcgcatgcccgccgaggccgatgcggtcgaggccgccgtcaaggccgccatcgacggcggtatccggaccaaggacctgggcggtaacgccggcaccaaggagatgggcgaggccatcattgcagagctaaacaagctgctgtag

SEQ ID NO: 107192 - protein, 366 aa, Magnaporthe grisea 70-15
MSSFNIVVFAGDHAGPEVVAEAVKVLKTVEEKSKTGVKFNLQDHLLGGASINAHGNPLTDEALAAAKSADAILLGAIGGPEWGPSSPVRPEQGLLKLRKELGTFGNLRPCSFASDSLVDFSPLKADVCRGTDFVVVRELTGGIYFGDRTEDDGSGYALDTEPYSRHEIERIARLGAQLALARSPPAKVWSLDKANVLATSRLWRKVVDEIFAKEFPQLELGHHLIDSAAMLMVKNPRALNGVVITSNLFGDIISDEASVIPGSLGLLPSASLGTIPDGQSRCNGIYEPIHGSAPDISGKGIVNPVGTILSVAMMLRYSLRMPAEADAVEAAVKAAIDGGIRTKDLGGNAGTKEMGEAIIAELNKLL

SEQ ID NO: 107193 - DNA, 1077 bp, Apis mellifera; identical to SEQ ID NO: 37083
  CDS (1)..(1077)

SEQ ID NO: 107194 - protein, 358 aa, Apis mellifera; identical to SEQ ID NO: 37084

SEQ ID NO: 107195 - DNA, 1101 bp, Aspergillus nidulans FGSC A4
  CDS (1)..(1101)
atgccgtcttacaatattgttgtctttgggggagatcattgcggtcctgaggttaccgccgaggctgtcaagatcctccgtgtgatcgaaaagagtcgtgacgatatcactttcaacctgcaagaccacttgctcggtggttgctcaattgatgccacaggatctcctcttaccgatcaagcacttgaagccgcgaagaacgctgacgccgtgttccttggtgccattggtggcccagaatggggaactggtgctgtccgccctgagcagggtattctcaagctgcgcaaggaaatgggcactttcgccaacttgcgaccatgcaatttcgccgctccctcactagtagagagctctcccctccggcctgagatctgccgcggcgtcgacttcaacatcatccgtgaattgactggcggtatctacttcggtgaacgcaaggaagacgacggcagcggcttcgcccttgacacggaaccctactcacgcgctgaaattgaacgcatcacccgtcttggtgcccacctcgccctgcaacacaaccctcctcttcctgtgtggagcttggacaaggccaatgtccttgctaccagccgtctctggcgtaagacggttaccgaaatcatggcgaaggagttccctcagcttaagcttgagcaccagcttatcgactccgctgccatgattatggtcaaggaccctcgcaagctgaatggtatcgtcatcaccagcaacctgttcggtgatattatatcggacgaggctagcgttatccccggatctttgggtctgcttcccagcgctagtctgagtagcattcctgatggaaagggcaaggttaacggtatttacgagcccattcacggctccgcgcccgacatttccggaaagggcattgttaaccccgtcgctgcaatcctctcagtcggcctgatgatgcagtactctttcgccctcttcgaagaggctcgcgcggttgcgaccgccgtgagcaacgtcatcgaggccggtgtccgcactggtgacattggcggcaaagcttccaccaaggaagttggtgatgctgttgctgctgagctggagaagcttctcaagaaataa

SEQ ID NO: 107196 - protein, 366 aa, Aspergillus nidulans FGSC A4
MPSYNIVVFGGDHCGPEVTAEAVKILRVIEKSRDDITFNLQDHLLGGCSIDATGSPLTDQALEAAKNADAVFLGAIGGPEWGTGAVRPEQGILKLRKEMGTFANLRPCNFAAPSLVESSPLRPEICRGVDFNIIRELTGGIYFGERKEDDGSGFALDTEPYSRAEIERITRLGAHLALQHNPPLPVWSLDKANVLATSRLWRKTVTEIMAKEFPQLKLEHQLIDSAAMIMVKDPRKLNGIVITSNLFGDIISDEASVIPGSLGLLPSASLSSIPDGKGKVNGIYEPIHGSAPDISGKGIVNPVAAILSVGLMMQYSFALFEEARAVATAVSNVIEAGVRTGDIGGKASTKEVGDAVAAELEKLLKK

SEQ ID NO: 107197 - DNA, 1122 bp, Candida albicans SC5314
  CDS (1)..(1122): transl_table=12
atgtctgttaaaaccaaaaccattactgtcttgcctggtgaccatgtcggtaccgaaattgtcaatgaagcaatcaaagtcttgaaagcaattgaagctgccactccctaccaaaaaatccaatttgatttcaaacaccacttgattggtggtgctgccattgatgccactggcgtcccgcttccagatgatgctcttgaaagtgctaaatcatccgatgcagttttgttgggtgctgttggtggacccaaatggggtactggcactgttcgtcctgaacaaggattattgaaaatccgtaaagaattgaacctttatgccaacattagaccatgtaattttgccagtgactcgttattagaattgtctccattaaaagctgaagtggtcaaaggaaccaatttaattattgttcgtgaattagttggtggtatatattttggtgaacgtcaagaacaagaagaaagtgaagacaaaaaaacagcttgggatacagaaaagtatactgttgacgaagttactcgtatcactcgtatggcagcatttatggctttgcagcacaatccaccattgccaatatggtctttggacaaagctaatgttttggcatcgtcgagattgtggagaaagaccgttgataaagtgatttctgaagaatttccagctttgtctgtgcagcatcaattgattgattcggctgcaatgattttgatccaaaacccaaccaaattgaacggtatcatcattacatctaacatgtttggtgatatcatctcagatgaggcatccgttatcccaggatctttgggtttattgccatctgcttcattggcttcattgccagataccaacactgcttttggtctttatgagccttgccatgggtctgctccagatttaccagccaacaaagtgaatccaattgctacaatcttgtctgccgcttccatgttgagattatccttggattgtgttaaggaagctgaagcattggaagaagctgtcaaacaggttttggatagcggtatcagaacagcagatttaagaggtactagctctactacagaagtcggtgacgcaatagccgaaacagtcactaaaattttaaaacaaaatacataa

SEQ ID NO: 107198 - protein, 373 aa, Candida albicans SC5314
MSVKTKTITVLPGDHVGTEIVNEAIKVLKAIEAATPYQKIQFDFKHHLIGGAAIDATGVPLPDDALESAKSSDAVLLGAVGGPKWGTGTVRPEQGLLKIRKELNLYANIRPCNFASDSLLELSPLKAEVVKGTNLIIVRELVGGIYFGERQEQEESEDKKTAWDTEKYTVDEVTRITRMAAFMALQHNPPLPIWSLDKANVLASSRLWRKTVDKVISEEFPALSVQHQLIDSAAMILIQNPTKLNGIIITSNMFGDIISDEASVIPGSLGLLPSASLASLPDTNTAFGLYEPCHGSAPDLPANKVNPIATILSAASMLRLSLDCVKEAEALEEAVKQVLDSGIRTADLRGTSSTTEVGDAIAETVTKILKQNT

SEQ ID NO: 107199 - DNA, 1140 bp, Ustilago maydis 521
  CDS (1)..(1140)
atgagcaagcaagcctacaacgtcgtcgttcttcccggtgacggaatcggacccgaggtggtcgaacaagcgacgcgtgttctcgaattgatctcgtccaagagcaccacgttttcgatcaagctcaagtcgtacgattttggtggatgcgctattgactcaactggcaaacccctgcctgatgacacgctcgccgcatgcaaggaagccgatgccatccttatgggttcggtgggaggacccaagtggggcgtgggcaaagtgcgacctgaacagggactgcttgctttgcgcaaggagctggacctgtatgccaacatccgaccgtgcttgtttccgtccgagtcgctgctctcgcactctccgttgaagccggaagtggccaagggtgtatcgttcattgtcgttcgtgagctcgtcaaaggcctctactttggtgagcgccaggaagccaacctggacgaccccaactcggacggtgctgccttcgacaccatggtgtacaacaaacacgatgttgaacgcatcaccaagcttgcctcgcacctcgctttgcaatcgaacccgcctgctccgctccactcgatcgacaaggccaacgttcttgccacctcgcgtctctggcgtaaagtggttcaggacacggtcgactctgaatttgcttcgcagggtattacagttgaccaccagctggtcgactcagccagtatggtgatggtatccaacccacgcaagctcaacggtgttgtgttgaccgaaaacatgtttggtgacattctttccgacgaatcgtctgtgatccccggtgcgctcggtttgcttccctcggcttcgctctcgggtctgccggatggaaacggcaagtgcaacggtctctatgaacccattcacggctcggctcccgatatcgctggcaaaggcatcgccaaccctgtaggaaccatcctctcagctgccatgttgctcagatactcgctcaaccaacctgacttggcagacaaggtcgaagccgccgtcagaaaggtcctcgacgccaagcaaatcggaggcctcgaactcagaaccgctgatctcggcggaaaacacggctccaaggacgttggtgaccaggtcgtcgctgtcctcgagaccctgctttag

SEQ ID NO: 107200 - protein, 379 aa, Ustilago maydis 521
MSKQAYNVVVLPGDGIGPEVVEQATRVLELISSKSTTFSIKLKSYDFGGCAIDSTGKPLPDDTLAACKEADAILMGSVGGPKWGVGKVRPEQGLLALRKELDLYANIRPCLFPSESLLSHSPLKPEVAKGVSFIVVRELVKGLYFGERQEANLDDPNSDGAAFDTMVYNKHDVERITKLASHLALQSNPPAPLHSIDKANVLATSRLWRKVVQDTVDSEFASQGITVDHQLVDSASMVMVSNPRKLNGVVLTENMFGDILSDESSVIPGALGLLPSASLSGLPDGNGKCNGLYEPIHGSAPDIAGKGIANPVGTILSAAMLLRYSLNQPDLADKVEAAVRKVLDAKQIGGLELRTADLGGKHGSKDVGDQVVAVLETLL

SEQ ID NO: 107201 - DNA, 1122 bp, Cryptococcus neoformans var. neoformans B-3501A
  CDS (1)..(1122)
atggccgacaagacctttaagatcactgttctccctggtgacggtatcggccccgaggttgttgccgaagctgtccgagttctcgagactattgtcaatcattctgatctcaagcttgatctcaaatcatacgacttcggtggcgccgccattgataaccatggagttccccttcctgacgagaccctcaaggcttgtaaggaggccgatgccgttttgatgggttccgtcggtggtcccaaatggggtgttggtcctgtccgtcccgagcagggtatcctcaagctccgaaaggagcttggcctttatgccaacatccgtcccgccaattttgcttccgagagcttgctcaaacggtctcctttgaaggaagacactgccaggggtaccgacattattgttctccgtgagctgatcggcggtatctactttggtgagcgacaggagaccaatgatgagggtgtcgcctgggatcaatgtatttactccaagcctgaaattgaacgtattacgagagtcgctgctcagatcgctctggctgccgaacctcctctccccattacttcagtcgacaaggccaatgttcttgctacttctcgactctggcgaaagacagtctctgagctcatggccaaggagtatcctcagctcaaacttgagcaccagctcgtcgattctgccgccatgatcatgatcgccaaccccaggaagcttaacggtgtcctcttaactgagaatatgtttggtgacattctttctgacgaaagctccgtcatccccggctcccttggtctcctcccttctgcgtctctcgccggtgcccccgacgctaagtctaccaccatgggtctctatgagcctatccacggttccgctcctgacattgccggtcaaggcatcgccaatcccatcggtaccatcctctccgccgccatgatgctccggtactctctcggtaagggcagagaagccgccctcatcgaacaggctgtgcagaaggttcttgacagtgccgaatccggcggtttcgactatcgaacgaaggatttgggtggccagaggagcacgaaggaggtgggtgataaagttgtcgaggtgttgaagggtcttttgggtgcttaa

SEQ ID NO: 107202 - protein, 373 aa, Cryptococcus neoformans var. neoformans B-3501A
MADKTFKITVLPGDGIGPEVVAEAVRVLETIVNHSDLKLDLKSYDFGGAAIDNHGVPLPDETLKACKEADAVLMGSVGGPKWGVGPVRPEQGILKLRKELGLYANIRPANFASESLLKRSPLKEDTARGTDIIVLRELIGGIYFGERQETNDEGVAWDQCIYSKPEIERITRVAAQIALAAEPPLPITSVDKANVLATSRLWRKTVSELMAKEYPQLKLEHQLVDSAAMIMIANPRKLNGVLLTENMFGDILSDESSVIPGSLGLLPSASLAGAPDAKSTTMGLYEPIHGSAPDIAGQGIANPIGTILSAAMMLRYSLGKGREAALIEQAVQKVLDSAESGGFDYRTKDLGGQRSTKEVGDKVVEVLKGLLGA

SEQ ID NO: 107203 - DNA, 1083 bp, Tribolium castaneum; identical to SEQ ID NO: 37121
  CDS (1)..(1083)

SEQ ID NO: 107204 - protein, 360 aa, Tribolium castaneum; identical to SEQ ID NO: 37122

SEQ ID NO: 107205 - DNA, 1074 bp, Prochlorococcus marinus str. MIT 9303
  CDS (1)..(1074): transl_table=11
atgcgccagcaccgcatcgttctgctgcctggtgatggtatcggtcctgaaatcactgctgtagcaaagttgttacttgatgcagcaggcgaacaacacggtttcaagctgaatttcgagcaacaccccataggcggtgttgccatagatgcaagcggatcgccgttgcccgccagcacccttgaggcatgtcaagccagtgatgcggtgctccttgcagcaattggtagccctcgctttgatgctctgcccagggagcaacggccggagacaggcctgctatcccttcgtgctggactgaaactatttgcgaacctcaggccggtgacgatcctgccggccctgatcgatgccagcagcctgaaagcaaatgtgatcaaaggggttgatctaatggtggtgcgggagctcacaggcgggatctatttcggccaaccgaaagggcggattgaggccgatggtgatgagcgcgctttcaacacaatgacctactccagaactgaggtggaccgaatcgccaaggtcgctttcgacctcgcccgcgatcgcagcggaaagctttgttcgatagataaggcaaacgtgcttgatgtcagtcaactgtggcgtgatcgtgtcgatgctttggctgccaactatggagatgtagagctcagccacatgtacgtggacaatgccgcgatgcaattggtgcgcaaccccaggcaatttgacgtgctgcttaccggcaacctgttcggagacatccttagtgacgaagcagccatgcttaccggctcgattggcatgctgccctcagcttcgctcggcagcgaaggaccaggactgttcgaaccggttcatggttccgcacccgatattgcaggacaagacctggccaatccaatggcaatggtgctttgcgcagcaatgatgctgagaattggcttaaaggaaaacgatgccgccacggcgcttgaaggatcagtagagcgtgttctcgcggcaggtttccgtacaggtgacctcatgagtgagggttgtacccaactgggctgcgcagggatgggtgagcaattgctgcaagcgctttaa

SEQ ID NO: 107206 - protein, 357 aa, Prochlorococcus marinus str. MIT 9303
MRQHRIVLLPGDGIGPEITAVAKLLLDAAGEQHGFKLNFEQHPIGGVAIDASGSPLPASTLEACQASDAVLLAAIGSPRFDALPREQRPETGLLSLRAGLKLFANLRPVTILPALIDASSLKANVIKGVDLMVVRELTGGIYFGQPKGRIEADGDERAFNTMTYSRTEVDRIAKVAFDLARDRSGKLCSIDKANVLDVSQLWRDRVDALAANYGDVELSHMYVDNAAMQLVRNPRQFDVLLTGNLFGDILSDEAAMLTGSIGMLPSASLGSEGPGLFEPVHGSAPDIAGQDLANPMAMVLCAAMMLRIGLKENDAATALEGSVERVLAAGFRTGDLMSEGCTQLGCAGMGEQLLQAL

SEQ ID NO: 107207 - DNA, 1089 bp, Clostridium thermocellum ATCC 27405
  CDS (1)..(1089): transl_table=11
atgggaaagtataaaatagcggtacttccgggtgacggtatagggccggaagttattgaacaggcggttaaggtaattgaagctgtgggtgagatatacaatcacagttttgaattaaaagaaggcctgctcggtggatgtgccattgatgccaccggcgagcccttcccaaaagagacactggaactctgcaagtcctctgatgcagttttgctgggggccgtaggcggaccgaaatgggataaccttccgggggacaaaagacctgaagcgggtcttcttggaatacgcggagcattgggcttgtatgcaaatttaaggcctgcggttatctatcaggcactcaaaggtgcgtcgccactgcgctccgatattgtaaaagacggcattgacataatggtggtaagagagcttaccggcggtatgtattttggcgaaagaggaagagtgcagacggagaatatgggtcaggccgcttttgacacagaaaagtacagcgagtttgaagttgaaagaattgcacggctggcgtttgagacggccatgaagagaaataagaaactcacatctgtggacaaagccaatgtactggaaagctcaagactttggagggaagttgttaacagggttgcttcagactatccggaagttgagcttaatcatatgtatgtggacaatgccgccatgcagctggtaaggaatcctgcgcagtttgacgttatagttacatcaaatatgttcggtgatattctctccgacgaggcgtctatgattaccggctcaataggcatgcttccttcggcaagtcttggagaaggctcattggggctttatgaaccaatacatggttccgcgccggacatagcggggcaggacaaagcaaatcccattgccacaatactttcagtagctatgatgatgaaatactccttcggtcttgaagatgctttcagggctattgaaaatgccgtcgtaaatgtgcttggcatgggatacagaacggcggacattgcttccccggatactcctcgtgagaatatagtcggaacaaaggaaatgggaaggttaataatttcaaaattaaaataa

SEQ ID NO: 107208 - protein, 362 aa, Clostridium thermocellum ATCC 27405
MGKYKIAVLPGDGIGPEVIEQAVKVIEAVGEIYNHSFELKEGLLGGCAIDATGEPFPKETLELCKSSDAVLLGAVGGPKWDNLPGDKRPEAGLLGIRGALGLYANLRPAVIYQALKGASPLRSDIVKDGIDIMVVRELTGGMYFGERGRVQTENMGQAAFDTEKYSEFEVERIARLAFETAMKRNKKLTSVDKANVLESSRLWREVVNRVASDYPEVELNHMYVDNAAMQLVRNPAQFDVIVTSNMFGDILSDEASMITGSIGMLPSASLGEGSLGLYEPIHGSAPDIAGQDKANPIATILSVAMMMKYSFGLEDAFRAIENAVVNVLGMGYRTADIASPDTPRENIVGTKEMGRLIISKLK

SEQ ID NO: 107209 - DNA, 1071 bp, Herminiimonas arsenicoxydans
  CDS (1)..(1071): transl_table=11
atgaaaattgcaattttgccgggcgacggcatcggtccggaaatcatgaatcaagcggtcaaggtgatgaacgccttgggtgaaaaatttgaaactgaaacggtgccggtcggcggcgcagcctatgcagaacaagggcacccgttgccggaatcgaccttgaaggtcgcgaaagaagcggatgccattttgttcggcgcggttggtgatttcaagtacgacacactggaacgctcgctgcgtcctgagcaggcaattctcggtctgcgcaagcatctgggtttgtttgcgaacttccgtcctgcgattttgtatccggaactggcgggagcatcgtcactgaagccggaaatcgtttccggcctcgacatcatgatcgtgcgcgaattgacaggcgacatttacttcggtcagccgcgcggcatgcgcgaagcaccggacggtccgttcaagggcgcgcgtgaaggtttcgacaccatgcgttacagcgaaccggaaattcgccgcattgcgcacgtcgcattccaggccgcgcaaaaacgcagcaagcgtttgaccagcgtcgacaaggcgaacgtactggaaacattccagttctggcgcgatgtcgtgaccgacgtgcacaaggaatacaaagacgtcaaactcgaccacatgtacgtcgataacgccgcaatgcaattggtgcgcgcaccgaaggaattcgacgtggtcgtgaccggcaatatgtttggcgatatcctgtccgatgcggcagcgatgctgactggctcgattggcatgttgccatcagcttcgctggatgcgaacaacaagggcttgtacgaaccgtcgcacggttcggcaccggatatcgccggcaaggacatcgccaatccactggcgcaaattctgtcgctggcgatgatgttgcgttactcgctgggtaaaaccgaacaggcagatcgtattgaaaccgcagtcaaggcggtgttgaaacagggtttgcgtacggtcgatatttacgaagccggcactaccaaagtcagcacgacgcaaatgggcgatgcagtcgtcaaagcattggcttga

SEQ ID NO: 107210 - protein, 356 aa, Herminiimonas arsenicoxydans
MKIAILPGDGIGPEIMNQAVKVMNALGEKFETETVPVGGAAYAEQGHPLPESTLKVAKEADAILFGAVGDFKYDTLERSLRPEQAILGLRKHLGLFANFRPAILYPELAGASSLKPEIVSGLDIMIVRELTGDIYFGQPRGMREAPDGPFKGAREGFDTMRYSEPEIRRIAHVAFQAAQKRSKRLTSVDKANVLETFQFWRDVVTDVHKEYKDVKLDHMYVDNAAMQLVRAPKEFDVVVTGNMFGDILSDAAAMLTGSIGMLPSASLDANNKGLYEPSHGSAPDIAGKDIANPLAQILSLAMMLRYSLGKTEQADRIETAVKAVLKQGLRTVDIYEAGTTKVSTTQMGDAVVKALA

SEQ ID NO: 107211 - DNA, 1152 bp, Synechococcus elongatus PCC 6301
  CDS (1)..(1152): transl_table=11
gtgagaggaggcggttctagtacagtgaaaatcgctgacttcaggcgatcgcccatgacccgctcctatcggattaccctgcttcctggcgatggcatcggtcccgagattatggcagtgaccgttgacatcctgcgggcaatcggtcgccagtttgacctcaactttgaatttgaggaagcactgatcggcggatcggcaatcgatgccaccggtgagcccctgcctgaagccacgttggcgacctgtcgcaacagtgatgctgtcctactggctgcgatcgggggctacaagtgggattccttgccgcgatcgcagcgtccggaaaccggtcttttaggtctgcgagctggcttaggtctgtttgccaatctgcggcccgccgcaattttgcctcaattggttgatgcctcctccctcaaacgggaagtgatcgaaggcgtcgatttgatggtggtgcgagaactgaccggcggcatttactttggggaacctaaaggctgcttcgccgatgaacagggacgacagcgagctttcaacaccatggtctaccgcgaggatgagattgatcgcattggccgagttgcctttgacattgcccgcaaacggggcaaacgtctttgctcggtggataaggcaaatgtgctcgaggtctcccaactctggcgcgatcggatgacgctcttgggcagcgactacgctgatgtggagctcagccacctctacgttgataacgccgccatgcagttggtgcgttggcccaagcagttcgacaccatcgtcacgggcaatctttttggggatatcctttcggacattgcggcaatgctgacgggtagcattggcatgctgccgtctgccagcttgggtgccgaaggccccggcgtttttgaaccggtacatggctctgcacctgacatcgctggtcaagacaaagccaaccccctcgctcaagtgttgagcgcagctatgatgttgcgctacggcttggatgagccggaagctgctgcccgcattgaagctgctgtcaaccaagtgctcgatcagggctaccgaactggcgatctgtattccgaaggaatgactcttgtgggctgcaaaggcatgggcgatgctctactggcagctttagaatctcccgtctctgcctag

SEQ ID NO: 107212 - protein, 383 aa, Synechococcus elongatus PCC 6301
MRGGGSSTVKIADFRRSPMTRSYRITLLPGDGIGPEIMAVTVDILRAIGRQFDLNFEFEEALIGGSAIDATGEPLPEATLATCRNSDAVLLAAIGGYKWDSLPRSQRPETGLLGLRAGLGLFANLRPAAILPQLVDASSLKREVIEGVDLMVVRELTGGIYFGEPKGCFADEQGRQRAFNTMVYREDEIDRIGRVAFDIARKRGKRLCSVDKANVLEVSQLWRDRMTLLGSDYADVELSHLYVDNAAMQLVRWPKQFDTIVTGNLFGDILSDIAAMLTGSIGMLPSASLGAEGPGVFEPVHGSAPDIAGQDKANPLAQVLSAAMMLRYGLDEPEAAARIEAAVNQVLDQGYRTGDLYSEGMTLVGCKGMGDALLAALESPVSA

SEQ ID NO: 107213 - DNA, 1083 bp, Syntrophus aciditrophicus SB
  CDS (1)..(1083): transl_table=11
atgcaggaggattccatggggacagaatttcatgtcggtgtgattcccggtgacggaacagggccggaagtcgttgcggaaggcatcaaagtgctcaatgccgcggccagtcgatacggcttcggcctgaaatataccacctacgacctgggcggggaacgctacaagcggacaggcgaaacccttccggacagcgtgatccgggaactgaaacagcataaggccatctttctcggcgcgatcggtcatcccgaagtagcaccgggcatcctcgaaaagggcatcctgttgagggcccgctttgaactggatcagtacatcaatctgcgccccgtgaaactttatgaaggcgtcgatacgcctctgaaaaacaagggaccggaggaaatcgatttcgtggtcgtccgggaaaacaccgaagggctctatgccggcgcgggcggcgtccttaaaaggggaaccgccgatgaagtggccatccaggaatccatcaatacacgcaagggtgtggagcgctgcatccgcttcgccttcgacatcacccgaaaacgaaacaagggaaagaaactgaccctgtgcggcaaaaccaacgtcctgaccttcgccttcgatctctgggaacgaaccttctatgaagtcgcgaaggactatcccgacatcgcgacggattacgcccacgtggacgccacctgcatgtggatggtcaagaatcccgaatggttcgacgtcattgtcacggacaacatgttcggcgacatcatcaccgatctgggcgccatgatccagggcggcatgggcgttgccgccggcggcaacatcaatcccgagggcgtctccatgttcgagcccatcggcggctccgcgcccaaatacacgggcaggaacgtcatcaatcccctggccgccatcatggccggcgccatgatgctggattttctcggtcaggaggaggcggcccagtgcatcgaaacgtcggtgcagaaggccatccggaacgatctcacctccatggacgccggaaagatgggcatggggaccaaggaagtgggcgacctgatcagccggtacgttctggaaaaataa

SEQ ID NO: 107214 - protein, 360 aa, Syntrophus aciditrophicus SB
MQEDSMGTEFHVGVIPGDGTGPEVVAEGIKVLNAAASRYGFGLKYTTYDLGGERYKRTGETLPDSVIRELKQHKAIFLGAIGHPEVAPGILEKGILLRARFELDQYINLRPVKLYEGVDTPLKNKGPEEIDFVVVRENTEGLYAGAGGVLKRGTADEVAIQESINTRKGVERCIRFAFDITRKRNKGKKLTLCGKTNVLTFAFDLWERTFYEVAKDYPDIATDYAHVDATCMWMVKNPEWFDVIVTDNMFGDIITDLGAMIQGGMGVAAGGNINPEGVSMFEPIGGSAPKYTGRNVINPLAAIMAGAMMLDFLGQEEAAQCIETSVQKAIRNDLTSMDAGKMGMGTKEVGDLISRYVLEK

SEQ ID NO: 107215 - DNA, 1110 bp, Novosphingobium aromaticivorans DSM 12444
  CDS (1)..(1110): transl_table=11
ttgacgtcgcgccggaagaagacgccggaaaagacggacgaaggggtttccatgaagattgcggttctgccgggcgacggcatcggtcccgaagtgacgcgcgaagcggtgcgcgtgatcgaggcacttggccttggcgacatcgagatgaaggaagccccggtcggcggcgcggcctacaaggcctatggccacccgctgccgcccgagacactggagatcgcgcgtctttccgacggcatcctgttcggcgcggtgggcgaccccgactgcgactcgcttgaacgccacctgcgcccggaacaggcgatcctcggcctgcgcaaggcgctgacgctgttcgccaacctgcgccccgcgcgggtgttcaagggcatggaagacttttccgccctgcgccccgaagtggccggcgcgatcgacctgctgatcgtgcgcgaactgaacggtgacgtgtacttcggagaaaagggcttccgcaccgccgccaacggcgaccgcgaaggctacgacgtcatgtcctacagcgagagcgaagtgcgccgcattgcccacgtcgcgttccgcgccgcgatgggccgcaagaagcgcctgtgctcggtcgacaaggccaacgtcctcgagaccagccagctctggcgcgacgtgatgctcgaagtggcgaaagactatcccgaagtcgcgctcgagcacatgtacgtcgacaacgccgcgatgcagctcgtccgcgctcccggcaacttcgacgtcgtcgttaccggcaacctgttcggcgacatcctttcggaccaggcatcgatgtgcgtcggctcgatcgggctcctggcctcggcctcgctcggcgaacgcgagaccgaatacggcacgttcggcctgtacgagccgatccacggctcggctcccgacatcgcgggcaagggccttgcgaacccgatggccacgatcctttcggcggccatgctgctgcgccactcgctcggcctcgaagtggctgcggaccgcatcgaggcggctgttgccaaggcgctggccgacggcgtgcttggccgcgaccttggcggaaccgcaggtacgacggaaattggtgacgcggtgcttgcaaggctgtaa

SEQ ID NO: 107216 - protein, 369 aa, Novosphingobium aromaticivorans DSM 12444
MTSRRKKTPEKTDEGVSMKIAVLPGDGIGPEVTREAVRVIEALGLGDIEMKEAPVGGAAYKAYGHPLPPETLEIARLSDGILFGAVGDPDCDSLERHLRPEQAILGLRKALTLFANLRPARVFKGMEDFSALRPEVAGAIDLLIVRELNGDVYFGEKGFRTAANGDREGYDVMSYSESEVRRIAHVAFRAAMGRKKRLCSVDKANVLETSQLWRDVMLEVAKDYPEVALEHMYVDNAAMQLVRAPGNFDVVVTGNLFGDILSDQASMCVGSIGLLASASLGERETEYGTFGLYEPIHGSAPDIAGKGLANPMATILSAAMLLRHSLGLEVAADRIEAAVAKALADGVLGRDLGGTAGTTEIGDAVLARL

SEQ ID NO: 107217 - DNA, 1056 bp, Methylobacillus flagellatus KT
  CDS (1)..(1056): transl_table=11
atgaagatcgcggtattgccgggcgatggcatcggccctgaaattgtggcgcaggccgtcaaggtactgaaggcgcttgatcttgacctcgagttgcaggaagcacctatcggtggcgcaggttatgaagcagcaggcgacccgttgcccgacgctacgctcaagctggccaaggaggccgatgccgtgctgctcggtgcggtaggagactggaaatacgataccctgccacgcgacaagcgccctgagcgcggcctgctgcgcatccgcaaggaactcaacctgttcgccaatttgcgtcccgccttgttgtatcccgaattagcgtcggcatccacactgaagcctgaagtggtgtccggcttggatatcatgatcgtacgtgagctgaccggcgacatctattttgggcagcctcgcggcatttccacgctggataacggagaacgcgaaggggtcaatacgatgcgttacaacgaatccgaaatccgccgcatcgcccatgtggcattcggcatcgcgcagaaacgcaacaagaaggtctgttctgtagacaaggccaatgtgttggaaactaccgagctctggcgccaggtgatgatcgaggtggcaaaggagtaccccgatgtcgaactcagccatatgtatgttgataatgccgccatgcagctgatccgtgcgcccaagcagtttgatgtgatggtcacaggcaacattttcggcgacatcctctcggatgaggcctcgatgctgactggttccattggcatgttgccttccgcgtctctggatcagggcaataaaggcatgtacgagcccagccacggttctgcgccggacattgctggccaggatgttgccaaccctctagccactatcctctctgcggccatgatgttgcgctataccttcaatgatgaagccaacgccagccgcgtggaaaatgcagtcaagaaagccttggagcaggggtaccgcacagcagatatctggactgaagggacgagcaaggtcaagtgcagtgaaatgggggatgcggttgtagcagcgctataa

SEQ ID NO: 107218 - protein, 351 aa, Methylobacillus flagellatus KT
MKIAVLPGDGIGPEIVAQAVKVLKALDLDLELQEAPIGGAGYEAAGDPLPDATLKLAKEADAVLLGAVGDWKYDTLPRDKRPERGLLRIRKELNLFANLRPALLYPELASASTLKPEVVSGLDIMIVRELTGDIYFGQPRGISTLDNGEREGVNTMRYNESEIRRIAHVAFGIAQKRNKKVCSVDKANVLETTELWRQVMIEVAKEYPDVELSHMYVDNAAMQLIRAPKQFDVMVTGNIFGDILSDEASMLTGSIGMLPSASLDQGNKGMYEPSHGSAPDIAGQDVANPLATILSAAMMLRYTFNDEANASRVENAVKKALEQGYRTADIWTEGTSKVKCSEMGDAVVAAL

SEQ ID NO: 107219 - DNA, 1095 bp, Acidobacteria bacterium Ellin345
  CDS (1)..(1095): transl_table=11
atgaaactcaaaattgctgtgcttggaggcgacggcgtcggcccagaggttacggccgaggctgttcgtgtcctgcgtgccatcgctaacgtcaacggatacgagttccagttcaccgaggctgaagttggcggcgtcgccatccggaaacacggcagccctctcccggaaaagacgctccacacctgcctcgagtccgatgctgtcctactcggcgcagtcggccatcccgagttcgactcgatgccacgcgacaagaagcccgagaccggccttctcgcgttgcgccaggcgctcggcggcttcgcgaacctgcgcccggtgcaagcgtatgccgctctatccgactcgtcgcccatcaagcaggaactcgtcttcggcgcggatgtcatgatcgttcgcgaactcctcggcggcctctacttcggcgagccccgcggaattaaagatgacactgcgacgaacaccatgtcgtactcgcgctatgaaatcgagcgcgtcgcacatatcgccttccagcaagcgcgcaatcgccgtaagaaggtgacgtcggttgataaagccaacgttctcgaatgctcgcagctctggcgcttagtggtgaccgaagtcgcgaagcaatattccgacgtaaagctcgaacacgcctacgtggactccttcgcgatgcgcctcatccaggcgcccaccgccttcgacgtcgtacttaccgaaaatctctttggcgatatcctcagcgatgaagctgccgtcatcggcggctcgctcggattgcttgcctctgccaccatcggcggcgaggtcgatctttacgaaccggtccatggctccgcacccgacatcgcaggcaagggaatagccaacccggtcggcgcgatcaactcagtcgccatgctgctgcgccacaccgcgaaacttgagcaggatgcgcgattgatcgaatccgccgtgaacgcggttctcctcgacggctatcgaacgaaggatcttgttccctccgcgcgcaagttcaatacgaccgcggaagtgggctccgccatcgagcgccagtgcgccgacatggcaatcagccattacgcctaccacgcggtataa

SEQ ID NO: 107220 - protein, 364 aa, Acidobacteria bacterium Ellin345
MKLKIAVLGGDGVGPEVTAEAVRVLRAIANVNGYEFQFTEAEVGGVAIRKHGSPLPEKTLHTCLESDAVLLGAVGHPEFDSMPRDKKPETGLLALRQALGGFANLRPVQAYAALSDSSPIKQELVFGADVMIVRELLGGLYFGEPRGIKDDTATNTMSYSRYEIERVAHIAFQQARNRRKKVTSVDKANVLECSQLWRLVVTEVAKQYSDVKLEHAYVDSFAMRLIQAPTAFDVVLTENLFGDILSDEAAVIGGSLGLLASATIGGEVDLYEPVHGSAPDIAGKGIANPVGAINSVAMLLRHTAKLEQDARLIESAVNAVLLDGYRTKDLVPSARKFNTTAEVGSAIERQCADMAISHYAYHAV

SEQ ID NO: 107221 - DNA, 1104 bp, Silicibacter sp. TM1040
  CDS (1)..(1104): transl_table=11
atgtccaacccatcgattctgattttgcccggtgacggcatcggccccgaagtgatggccgaggtcagaaaggtcatttcctggttcggcgccaagcgcgatattcagttcgatgtgagcgaagatctggttggcggctctgcctatgacgcccatggcacgcccctgcatgacgataccatggcaaaggcgcaagaggtggacgctgtgcttctcggcgcggtgggtggcccgaaatacgacgcactcgatttctcggtaaagcccgagcgcggccttctgcgcctgcgcaaggaaatggatctttattccaacctgcgtccggcccagtgctttgatgcgctggcggatttctcctcgctcaagaaggacgtcgtggccgggctcgatatcatgatcgtgcgcgaactgacctccgggatctactttggcgagccgcgcggcatcatcgaagaaggcaacgagcgcgttggcatcaacacccagcgctataccgaatccgagatcgagcgtgttgcgcgttcggcgtttgaactggccatgcgtcgcggcaagaaactctgctcgatggaaaaagccaacgtgatggagagcggcatcctgtggcgcgaagttgtcaccgaggtgagcaaggactaccccgaggtggaactttcgcacatgtacgcggatgccggtgccatgcagctctgccgctggcccaagcagtttgacgtgattgtcaccgacaatctctttggcgatctgctttccgatgctgcggccatgctgacgggatccttgggcatgctcccctccgcgtcgcttggcgcgccgatggccaatggtcgccccaaggcgctttatgagcccgtgcacggctcggcccctgacatcgccggtcagggcaaggccaacccgattgcctgcatcctctcttttgccatggcgctgcgctacagctttgacatgggcaccgaggcggaccgccttgaagcggctgtcgagaaagtgctcgccgatggcgtgcgcaccgcggaccttctgggcgaagagggcgtgaccccggtcagcacctccgagatgggcgatgccgtggtcgaggcgctcaacgcaagcctctaa

SEQ ID NO: 107222 - protein, 367 aa, Silicibacter sp. TM1040
MSNPSILILPGDGIGPEVMAEVRKVISWFGAKRDIQFDVSEDLVGGSAYDAHGTPLHDDTMAKAQEVDAVLLGAVGGPKYDALDFSVKPERGLLRLRKEMDLYSNLRPAQCFDALADFSSLKKDVVAGLDIMIVRELTSGIYFGEPRGIIEEGNERVGINTQRYTESEIERVARSAFELAMRRGKKLCSMEKANVMESGILWREVVTEVSKDYPEVELSHMYADAGAMQLCRWPKQFDVIVTDNLFGDLLSDAAAMLTGSLGMLPSASLGAPMANGRPKALYEPVHGSAPDIAGQGKANPIACILSFAMALRYSFDMGTEADRLEAAVEKVLADGVRTADLLGEEGVTPVSTSEMGDAVVEALNASL

SEQ ID NO: 107223 - DNA, 1068 bp, Rubrobacter xylanophilus DSM 9941
  CDS (1)..(1068): transl_table=11
atgagccagaggtttcgcgtactgcttctgcccggcgacggcataggcccggaggtggtggccgccgcccggagggtggccgacgccgccgcggcccgcttcggcctaaccctggagtacgaggagcggaggataggggccgcggccatccgggaggagggggcccccgtctcgaaggagaccctgcggagggcgggggaggcggacgccgtcctgctcggggccgtgggggacccggagttcgacggcggcgaggtccggcccgaggccgggctgctcgcgctgcgtcgggagctcgggaccttcgccaacctgcgcccggtggcggccatcccggccctctccggctcctcccccctgaggcccggggtggcggagggggtggacctgctcatcgtccgggagctcaccggcggggcgtacttcggggagaaggaggagggcgaggagagggccagcgacctctccgtgtacacccgcggggaggtcgagcgggtggcgagggtcgccttcgaggccgcgcgggggcgcagggggagggtcgcctccgtggacaaggccaacgtgctcgccaccagccggctgtggcgccgggtcgtcggggaggtggcccgggactacccggacgtcgcgctcgagcacgtgctcgtggacgcggcggcgatgcacctggtcaccgacccggggcgcttcgacgtgatcctcacggagaacctcttcggggacatcctctccgacgaggcggcggtgctgcccggctcgatggggatgctgcccagcgcctcgctgggggagcccggctcccccggcatcttcgagccggtgcacggcagcgccccggacatcgccggcaagggggtggccaacccctacgccgccatcctctcggcggcgatgatgttccgccacgggctggggcggccggaggccgcggaggccatcgagcggggggtcgaggcggcggtggcggccgggtgcctcacccccgacctgggcgggagcagcggcacggaggaggcagcggaggccgtggcccgccgggtggccgcggaggagggagcggcatga

SEQ ID NO: 107224 - protein, 355 aa, Rubrobacter xylanophilus DSM 9941
MSQRFRVLLLPGDGIGPEVVAAARRVADAAAARFGLTLEYEERRIGAAAIREEGAPVSKETLRRAGEADAVLLGAVGDPEFDGGEVRPEAGLLALRRELGTFANLRPVAAIPALSGSSPLRPGVAEGVDLLIVRELTGGAYFGEKEEGEERASDLSVYTRGEVERVARVAFEAARGRRGRVASVDKANVLATSRLWRRVVGEVARDYPDVALEHVLVDAAAMHLVTDPGRFDVILTENLFGDILSDEAAVLPGSMGMLPSASLGEPGSPGIFEPVHGSAPDIAGKGVANPYAAILSAAMMFRHGLGRPEAAEAIERGVEAAVAAGCLTPDLGGSSGTEEAAEAVARRVAAEEGAA

SEQ ID NO: 107225 - DNA, 1083 bp, Cytophaga hutchinsonii ATCC 33406
  CDS (1)..(1083): transl_table=11
atggaaaagaaaattgcagtattaaaaggtgatggtatcggtccggaagttacggatcaggcattaaaagttttgaaagcagtagaaaaaactttcggtcataaatttcattatacagaagcgcttgttggtgctgttgcgattgatgcaacagggaatccttttcctgaagaaacattgaaagtgtgccaaagttcagatgcaatcttatttggtgctatcggtcacccgaaatatgacaacgatccaaaagctaaagtacgtcctgagcaaggtttgcttgcaatgcgtaaggctttaggtttgttcgcaaacattcgtccggttaatacttacaaaatattagagaacgcttctccattacgtgcagatcttgtacagaatgtagacttcgttgtgttccgtgaattgactggcggtatctacttcggtacacgtggtcgcagcgaagatggcaacatggctttcgatacatgtacttacacacgcgatgaaattcttcgcatctctaaactggcgtttgaatctgcacgtcaacgcaaaaaccacgtaacgttggtagataaagcaaacgtattggcttcttcccgtttatggagagaagtagtaaaagaataccatgcagcaaactttgctgatgttacgcttgatttcatgttcgttgataacgcagcaatgaagatcattcaacagcctgctttcttcgacgttgtgttaacagaaaacatgtttggtgatatcatcacagatgaagcttcagtaattacaggttctatgggtatgttgccttcagcttctgtaggtagtgtagttggtttgtatgagccgatccacggttcttatcctgaaggcgctggtctgaacatcgcaaacccgaacggtgcaattctttcagcagcattgctgttagaaacttcttttggaatggtagctgaagcgaaagcaatccgtgctgccgttgagaaagcaatggaagatggaattttaacgatcgatatccgtcgtgaaaaaccaaactctactactgaagttggcgactatgttgcaaacttagttgctaaaggcgcaagcgttgttgcataa

SEQ ID NO: 107226 - protein, 360 aa, Cytophaga hutchinsonii ATCC 33406
MEKKIAVLKGDGIGPEVTDQALKVLKAVEKTFGHKFHYTEALVGAVAIDATGNPFPEETLKVCQSSDAILFGAIGHPKYDNDPKAKVRPEQGLLAMRKALGLFANIRPVNTYKILENASPLRADLVQNVDFVVFRELTGGIYFGTRGRSEDGNMAFDTCTYTRDEILRISKLAFESARQRKNHVTLVDKANVLASSRLWREVVKEYHAANFADVTLDFMFVDNAAMKIIQQPAFFDVVLTENMFGDIITDEASVITGSMGMLPSASVGSVVGLYEPIHGSYPEGAGLNIANPNGAILSAALLLETSFGMVAEAKAIRAAVEKAMEDGILTIDIRREKPNSTTEVGDYVANLVAKGASVVA

SEQ ID NO: 107227 - DNA, 1011 bp, Rhodococcus sp. RHA1
  CDS (1)..(1011): transl_table=11
atgaagcttgcggtcattccgggtgacggcatcggtgtcgaggtcacggccgaggcactgaaggtgctgcggaagctcgtacccgatctccagaccaccgagtacgacctcggtgcccgtcgatacaacgccaccggggaactgctcccggatgccgatctcgcggcgatccgcgagcacgacgcgattctgctgggcgccatcggcgacccgtcggtgaccccgggtgtgctcgagcgggggctgctgctgaacatgcgattcgcgttggatcatcacgtgaatctgcgtccgtcgcagctctatccggggtcgaagtcgccgctcgcggcgcagccggacatcgacttcgtggtcgtgcgcgagggcaccgagggtccgtacaccggcaacggtggcgcgattcgcgtcggcaccccgcacgagatcgcgaccgaggtgtcgatcaacacgtggttcggtgccgagcgggtggtgcggtacgcgttcgcgctcgcgcagacccggcgtaagcacgtcaccctgatccacaagacgaacgtcctctccaacgccggtgcgatctggacgcgtgccgtggagacggtgtcggccgaatacccggacgtggagacggcgtactgccacatcgacgcggccaccatctacatggtcaccgatccgtcgcgattcgacgtgatcgtcacggacaacctgttcggcgacatcatcaccgacctcgcgggtgcggtcacgggaggcatcggactggcggcgtcggggaacatcgacgcgtcggggacgaacccgtcgatgttcgagccggtgcacggcagcgccccggacatcgccggccaggggatcgcggatcccacggcggccatcctgtccgcggcgctgctgctgcgtcacctcggccgggacggcgatgccgcgcgcatcgaagctgccgtcgaggccgatctggcgtcccgcggcgactcgaaggtcgtcacgtcggaggtcggcgaccggatcgccgccgccctctag

SEQ ID NO: 107228 - protein, 336 aa, Rhodococcus sp. RHA1
MKLAVIPGDGIGVEVTAEALKVLRKLVPDLQTTEYDLGARRYNATGELLPDADLAAIREHDAILLGAIGDPSVTPGVLERGLLLNMRFALDHHVNLRPSQLYPGSKSPLAAQPDIDFVVVREGTEGPYTGNGGAIRVGTPHEIATEVSINTWFGAERVVRYAFALAQTRRKHVTLIHKTNVLSNAGAIWTRAVETVSAEYPDVETAYCHIDAATIYMVTDPSRFDVIVTDNLFGDIITDLAGAVTGGIGLAASGNIDASGTNPSMFEPVHGSAPDIAGQGIADPTAAILSAALLLRHLGRDGDAARIEAAVEADLASRGDSKVVTSEVGDRIAAAL

SEQ ID NO: 107229 - DNA, 1077 bp, Haemophilus somnus 129PT
  CDS (1)..(1077): transl_table=11
atgaaaagttatactattgcagtattaagtggggatggtatcggtcctgaaattatggcggaagctataaaagtattggatgcagtgcaaaaaaaatataatttcaaattaaattaccgcacttttgatgtgggaggaatagccatcgataatcatggtacgcctttacccgcttctacattaaatggctgtgaagaaagtgatgcaattttattcggctcggtaggcggaccaaaatgggaacatttaccccctaatcagcagcctgaaagaggtgcactactaccattgcgtaaacatttcaaattgttttgtaatttacgtcctgccacactttaccaaggtttagaaaaattttgtccattgcgagcggatattgccaccaaaggatttgatatgatgactgttcgtgaattaaccggcggcatttatttcggtcaacctaaaggacgagatggagagggaatgcaaactcgtgcctttgatacagaagtttattacaaatatgaaattgaacgtatagctaaagttgcttttgaaacagcgatgaaacggcgtaaacatgtaacatctgttgataaagccaatgtattaatcagctcggtattatggcgtgaaacggtcaatgaggttgccaagaactatcctgacgtaacattggatcatatttatattgataatgcgacaatgcaattgatcaagcaacctgaatttttcgatgtcttactttgctctaatatttttggcgatattatttctgatgaggcagcaatgattaccggctcaatgggtatgctaccctctgccagtctaaatgaacatggttttgggctttacgaaccggcaggtggttctgctccggatattgcaggcaaaggcattgccaacccaatcgctcaaattctatctgctgccatgatgctacgttatagctttaacttaaatgaagcggcggattcaatagaaaacgcagtgaaacaggttctttctcaaggttatcgaaccgcagatttagcagatgaacatccgcccatttccacagctgaaatgggagacttaattgtaaacgcaatttaa

SEQ ID NO: 107230 - protein, 358 aa, Haemophilus somnus 129PT
MKSYTIAVLSGDGIGPEIMAEAIKVLDAVQKKYNFKLNYRTFDVGGIAIDNHGTPLPASTLNGCEESDAILFGSVGGPKWEHLPPNQQPERGALLPLRKHFKLFCNLRPATLYQGLEKFCPLRADIATKGFDMMTVRELTGGIYFGQPKGRDGEGMQTRAFDTEVYYKYEIERIAKVAFETAMKRRKHVTSVDKANVLISSVLWRETVNEVAKNYPDVTLDHIYIDNATMQLIKQPEFFDVLLCSNIFGDIISDEAAMITGSMGMLPSASLNEHGFGLYEPAGGSAPDIAGKGIANPIAQILSAAMMLRYSFNLNEAADSIENAVKQVLSQGYRTADLADEHPPISTAEMGDLIVNAI

SEQ ID NO: 107231 - DNA, 1083 bp, Trichodesmium erythraeum IMS101
  CDS (1)..(1083): transl_table=11
atgataaactgccgcattactctacttcccggtgacggcattggccctgaaattatggcagtggcggtagatgtcttgaaagtagttggcaagcaatttaacctcgaatttgaatttcaagaagctcctattggtggagtagctattgatgctacaggagaacctctacctaaagaaactctggaaatgtgtcgtaatagcaatgcagtgttattagcagctatcggtggttacaagtgggataatttgccccgccatcaacgaccagaaaccggactattaggacttagagccggattaggattatttgccaatttacgacctgctaaaattttcccccaattaatagatgcttcaactctgaaacgagaaatagttgaaggagtggatattatggtggtgcgagaattaactggtggggtatattttggtacacctaagggtgtgtttgaaacggagactaaagagaaacggggtgtcaatacaatggcctattctgagtcagaaattgaccgtattgctaaagtaggatttgagactgcccagaaacgaggaggtaagttgtgttccgtggataaagcaaatgttttggaagtgtctcagttctggcgcgatcgtattaatctagttgcccaagaatatcaagatgtagagttatctcatttatatgtagataatgcagctatgcagcttgttcgttttccgaaacaatttgatactattgtcacaggaaatttatttggggatattctttctgatgctgctgccatgttaacaggaagtattgggatgttaccttctgccagtttaggtgcttctggaccaggagtatttgaacctgttcacggttctgcgccagatattgctggtcaggataaggctaatcctttggcacaagttttgagtgtagcaatgatgttgcgttatgctttagagcaacctgtagtagcagataaaattgaacaagcggtattgcaagtattggagcaaggttatcgtactggtgatattatgtcggaaggaatgaaactcgtgggatgtaaagaaatgggggaggttttgttaaaaatattgagtttgtag

SEQ ID NO: 107232 - protein, 360 aa, Trichodesmium erythraeum IMS101
MINCRITLLPGDGIGPEIMAVAVDVLKVVGKQFNLEFEFQEAPIGGVAIDATGEPLPKETLEMCRNSNAVLLAAIGGYKWDNLPRHQRPETGLLGLRAGLGLFANLRPAKIFPQLIDASTLKREIVEGVDIMVVRELTGGVYFGTPKGVFETETKEKRGVNTMAYSESEIDRIAKVGFETAQKRGGKLCSVDKANVLEVSQFWRDRINLVAQEYQDVELSHLYVDNAAMQLVRFPKQFDTIVTGNLFGDILSDAAAMLTGSIGMLPSASLGASGPGVFEPVHGSAPDIAGQDKANPLAQVLSVAMMLRYALEQPVVADKIEQAVLQVLEQGYRTGDIMSEGMKLVGCKEMGEVLLKILSL

SEQ ID NO: 107233 - DNA, 1095 bp, Shewanella sp. MR-7
  CDS (1)..(1095): transl_table=11
atgagttatcaaattgcagtattagccggtgatggtattgggccagaagtgatggccgaggcgcgtaaggtgttaaaggcggttgaggcacgttttggccttaacattgaatacactgaatatgatgtcggcggtatcgccattgacaatcatggttgtcctttgcctgaggcaacactgaagggctgcgaggcggccgatgccatcctatttggttcagtcggtggtcctaaatgggaaaaactgccgcccaatgaacagcccgagcgtggtgctctgttgccgctacggggtcacttcgaactgttttgtaacctgcgtcccgctaaattgcatgatggtttagaacatatgtcaccgctgcgcagcgatatttctgctagaggcttcgatgttctctgcgtgcgtgagttaacgggtgggatctacttcggtaaacctaagggtcgccaaggtgaaggtgagagtgaagaagccttcgataccatgcgttacagccgccgcgagattgcccgtatcgcccgcatcgcctttgaagccgcccgcggccgccgtaaaaaagtcacttcggtcgacaaggcaaacgtcttagcttgctcagtactgtggcgccaagtggtagaagaagtggcggtggatttccccgatgttgaactggaacacatctatatcgacaacgcgaccatgcagttgctgcgccgccccgatgagtttgacgtgatgctgtgctccaacttgtttggcgacattctatcggatgaaatcgccatgttgaccggctccatgggcttgttgtcttcggcgagcatgaatagcactggctttggtttgtttgaacccgcgggtggtagcgcgccggatattgcaggtaagggcatcgctaacccgattgcacaaattctgtcggcggcactgatgctgcgccacagcttaaagcaagaagaggcggcaagcgcgatcgaacgtgccgtgagtaaagcgctgaattctggctatttaactggtgagctattaagtagcgaccaacgccataaggccaaatcgacagtcgaaatgggcgactttatcgccgatgcagttaaggcaggtgtgtaa

SEQ ID NO: 107234 - protein, 364 aa, Shewanella sp. MR-7
MSYQIAVLAGDGIGPEVMAEARKVLKAVEARFGLNIEYTEYDVGGIAIDNHGCPLPEATLKGCEAADAILFGSVGGPKWEKLPPNEQPERGALLPLRGHFELFCNLRPAKLHDGLEHMSPLRSDISARGFDVLCVRELTGGIYFGKPKGRQGEGESEEAFDTMRYSRREIARIARIAFEAARGRRKKVTSVDKANVLACSVLWRQVVEEVAVDFPDVELEHIYIDNATMQLLRRPDEFDVMLCSNLFGDILSDEIAMLTGSMGLLSSASMNSTGFGLFEPAGGSAPDIAGKGIANPIAQILSAALMLRHSLKQEEAASAIERAVSKALNSGYLTGELLSSDQRHKAKSTVEMGDFIADAVKAGV

SEQ ID NO: 107235 - DNA, 1086 bp, Alkalilimnicola ehrlichei MLHE-1
  CDS (1)..(1086): transl_table=11
atgactgccaacatcctgatcaccccgggcgacggtatcggtccggagatcgtggccgaggcgcgcaagctgctggaggccctgcgtgacgacttcggcttcgactgcactttggaagaggcccccatcggcggcgctggctacgaggcgcatggcaagccgctgccggaagagaccctggctctcgcccgggaggccgatgccatcctattgggtgccgtgggtgggccgcgctgggaacagctggatcgccccctgcgtcccgaacgcggcctcctggccatccgtgcggagttgggcctgttcggcaacctgcgtccagccatcctctatccgcaactggccgaggcctccagcctgcgccatgagatcgtcgccggcctggacatcatgatcgtccgggagctgaccggcggcatctacttcggtgagccccggggcatccgcaggctggagaacggcgaacgccagggttacaacaccatggtctacagcgagtcggagatcgaccgcgtgggccggctggcctttgacatcgcgagcaagcgcggcagccgagtctgctccgtggacaaggccaacgtgctggaggtctccgaactctggcgtgaggtgatggaacgcgtggcccgggattaccccggtgtcgagctgagccacatgtacgtggacaacgccgccatgcagttggtgcgtgcgcccaaacagttcgacgtggtggtcaccagcaatctgttcggtgacgtgctctcggactgtgccgccatgctcaccggctccattggcatgctgccctccgcctcgctggatgtgaacagcaaggggctgtatgagccggtgcacggttccgcgccggacatcgccggcaaggggctggccaatccgctggccacccttctgtcagtggccatgatgctgcgctacagtctggatcagggcgccctcgccgaccgggtgcagcaggcggtgggtgatgtgctcaaccaggggctgcgcacgccggatatcgccgcccgccagtcgcgcaccgtcagcaccgccgagatgggtgacgcggtggtggccgcgctgcgtgcccggggctga

SEQ ID NO: 107236 - protein, 361 aa, Alkalilimnicola ehrlichei MLHE-1
MTANILITPGDGIGPEIVAEARKLLEALRDDFGFDCTLEEAPIGGAGYEAHGKPLPEETLALAREADAILLGAVGGPRWEQLDRPLRPERGLLAIRAELGLFGNLRPAILYPQLAEASSLRHEIVAGLDIMIVRELTGGIYFGEPRGIRRLENGERQGYNTMVYSESEIDRVGRLAFDIASKRGSRVCSVDKANVLEVSELWREVMERVARDYPGVELSHMYVDNAAMQLVRAPKQFDVVVTSNLFGDVLSDCAAMLTGSIGMLPSASLDVNSKGLYEPVHGSAPDIAGKGLANPLATLLSVAMMLRYSLDQGALADRVQQAVGDVLNQGLRTPDIAARQSRTVSTAEMGDAVVAALRARG

SEQ ID NO: 107237 - DNA, 1053 bp, Hyphomonas neptunium ATCC 15444
  CDS (1)..(1053): transl_table=11
atgaaacagactctcctcctattgccgggcgatggcatcggccccgaagttgtcgcacaggcccggcgtatcgccgaagcgcttgtgccggacgtgcagattgaagaagggctcgtcggtggcgcaagctttgatgcccacggcacgcccctgaccgatgagacgctggaccgtgcccggaaggccagcgccgttctgcttggcgccgttggcggccccagatggacggcaacggcgcgtgataagcgccctgaagcgggtctcctggcgctccgcaagggactggatgtctttgccaatctgcgaccggctttctgttttccagcgctggtcgatgcctccagcctgaagaaggaccgcgtcgaagggcttgatctgatgatcgtccgcgagctgaccggcggggtctatttcggccagcctcgcggcatcgacgaagagggcggcctgcgccgcggctatgacacggcgatttatacccacccggaagtcgagcgcgttgcccgcatcgcgtttgacatagcgcgtggccggaatggccgcgttacctcggttgaaaaatccaatgtgatggaatctggcctcttctggcgccaggaagttaccctcgcgcatgccgaactcggcgccggggtggagctggcccacatgtatgcagatgcctgcgccatggaactcgtccgcgcgcccaagcagtttgacgtgatcctggcagataatctcttcggcgacatcctgtcggacgcggcggctatgttgaccggctcgatcggtatgttgccatccgcctcgctaggcgcgcccggcacgccgggcctctatgagccggtccacggctccgcgcccgacattgccgggcagggcatcgccaacccctgcgcggccatcctgtcgctcgaaatggcgctgcgttggtcgctcggtaaagagaaagccgctgatacgctgctcgccgccgttggcaaggcgctcgaccgcggtgcccgcacgcgggaccttggcggagatctgagcacccgtgcaatggcggacgcggttctcaacgcgctctga

SEQ ID NO: 107238 - protein, 350 aa, Hyphomonas neptunium ATCC 15444
MKQTLLLLPGDGIGPEVVAQARRIAEALVPDVQIEEGLVGGASFDAHGTPLTDETLDRARKASAVLLGAVGGPRWTATARDKRPEAGLLALRKGLDVFANLRPAFCFPALVDASSLKKDRVEGLDLMIVRELTGGVYFGQPRGIDEEGGLRRGYDTAIYTHPEVERVARIAFDIARGRNGRVTSVEKSNVMESGLFWRQEVTLAHAELGAGVELAHMYADACAMELVRAPKQFDVILADNLFGDILSDAAAMLTGSIGMLPSASLGAPGTPGLYEPVHGSAPDIAGQGIANPCAAILSLEMALRWSLGKEKAADTLLAAVGKALDRGARTRDLGGDLSTRAMADAVLNAL

SEQ ID NO: 107239 - DNA, 1074 bp, Leuconostoc mesenteroides subsp. mesenteroides ATCC 8293
  CDS (1)..(1074): transl_table=11
atgacatcagttaaaaaaatagtagttttaaaaggcgattatatcggtcccgaaatcatgacagcaggtttagcagtattggacgctgcgacaaaggatacaacatttgcttatgaacttatagatgcaccatttggtggtgatggtattgatcgagctggtgacccgctaccacagtcaactattgatgtttcaaaacaagctgatgcggtgctacttagtgcaattggtgggccgaaatgggataatgcgccacgacgtccagaacaagggctattagaaattagatcaaaacttaacttatttgctaatatccggccaacaaaagtgacggcagcacaaattgaccgttcaccactgaagccagagtatgttgaaaatacggattttgtaatcgttcgtgagctgacctctggtgcttattttggaaagccacgtaagctcgaagcacatcaagcaattgatacgatgtattacagtgaagaagaagtaactcgtattatgcaccaaggctttaaaatggcgcaaaaacggaacaagcatgtcaccattgttgataagtcaaatgtattggctacatcaaagttttggcgaaagattgctaatgaagttggcaaaagttatcaggatgtgacaatcgactattactatgttgacgcgatgacaatggctattatggccaagcccacaacatttgatgttgtgattatacctaatttgtttggggacattttaagtgatgaagcagcacaaattacaggctcaattggacaaataccttctatgtcagttggtgaaagcggccctaatttgtatgagccaattcatggctcagcacctgacattgctgggcaaggcatagccaatcccatttctatggtaaatacggtagctatgatgttaacggaaagctttgatgaaaaaaggattgccgataaaattactgcagcagtagactacattattgaaaaccactgtgtgacaccagacatgggtggcacgatgacgaccgatgaagtcacacaaaaaatggttgattacataaaaaattatgaatcggcggatataaaatga

SEQ ID NO: 107240 - protein, 357 aa, Leuconostoc mesenteroides subsp. mesenteroides ATCC 8293
MTSVKKIVVLKGDYIGPEIMTAGLAVLDAATKDTTFAYELIDAPFGGDGIDRAGDPLPQSTIDVSKQADAVLLSAIGGPKWDNAPRRPEQGLLEIRSKLNLFANIRPTKVTAAQIDRSPLKPEYVENTDFVIVRELTSGAYFGKPRKLEAHQAIDTMYYSEEEVTRIMHQGFKMAQKRNKHVTIVDKSNVLATSKFWRKIANEVGKSYQDVTIDYYYVDAMTMAIMAKPTTFDVVIIPNLFGDILSDEAAQITGSIGQIPSMSVGESGPNLYEPIHGSAPDIAGQGIANPISMVNTVAMMLTESFDEKRIADKITAAVDYIIENHCVTPDMGGTMTTDEVTQKMVDYIKNYESADIK

SEQ ID NO: 107241 - DNA, 1086 bp, Solibacter usitatus Ellin6076
  CDS (1)..(1086): transl_table=11
atgaacctcaatgtcctcgttctccccggtgacggcatcggaaccgaagtcacttgtcaggccgtccgggtattggaacacgtcgcgaagaagtggaaccacaccctccatctcaccgagggcctgctgggcggcatcgcgattcacaagaccggaacgccgtttccgcaagagacagcgaaactcgccgcctccgccgacgccacgctgatgggcgcggtgggtcttcccgaatttgacaatgcaccacccgagaagcgccccgaaaaaggactcctcggaattcgacaggctctgggcgtgtacgcaaacctccgtccggttcgggcctacgcgtcgcaactggattcttcacccctgaagaaccacctggtggaaggcaccgatatgatcatcgtccgcgaactgacgggcgggatctattacggaactccgcgcggaatctccggcagcggattggaagagcgggcggtcaataccatgacctacacacgcgccgaaatcgagcgcgttgcccgcatggccttccacctggcgcgcgcccgccgcaagaaagtgacctcggtcgataaatcgaacgtgctggagaattcgcagctctggcggcgcgtagtcgttgaagtcgccaaaaacttcccggatatcgagctggatcacatcctggtggacaactgcgcgatgcagctggtgctcaaccccaagcgctttgatatcgtgctcacggaaaatatgttcggcgatatcttgagcgatgaaggcgcggtactggccggttccatcggcatgctcccctccgcctccatcggcgaccagcgtccgtcgggcgcgtgggtgggtctgtatgagccggtccacggctccgcccccgatatcgcgggacagaataaggccaacccgctcggcgccatcggctccgtagcggcgatgctggcttacagttttggtttgaaggaagaagccgccgcggtggaaacagccatcgaagcggtcctcacaagtggccaggtcacagccgacctgaggcctgcaggcgcgcccgccaccaccgcacaggttggtcaagcggtctgcgccgcaatcggctga

SEQ ID NO: 107242 - protein, 361 aa, Solibacter usitatus Ellin6076
MNLNVLVLPGDGIGTEVTCQAVRVLEHVAKKWNHTLHLTEGLLGGIAIHKTGTPFPQETAKLAASADATLMGAVGLPEFDNAPPEKRPEKGLLGIRQALGVYANLRPVRAYASQLDSSPLKNHLVEGTDMIIVRELTGGIYYGTPRGISGSGLEERAVNTMTYTRAEIERVARMAFHLARARRKKVTSVDKSNVLENSQLWRRVVVEVAKNFPDIELDHILVDNCAMQLVLNPKRFDIVLTENMFGDILSDEGAVLAGSIGMLPSASIGDQRPSGAWVGLYEPVHGSAPDIAGQNKANPLGAIGSVAAMLAYSFGLKEEAAAVETAIEAVLTSGQVTADLRPAGAPATTAQVGQAVCAAIG

SEQ ID NO: 107243 - DNA, 1080 bp, Magnetococcus sp. MC-1
  CDS (1)..(1080): transl_table=11
atggctaagaaggttttggtgctccctggtgatgggattggtcaggagatcaccgcagaggcagtgaaggttttaaattgggccatccaaaacggtgcggacatcaccctggaagaggggctcattgggggtaccgcctatgatgccacaggtactcctctgcccgcagagaccattacccaagccaaggcggcacaagcggtgctgttgggcgcggtggggggcaccaaatgggaaccgctggacattagcgtgcgccctgaaaagggtttgcttggtatccgtaaagcattggatctttactgcaacctgcgtccagcggcggtttatccccagttggcggatgcctcgaccctcaagaaagaggtagtggccggcattgatattatggtggtgcgggagctctcttcgggcatctactttggtcagccacggggggtggaagatctgggcgatggccgcaaaaagggctttaacaccctggtctataccaccgatgagattgagcgcatcgcccgtaaagcctttgaagccgcccgcaagcgcagcaatcgggtctgtagtgtggataaagccaatgtgttggagtctaccgaactgtggcgcgaagtggtgagcgatctgcacaaacgtgaatacgctgacgtggagctttcccacatgtatgtggataatgccgccatgcagttgatccgcaatccccgtcaatttgatgtgattgtgaccaccaatatgtttggcgacattctttctgacgcggccagcatgcttacgggttctattggcatgctgccgtcggccagtctgggggatcaatttgccctgtatgagcccattcatggttcggcaccggatattgccggcaaaggcatcgccaatcctctggcgaccattctgtcggtggctatgatgctgcgttattccctggagctacctcaactggccgatggggtagaggctgcggtggttacggtgttggatcaaggcttacgcaccgccgatattatgcagccgggtatgacccaggtcggcaccgcccagatgggcgatgcggtgctggcggcattgaataatgcttaa

SEQ ID NO: 107244 - protein, 359 aa, Magnetococcus sp. MC-1
MAKKVLVLPGDGIGQEITAEAVKVLNWAIQNGADITLEEGLIGGTAYDATGTPLPAETITQAKAAQAVLLGAVGGTKWEPLDISVRPEKGLLGIRKALDLYCNLRPAAVYPQLADASTLKKEVVAGIDIMVVRELSSGIYFGQPRGVEDLGDGRKKGFNTLVYTTDEIERIARKAFEAARKRSNRVCSVDKANVLESTELWREVVSDLHKREYADVELSHMYVDNAAMQLIRNPRQFDVIVTTNMFGDILSDAASMLTGSIGMLPSASLGDQFALYEPIHGSAPDIAGKGIANPLATILSVAMMLRYSLELPQLADGVEAAVVTVLDQGLRTADIMQPGMTQVGTAQMGDAVLAALNNA

SEQ ID NO: 107245 - DNA, 1065 bp, Azoarcus sp. BH72
  CDS (1)..(1065): transl_table=11
atgaagatttgcgtgttgccgggcgacggcatcggtcccgaaatcacggcagaagccgtgcgcgtgctgcgggcgctcgatctgaagatcgaactggaagaagcgctgctcggcggcagcgcggtggatgccaccggcacgccctacccggaggcgacgcagaagcttgcgcgcgccgccgacgccgtgctgctcggcgcggtcggcggcccgaagtgggacacgctgccgcgcgaacagcgccccgagcgcggcctgctcggcatccgcaaggatctcagcctcttcgccaacctgcgtccggccatcctgtatccggaactggccaacgcctccacgctgaagccggaggtggtgtcggggctcgacatcctgatcgtccgcgaactcaccggcgacatctacttcggccagccgcgcggcatcgaaacccgcgaggtcaatggcgcccagcagcgcgtgggctggaacacgatgatctacgccgagtacgagatccgccgcatcctcaaggtggcgttcgaagcggcgcagaagcgcggcaagaagctgtgctcggtcgacaagatgaacgtgctcgaaaccactcaactctggcgcgatatcgccgatgaaatggcgaaggacttcccggatgtggagctgtcgcacatgctggtcgacaacgccgcgatgcagctggtgcgcaatcccaagcagttcgacgtgatggtcaccggcaacatgttcggcgacatcctgtcggacgaggcctcgatgctcaccggctcgatcgggatgctgccgtcggcctcgctcgacgccaacaacaaggggctgtacgagccttcgcacggctcggcgccggacatcgccggcaagggcgtggccaacccgctggccaccatcctgtcggcggcgatgatgctgcgttatacgttcaatcaggaagaagccgcggtgcgcatcgagcgcgcggtcaagaaggtgctggcgcagggtttccgcaccggcgacatctacgaggcaggtacgaagaaggtcggcaccagggaaatgggcgacgcagtgctggcggcgctctga

SEQ ID NO: 107246 - protein, 354 aa, Azoarcus sp. BH72
MKICVLPGDGIGPEITAEAVRVLRALDLKIELEEALLGGSAVDATGTPYPEATQKLARAADAVLLGAVGGPKWDTLPREQRPERGLLGIRKDLSLFANLRPAILYPELANASTLKPEVVSGLDILIVRELTGDIYFGQPRGIETREVNGAQQRVGWNTMIYAEYEIRRILKVAFEAAQKRGKKLCSVDKMNVLETTQLWRDIADEMAKDFPDVELSHMLVDNAAMQLVRNPKQFDVMVTGNMFGDILSDEASMLTGSIGMLPSASLDANNKGLYEPSHGSAPDIAGKGVANPLATILSAAMMLRYTFNQEEAAVRIERAVKKVLAQGFRTGDIYEAGTKKVGTREMGDAVLAAL

SEQ ID NO: 107247 - DNA, 1074 bp, Acidovorax sp. JS42
  CDS (1)..(1074): transl_table=11
atgaaaatcgcagttctgccgggtgacggcattggccccgagatcgtcgccgaggccgtcaaggtgctcgaagccctggacctgaagctggagatggagacggcacccgtgggcggcgccgcctacgaggccgcgggccacccgctgccggagtccacgttgaatctcgccaagagtgccgacgccatcctgttcggcgccgtgggcgactggaagtacgacacgttggcgcgcccgctgcgccccgagcaggccatcctgggcctgcgcaagcacctgggcctgttcgccaacttccgtcccgcgatctgctacgagcagctcacgcacgcctccagcctcaagcccgagctggtggccggcctggacatcctcatcatccgcgagctgaccggcgacatctacttcggccagccgcgcgggcgtcgcaccgccgccgacggccacttccccggcgccgaggaagcattcgacaccatgcgctacagcaagcccgagatcgagcgcatcgcccgcgtcgcgttcgaggccgcgcgcaagcgcaacaagaaggtcaccagcgtggacaaggccaacgtgctggaaaccttccagttctggaaggacgtcgtgaccgaggtgcacaaggactatcccgacgtggagctgcagcacatgtacgtggacaacgcggccatgcagctggtgaaagcgcccaaggcgttcgacgtgatcgtcaccggtaacatgttcggcgacatcctctccgacgaagcctccatgctcaccggctccatcggcatgctgccctcggccagcctgaacgacaagaagcaaggcctgtacgagcccagccacggcagcgcccccgatatcgccggcaagggcgtggccaaccccctggctaccatcctcagcgccgccatgatgctgcgcttcagcctgaaccaggaagaagccgcgcgccgcatcgaagccgcggtgcagcaggtgctggcccaaggcctgcgcacgcctgacatctacagcgacggcaccaccaaggtgggcacggcacagatgggcgatgccgtggtgaaggccctcgctgcctga

SEQ ID NO: 107248 - protein, 357 aa, Acidovorax sp. JS42
MKIAVLPGDGIGPEIVAEAVKVLEALDLKLEMETAPVGGAAYEAAGHPLPESTLNLAKSADAILFGAVGDWKYDTLARPLRPEQAILGLRKHLGLFANFRPAICYEQLTHASSLKPELVAGLDILIIRELTGDIYFGQPRGRRTAADGHFPGAEEAFDTMRYSKPEIERIARVAFEAARKRNKKVTSVDKANVLETFQFWKDVVTEVHKDYPDVELQHMYVDNAAMQLVKAPKAFDVIVTGNMFGDILSDEASMLTGSIGMLPSASLNDKKQGLYEPSHGSAPDIAGKGVANPLATILSAAMMLRFSLNQEEAARRIEAAVQQVLAQGLRTPDIYSDGTTKVGTAQMGDAVVKALAA

SEQ ID NO: 107249 - DNA, 1110 bp, Magnetospirillum magnetotacticum MS-1
  CDS (1)..(1110): transl_table=11
atggccgccaagaagcttttgatccttcccggtgatggcatcggcgtcgaagtgatggcgcaggtccgccggatcatcgattggatggcccgcaagcggaaggtcgagttcgagatcaccgagggtctgctgggcggcgccgcctatgacgtgcacggcactccctatccggccgagacgctggaggccgccctggccgccgacgccgtgctgctgggcgcggtgggtggccccaagtgggacgacctgcccttcgacaagaagcccgagcgcggcctgctgggcatccgcaaggatatgggcctgttcgccaatctgcgccccgccaccgttctggacgccctggccgacgcctcgacgctgaagaacgaagtggtctccggcctggacatcatgatcctgcgcgagctgaccggcggtctgtatttcggccagccgcgcggcatcgacacgctgcccgacggcacccgcaagggctacaacaccctggtctacaccacgcccgagatcgtgcgcatcggccgcgtcgccttcgatctggcgcgcaagcgcaacaagaagctgtgctcggtggacaaggccaatgtgctggaatgcaccgtgctgtggcgcgaagagatgatcaagctgcagaaggaagagtatcccgacgtggagctctcccacatgtatgtggacaatgccgccatgcagctggtccgcaaccccaagcagttcgacgtcatggtcaccgagaacatgttcggcgacatcctgtccgattgcgccgccatgctgaccggctcgctgggcatgctgccctcggcctcgctgggtgaggccgatgccaatggcaagcgcaaggcgctgtacgagcccgtccatggctcggcccccgacatcgctggcaaggacatggccaatccgctggccaccataatgtcgttcgccatgtgcctgcgctattccttcgacatggtcgccgaagccgatctgatcgagaccgcggtcaagaacgtgctgaagggtggcctgcgcaccgccgacatcatgcagcccggcaaggccaaggtttccaccaccgtcatgggtgaggccgtggtccgcgaactggacaagctgaactcctga

SEQ ID NO: 107250 - protein, 369 aa, Magnetospirillum magnetotacticum MS-1
MAAKKLLILPGDGIGVEVMAQVRRIIDWMARKRKVEFEITEGLLGGAAYDVHGTPYPAETLEAALAADAVLLGAVGGPKWDDLPFDKKPERGLLGIRKDMGLFANLRPATVLDALADASTLKNEVVSGLDIMILRELTGGLYFGQPRGIDTLPDGTRKGYNTLVYTTPEIVRIGRVAFDLARKRNKKLCSVDKANVLECTVLWREEMIKLQKEEYPDVELSHMYVDNAAMQLVRNPKQFDVMVTENMFGDILSDCAAMLTGSLGMLPSASLGEADANGKRKALYEPVHGSAPDIAGKDMANPLATIMSFAMCLRYSFDMVAEADLIETAVKNVLKGGLRTADIMQPGKAKVSTTVMGEAVVRELDKLNS

SEQ ID NO: 107251 - DNA, 1089 bp, Nostoc punctiforme PCC 73102
  CDS (1)..(1089): transl_table=11
atgacccagaactaccgcattactctactccccggcgatggcattggccctgaaattatggcagtggcggtagatgtgctgaaagtcgtagggaagcaatttgatctgaagtttgaattccaagaagcacttattggtggtgcagcaattgacgctacaggcgaacccttaccatctgccactctagaaacttgtcgtaacagtgatgctgtgttacttgcagcaattggtggttataagtgggattctctgccatccaatttacgcccagaagcaggtttattaggactgcgtgcaggtttgggattatttgccaatttgcgcccagcgaaaattttgccccagttaattgatgcctcgactttgaaacgcgaagttgtggaaggcgtggatattatggtggtgcgcgaactcactggtgggatttacttcggtaaacctaaagggatttttgccacagaaacgggtgaaaaacgcggtgtaaatacaatggtttacaccgaatcagaaattgaacgcattgggcgggtggcctttgaagccgctagaaaacgtggcggaaaactttgttctgtggataaggcgaacgtattagaagtatctcagttgtggcgcgatcgcatcacccaactttcacaagaatatccagatatcgaactctctcatttatatgtagataatgctgctatgcagttagtacgcgctcctaagcagttcgacaccattgttacaggcaatttgtttggcgatattctctctgatgctgctgccatgcttaccggtagtattgggatgttaccctcagcgagtttgggtgcttctgggcctggtgtgtttgaaccagttcatggttctgctccagatattgctggacaggataaggccaatcctctagcacaggttttgagtgcggcgatgatgctacgctacgctttagaccaaccaaaagcggcagatcgtatcgaacaagccgtattccaagttttagagcaaggcgatcgcactggggatataatttctccaggaaaaaacctccttggttgccgcgctatgggagactcgctcattaaggctcttgaacaaaaataa

SEQ ID NO: 107252 - protein, 362 aa, Nostoc punctiforme PCC 73102
MTQNYRITLLPGDGIGPEIMAVAVDVLKVVGKQFDLKFEFQEALIGGAAIDATGEPLPSATLETCRNSDAVLLAAIGGYKWDSLPSNLRPEAGLLGLRAGLGLFANLRPAKILPQLIDASTLKREVVEGVDIMVVRELTGGIYFGKPKGIFATETGEKRGVNTMVYTESEIERIGRVAFEAARKRGGKLCSVDKANVLEVSQLWRDRITQLSQEYPDIELSHLYVDNAAMQLVRAPKQFDTIVTGNLFGDILSDAAAMLTGSIGMLPSASLGASGPGVFEPVHGSAPDIAGQDKANPLAQVLSAAMMLRYALDQPKAADRIEQAVFQVLEQGDRTGDIISPGKNLLGCRAMGDSLIKALEQK

SEQ ID NO: 107253 - DNA, 1086 bp, Crocosphaera watsonii WH 8501
  CDS (1)..(1086): transl_table=11
atgacgaggcaatatcgcattaccctactgccaggggatggcattggccctgagattttagctgttaccgttgatatcctcaaagttgttggtaagcagttagagattgattttcaattccaagaagccctgatcggcggggtagccattgatgaaacaggcaaaccactgccagaagcaaccctgaagatgtgtcgtagtagcgacgctgtcttattagctgccatcggcggttataaatgggataatttaccccgtgaaaagcgaccggaaacaggtttattagccatccgtgccggactaaacctttttgctaacctacggccagctaccattctacctcaactcatcaatgcttcttccctgaaaccagagatcgttcaaggggtagatattatggtggttagggagttaaccggggggatctattttggcaaacccaaaggcatttttgagacagaaaccaaagaaaaacgaggggtcaacactatggcttataccgagtcagaagttgatcgcatcgctaaagtagcctttgaaaccgctcagaaacgcggtggcaagctttgttctgtagataaagcaaatgtcctcgatgtttctcaactatggcgcgatcgcgtcaccttgatggcggaaaagtaccccgatgtagaactttctcacctctatgtagataacgcagcaatgcagttagtccgagaacccaaacaatttgataccatcatcacaggtaatttatttggggacatcctctccgacgcagcagccatgttaaccggtagtattgggatgttaccttctgctagtttgggcttagaaaaaccagggttatttgaacccgttcacggttcggcccccgatatcgcaggagaagacaaagctaaccccttagcccaggttctcagtgcagcgatgatgctacgctatggcttaaacgaaccaaaggcagctactaagttagaaaaagctgttttagaagccttagcccaaggatatcgtacaggagatattatgtctgacggcatgaaagcagtgggatgtaaagggatgggagaagttttgttaaggatattggaatcatag

SEQ ID NO: 107254 - protein, 361 aa, Crocosphaera watsonii WH 8501
MTRQYRITLLPGDGIGPEILAVTVDILKVVGKQLEIDFQFQEALIGGVAIDETGKPLPEATLKMCRSSDAVLLAAIGGYKWDNLPREKRPETGLLAIRAGLNLFANLRPATILPQLINASSLKPEIVQGVDIMVVRELTGGIYFGKPKGIFETETKEKRGVNTMAYTESEVDRIAKVAFETAQKRGGKLCSVDKANVLDVSQLWRDRVTLMAEKYPDVELSHLYVDNAAMQLVREPKQFDTIITGNLFGDILSDAAAMLTGSIGMLPSASLGLEKPGLFEPVHGSAPDIAGEDKANPLAQVLSAAMMLRYGLNEPKAATKLEKAVLEALAQGYRTGDIMSDGMKAVGCKGMGEVLLRILES

SEQ ID NO: 107255 - DNA, 1062 bp, Prosthecochloris aestuarii DSM 271
  CDS (1)..(1062): transl_table=11
atgttcaagattgtctctatacccggtgacgggattggaccggaagtggtggcaagtgccatccgggtcatcaatacgcttgcccgacagcatggccttgaaattacaatcgaggagcaccttttcggaggtgcctcctatgatgttcacggtgagatgctgacccaggaaaccctcgaagcctgccgcaaatgcgatgcggttctccttggtgcggtcggtggaccgaaatgggaaaatctgcctcatgagaaaaaacccgaagcggccctcctcgggatccgcaaggaactcggtctgtttgccaatttcagaccagccaaagtctacgatgcgctggtcaatgcgtcatcactcaaacctgagattcttgcaggcaccgatttcatggtcatcagagaactgaccggcggaatctacttcggagagccaagaggttatgacgacaccagaggctggaatacgatggtctatgagcactatgaagtcgagcgcattgcccgtcttgcctttgatgcagccatgaaacgcaagaaacaacttgtctcaatagataaagccaacgttctcgaaagctctcagttctggagaaatattgttcatgaagtccataaggactttcctgaggtcgaactcatcgacatgtatgtcgacaacgcggccatgcagatagtacgcgatcccaaacagtttgacgttatcgtcacaaaaaacctgtttggcgacattctcagcgatatctccggcatgatcaccggaagcctcggcatgcttccttcggcaagtatcggctcaagccatgcgctctatgagcctattcacggcagcgccccggacatcgcagggcagaacaaagccaacccgatagctacgatcgcatcggcggccatgatgttcgaacacagcttctgtatgaaaaatgtcgcagatgaaatatacagcgccattgaaaaaacactggcttcgggattcagaaccgccgatatcgctaatccggaagacactatcgtttcaacaacagagatgaccgatgctatcgtagcaaatcttgaggcatcataa

SEQ ID NO: 107256 - protein, 353 aa, Prosthecochloris aestuarii DSM 271
MFKIVSIPGDGIGPEVVASAIRVINTLARQHGLEITIEEHLFGGASYDVHGEMLTQETLEACRKCDAVLLGAVGGPKWENLPHEKKPEAALLGIRKELGLFANFRPAKVYDALVNASSLKPEILAGTDFMVIRELTGGIYFGEPRGYDDTRGWNTMVYEHYEVERIARLAFDAAMKRKKQLVSIDKANVLESSQFWRNIVHEVHKDFPEVELIDMYVDNAAMQIVRDPKQFDVIVTKNLFGDILSDISGMITGSLGMLPSASIGSSHALYEPIHGSAPDIAGQNKANPIATIASAAMMFEHSFCMKNVADEIYSAIEKTLASGFRTADIANPEDTIVSTTEMTDAIVANLEAS

SEQ ID NO: 107257 - DNA, 1107 bp, Sulfitobacter sp. EE-36
  CDS (1)..(1107): transl_table=11
atggccaaccccacattgctaatcctcgccggtgacggcatcggccccgaggtcatgggccaggttgttcgcatcatcgactggtttggcgacaagcgcgatctggcctttgacgtagatcacgatctggtcggcggtgccgcctatgataaacacggcacccccctgcatgacgacacgatggccaaagcgctggcggcggatgctgttctgctgggtgccgttggcgggccgaaatacgacgcgcttgatttcagcgtcaaacccgaacgcggcctgctgcgcctgcgcaaggaaatggacctgttttcgaacctacgtccggcacagtgttttgacgcgttggcggatttctcctcgctgaagaaagacctcgttgccgggctcgacatcatgatcgtgcgcgaactgacatcgggtgtctactttggcgaaccccgcggaattttcgaggaaggcaacgagcgcgtcggcatcaatacacagcgctacaccgaatccgagatcgaccgtgtcgcacggtcagcctttgaactggcgcgtcgtcggggcaacaaagtctgctcgatggagaaagccaacgtcatggaaagcggcatcctgtggcgcgaagtcgtgcagaaagtgcatgacgaagactaccccgatgtcgagctgtcccacatgtacgccgacaacggcgcgatgcagctggtgcgcgcgcccaaacagttcgacgtgatcgtcaccgacaacctgttcggcgatatcctgtccgattgtgccgcgatgctgacaggctcgctggggatgctgccctctgcctcgctgggtgcgcccaatgccgatggccgccccaaagcgctgtacgagcccgtccacggctctgcccccgatatcgcgggtcaaggcaaggcgaaccccatcgcctgcatcctcagctttgcaatggcgctgcgctattccttcgaccagggcgatgaagccgcgcgtctggaaaaagccgttgaaaaagtgctggccgatggggcacgcaccgcggatctgatgggccccgaaggcggctcccccatctcgacctcggaaatgggtgacgcaatcctcgccgccctggacgcaagcctgtaa

SEQ ID NO: 107258 - protein, 368 aa, Sulfitobacter sp. EE-36
MANPTLLILAGDGIGPEVMGQVVRIIDWFGDKRDLAFDVDHDLVGGAAYDKHGTPLHDDTMAKALAADAVLLGAVGGPKYDALDFSVKPERGLLRLRKEMDLFSNLRPAQCFDALADFSSLKKDLVAGLDIMIVRELTSGVYFGEPRGIFEEGNERVGINTQRYTESEIDRVARSAFELARRRGNKVCSMEKANVMESGILWREVVQKVHDEDYPDVELSHMYADNGAMQLVRAPKQFDVIVTDNLFGDILSDCAAMLTGSLGMLPSASLGAPNADGRPKALYEPVHGSAPDIAGQGKANPIACILSFAMALRYSFDQGDEAARLEKAVEKVLADGARTADLMGPEGGSPISTSEMGDAILAALDASL

SEQ ID NO: 107259 - DNA, 1104 bp, Roseovarius nubinhibens ISM
  CDS (1)..(1104): transl_table=11
atgagcacaccttcgcttcttatcctgcccggcgacgggatcggccccgaggtcatgaccgaggtgcgcaaggtcatcgactggttcggcgccaagcgcgacctggcctttgatgtgagcgaggatctggtgggcggcgcggcctatgacaagcacggcgtgccgctgcatgacgacacgatggcgcgcgcccaagaggtcgacgcggtgctgctcggcgccgtgggtggcccgaaatacgacgagctcgatttctcggtcaaacccgagcgcggcctgctgcgcctgcgcaaggaaatggaccttttcgccaacctgcgcccggcgcaatgctttgacgcgctggccgatttcagcagcctgaaaaaggacgtggtcgccggtctcgacatcatgatcgtgcgcgagctgacctcgggcgtctatttcggcgagccgcgcggcatcttcgaagagggcaatgagcgcgtcggcatcaacacccagcgctacacggagagcgagatcgagcgcgccgcccgcgccgcgttcgagctggcgatgcgccggaacaagaaggtctgctcgatggagaaggccaatgtgatggagagcggcattctctggcgcgaagtcgcaacccgcgtcggcaaggactatcccgaggtcgagctgtcgcatatgtatgccgacaatggcgcgatgcagctcgtgcgggcgccgaaacaattcgacgtgatcctcaccgacaacctctttggcgacatcctgtcggattgcgccgcgatgctcaccggctcgctcggcatgctgccctcggcctcgctcggcgcaccgatggccaatggccggcccaaggcgctctacgagccggtgcatggctcggcccccgacatcgcgggtcagggcaaggcgaacccgatcgcctgtatcctgagctttgccatggcgctgcgctacagctttgatcagggcgacgaggcgacccgtctcgagaacgccatcgaagcggtgctcgcctccggcgcgcgcacggccgatctcatgggtcccgaaggcggcacgccgctctcgaccgccgagatgggcgacaaggtgatcgaggcgctcgaccagagcctctaa

SEQ ID NO: 107260 - protein, 367 aa, Roseovarius nubinhibens ISM
MSTPSLLILPGDGIGPEVMTEVRKVIDWFGAKRDLAFDVSEDLVGGAAYDKHGVPLHDDTMARAQEVDAVLLGAVGGPKYDELDFSVKPERGLLRLRKEMDLFANLRPAQCFDALADFSSLKKDVVAGLDIMIVRELTSGVYFGEPRGIFEEGNERVGINTQRYTESEIERAARAAFELAMRRNKKVCSMEKANVMESGILWREVATRVGKDYPEVELSHMYADNGAMQLVRAPKQFDVILTDNLFGDILSDCAAMLTGSLGMLPSASLGAPMANGRPKALYEPVHGSAPDIAGQGKANPIACILSFAMALRYSFDQGDEATRLENAIEAVLASGARTADLMGPEGGTPLSTAEMGDKVIEALDQSL

SEQ ID NO: 107261 - DNA, 1104 bp, Oceanicola batsensis HTCC2597
  CDS (1)..(1104): transl_table=11
atgaccaacccctcgcttctcatcctgcccggcgacgggatcggccccgaagtcatggccgaggtgcgcaagatcatcgactggttcggcgcccggcgcggcatcaccttcgacgtcagcgaagatctcgtcggcggctgtgcctatgacaagcacggcaccccgctgcatgacgacacgatggccagggcgcaggaggtcgacgcggtccttctcggtgccgtcggtgggccgaaatacgacagcctcgatttctcggtaaagcccgagcgcggcctgctgcgcctgcgcaaggagatggaccttttctccaatctgcgtccggcgcagtgtttcgacgcgctggcggatttctcgtcgctcaagaaggacgtggtcgcggggctcgacatcatgattgtgcgcgaactgacgagcggcgtctatttcggggagccgcgcggcatcttcgaagagggcaacgagcgcgtcggcatcaacacgcagcgctatacagagagcgaaatcgaccgcgtcgcccgctcggccttcgatctggcgatgaagcgcggcaagaagctctgctcgatggaaaaggccaacgtgatggagtcgggtatcctctggcgcgaagtcgtgaccgaggtgggcaaggactatcccgaggtggaactcagccacatgtacgccgacgccggggccatgcagctgacgcgctggcccaaacagttcgacgtgatcgtcaccgacaacctcttcggcgacttgctgtcggacctcgccgcgatgctgaccgggtcgctcggcatgctgccgtcggcctcgctcggcgcgccgatggacaacggccggcccaaggcactttacgaaccggtgcacggctcggcccccgacatcgcggggcagggcaaggccaacccctgcgcctgtatcctctccttcgccatggcgctgcggtattccttcgatctcggggacgaggcgacgcggctggagcaggcggtaaacgcggtgttgggcgacggcgtccgcaccgctgacctgctgaacgaagagggcatcaccccggcgaccaccgccgagatgggcgacgcggtgcttgcggcgctggacgcgtcgctctga

SEQ ID NO: 107262 - protein, 367 aa, Oceanicola batsensis HTCC2597
MTNPSLLILPGDGIGPEVMAEVRKIIDWFGARRGITFDVSEDLVGGCAYDKHGTPLHDDTMARAQEVDAVLLGAVGGPKYDSLDFSVKPERGLLRLRKEMDLFSNLRPAQCFDALADFSSLKKDVVAGLDIMIVRELTSGVYFGEPRGIFEEGNERVGINTQRYTESEIDRVARSAFDLAMKRGKKLCSMEKANVMESGILWREVVTEVGKDYPEVELSHMYADAGAMQLTRWPKQFDVIVTDNLFGDLLSDLAAMLTGSLGMLPSASLGAPMDNGRPKALYEPVHGSAPDIAGQGKANPCACILSFAMALRYSFDLGDEATRLEQAVNAVLGDGVRTADLLNEEGITPATTAEMGDAVLAALDASL

SEQ ID NO: 107263 - DNA, 1083 bp, Prochlorococcus marinus str. MIT 9211
  CDS (1)..(1083): transl_table=11
atgaaaacatacaatgttgttttattaccaggcgacggaataggtccagaaataatggatgtggcaacaaaaacaatagattatgtagctcagaaatataactttggaattgaatatgaacaaaaactaataggtggttcagctatagataaatataatgatccgttgccagaagaaactttaaaagcctgtaagagcagtgacgctgtcttactttcagcaataggcagcccaaaatatgatgctctacccagagaaaaaaggcctgagtctggtttacttaatttaagatcaggtctaggattatttgcaaatattaggccagtaaaagtctggccagcactaattagtgaaagttctctaaagcaggagatagtccaaaatgttgatcttgttgtggtaagagaactaacaggcggcatctactttgggcaaccaaaaggaagattacaaagtgagaatggtgagagagcttttaatactatgacctactcaacaatggaaatagataggattgccagagttgcatttgaacttgctaccgatagaaaaaagaaactatgttctatagataaagccaatgttttagatgtaagccaattatggagagaaagagtaatagaactaagctacaactttccaaaagttgaattaaatcatttatatgtagacaatgcagcaatgcaacttataagacaaccagaccaatttgatgtaattctaactggcaatctgtttggagatattattagtgatgaagcagctatgttgactggttcaattggaatgcttccttccgcatcattacgacttgaaggtcctggactttttgaaccagttcatggatcagctccagatatagcaaataaggatatcgccaacccaatggccatggtcctttcagcagcaatgatgttaagggttggtctaaaagagaacaacgcagctgatgacctagagaatgcgatagataaggtccttaaagatggttatagaacatcagatcttatgactaatggcaaaaaggtgcttggatgcagggaaatgggggagcaaattcttatgagtcttgcagctgcataa

SEQ ID NO: 107264 - protein, 360 aa, Prochlorococcus marinus str. MIT 9211
MKTYNVVLLPGDGIGPEIMDVATKTIDYVAQKYNFGIEYEQKLIGGSAIDKYNDPLPEETLKACKSSDAVLLSAIGSPKYDALPREKRPESGLLNLRSGLGLFANIRPVKVWPALISESSLKQEIVQNVDLVVVRELTGGIYFGQPKGRLQSENGERAFNTMTYSTMEIDRIARVAFELATDRKKKLCSIDKANVLDVSQLWRERVIELSYNFPKVELNHLYVDNAAMQLIRQPDQFDVILTGNLFGDIISDEAAMLTGSIGMLPSASLRLEGPGLFEPVHGSAPDIANKDIANPMAMVLSAAMMLRVGLKENNAADDLENAIDKVLKDGYRTSDLMTNGKKVLGCREMGEQILMSLAAA

SEQ ID NO: 107265 - DNA, 1065 bp, Erythrobacter sp. NAP1
  CDS (1)..(1065): transl_table=11
atgaagatcgcaattctgccaggcgacgggatcggccccgaagtcacccgcgaggcggtgaaagtgctagaggcggtgaacctgcccggacttacactgttcgaaggcgacgttggcggcatcgcttacaaacgccacggccatccgcttccgcccgaaacgctgacgattgccaagtcctgcgatgcagtgctgttcggcgctgtcggcgatcccgattgcgacaggctcgaccggcatctgcgccccgaacaggcgatcctcggccttcgcaaggagctcgacctgttcgccaatctgcgcccggccaaggtctatgaggggctggagcacctctctcccctgaagccggagatcgcgggccagcttgacatgatgatcgtgcgcgaactcaccggcgacgtgtatttcggggacaagggcgaacgggtggccatcgacggcacgcgcgaggggtgggacatgatgtcctactccgaaaccgaggtcagccggattgcccgcgttgcttttcgaaccgcgcgcgcaggcgatgacaagtaccgcgtgaccagcgtcgacaaggcaaacgtgctcgaaaccagccaggtgtggcgcgacacggtcaacgcggcggctggcgctcatcccgatatcgagcttagccacatgtatgtcgacaacgccgcgatgcagatcatcagcaatccgggcagcttcggtgtgatcctgaccggcaacctgttcggcgatatcctgtccgatctggccagcgcggcggtcgggtcgatcggcctgctcgccagcgcctcgatgggcgaacgccgcaccgaccatggcatcttcggcctctacgaaccgatccacggcagcgcgcccgatatcgcgggcaggggtatcgccaatccgatggcgacgatcctttcggcagccatgatgctgcgccactccttcggtctcgacagcgaagcagcgcggatcgaggcggcggtcgaaaaggcgctggcagacggtttcctcggcggcgaccttggcggagagcacgggaccgaggcgatcggcgctgcggtgagggagcggctctag

SEQ ID NO: 107266 - protein, 354 aa, Erythrobacter sp. NAP1
MKIAILPGDGIGPEVTREAVKVLEAVNLPGLTLFEGDVGGIAYKRHGHPLPPETLTIAKSCDAVLFGAVGDPDCDRLDRHLRPEQAILGLRKELDLFANLRPAKVYEGLEHLSPLKPEIAGQLDMMIVRELTGDVYFGDKGERVAIDGTREGWDMMSYSETEVSRIARVAFRTARAGDDKYRVTSVDKANVLETSQVWRDTVNAAAGAHPDIELSHMYVDNAAMQIISNPGSFGVILTGNLFGDILSDLASAAVGSIGLLASASMGERRTDHGIFGLYEPIHGSAPDIAGRGIANPMATILSAAMMLRHSFGLDSEAARIEAAVEKALADGFLGGDLGGEHGTEAIGAAVRERL

SEQ ID NO: 107267 - DNA, 1080 bp, Synechococcus sp. RS9917
  CDS (1)..(1080): transl_table=11
atgcgtcagcatcgcgttgttctgctgcccggtgacgggatcggtccagagatcacggcggtcgctcggatgctgctggaggccgtggcagcacggcacggttttgcgcttcagtttgatgagcagttgatcgggggtgccgcgatcgacgccacgggtgtccccttgccagaagccagcctcgaggcctgccgcggcgccgatgcggtgttgctcgcggcgatcggcaacccccgtttcgatgccctgccccgagagcagcgcccggagagcggtctcctggccctgcgctccggcttgggactgttcgccaacctcagaccggtgaagattgttccggccctgagcgccgccagcagcctcaaagcggaggtgatcgaaggggtggatctacttgtggtgcgcgaactcaccggtggcatctatttcggtcagcccaagggacgggtgacggccgatggagaggaacggggcttcaacaccatgacctactccgcctccgaggtcgaccggatcgcccgggtcgctttcgagctggcaaaagaacgccgcggccagctctgctcggtggacaaggcgaatgtgctggatgtgagtcagctctggcgcgaccgggtcgaggccatggctgccacttatccggaggtcagcgtgagccatctgtatgtcgacaacgccgccatgcagctggtgcgtgatccgcgccagtttgatgtgctgctcacgggcaacctgttcggcgacatcctcagcgatgaagcggcgatgctcaccggctcgatcggcatgttgccctccgcttccctcggcagtgcagggcccggcctgtttgaacccgtgcacggctcggcgcccgacatcgctggtcaggacaaggccaatccgatggcgatggtgctgtctgccgccatgatgctgcgcatcggcctgaaggaaacggaggctgccgatgcgctcgaagcggcggtgaaccgggtgctcgctgccggttaccgcaccggagacctgatggcggagggctgcacacccctcggctgtcgtgccatgggtgaacagctgctggtccactgcaacggctga

SEQ ID NO: 107268 - protein, 359 aa, Synechococcus sp. RS9917
MRQHRVVLLPGDGIGPEITAVARMLLEAVAARHGFALQFDEQLIGGAAIDATGVPLPEASLEACRGADAVLLAAIGNPRFDALPREQRPESGLLALRSGLGLFANLRPVKIVPALSAASSLKAEVIEGVDLLVVRELTGGIYFGQPKGRVTADGEERGFNTMTYSASEVDRIARVAFELAKERRGQLCSVDKANVLDVSQLWRDRVEAMAATYPEVSVSHLYVDNAAMQLVRDPRQFDVLLTGNLFGDILSDEAAMLTGSIGMLPSASLGSAGPGLFEPVHGSAPDIAGQDKANPMAMVLSAAMMLRIGLKETEAADALEAAVNRVLAAGYRTGDLMAEGCTPLGCRAMGEQLLVHCNG

SEQ ID NO: 107269 - DNA, 1077 bp, Pseudoalteromonas tunicata D2
  CDS (1)..(1077): transl_table=11
atgagtcagtcaaattataatattgccgttttagccggtgatggaattggccctgaggtaatggcggccgcagagcaagttttagatgcggtgagccaaaaattcagttttactttaaatcgcacacatcatgccattggtggtgcggcgatagatcaatttggtcaagcattaccagatgcaacacttgcggcatgtgagcaggccgatgccattttatttggttcagtaggtgggccaaaatgggaaaaactaccgccagccgaacagcctgagcgtgcatccctattaccgctgcggaagcattttggtttgttttgtaatttacgcccagcgcaattattaccagctcttagtgctgcatcacctttacgtgctgatatcagcgaaaaaggatttgatattttatgcgtacgtgaattaactggcggtatttattttggtgaaaaaggtcgcagtggtgaaggcgagtctgaatctgcatttgatacgcaaacttattcacgtaaagagattgctcgtattgcccattttgctttttcagccgcgcgcttacgtcgcaataaagtaacctcagtagataaggccaatgtattggcatcaagtgttttgtggcgtgaagtagtgaccgaagtatcaaaagattaccctgatgtcgcactcgaatacatttatgttgataacgcggccatgcaattagtaaaaaatccgggtcaatttgatgttttattatgcgacaacctatttggtgacattttatcggatgaatgcgcaatgatcaccggctcgatgggccttttgccttcagcaagcttaaatcaatcaggttttggtttgtatgaacctgctggtggttcagcgccggatattgctggtaaaggcattgccaacccgatagcccaaattttaagtgcagctttgatgcttagatattcacttaaacaagaagaagcggcgcgtaccattgaaaaagcagtggccgaagcggttgctgccggtgttgggacgccagatatttatccgcaagcaggttgcactaccgcagatgttgctgcggcgatcgtggcacgtatttaa

SEQ ID NO: 107270 - protein, 358 aa, Pseudoalteromonas tunicata D2
MSQSNYNIAVLAGDGIGPEVMAAAEQVLDAVSQKFSFTLNRTHHAIGGAAIDQFGQALPDATLAACEQADAILFGSVGGPKWEKLPPAEQPERASLLPLRKHFGLFCNLRPAQLLPALSAASPLRADISEKGFDILCVRELTGGIYFGEKGRSGEGESESAFDTQTYSRKEIARIAHFAFSAARLRRNKVTSVDKANVLASSVLWREVVTEVSKDYPDVALEYIYVDNAAMQLVKNPGQFDVLLCDNLFGDILSDECAMITGSMGLLPSASLNQSGFGLYEPAGGSAPDIAGKGIANPIAQILSAALMLRYSLKQEEAARTIEKAVAEAVAAGVGTPDIYPQAGCTTADVAAAIVARI

SEQ ID NO: 107271 - DNA, 1089 bp, Photobacterium sp. SKA34
  CDS (1)..(1089): transl_table=11
atggctggttcttacaatattgcagttttacccggtgacgggattggtccagaagtgatgcaacaagcacataaagtgctaaatgcaatcgagactaaatttaacctaacctttaatcgtacagaatatgatgtgggtggtattgctatcgataatcatggttgcccgctaccagatgccactctaaaaggctgtgaacaatccgatgccgtgttgtttggctctgttggtggccctaagtgggaacatctagcacctaacgatcaacctgagcgtggtgctcttctgccactacgtaaacacttccaattattttgtaatctacgtccagctcaaattcaccgtggcttagagaagttctctccgctacgcactgatatttcagagcgtggttttgatattgctgttgtgcgtgaactcactggcggtatttactttggtcagccaaaaggccgtgaaggtgaaggcgcgcaagaaaaagcgttcgataccgaagtctactaccgctatgaaattgaacgtattgcaaaaattgcgtttgaatcagctcgcttacgcagcaaaaaagtctgctctattgataaagctaacgtactacagagctctattttatggcgtgaagtcgtagaagaaatcgcaaaagattaccctgatgtgacgttaactcatatgtatattgataacgcgaccatgcagctgatcaaagatccttctcaatttgatgtcatgctatgttcaaatatctttggcgatatcatttcggatgagtgtgcaatgatcacaggctctatgggtatgttaccttctgctagcctcaaccaagataagtttggtatgtacgagcctgctggcggctcagcacccgatattgcaggtaaaaacattgcaaacccagtggcgcagatcctatctgctgcactgatgcttcgttacagcctaggtgaagaaacagcagcgcgtgctatcgagcaagctgtatcacaagcgctggaagccggcgagttaaccgccgatcttgcaagtgataagccagcactcaccaccagtgaaatgggcgataagatcgcagcctacattcaacaagcataa

SEQ ID NO: 107272 - protein, 362 aa, Photobacterium sp. SKA34
MAGSYNIAVLPGDGIGPEVMQQAHKVLNAIETKFNLTFNRTEYDVGGIAIDNHGCPLPDATLKGCEQSDAVLFGSVGGPKWEHLAPNDQPERGALLPLRKHFQLFCNLRPAQIHRGLEKFSPLRTDISERGFDIAVVRELTGGIYFGQPKGREGEGAQEKAFDTEVYYRYEIERIAKIAFESARLRSKKVCSIDKANVLQSSILWREVVEEIAKDYPDVTLTHMYIDNATMQLIKDPSQFDVMLCSNIFGDIISDECAMITGSMGMLPSASLNQDKFGMYEPAGGSAPDIAGKNIANPVAQILSAALMLRYSLGEETAARAIEQAVSQALEAGELTADLASDKPALTTSEMGDKIAAYIQQA

SEQ ID NO: 107273 - DNA, 1080 bp, Oceanospirillum sp. MED92
  CDS (1)..(1080): transl_table=11
atgtctaaaaacgtattgattctgccgggtgatggcatcggtccagaaattgttacagaggcacgtcgtgttctggaactagtaaatgagcaggataacctgggtctggaactgactgaagcgctgctgggtggtgctgcgattgatgctgaaggcgtacctctgccagatgcaacgcttgaggcggctaaagcttctgatgcgattctgctgggtgctgtgggtggtcctaagtgggataccaatcctgatttccagatccgtcctgaaaaaggtctgctgggtattcgttcccaactggagcttttcggtaacctgcgcccagctattctttacccgcagctggcacacgcgtctaccttgaagcctgaagtggtatctggcctggatattctgattgtacgtgaactgacggggggtatttacttcggtcagccacgtggtgtccgtgagaaagagggtggtatccgcgaaggttacaacacttatgtttacgatgagaatgagatccgtcgtatcggtcgtgttgcgtttgaggcggctatggcgcgcgataagcgtttgtgttctgtagacaaggctaatgtactggaagtaacagttctgtggcgtgaaattatggaagacctagccaaggaatacccagaagtagagctaagtcatatgtacgtcgacaatgcagcgatgcagttggtgcgtgcacctaagcagtttgacgttatggtaacgggcaacatgtttggcgacattctatcggatgctgctgccatgctgaccggctccatcggtatgctgccttctgcttctctggatgagagcggtaaaggtatgtacgagccttgtcatggttctgcgcctgatatcgcaggtcagggcctggctaacccgctggcgactattctgtctgcggcgatgatgctgcgttactctctgggtgctggcgaaacggctgaccgtattgaagcggcagtgagcaaagtgctagatcagaatctgcgtactgctgacattatgtctgaaggtatgcagcaggtatctacatctgaaatgggtgatgcggtagttgctgcgctgcagtaa

SEQ ID NO: 107274 - protein, 359 aa, Oceanospirillum sp. MED92
MSKNVLILPGDGIGPEIVTEARRVLELVNEQDNLGLELTEALLGGAAIDAEGVPLPDATLEAAKASDAILLGAVGGPKWDTNPDFQIRPEKGLLGIRSQLELFGNLRPAILYPQLAHASTLKPEVVSGLDILIVRELTGGIYFGQPRGVREKEGGIREGYNTYVYDENEIRRIGRVAFEAAMARDKRLCSVDKANVLEVTVLWREIMEDLAKEYPEVELSHMYVDNAAMQLVRAPKQFDVMVTGNMFGDILSDAAAMLTGSIGMLPSASLDESGKGMYEPCHGSAPDIAGQGLANPLATILSAAMMLRYSLGAGETADRIEAAVSKVLDQNLRTADIMSEGMQQVSTSEMGDAVVAALQ

SEQ ID NO: 107275 - DNA, 1113 bp, Xanthobacter autotrophicus Py2
  CDS (1)..(1113): transl_table=11
atggccacccacaagctgctcctcctcgccggcgacggcatcggtcccgaagtcatggccgaggtgaaacgggtggccgcatggctcgaccaggcgggccttgcctccttcgccatcgaagaggatctggtgggcggctgcgcctatgacgcgcacggcgccgccatctcggaggatgccatggtccgcgccaaggcggcggacgcggtgctgctcggcgccgtgggcggccccaagtgggcgagcgtaccctacgaggcgcgccccgaggcgggcctgctgcgcctgcgcaaggacctgcagctgttcgccaatctgcgccccgccatctgctatccggcgctggccgatgcctcctccctcaagcgcgaggtggtggaggggctcgacatcctcatcgtgcgcgagctgaccggcggcgtctatttcggcgagcccaagaccatcatggacctcggcaacggccagaagcgcgccatcgacacgcaggtctacgacacctacgagatcgagcgcatcgctgccgtggccttcgagctggcccgcacccgccgcaacaaggtgacctcttccgaaaagcacaacgtgatgaagtccggcgtgctctggaaggaggtggtcaccgccctccacgagcgcgcctacaaggacgtggagctggagcacaacctcgccgattcgctcgccatgcagctcgtgcgctggcccaagcagtatgacgtgatcgtcaccgacaatctgttcggcgacatcctttccgacatcgctgccatgctcaccggctcgctgggcatgctgccctccgcctcgctgggcgcggccgatccggtcaccggcaagcgcgcggcgctgtacgagccggtgcacggctcggcccccgacattgccggcaagggcatcgccaatcccatcgccatgatcggctcgctggccatggccctgcgctattcgttcaaccagggcgaggtggcggaccgcatcgaccaggccatcgccggcgtgctggcctccggcaagcgcactggcgatatcgccggcccgggcaccgagaccatcggcacccaggacatgggcaaggccatcatcgccgagctggatgctgccaccgcctga

SEQ ID NO: 107276 - protein, 370 aa, Xanthobacter autotrophicus Py2
MATHKLLLLAGDGIGPEVMAEVKRVAAWLDQAGLASFAIEEDLVGGCAYDAHGAAISEDAMVRAKAADAVLLGAVGGPKWASVPYEARPEAGLLRLRKDLQLFANLRPAICYPALADASSLKREVVEGLDILIVRELTGGVYFGEPKTIMDLGNGQKRAIDTQVYDTYEIERIAAVAFELARTRRNKVTSSEKHNVMKSGVLWKEVVTALHERAYKDVELEHNLADSLAMQLVRWPKQYDVIVTDNLFGDILSDIAAMLTGSLGMLPSASLGAADPVTGKRAALYEPVHGSAPDIAGKGIANPIAMIGSLAMALRYSFNQGEVADRIDQAIAGVLASGKRTGDIAGPGTETIGTQDMGKAIIAELDAATA

SEQ ID NO: 107277 - DNA, 1071 bp, marine gamma proteobacterium HTCC2207
  CDS (1)..(1071): transl_table=11
atgagtaaagtgttggtattacccggggacaatataggccctgaaattattactgaagcggtaagggtgctggagacagttaaccagaagtttggcttgggtattgagttggattacgcccatttgggtggcgcggcgttagatgctgtgggtgagccttgcccacaggagactttggataaggcccgcgcctcggatgcgattctgttaggtgctgtgggtggcccccagtgggatgatgttgagcgccatctgcgccctgaaaagggtttgttaacaattcgctctgagttggagctgtttggtaatttgcgtccggcgattatgtatccccagttagcccatgcctcttccctaaagcctgagtttgtctccggtttggatattttgattgttcgcgaattggtgggtggcatctactttggtgagccacggggtattcgtaccttggataatggtgagcgcgagggttataacacctacaaatacaatgagtctgagattcgtcgtattggccgtatggcgtttgaagcggcgatggtacgcggtaagcgtctgtgttcggtggataagtccaatgtgttggaagcgactattttatggcgcgagattattacgtctatggcagctgactaccctgaggtggagctgagccatatgtatgtagacaatgcggctatgcagttggtgaaggagcctaagcagtttgatgtggtggtgaccggtaatatgtttggcgatattttgtcggatacggcggctatgttgaccgggtctattggtatgttgccctctgcgtcgttggataaagatggcggcggtatgtatgagccttgccatggttcagcgccggatattgccgggcagggtgtggcgaatccattggcgactattttgtcggtggcgatgatgttgcgttattcgttggatgcggttgcggcggcggatgcaattgagaaggcggtgagtgatgtgctggatcagggtttgcgcactggggatatttataccgatggtatgacgcgggttggtactgttgagatgggtgatgcggtggtggcggcgctttaa

SEQ ID NO: 107278 - protein, 356 aa, marine gamma proteobacterium HTCC2207
MSKVLVLPGDNIGPEIITEAVRVLETVNQKFGLGIELDYAHLGGAALDAVGEPCPQETLDKARASDAILLGAVGGPQWDDVERHLRPEKGLLTIRSELELFGNLRPAIMYPQLAHASSLKPEFVSGLDILIVRELVGGIYFGEPRGIRTLDNGEREGYNTYKYNESEIRRIGRMAFEAAMVRGKRLCSVDKSNVLEATILWREIITSMAADYPEVELSHMYVDNAAMQLVKEPKQFDVVVTGNMFGDILSDTAAMLTGSIGMLPSASLDKDGGGMYEPCHGSAPDIAGQGVANPLATILSVAMMLRYSLDAVAAADAIEKAVSDVLDQGLRTGDIYTDGMTRVGTVEMGDAVVAAL

SEQ ID NO: 107279 - DNA, 1074 bp, delta proteobacterium MLMS-1
  CDS (1)..(1074): transl_table=11
atgaagaaaatagcggttctgccgggtgacggcatcggtccggaggtgatgcgcgaggcgatcaaggtgctggaggccgcccagcgcaaattcgatttcaccttaagctacgactacgccgatgtgggtggttgcgccattgatcgccatggccgggccctgccccatgccaccctggagttgtgccggcaaagtgacgccatcctgttcggctcggtgggcggccccaagtgggaaagcctgccgccggagcagcagccggaacgggccgccctgctgccgctgcgcaaggaatttgaactcttttgcaacctgcggccagccagggtctttccctccctggccgccgccagcccgctcaaaccggaaattgtcggcaacggctttgatctgctggtggttcgcgaattgaccggcggcatctacttcggtcagcccaaggggagagaaggcagcggtcccgaggaaaaagcctttgacaccatgatctacagccgccgggaaatcgaccgcatcgcccgccgggccttcgaagccgcccgcctgcgccggggcatcgtcacttcggtggacaaggccaacgtgctgaccaccatggtactgtggcgggaggtggtcaaggaagtggccgccgattaccccgatgtgaccttgaaccatatctacgtcgacaacgccgccatgcagctgatccgcaacccccaccagttcgacgtgctgctctgcggcaacatgtttggcgatatcatctccgatgaatgcgccatgataaccggctccatggggctgctggcctcggccagtctcaacgaatcgggctttggcctttacgagccggccggcggttcagcaccggatatcaccggcctggggattgccaaccccatcgcccagatcctgtcggcggcgatgatgctgcgctacagcttccagttgggccaggccgccgacaccatcgaaagggcggtggccaaagccctggccaccgacatcctgaccccggatatcgccgccgaccccagccaggcggtgagcaccgaagagatgggcaccgccatcgccaacggcctctaa

SEQ ID NO: 107280 - protein, 357 aa, delta proteobacterium MLMS-1
MKKIAVLPGDGIGPEVMREAIKVLEAAQRKFDFTLSYDYADVGGCAIDRHGRALPHATLELCRQSDAILFGSVGGPKWESLPPEQQPERAALLPLRKEFELFCNLRPARVFPSLAAASPLKPEIVGNGFDLLVVRELTGGIYFGQPKGREGSGPEEKAFDTMIYSRREIDRIARRAFEAARLRRGIVTSVDKANVLTTMVLWREVVKEVAADYPDVTLNHIYVDNAAMQLIRNPHQFDVLLCGNMFGDIISDECAMITGSMGLLASASLNESGFGLYEPAGGSAPDITGLGIANPIAQILSAAMMLRYSFQLGQAADTIERAVAKALATDILTPDIAADPSQAVSTEEMGTAIANGL

SEQ ID NO: 107281 - DNA, 1086 bp, Oceanobacter sp. RED65
  CDS (1)..(1086): transl_table=11
atgtctaaaaatgtattgattctgccgggtgacggtattggtcctgagatcgttactgaggcggttaaggttctgaatgttatcaacgacaagctatcgcttgatcttgattttgttgatggtttagtgggtggtgcggcatacgatgttcatggcacgccattacctgatgagaccatggaaaaagcccacgcggcagacgctattctcttgggtgcagtgggtggtccaaaatgggataacctcgagaatcgtgatcatcgtccagaaaagggccttttaggtttgcgctctggcctagaattgtttggtaatttgcgtcccgcaattttgtacccgcagctggcggatgcgtcttcattgaaaccggaagttgtttcgggtttagatattttgattgttcgtgaattaacgggcggtatttatttcggtcagccgcgcggtattcgcatgttggaaaacggtgagcgcgaaggttataacacctatgtttacagcgagtctgagattcgtcgcatcgcgaaagttgcgtttgaatcagcgcaaaaacgtaacaaaaaattgtgctcagtggataaggccaatgttttagaggtaactgttctttggcgtgaaatcctagaagaaatgtcgaaagactatccagatgttgagttgtctcacatgtatgtagacaacgctgccatgcaacttgttcgtgcgccaaaacaatttgacgttatggtaacgggcaatatgttcggagatattttgtccgacgccgcagctatgctgacgggttcaatagggatgttaccaagtgcttctttgaatcaaagcaacaaaggtatgtatgaaccttgtcatggtagtgcaccagatattgcaggtaagggtcttgcaaatccattggcaacgattttgtcagcagcaatgatgttgcgttatagcttggaggagagcaaagcggcagatgaaatagaggctgcagtgagtcgcgtattggatcaaggtctgcgtacagccgacattatgagtgaaggtatgcagcaagtctcaacggctgaaatgggtgatgcggtcgttgcgcaattaacagaagcctaa

SEQ ID NO: 107282 - protein, 361 aa, Oceanobacter sp. RED65
MSKNVLILPGDGIGPEIVTEAVKVLNVINDKLSLDLDFVDGLVGGAAYDVHGTPLPDETMEKAHAADAILLGAVGGPKWDNLENRDHRPEKGLLGLRSGLELFGNLRPAILYPQLADASSLKPEVVSGLDILIVRELTGGIYFGQPRGIRMLENGEREGYNTYVYSESEIRRIAKVAFESAQKRNKKLCSVDKANVLEVTVLWREILEEMSKDYPDVELSHMYVDNAAMQLVRAPKQFDVMVTGNMFGDILSDAAAMLTGSIGMLPSASLNQSNKGMYEPCHGSAPDIAGKGLANPLATILSAAMMLRYSLEESKAADEIEAAVSRVLDQGLRTADIMSEGMQQVSTAEMGDAVVAQLTEA

SEQ ID NO: 107283 - DNA, 1092 bp, Vibrio sp. Ex25
  CDS (1)..(1092): transl_table=11
atgacagacaaatcatacaaaattgctgtcctacccggtgacggcatcggcccggaagtaatggcgcaagcacacaaggtattggatgctatcgaaaagaagcacggtattgcgtttgagcgtgacgaacatgatgtaggcggcatcgcgatcgataatcatggcagcccacttccagaaagcaccgtaaaagcgtgtgaagagtctgatgcagtactatttggctcggttggcggcccgaagtgggagcacttgccacccaacgaccaacctgaacgcggtgccttactaccactacgcaaacacttccaactgttttgtaacctacgcccagcgcaaatccacgcaggcctggaagctttctcaccacttcgtgctgacatctcaggccgtggttttgacatcgtggtagtccgtgaactgactggtggtatctatttcggtcaaccaaaaggccgtgaaggcgaaggcgcaacagaaaaagcgtttgatactgaggtgtaccaccgctttgagatcgaacgtattgcaaaaatcgcttttgagtctgctcgtctacgtcgcaagaaagtgtgctctatcgacaaagcgaacgttctacaaagctctattctatggcgtgaagtagtcgaagaaatcgcaaaagattacccagatgtcgagctatcacacatgtacatcgacaacgcaaccatgcagcttatcaaagacccagctcagttcgacgtgatgctgtgttcaaacatcttcggcgacatcatttccgatgagtgcgcaatgatcactggctctatgggtatgctgccttcagcgagcctaaacgaaagcaaattcggtctgtacgagccagcaggcggcagtgcacccgatatcgcaggtaagaacatcgctaacccagtggcgcaaatcctatctgcggcactgatgttacgttatagccttggcgaagaagccgcagcacaagacatcgaagcagcggtgtcgaaagcactttcagctggcgagctaacaggcgaccttgcaggcaacaacccggcacttacaacatcagagatgggcgataagatcgctgagtacatcctaaactcgtaa

SEQ ID NO: 107284 - protein, 363 aa, Vibrio sp. Ex25
MTDKSYKIAVLPGDGIGPEVMAQAHKVLDAIEKKHGIAFERDEHDVGGIAIDNHGSPLPESTVKACEESDAVLFGSVGGPKWEHLPPNDQPERGALLPLRKHFQLFCNLRPAQIHAGLEAFSPLRADISGRGFDIVVVRELTGGIYFGQPKGREGEGATEKAFDTEVYHRFEIERIAKIAFESARLRRKKVCSIDKANVLQSSILWREVVEEIAKDYPDVELSHMYIDNATMQLIKDPAQFDVMLCSNIFGDIISDECAMITGSMGMLPSASLNESKFGLYEPAGGSAPDIAGKNIANPVAQILSAALMLRYSLGEEAAAQDIEAAVSKALSAGELTGDLAGNNPALTTSEMGDKIAEYILNS

SEQ ID NO: 107285 - DNA, 1077 bp, Alteromonadales bacterium TW-7
  CDS (1)..(1077): transl_table=11
atgagtaaaacaaactacagcgttgccgtattagcaggcgacggtattggcccagaagtaatggcagcagcagagcaagtacttgatgctgtaagcaataagtttggttttactctaaaccgcgagcatcatgctattggtggtgcagccattgatgagtttggtgaagcattaccaccaaaaacactaagcgcgtgtgaaaacgctgatgctattttatttggctcagtaggtggccctaagtgggaaaaccttccaccaaacgagcaacctgagcgtgcatcgcttttaccgcttcgtaagcactttggtttgttttgtaacttacgcccagcacagttattaccagcattaagtgcagcgtcgccacttcgcgctgatattagcgaaaaaggctttgatattttatgtgtacgcgagcttaccggcggcatttactttggtgaaaaaggccgaggtggcgaaggcgaagaggagtttgcctttgatacgcaaaactactcgcgtaaagaaattgaacgcattgcccgctttgcttttgaagcagcaaaattacgtagtaaccatgttacctctgttgataaagccaacgtacttgcatcaagcgtattatggcgcgaagtagtcaccgaagtaagtaaagactacccagaagtcagcctagattatatatacgtagataacgcagctatgcagttagttaaacagcctagccagtttgacgtgctactttgcgataacttgtttggtgatattttgtcagatgagtgtgcgatgatcacaggctcaatgggcttattaccttcggcaagcttaaatcaatcgggctttggtttgtacgaacctgctggtggctccgcgccagatattgcaggtaaaggcgttgcaaacccaatagcacaaattttaagtgccgcactgatgctacgttactcattagggcaagacgaagcagcacgcaccattgaaaaagccgtagccgaagccgtagaagcaggcgttggcacgccagatatctacccacaaggtggatacagcacaagcgatgtggcagctgccattgtttcacgtatttaa

SEQ ID NO: 107286 - protein, 358 aa, Alteromonadales bacterium TW-7
MSKTNYSVAVLAGDGIGPEVMAAAEQVLDAVSNKFGFTLNREHHAIGGAAIDEFGEALPPKTLSACENADAILFGSVGGPKWENLPPNEQPERASLLPLRKHFGLFCNLRPAQLLPALSAASPLRADISEKGFDILCVRELTGGIYFGEKGRGGEGEEEFAFDTQNYSRKEIERIARFAFEAAKLRSNHVTSVDKANVLASSVLWREVVTEVSKDYPEVSLDYIYVDNAAMQLVKQPSQFDVLLCDNLFGDILSDECAMITGSMGLLPSASLNQSGFGLYEPAGGSAPDIAGKGVANPIAQILSAALMLRYSLGQDEAARTIEKAVAEAVEAGVGTPDIYPQGGYSTSDVAAAIVSRI

SEQ ID NO: 107287 - DNA, 1080 bp, marine gamma proteobacterium HTCC2143
  CDS (1)..(1080): transl_table=11
gtgagtagaaaagtattggttatctcaggtgatggcattggtccggaaattaccgcagaaacggtaaaagttcttgatgtggtcaaccagcggtttgaattgggtatcgaatttgacgaggctttactgggcggtgcggcattggatgagacgggcgtgccaatgccggatgaaacactgaataaagcaaaagactctgatgcaattttgttcgctgctcttggtgggcctaagtgggatgctaacgatcgggatttaaggcctgaaaagggtctactgcaatttcggtcaggtttaggcttatttggtaatcttagaccagccattctctactctcagcttgctgatgcgtcttcgctgaaacctgaaattgtcgcgggcctcgacattctgattgttagggagcttaccggtggtatttatttcggcgaaccgcggggtattcgcacgcttgaaaacggtgagagagaaggttacaacacctataaatacaatgaaacagagatccgacgcattgccaagatggcctttgaggcggcgcaaaagcgcagtggcaagctatgctcagttgataaatcaaatgtgcttgaagcaactgtcttgtggcgggagatcgtcgaaggtatggcggcggactacccagatgttgagctgtctcatatgtatgttgataacgctgctatgcagctggtgagggacccaaaacaatttgatgtcatcgttaccggcaatatgtttggcgacatcttgtctgatgccgcagcgatgttaactggttctattgggatgttgccatcggcatcgctggataaaaatggccgtggaatgtacgagccctgccatggttcggcacctgatattgccggccaaggtaaggctaacccactggcaatgatactgtcggctgcgatgatgttgcgttattcactggatgcagtggaggcggcggatgctattgagatcgcggtgggcgtggtgttggatcagggtattcgcaccagtgatattttttcagcgggtactgaattggtcagtacgcgagttatgggcgatgccgtagcagcggcgctgcaactgtag

SEQ ID NO: 107288 - protein, 359 aa, marine gamma proteobacterium HTCC2143
MSRKVLVISGDGIGPEITAETVKVLDVVNQRFELGIEFDEALLGGAALDETGVPMPDETLNKAKDSDAILFAALGGPKWDANDRDLRPEKGLLQFRSGLGLFGNLRPAILYSQLADASSLKPEIVAGLDILIVRELTGGIYFGEPRGIRTLENGEREGYNTYKYNETEIRRIAKMAFEAAQKRSGKLCSVDKSNVLEATVLWREIVEGMAADYPDVELSHMYVDNAAMQLVRDPKQFDVIVTGNMFGDILSDAAAMLTGSIGMLPSASLDKNGRGMYEPCHGSAPDIAGQGKANPLAMILSAAMMLRYSLDAVEAADAIEIAVGVVLDQGIRTSDIFSAGTELVSTRVMGDAVAAALQL

SEQ ID NO: 107289 - DNA, 1098 bp, marine gamma proteobacterium HTCC2080
  CDS (1)..(1098): transl_table=11
atgagccattccatattgctgctgcccggtgatggcatcgggcctgaagtcgtcgcccaagctcgtcgcgttctagagcgcgcggctgatttatataagctcaccattgaactcgacgaagccaacttaggcggtgtcgccatcgaccgtgaggggcaggcttatcctgaaagcactcaagcaaaagcgcgatctgcggcagcattgttgctgggtgccgtagggggccctcaatgggatggcttacccgctgaggagcgccccgagcggggtttgttggctatccgagcagacttggatttatttgcaaatttacgacctgccatattgttcccccagttggccgatgcctcgagtttgaagcctgagttagtggcggggctcgatattttgatcgtcagagaattaaccggtggtatttacttcggcgagcctcgaggcattcgcacacgcgaagacggtgagcgagagggttacaacacttatatctatcgagaaagcgaaatcgaacgcatagcgaagcttgctttcgagctggcaaccaagcgtggtggtcgtttaacgtctgtcgacaaggccaatgtacttgaggtaactcagctttggcgcgaggttgttaccaacgtggcagggaattttccagaggttgacctagaccacctgtatgtcgataacgctgcgatgcaacttgtgcgggcgcccaaacaattcgatgttttagttaccggtaatattttcggagatattctttcggacactgcggcaatgttaacagggtcgattggtatgctgccttcggcgtcgcttaacgcacattcggcgggcctttatgagcctgtgcatggctcggctcccgatattgctgggcaggattgcgctaatcctctcgcgacgattctgtcagtggcaatgctgctgcgttattccctcgatgccccagatgccgcaatcgcagtggaagccgctgtatccgcggtgctagatcagggatgcaggactgcagatatcgcagctaagggcgatgttgtcattgggacagaagcgatgggtacagcggtgctcaatgcacttgaaggccctcaagggaatcagttatga

SEQ ID NO: 107290 - protein, 365 aa, marine gamma proteobacterium HTCC2080
MSHSILLLPGDGIGPEVVAQARRVLERAADLYKLTIELDEANLGGVAIDREGQAYPESTQAKARSAAALLLGAVGGPQWDGLPAEERPERGLLAIRADLDLFANLRPAILFPQLADASSLKPELVAGLDILIVRELTGGIYFGEPRGIRTREDGEREGYNTYIYRESEIERIAKLAFELATKRGGRLTSVDKANVLEVTQLWREVVTNVAGNFPEVDLDHLYVDNAAMQLVRAPKQFDVLVTGNIFGDILSDTAAMLTGSIGMLPSASLNAHSAGLYEPVHGSAPDIAGQDCANPLATILSVAMLLRYSLDAPDAAIAVEAAVSAVLDQGCRTADIAAKGDVVIGTEAMGTAVLNALEGPQGNQL

SEQ ID NO: 107291 - DNA, 1068 bp, Candidatus Desulfococcus oleovorans Hxd3
  CDS (1)..(1068): transl_table=11
atgggaaaaagttacaacatcgcggtcataccgggagacggcaccggcccggaagtggtggccgaaggggtgaaggtgctcaacgccgccgccgcccggttcggcttcaaccttgactacaccgattattcgctgggcggtgaacactacaaggccaccggcgaaatcctgaacgacgacaccatcgaccggctcaagaaagcggacgccatctttctgggcgccatcggccatcccgacgtcaagcccggcatcctggaaaagggcctgctgctcaaacttcgattcacctgcgaccagtacatcaacctccggccggtacggctgtacgaaggggtctatacacccctgaaagacaagacaccggcggatatcgattttaccgttgttcgggaaaacaccgaagggctttatgccggggccggtggctttctgaagtacggtaccccggacgaggtggccattcaggaatcgatcaacacgcgaaaaggggtggagcggtgcatccggttcgcctttgaatacacccgcaaccggaacaaacgaaaaaagctgaccctgtgcggcaagaccaacgtgctgacctttgcctttgacctgtgggagcggacctttcacgatgtggcaaaagagtatccggatatcgagaccgactacgcccacgtggacgccatctgcatgtggatggtgaaaaacccggagtggtttgacgtgatcgtgaccgacaacatgttcggcgatatcatcaccgacctgggcgccatgattcagggcggcatgggcgtggccgccggcggcaacatcaaccccgagggggtctccatgttcgagcccatcggcggatcagcccccaagtacaccggcctgggcgtgatcaaccccattgccgccatcatggccggcagcctgatgctggaacacctgggcgagagcgcggccgcggacgccattgagcaggccgcgatgaccgccatcaaaaaagacttgaagagtgtggaagccagaaaaatgggcatgagcaccgcggaagtgggcgcccgggtggccgcctatgtggctcaatcttaa

SEQ ID NO: 107292 - protein, 355 aa, Candidatus Desulfococcus oleovorans Hxd3
MGKSYNIAVIPGDGTGPEVVAEGVKVLNAAAARFGFNLDYTDYSLGGEHYKATGEILNDDTIDRLKKADAIFLGAIGHPDVKPGILEKGLLLKLRFTCDQYINLRPVRLYEGVYTPLKDKTPADIDFTVVRENTEGLYAGAGGFLKYGTPDEVAIQESINTRKGVERCIRFAFEYTRNRNKRKKLTLCGKTNVLTFAFDLWERTFHDVAKEYPDIETDYAHVDAICMWMVKNPEWFDVIVTDNMFGDIITDLGAMIQGGMGVAAGGNINPEGVSMFEPIGGSAPKYTGLGVINPIAAIMAGSLMLEHLGESAAADAIEQAAMTAIKKDLKSVEARKMGMSTAEVGARVAAYVAQS

SEQ ID NO: 107293 - DNA, 1092 bp, Pseudomonas putida GB-1
  CDS (1)..(1092): transl_table=11
atgagcaagcctttcagaattgcggcaatccccggcgatggcatcggcaacgaagtactgcctgaaggcattcgtgtagtcgaggccgctgcgcgcaagcatggcctggacatcagcttcgagttcttcgagtgggccagctgcgactattacctggcccacggcaagatgatgccggacgactggttcgaacagctcaagggcttcgatgccctgtacttcggtgctgtgggctggccagacaaggtgccggaccacatctcgctgtggggttcgctgctcaagttccgccgagacttcgaccaatacgtgaacatccgcccagtgcgcctgttccctggcgtgccttgcccgctggcaggtcgtgaaccaggtgacatcgacttcgtggtcatccgcgagaacaccgagggcgaatattcgtcgctgggtgggcgcatgttcgaaggcaccgaaaacgagttcgtgctgcaggaatcggtgttcacccgtcgcggcgtcgaccgcattctcaagtacgccttcgacgtggcccagacccgcgagcgcaagcacgtcacctcggccaccaagtcgaacggcatggccgtgagcatgccgtactgggacgagcgcaccgctgcgatggctgccaattatccggaaatcagctgggacaaacagcatatcgatatcctctgcgcgcgcttcgtgctgcagccggaccgctttgacgtggtggtggcttcgaacctgttcggcgacatcctctccgacctcggcccggcctgcgccggcaccatcggcatcgcgccatcggccaacctcaaccccgagcgcaaattcccgtcgctgttcgaacccgtgcatggctcggcaccggacatctacggcaagaacatcgccaacccgatcgcgatgatctggtcgggtgcgctgatgctcgacttccttggcaacgacggcgccgacccacgctaccgcgccgcccacgacgacatcctcaaggccatcgagcaggtcatcgccgccggtgatgtcacccgcgacatgggtggccagcagtccacccagcaagtgggccaggccatcaccgcgctggtcgaagcctga

SEQ ID NO: 107294 - protein, 363 aa, Pseudomonas putida GB-1
MSKPFRIAAIPGDGIGNEVLPEGIRVVEAAARKHGLDISFEFFEWASCDYYLAHGKMMPDDWFEQLKGFDALYFGAVGWPDKVPDHISLWGSLLKFRRDFDQYVNIRPVRLFPGVPCPLAGREPGDIDFVVIRENTEGEYSSLGGRMFEGTENEFVLQESVFTRRGVDRILKYAFDVAQTRERKHVTSATKSNGMAVSMPYWDERTAAMAANYPEISWDKQHIDILCARFVLQPDRFDVVVASNLFGDILSDLGPACAGTIGIAPSANLNPERKFPSLFEPVHGSAPDIYGKNIANPIAMIWSGALMLDFLGNDGADPRYRAAHDDILKAIEQVIAAGDVTRDMGGQQSTQQVGQAITALVEA

SEQ ID NO: 107295 - DNA, 1116 bp, Pseudomonas putida GB-1
  CDS (1)..(1116): transl_table=11
ttggccgcaccgcgtgaatggatagaggaaagcatgagcaagcagattctgattctcccaggtgacggtatcggcccggaaatcatggccgaagcggtcaaggtgctggagctggccaacgacaagttccagctcggtttcagcctggcgcacgacgtgatcggcggtgccgccatcgacaagcacggcgtgccactggccgacgaaaccctggagcgtgcgcgccaggccgatgccgtgctgctgggcgccgtgggtggcccgaagtgggacaagatcgagcgagacattcgcccggagcgcggcctgctgaaaatccgttcgcaactgggcctgttcgccaacctgcgcccggccatcctctacccgcaactggccgatgcctcgtcgctgaagccggaaatcgtttcgggcctggacatcctcatcgttcgtgagctgaccggtggtatctacttcggtgccccgcgtggccagcgcgagctggaaggcggcgagcgccaggcctacgacaccctgccttacagcgagagcgaagtgcgccgcattgcccgtgtcggcttcgacatggcccgcgtgcgcggcaagaagctgtgctcggtggacaaggccaacgtcctggcctccagccagctgtggcgtgaagtggtcgaagacgtggccaaggactacccggatgtggaactgagccacatgtacgtcgacaacgcggccatgcagctcgttcgtgcccccaaacagttcgacgtgatggtgaccgacaacatgttcggtgacattctgtcggatgaagcttccatgctgaccggttccatcggcatgctgccttcggcgtcgttggatgccgacaacaagggcatgtacgagccgtgccacggctcggcgccggacatcgcaggccttggcatcgccaacccgctggcgaccatcctgtcggtgtcgatgatgctgcgttacagcttcaatcagtcggctgccgccgaggcgatcgagaaggccgtgagcctggttctggaccagggcctgcgcaccggcgacatcttctccgaaggctgccgcaaagttggtacgcaggaaatgggcgacgcagtagtcgcagcgctgcggaatctgtaa

SEQ ID NO: 107296 - protein, 371 aa, Pseudomonas putida GB-1
MAAPREWIEESMSKQILILPGDGIGPEIMAEAVKVLELANDKFQLGFSLAHDVIGGAAIDKHGVPLADETLERARQADAVLLGAVGGPKWDKIERDIRPERGLLKIRSQLGLFANLRPAILYPQLADASSLKPEIVSGLDILIVRELTGGIYFGAPRGQRELEGGERQAYDTLPYSESEVRRIARVGFDMARVRGKKLCSVDKANVLASSQLWREVVEDVAKDYPDVELSHMYVDNAAMQLVRAPKQFDVMVTDNMFGDILSDEASMLTGSIGMLPSASLDADNKGMYEPCHGSAPDIAGLGIANPLATILSVSMMLRYSFNQSAAAEAIEKAVSLVLDQGLRTGDIFSEGCRKVGTQEMGDAVVAALRNL

SEQ ID NO: 107297 - DNA, 1074 bp, Marinobacter sp. ELB17
  CDS (1)..(1074): transl_table=11
atgtcacgagccatattattgctgccgggcgacggcattggccctgaaatcatgggcgaggcggaaaaagtactgcgccgggtgaatgagtcgttcaagcttgatttgagttttcagcacggcttggttggcggtgctgcgctggatgattccgacactccgctgccggatgaaaccctggagttggccaccaaggccgacgcgattctgctgggcgccgttggcggcccgaagtgggacggcctgccgatggcgaaacgtccggaaaaaggtttgctgggcctgcgttccaaacttgaactgtttgccaattttcgccctgctattctttatccgcagctggcgtctgcttcttcgctgaagccggaagtggtgtccgggctggatattatgattatccgtgagctgaccggcggtatttactttggtcagcctcgcggtgtgcggcagctggaaagcggtgagcgccagggctataacacttacgcctacacagagactgaaattcgccgtattggccgggtcgcgtttgaaacagcccagcagcgcggcaaaaaactgtgctcggtcgacaaggccaacgtgttagaagtgaccgtgctgtggcgtgagatcatgaacgagctcaagctcgagtatccgaacgtagagctgtctcacatgtacgtggataacgccgcgatgcaactggtgcgcgcacccaaacagtttgacgtgattgtaaccggcaatatgtttggtgatattctttctgacgaagccgccatgctgacaggctccatcggcatgctgccatcggcttcgatgaactcggcgaagcagggcctgtacgagccttgccatggttcggcacctgatattgccggcaaaggcattgcaaatccgttggcgaccattcttagcgttgcgatgatgctacgctatagcctcgatgaaggtgccgccgccgcagccattgaagccgcggttggcaaggtactggaccaaggcttgcgcacagcggatataatgtcggaaggctgcacccgggtttctacccgtgaaatgggtgaagcggtactggcgcagctataa

SEQ ID NO: 107298 - protein, 357 aa, Marinobacter sp. ELB17
MSRAILLLPGDGIGPEIMGEAEKVLRRVNESFKLDLSFQHGLVGGAALDDSDTPLPDETLELATKADAILLGAVGGPKWDGLPMAKRPEKGLLGLRSKLELFANFRPAILYPQLASASSLKPEVVSGLDIMIIRELTGGIYFGQPRGVRQLESGERQGYNTYAYTETEIRRIGRVAFETAQQRGKKLCSVDKANVLEVTVLWREIMNELKLEYPNVELSHMYVDNAAMQLVRAPKQFDVIVTGNMFGDILSDEAAMLTGSIGMLPSASMNSAKQGLYEPCHGSAPDIAGKGIANPLATILSVAMMLRYSLDEGAAAAAIEAAVGKVLDQGLRTADIMSEGCTRVSTREMGEAVLAQL

SEQ ID NO: 107299 - DNA, 1071 bp, Herbaspirillum seropedicae
  CDS (1)..(1071): transl_table=11
atgaagattgctatcctgccgggtgacggcatcggtcccgaaatcgtcaatgaggctgtgcgcgtgctcaacgcgctggacgagaagttcgagatggaaaccgccccggtcggcggcgccggctacgaagcccacggccacccgctgccggacggcaccctgaagctggccaaggaagccgacgccatcctcttcggtgcggtcggcgactggaagtacgacaagctggaacgcgccctgcgccccgagcaagccatcctgggcctgcgcaagcatctgcaattgttcgccaatttccgcccggcgatctgctacccggaactgaccggcgcttcgtccttgaagcccgagctggtggccaacctggacatcctgatcgtgcgcgaactgaacggcgacatctatttcggccagccgcgcggcatgcgcgaagcgccggacggccccttcaagggcgcacgcgaaggttttgataccatgcgttattcggaaccggaaatccgccgcatcgcccatgtcgccttccaggccgccgccaagcgcggcaagcgcctgtgcagcgtggacaaggccaacgtgctggagaccttccagttctggaaggacatcgtcaccgaagtgggcaaggaatatccggacgtggaactgtcgcacatgtacgtggacaatgccgcgatgcaactggtgaaggcgccgaagaacttcgacgtcatcgtcaccggcaacatgttcggcgacatcctctcagacgcggcggccatgctgaccggttccatcggcatgctgccttcggcgtcgttggatgccaacaacaaaggtctgtatgaaccttcgcacggttcggcacccgacatcgccggccgcggtatcgccaatccgctggcgaccatcctgtcggcggcgatgatgctgcgcttctcgctgaacaaggccgagcaggccgaccgcatcgagaacgcggtgaagaaagtgcttgcgcaaggtctgcgcaccgccgatatttatgaagaaggctgcaccaaggtcaatacccagcagatgggtgaggccgtggtcaaggccctcgcctga

SEQ ID NO: 107300 - protein, 356 aa, Herbaspirillum seropedicae
MKIAILPGDGIGPEIVNEAVRVLNALDEKFEMETAPVGGAGYEAHGHPLPDGTLKLAKEADAILFGAVGDWKYDKLERALRPEQAILGLRKHLQLFANFRPAICYPELTGASSLKPELVANLDILIVRELNGDIYFGQPRGMREAPDGPFKGAREGFDTMRYSEPEIRRIAHVAFQAAAKRGKRLCSVDKANVLETFQFWKDIVTEVGKEYPDVELSHMYVDNAAMQLVKAPKNFDVIVTGNMFGDILSDAAAMLTGSIGMLPSASLDANNKGLYEPSHGSAPDIAGRGIANPLATILSAAMMLRFSLNKAEQADRIENAVKKVLAQGLRTADIYEEGCTKVNTQQMGEAVVKALA

SEQ ID NO: 107301 - DNA, 1095 bp, Pseudomonas putida
  CDS (1)..(1095): transl_table=11
atgcctgcacactctttccgcatcgctgccatccctggggacggtatcggcctcgaagtcctgccagaaggcatccgtgtattggaagccgccgcgctcaagcatggcctggcgctggagttcgacaccttcgaatgggccagctgcgactactacttgcaacacggcaagatgatgccggatgactgggccgaacaactcaagcagtacgacgccatctacttcggtgccgtgggttggcctgacaaggtacctgaccacatttccctgtggggctcactgctcaagttccgccgcgagttcgaccagtacgtgaacatccgcccggtgcgcctgttcccaggggtgccgtgcgccttggccaaccgcaaggtcggcgacatcgatttcgtggtggtgcgggagaacaccgaaggcgaatactcgtcgctcggtggcatcatgttcgagaacactgaaaacgaaatcgtcatacaggaatcgatcttcacccgccgtggcgtcgatcgtatcctcaagtacgcgttcgacctcgccgagaaacgcgagcgcaagcacgtgacttcggccaccaagtccaacggtatggccatcagcatgccgtactgggacaagcgcaccgaagcaatggcggctcactatccgcacgtcagctgggacaagcagcatatcgacatcctctgtgcgcgtttcgtgttgcagccagagcgcttcgatgtagtggtggcgtccaacctgttcggcgacatcctgtcggacctggggccggcctgcgcgggcaccattggcattgccccgtcggccaacctcaaccctgaacgcaacttcccgtcactgttcgaacctgtgcatggttctgcaccggacatcttcggcaagaacatcgccaacccgatcgcgatgatctggtcaggtgcgctgatgctggaattcctgggccagggagatgagcgttaccagcgcgcccacgacgacatgctcaatgccatcgaacgggtaattgccgacggttcggtcacacctgacatgggcggcacactttccacccagcaggtgggcgccgccatcagcgacaccctggcccggttagactga

SEQ ID NO: 107302 - protein, 364 aa, Pseudomonas putida
MPAHSFRIAAIPGDGIGLEVLPEGIRVLEAAALKHGLALEFDTFEWASCDYYLQHGKMMPDDWAEQLKQYDAIYFGAVGWPDKVPDHISLWGSLLKFRREFDQYVNIRPVRLFPGVPCALANRKVGDIDFVVVRENTEGEYSSLGGIMFENTENEIVIQESIFTRRGVDRILKYAFDLAEKRERKHVTSATKSNGMAISMPYWDKRTEAMAAHYPHVSWDKQHIDILCARFVLQPERFDVVVASNLFGDILSDLGPACAGTIGIAPSANLNPERNFPSLFEPVHGSAPDIFGKNIANPIAMIWSGALMLEFLGQGDERYQRAHDDMLNAIERVIADGSVTPDMGGTLSTQQVGAAISDTLARLD

SEQ ID NO: 107303 - DNA, 1095 bp, Nicotiana tabacum; identical to SEQ ID NO: 37231
  CDS (1)..(1095)

SEQ ID NO: 107304 - protein, 364 aa, Nicotiana tabacum; identical to SEQ ID NO: 37232

SEQ ID NO: 107305 - DNA, 2225 bp, Candida maltosa
  CDS (860)..(1981)
ggatccaatcattactggtggaggtcaagaaagaggtttgagatcaggtactttggcaccaccattagtagctgggtttggtgaagctgcaagattaatgaaacaagaatctgcatttgacaagaaacatattgagaagttgtctactaaattgaagaacggtttgttatccattccatctactcaattcaacggttgtaataacccaacatatcaatacccaggtgtgtgaatctttccttcgcatatattgaaggagaatctttgttaatcgcattgaaagatatcgcattgagttctggttctgcatgtacctctgcatctttggaaccatcatatgttttacatgctttgggtgccgatgatgccttggctcattcttccattagattcggtattggtagattcaccactgaagcagaaggttgactatgttattcaagcaattaatgaaagagttgatttcttgagaaagatgtctccattatgggaaatggttcaagaaggtattgacttgaactctatcgaatggagtggacattaaggtttttgtttttgttttttttttgtaatttgtgttgttatgtgtaattatcgtgtatagagtaatttcggaaattgtactttcgttcatgttatctgatccagttaaataatacgttcgtactgttgaaaaatgactaactcctgtaacggcgtacgtggattccgcagccgggttcaaagtttttttctgcttcttccactataaaaatatataataaacaaaaaaaatccgaggaactcaggctatgaaatttttcactccagaattttttttttcctacctccctttttattgaatatccttaaacccacaatgtcagttaaaactaaaactatcacaattttaccaggtgatcacgtcggtaccgaaattgtcaatgaagctattaaagttttagaagcaattgaagctgccactccttaccaaaaaattcacttcgatttcaaacatcatttaatcggaggttctgccattgatgccactggtgtcccattaccagatgatgcacttgaaagtgccaaaaattctgacgccgtcttattgggtgctgttggtggaccaaaatgggggactggcgctcttcgtccagaacaaggattattaaagatccgtaaagaattgaacctttatgctaacattagaccttgtaactttgccagtgactccttattggaattatctccattgagaccagaagtcgttaaaggtacaaacttgatcattgttcgtgaattagttggtggtatttatttcggtgatcgtgaagaacaagaagaaagtgaagataaacaaaccgcatgggatactgaaaaatacaccgtcgatgaagtcaccagaatcacccgtatcgctgctttcatggctttacagcataacccaccattaccaatctggtcattggataaagctaatgttttagcttcttctagattatggagaagaactgtcgataaagtgatttctgaagagttcccaactttatctgttcaacatcaattgattgattccgctgccatgattttaattcaaaacccaaccaaattgaatggtataattatcacttctaacatgtttggtgatatcatttccgatgaagcttcagttattccaggttctttgggtttattaccatctgcatctttagcttcattgccagataccaacaccgttttcggtctttatgaaccatgtcacggttctgctcctgatttaccagctaataaagttaacccaattgctactattttatctgctgcatctatgttgagattatctttggattgtgtgaaagaagccgaagctttagaagaagccgtgaaacaagtcttggataaaggtatcagaactgcagatttaagaggtaccagttcaactactgaagttggtgatgccattgtcgaagccgtcactaaaatcttaaaagaaaaagcttaagtaaagtatacacaaaatttaacgaatattattaatacaaaatgaacaccacctaaatacttttttttaaaaatgtactgactcttctaaaaattgagataattcaatatcggaaatttctctcaccggtttacttggatcttcggaaataaatctatttgaagtaatggtagcctcgcttgattctgattgactctttctaagaacatgggtaggcctcttcgttcggagaataaaacgcatc

SEQ ID NO: 107306 - protein, 373 aa, Candida maltosa
MSVKTKTITILPGDHVGTEIVNEAIKVLEAIEAATPYQKIHFDFKHHLIGGSAIDATGVPLPDDALESAKNSDAVLLGAVGGPKWGTGALRPEQGLLKIRKELNLYANIRPCNFASDSLLELSPLRPEVVKGTNLIIVRELVGGIYFGDREEQEESEDKQTAWDTEKYTVDEVTRITRIAAFMALQHNPPLPIWSLDKANVLASSRLWRRTVDKVISEEFPTLSVQHQLIDSAAMILIQNPTKLNGIIITSNMFGDIISDEASVIPGSLGLLPSASLASLPDTNTVFGLYEPCHGSAPDLPANKVNPIATILSAASMLRLSLDCVKEAEALEEAVKQVLDKGIRTADLRGTSSTTEVGDAIVEAVTKILKEKA

SEQ ID NO: 107307 - DNA, 1116 bp, Aspergillus oryzae
  CDS (1)..(1116)
atgaccatagcaaaaacctacaacatcctcgtccttcccggggacggcatcggccctgaaatcatggccgaggctacaaaagtgctctccgccttcaacacatccaccgtgcagttcaacacccgctcggaacttatcggcggatgcagcatcgatctccacggcaagccgattacggatgccgtcaaggaagcagctcttgcttcagacgcggtgctgttcgctgccgttggcggtccgaaatgggataatatgcggaggggactggatgggccggagggcgggttgctacagctgcggaaggcgatggatatctatgcgaatttaagaccttgttcggcggattcaccgagtaggagtgttgcgagggagtttagtccgtttcgacaggagatcatcgagggggtggatttcgtggttgtgagggagaattgtggaggagcgtattttgggagaaaggtagaagaagatgaatatgcaatggacgaatgggcctactctacctccgaaatccagcgcatcacccgtctctctgctgaactggctctgcgccacgatcccccctggcccgtaatctcgctggacaaggctaatgtgctcgcatcctcacggctctggcgccgagttgtcgaaaagaccatggcggaagagtacccgcaggtgaaactggtacatcagctggcggactccgcgtcgttgattctggcaacaaacccgcgcgtgctgaacggcgtgattctggccgataataccttcggtgatatgatttctgatcaggcgggctcgatagttggcacgttgggcgtgttgccgagtgcgagcttggatggactgccatctgaaacccggaggaggaccaatgggctgtatgaacccacacatggatcggcgccgaccatcgccggcaagaacatcgccaaccccgttgctatgattctctgcgtggcgctgatgttccggtactccttggatatggagcgtgaagcacagcaaattgaagaggccgtgcggactgttctagactccggcatccgcacgccagatttgggtggaaaggctgggacgacagaagtgggtgatgcgatcgtagctgtgctacgcggacagaaattgtag

SEQ ID NO: 107308 - protein, 371 aa, Aspergillus oryzae
MTIAKTYNILVLPGDGIGPEIMAEATKVLSAFNTSTVQFNTRSELIGGCSIDLHGKPITDAVKEAALASDAVLFAAVGGPKWDNMRRGLDGPEGGLLQLRKAMDIYANLRPCSADSPSRSVAREFSPFRQEIIEGVDFVVVRENCGGAYFGRKVEEDEYAMDEWAYSTSEIQRITRLSAELALRHDPPWPVISLDKANVLASSRLWRRVVEKTMAEEYPQVKLVHQLADSASLILATNPRVLNGVILADNTFGDMISDQAGSIVGTLGVLPSASLDGLPSETRRRTNGLYEPTHGSAPTIAGKNIANPVAMILCVALMFRYSLDMEREAQQIEEAVRTVLDSGIRTPDLGGKAGTTEVGDAIVAVLRGQKL

SEQ ID NO: 107309 - DNA, 1068 bp, Aspergillus oryzae
  CDS (1)..(1068)
atgaagacctacaacatcgcttcgatccccgcggacggcatcggccccgaggtcatctcggccggagttactgttctcaacgccttggccgagaagcttaacactttcaagcttgacttcacccactacgactggagctcggagacatacaaaactacggggaaatatattcccgacggaggactggaagacctgaagcgccatgatgcgattttgtttggagctgtcggagcacctgatgtgcccgatcacatttccctctggggtctccgtctttcgatctgccaaccgctgcagcaatatgcaaacgtccgacctacgcgcgtcctccggggcacacaatcaccgcttcggaactgcccccccggcaagttggactgggtgattgttcgtgagaatagtgagggcgagtatgccggacaggggggtcgatcccaccgcggcttcccctgggaagtagccactgagaccgcgatttttagccggcacggcgtcgagcgaatcatgcggttcgctttcgagacggcggctaaacggccacggaagctactgaccgtggtcactaagagcaatgcccagcgcaacggtatggtcctttgggatgaggttgcgaccgaagtggggaaagagttcccagaagtgcaggtggacaagatgttggtggacgcgatgactacaaggatggtgttgaagcccgagacgctggatacgattgttgccagtaatttgcatgcggacattctctccgacctcgcagctgctctcgccggttcgataggaatcgcaccgacctccaacttggaccccacccgacagcatcctagcatgtttgagccgattcacggctcagcattcgatatcaccgggaaaggcattgctaatcccgtggccaccttctggaccgcggccgagatgttagcgtggttgggcgaggagacggcggctcagaagctaatggagtgtgtggagaacgtgtgtgagaggggaatcttgaccgcagacctgggaggtaaggccacgaccaaggaagtcaccgaggccatggtgggggagatccagcgactgtaa

SEQ ID NO: 107310 - protein, 355 aa, Aspergillus oryzae
MKTYNIASIPADGIGPEVISAGVTVLNALAEKLNTFKLDFTHYDWSSETYKTTGKYIPDGGLEDLKRHDAILFGAVGAPDVPDHISLWGLRLSICQPLQQYANVRPTRVLRGTQSPLRNCPPGKLDWVIVRENSEGEYAGQGGRSHRGFPWEVATETAIFSRHGVERIMRFAFETAAKRPRKLLTVVTKSNAQRNGMVLWDEVATEVGKEFPEVQVDKMLVDAMTTRMVLKPETLDTIVASNLHADILSDLAAALAGSIGIAPTSNLDPTRQHPSMFEPIHGSAFDITGKGIANPVATFWTAAEMLAWLGEETAAQKLMECVENVCERGILTADLGGKATTKEVTEAMVGEIQRL

SEQ ID NO: 107311 - DNA, 1080 bp, Aspergillus oryzae
  CDS (1)..(1080)
atggcctctcagaaacctacctaccgcatcgcatccattccgggagacgggataggcatcgaagtcgtcgacgctgccatccaggtagtagaaaagctcgccaagacccttggaacattcaatatcgatttcactcacataccatggggaactgcgtactacaaggaacacggtcgatatgtgtccgaagattgtttagacacgctgcgcaagttcgacgctgggctgtttggtgccgtgggtgccccagatgttccggaccacatctccctctggggtctcttattagcacttcgcgggccgctgcagctatatgctaacgtccgtcccgtgcgcacattcccgggcaccaaatgccctctcaacaccgcgacagagggtattgactggatgcttgtgcgcgaaaactccgaaggagagtactccggccagggcggacgcagtcacgtcggtcagccgtgggaagctgcgacagaggtggctatgtttacccgcgtcgggatcgagaggattatgcgctttgcctttgaagtcgctcaatccagaccccgtaagctactgactgtggttacgaagagtaactccatgcgaaacggcatggtactctgggaccaggttgcggcggaagttgctaaggatttccccgatgttacgtgggacaaaatgctggtggatgcaatgacggtccgcatggtagcaaagccccaatctatcgataccatcgtgggaacaaatctacacatggatatcctatccgacttggcggctgcgttggcaggttctatcggtgtggctccttccagtaacctggatccgacccggaagaatccctcaatcttcgaaccagtacatggcagtgcatttgatatcaccggaaagggtgttgccaaccccgtagctactttctggtccgctgcggagatgctgtcatggttgggtgaaaaggaggcggcgaagcagctcatggattgcgtagaaaaggtctgcgccgctggtatcttaacgccggatctcggaggcacgtcgaatacgcaaggagtggtagatgctgtgaagaaggagatcgagcgtctggtataa

SEQ ID NO: 107312 - protein, 359 aa, Aspergillus oryzae
MASQKPTYRIASIPGDGIGIEVVDAAIQVVEKLAKTLGTFNIDFTHIPWGTAYYKEHGRYVSEDCLDTLRKFDAGLFGAVGAPDVPDHISLWGLLLALRGPLQLYANVRPVRTFPGTKCPLNTATEGIDWMLVRENSEGEYSGQGGRSHVGQPWEAATEVAMFTRVGIERIMRFAFEVAQSRPRKLLTVVTKSNSMRNGMVLWDQVAAEVAKDFPDVTWDKMLVDAMTVRMVAKPQSIDTIVGTNLHMDILSDLAAALAGSIGVAPSSNLDPTRKNPSIFEPVHGSAFDITGKGVANPVATFWSAAEMLSWLGEKEAAKQLMDCVEKVCAAGILTPDLGGTSNTQGVVDAVKKEIERLV

SEQ ID NO: 107313 - DNA, 1095 bp, Aspergillus oryzae
  CDS (1)..(1095)
atgtcttcttacaacatcgtcgtctttggcggagaccactgcggtccggaggtcaccgctgaggccatcaaggtcctccgtgctgttgagaagaactgcgatgttactttcaaccttcaagaccacttgctgggaggagcgtcaattgatgccacaggatctcccttgaccgacgaagccttgaacgcagctaagaacgctgatgctgttctcttgggtgccatcggtggaccgaaatggggcaccggcgccgtccgccccgaacagggtattctaaagctccgtaaagaaatgggcaccttcggcaacctgcgcccctgcaacttcgccgcaccctccctcgttgagagctctcccctccgcgccgacgtctgccgcggtgttaacttcaatatcatccgtgaactgacgggcggtatatacttcggtgagcgcaaggaagacgatggcagcggatatgcaatggacacagagccctactcgcgcgctgaaatcgagcgtatcatccgtctggccgctcaccttgccctgcagcacgacccccctcttcctgtgtggagtttggacaaggccaacgtcctggctactagccgtttgtggcgtaaggttgtcaccgaggttatggccaaggagttcccccagttgaagatcgagcaccagcttatcgactccgccgctatgatcatggtgaagaacccccgccagctgaacggtattgttgttaccagcaacctgttcggtgatatcattagtgatgaggctagcgttatccctggatctctgggcttgcttcccagtgctagtttgagcggtatccctgatggaaatagcaaggttaacggtatctatgagcctattcacggctctgcccctgacattgccggaaagggcattgttaaccctgtcgccgccattctgtccgtcgctatgatgatgcagtactctttcggtctgtttgccgaggcccgcgccattgagcaggccgtcagcaacgttatcgagtccggtgtccgcactggtgacatcggcggtaaggctaccaccgccgaggttggtgatgctgttgctgccgaattggagaagcttttgaagtaa

SEQ ID NO: 107314 - protein, 364 aa, Aspergillus oryzae
MSSYNIVVFGGDHCGPEVTAEAIKVLRAVEKNCDVTFNLQDHLLGGASIDATGSPLTDEALNAAKNADAVLLGAIGGPKWGTGAVRPEQGILKLRKEMGTFGNLRPCNFAAPSLVESSPLRADVCRGVNFNIIRELTGGIYFGERKEDDGSGYAMDTEPYSRAEIERIIRLAAHLALQHDPPLPVWSLDKANVLATSRLWRKVVTEVMAKEFPQLKIEHQLIDSAAMIMVKNPRQLNGIVVTSNLFGDIISDEASVIPGSLGLLPSASLSGIPDGNSKVNGIYEPIHGSAPDIAGKGIVNPVAAILSVAMMMQYSFGLFAEARAIEQAVSNVIESGVRTGDIGGKATTAEVGDAVAAELEKLLK

SEQ ID NO: 107315 - DNA, 1218 bp, Arabidopsis thaliana
  CDS (1)..(1218)
atggcggcggctctgcagacgaatatccggacggtcaaggttccggctacgttcagagctgtaagtaaacagtcattggcaccctttagagtaagatgtgctgttgcttcccctggtaaaaaacgatacaccatcactctccttcccggagacggcatcggtccggaggttgtctccattgccaaaaatgtgcttcagcaagctggatctttggaaggagtggaatttaacttccgtgagatgcccattggaggagctgctttggatttggtcggagtgcccttgccggaggagactatctcagctgcaaaagaatcagatgcagtgcttcttggagccattggagggtacaaatgggataacaatgaaaaacatctgaggcctgagaaggggttacttcagattcgtgcagctctcaaagtctttgcaaatctgagacctgctacagtcctcccacagttagtggatgcttccaccttaaagagagaggtagcagaaggtgttgatctaatggttgtaagggagcttaaaggaggtatttactttggagagccaaggggcataaagaccaatgaaaatggcgaggaagttgggtttaatactgaggtttatgctgctcacgagattgatagaattgctcgtgttgccttcgagactgctcggaaacggcgtggcaagctgtgttctgttgacaaagctaatgttttggaagcctcaatcttatggaggaaacgagtaacagcattagcctctgaatatcctgatgttgagctgtcacatatgtatgttgacaatgccgcgatgcagcttgttcgtgacccaaaacagtttgacaccatcgtcacaaacaacatttttggtgatatattatccgatgaagcttcaatgatcacaggaagcataggaatgctgccatctgctagtctcagtgattcgggacctggactctttgaacctatacatggttctgcacctgatattgctggacaggataaggcaaacccattggcaaccattctaagcgctgcaatgcttctgaaatacggacttggagaagaaaaggcagccaagagaattgaagacgcagtgttggttgctctgaacaacggattcagaactggagacatatactccgcgggaacaaaactggtgggctgcaaggagatgggagaggaggttctgaagtcagtggactcccaagttccagcttctgtttaa

SEQ ID NO: 107316 - protein, 405 aa, Arabidopsis thaliana
MAAALQTNIRTVKVPATFRAVSKQSLAPFRVRCAVASPGKKRYTITLLPGDGIGPEVVSIAKNVLQQAGSLEGVEFNFREMPIGGAALDLVGVPLPEETISAAKESDAVLLGAIGGYKWDNNEKHLRPEKGLLQIRAALKVFANLRPATVLPQLVDASTLKREVAEGVDLMVVRELKGGIYFGEPRGIKTNENGEEVGFNTEVYAAHEIDRIARVAFETARKRRGKLCSVDKANVLEASILWRKRVTALASEYPDVELSHMYVDNAAMQLVRDPKQFDTIVTNNIFGDILSDEASMITGSIGMLPSASLSDSGPGLFEPIHGSAPDIAGQDKANPLATILSAAMLLKYGLGEEKAAKRIEDAVLVALNNGFRTGDIYSAGTKLVGCKEMGEEVLKSVDSQVPASV

SEQ ID NO: 107317 - DNA, 2119 bp, Candida maltosa
  CDS (816)..(1937)
aggtttgagatcaggtactttggcaccaccattagtagctgggtttggtgaagctgcaagattaatgaaacaagaatctgcatttgacaagaaacatattgagaggttatctactaaattgaagaacggtttgttatccattccatctactcagtttaacggttgtaataacccaacatatcaatacccaggttgtgtgaatgtttcctttgcatacattgaaggggaatctttgttaatggcattgaaagatattgcattgagttctggttctgcatgtacctctgcatctttggaaccatcgtatgttttacatgctttgggtgccgatgatgccttggctcattcttccattagattcggtattggtagattcaccactgaagcagaagttgactatgttattcaagcaattaatgaaagagttgatttcttgagaaagatgtctccattatgggaaatggttcaagaaggtattgacttgaactctatcgaatggagtggacattaaggttttttgtttttttgtaatttgtgttgttatgtgtaattatcgtgtatagagtaatttcggaaattgtactttcgttcatgtatctgaaccagatgaataatacgttcgtattgttgaagaatgactaactcctgtaacggcgtgcgtgggttccgcagccgggttcaattttttttttcttgttcactataaaaatatataataaacgaaaaaaatccgagggactcaggctatgaaatttttcactcaagaattttttttccttcatccttaattcctttattcactacccaaacccacaatgtcagttaaaactaaaactattacaattttaccaggtgatcacgtcggtaccgaaattgtcaatgaagctatcaaagttttagaagcaattgaagctgccactccttaccaaaaaatccatttcgatttcaaacatcatttaatcggtggtgctgccattgatgccactggtgtcccattgccagatgacgcacttgaaagtgccaaaaaatctgatgccgtcttattgggtgctgttggtggaccaaaatgggggactggcgccgttcgtccagaacaaggtttattaaagattcgtaaagaattgaacctttatgctaacatcagaccatgtaactttgccagtgactccttattggaattatccccattgagaccagaagtcgttaaaggtacaaacttgatcattgttcgtgaattagttggtggtatttatttcggtgatcgtgaagaacaagaagaaagtgaagataaacaaaccgcatgggatactgaaaaatacaccgtcgatgaagtcaccagaatcacccgtatggctgccttcatggctttacaacataacccaccattaccaatctggtcattggataaggctaatgttttagcttcttctagattatggagaagaactgtcgataaagtgatttctgaagagttcccaactttgtctgttcaacatcaattgattgactccgccgccatgattttaattcaaaacccaaccaaattgaatggtataatcatcacttctaacatgtttggtgatatcatttccgatgaagcttcagttattccaggttccttgggtttattaccatctgcatctttggcttcattgccagataccaacaccgcttttggtctttatgaaccatgtcacggttctgctcctgatttaccagccaataaagttaacccaattgctactattttatctgctgcttctatgttgagattatctttggattgtgtgaaagaagctgaagctttagaagaagccgtgaaacaagtcttggataaaggtatcagaactgcagatttaagaggtaccagttcagctactgaagttggtgacgcgattgtcgaagctgttactaaaatcttaaaagaaaaagcttaagtaaagtatacacaaaatttaacgaatattattaatacaaaatgaacaccacctaaatacttttttttaaaaatgtaccgactcttctaaaaattgcgataattcaatatcggaaatttctctcaccggtttacttggatcttcggaaataaatctatttgaagtaatggtagccctcactt

SEQ ID NO: 107318 - protein, 373 aa, Candida maltosa
MSVKTKTITILPGDHVGTEIVNEAIKVLEAIEAATPYQKIHFDFKHHLIGGAAIDATGVPLPDDALESAKKSDAVLLGAVGGPKWGTGAVRPEQGLLKIRKELNLYANIRPCNFASDSLLELSPLRPEVVKGTNLIIVRELVGGIYFGDREEQEESEDKQTAWDTEKYTVDEVTRITRMAAFMALQHNPPLPIWSLDKANVLASSRLWRRTVDKVISEEFPTLSVQHQLIDSAAMILIQNPTKLNGIIITSNMFGDIISDEASVIPGSLGLLPSASLASLPDTNTAFGLYEPCHGSAPDLPANKVNPIATILSAASMLRLSLDCVKEAEALEEAVKQVLDKGIRTADLRGTSSATEVGDAIVEAVTKILKEKA

SEQ ID NO: 107319 - DNA, 1068 bp, Selenomonas ruminantium
  CDS (1)..(1068): transl_table=11
atggcatataagattacagttattcccggtgacggcattggccaggaaatcacggattccgccgtggaagtcctgaaagcggcggataagaagttcaatctgggcttggaatttgactaccatgatgccggcggcacggcctatgacaaattcggcacgccgctgccccaggagaccatcgatgcctgcaaggcagcagatggcgtgttgtttggcgctgtgggcggcgataaatgggacaaggtagatccggctaagcgtccggaaaaggctattttaggtttgcgcaaggccctggggctttatgccaacctgcgcccagtaaaggttgccgatgctctggtggagtattctccgttgaagccggaactggtcaaaggcgtggatctcgttatcgtccgtgagctgatcggcggcatctatttcggcgagaaatgcgagtccgaacagcataacggcgcggaacgtgcctgggatctggaaaattactccgtacccgaggtggagcgcatagcaaacctggcctttgaaacggcgaaactccgccggggcaaggtgacttccgttgacaagtcaaatgtgctggccacgtcccgtctctggcgccgcaccgtagccaaggtggcagaaaactatcccgaagtggagtgcaacaatctctatgtggataactgtgccatgcagattgcagtaaaccccacgcagtttgacgttatcgtcacgggcaatctcttcggggatatcctttcggacgaggcggctgtggtaggcggctccattggtatgctgccgtccgcatccatcggcgaatgcacgagcctttatgagccgattcatggcagtgcgccagatattgcggggcagggcattgccaatcccatcggtacgatcctgtcggcggccatgctgctcagatattccctgcatgaagaggcggcagccgatgccattgaggcggctgtggacaaagccctgggtgagggctaccgcacgccggacctttggaaggaaggctttacgaaggtcaataccagcgaaatcaccaaaatcatcagcgagagggtgtaa

SEQ ID NO: 107320 - protein, 355 aa, Selenomonas ruminantium
MAYKITVIPGDGIGQEITDSAVEVLKAADKKFNLGLEFDYHDAGGTAYDKFGTPLPQETIDACKAADGVLFGAVGGDKWDKVDPAKRPEKAILGLRKALGLYANLRPVKVADALVEYSPLKPELVKGVDLVIVRELIGGIYFGEKCESEQHNGAERAWDLENYSVPEVERIANLAFETAKLRRGKVTSVDKSNVLATSRLWRRTVAKVAENYPEVECNNLYVDNCAMQIAVNPTQFDVIVTGNLFGDILSDEAAVVGGSIGMLPSASIGECTSLYEPIHGSAPDIAGQGIANPIGTILSAAMLLRYSLHEEAAADAIEAAVDKALGEGYRTPDLWKEGFTKVNTSEITKIISERV

SEQ ID NO: 107321 - DNA, 1215 bp, Arabidopsis thaliana
  CDS (1)..(1215)
  misc_feature (800)..(800): s is g or c
atggcggcgtttttgcaaactaacatccgtctggagatcataccgggaagatacagttctctcaccgatcataagtttcgtgcgccgtatcgaattaggtgcgccgccgcttcaccggtgaaaaaacggtataacatcactctgcttcccggcgatggtatcggtccagaagttatatctgttgctaagaatgtgcttcagaaagctggatttctccaaggactagagtttgatttccaggagatgcctttcggcggagcagctttggatttggtcggagttccattgccggaggaaacttccactgctgctaaacagtctgatgccattcttcttggagctatcggagggtacaaatgggacaagaatgagaaacatctgagacctgagatgggtctgcttaacattcgaagagatctcaatgtctttgctaatttgagacctgctacagttttaccacagctagttgatgcttccacactgaagaaagaagtagcacaaggtgttgatatgatgattgtaagggagctcactggaggtatttactttggagagccaagaggcattacgatcaacgaaaatggcgaagaagtcggttttaatacagagatctacgctgctcacgagattgacagaattgctcgtgttgcattcgagactgctaggaaaaggcgtggcaagctgtgttctgttgacaaagccaatgtcttggatgcatcaatattgtggaggaaaagagtaacagctttagcctctgaatatccagatgttgaactatcacatatgtatgtcgataatgstgcgatgcagcttgtccgtgacccgaaacagtttgacacaatcgtcaccaataacatttttggtgatatattgtctgatgaagcttcaatgatcactggtagcattgggatgcttccatctgcaagtcttggtgaatcgggacctggactctttgaacctatacatggttcagcaccagatatagctggacaagacaaggcaaacccattggccaccattctcagtgcggcgatgcttctcaagtatggacttggagaagaaaaggctgcaaagatgattgaagacgcggtcgtggatgctctgaacaaaggtttcagaaccggagacatctactcccccggaaataaactggtgggatgcaaggaaatgggtgaggaggttctcaaatcagtggactccaaagttcctgtttaa

SEQ ID NO: 107322 - protein, 404 aa, Arabidopsis thaliana
  misc_feature (267)..(267): The Xaa at location 267 stands for Ala, or Gly.
MAAFLQTNIRLEIIPGRYSSLTDHKFRAPYRIRCAAASPVKKRYNITLLPGDGIGPEVISVAKNVLQKAGFLQGLEFDFQEMPFGGAALDLVGVPLPEETSTAAKQSDAILLGAIGGYKWDKNEKHLRPEMGLLNIRRDLNVFANLRPATVLPQLVDASTLKKEVAQGVDMMIVRELTGGIYFGEPRGITINENGEEVGFNTEIYAAHEIDRIARVAFETARKRRGKLCSVDKANVLDASILWRKRVTALASEYPDVELSHMYVDNXAMQLVRDPKQFDTIVTNNIFGDILSDEASMITGSIGMLPSASLGESGPGLFEPIHGSAPDIAGQDKANPLATILSAAMLLKYGLGEEKAAKMIEDAVVDALNKGFRTGDIYSPGNKLVGCKEMGEEVLKSVDSKVPV

SEQ ID NO: 107323 - DNA, 1098 bp, Phaeosphaeria nodorum
  CDS (1)..(1098)
atgccttcccataacattgttgttctcgctggtgacggtgtcggccctgaggtcgtcgcagaggcgttcaagatcctcaaggttgtcgagaagcacacagacaacacattcaacttccaagagcacctgtttggaggttgctcaatagatgcgcacaacaatcctctcacagatgaagcactcgcagcagcaaaaggcgccgatgcgatcattctcggtgctgtcggcggaccaaaatggggaactggaaaggtgcgtcctgaacaaggtatcctgaagctccgcaaagagctcggaacgttcggaaacctacgaccatgcttcttcgcgtccgactcgctcgtcgactcatcacccctcaaagccgaaaacgtccgcggcgtaaacttcaacatcatccgcgaactcactggaggcatatactttggcgagaggaaagaggatgagggcgacggcaaggccatggacacggagccatacagcgtcgaggagattgagcgcgttgtgcggttagcgggtagcctcgcatctgctgagaacccgccggttcccgtctggagtttggacaaggcaaacgttcttgcgacttcgaggttatggaggaagacattcgagcgcatcatgaaggacgagtacccacacctcaagtctggaacccacctgattgattcggcggccatgcttatgatcaagaacccgagagcgctgaacggtgttgtagttacaagtaatctgttcggtgacattatcagtgatgaggctagtgttatcccgggaagtctgggtctgctaccaagtgccagtttgggcggtattccagatggcaagacgaagttgaacggcatctacgagcccattcacggttccgcacccgatattgctggccagggcatcgtgaaccccatcgcgaccatcctgtccatcagtatgatgttcaagtactcgctgtgtctgcctgagcttgcgctgaagattgacgaggcaacaaaaatcaccatcgacaagggcgtacgaaccggtgatatcggaggaacatcgaaaacggccgaggtcggtgatgcgatagctgctgagctcgagactctgttgaagaagtag

SEQ ID NO: 107324 - protein, 365 aa, Phaeosphaeria nodorum
MPSHNIVVLAGDGVGPEVVAEAFKILKVVEKHTDNTFNFQEHLFGGCSIDAHNNPLTDEALAAAKGADAIILGAVGGPKWGTGKVRPEQGILKLRKELGTFGNLRPCFFASDSLVDSSPLKAENVRGVNFNIIRELTGGIYFGERKEDEGDGKAMDTEPYSVEEIERVVRLAGSLASAENPPVPVWSLDKANVLATSRLWRKTFERIMKDEYPHLKSGTHLIDSAAMLMIKNPRALNGVVVTSNLFGDIISDEASVIPGSLGLLPSASLGGIPDGKTKLNGIYEPIHGSAPDIAGQGIVNPIATILSISMMFKYSLCLPELALKIDEATKITIDKGVRTGDIGGTSKTAEVGDAIAAELETLLKK

SEQ ID NO: 107325 - DNA, 1137 bp, Schizosaccharomyces pombe; identical to SEQ ID NO: 37291
  CDS (1)..(1137)

SEQ ID NO: 107326 - protein, 378 aa, Schizosaccharomyces pombe; identical to SEQ ID NO: 37292

SEQ ID NO: 107327 - DNA, 1110 bp, Saccharomyces cerevisiae; identical to SEQ ID NO: 37293
  CDS (1)..(1110)

SEQ ID NO: 107328 - protein, 369 aa, Saccharomyces cerevisiae; identical to SEQ ID NO: 37294

SEQ ID NO: 107329 - DNA, 1134 bp, Drosophila melanogaster; identical to SEQ ID NO: 37295
  CDS (1)..(1134)

SEQ ID NO: 107330 - protein, 377 aa, Drosophila melanogaster; identical to SEQ ID NO: 37296

SEQ ID NO: 107331 - DNA, 1125 bp, Arabidopsis thaliana; identical to SEQ ID NO: 37299
  CDS (1)..(1125)

SEQ ID NO: 107332 - protein, 374 aa, Arabidopsis thaliana; identical to SEQ ID NO: 37300

SEQ ID NO: 107333 - DNA, 1167 bp, Bradyrhizobium japonicum
  CDS (28)..(1167): transl_table=11
gtggattcactttgcaggacatcaggcatgaacacgctctcgaacacgatcacggtggccgtggtcggtggtgaaggcatcggtccggaagtgaccgatcagtcccatcgcattctcaaatggttctcggaccggcgcggcgctccggtgattctgcgcgaagcgcaatacggtctgatcccgtatctcgcgacaggcaaggtgctgccggatgacaccgtcgaggcgatggaggaggccgacgcgatcctctggggcgcgaccggtggcccggagacgacggaggtccctccggccgcgcgcaaggcgggaagcctcttgtcgctgcgcagcaaatacgacctctatgccaatctccggcccatcgtcgccaatccggcgctggcggactccgcgccgctcaaggccgcggtgctgaaggacgtcgacttcatcatcatccgcgagctcaccagcggcatctatttcggcgagccgcgcggcatcgaaacgctgcccgatggccagcgccgcggcttcaacacccagcaatacaccaccagccagatccgccgggtggcgcgaaccgcgttcgaactggcacggacgcgcaagggccgggtctgctccgtcgacaaggccaatgtgcttgagaccagtgtgctgtggcgcgaggaggtcaccgcgctgcatgaagcggagttttccgatgtcgagctgacgcatctctatgtcgacaacgccgcgatgcagatcgtgcgggcaccctcgcaattcgacgtcatggtgacctgcaatatcttcggagacattctctccgattgcgcggcgatggcgtcgggctcgctcggcatgctgccgtcggtctcgctcgggccgccggaccggctcggacgtcgcaaggcgctctatgagccggttcacggcagcgcgcctgacattgcgggcaagggcatcgccaatccacttggctcgatcctcagcgtcgcaatgatgttgcgcattaccctccatcgacctgaagatgccgcgctgctggagaaggccgtggatacggccctggccgccggcgcaagaacggccgatatcgccgaacccggcgcaaaaagactttcgacccaggagatgggcgatgcggtgctgaacgcgctcgacaaggtggtcggcaaggagagggagcacgcgtga

SEQ ID NO: 107334 - protein, 379 aa, Bradyrhizobium japonicum
MNTLSNTITVAVVGGEGIGPEVTDQSHRILKWFSDRRGAPVILREAQYGLIPYLATGKVLPDDTVEAMEEADAILWGATGGPETTEVPPAARKAGSLLSLRSKYDLYANLRPIVANPALADSAPLKAAVLKDVDFIIIRELTSGIYFGEPRGIETLPDGQRRGFNTQQYTTSQIRRVARTAFELARTRKGRVCSVDKANVLETSVLWREEVTALHEAEFSDVELTHLYVDNAAMQIVRAPSQFDVMVTCNIFGDILSDCAAMASGSLGMLPSVSLGPPDRLGRRKALYEPVHGSAPDIAGKGIANPLGSILSVAMMLRITLHRPEDAALLEKAVDTALAAGARTADIAEPGAKRLSTQEMGDAVLNALDKVVGKEREHA

SEQ ID NO: 107335 - DNA, 1053 bp, Dechloromonas aromatica
  CDS (1)..(1053): transl_table=11
atgaagatttgtgttctgccgggtgacggcattggtcctgaaattaccgctcaagcggtgcgtgtgctgaattcgctcgatctcaagttcgagatggaagaggcgttgctcggtggtggtgctgtcgatgcgactggcaatccgtatcccgaagccacccagaagctggctcgcgctgctgacgctgtgctgctcggtgccgttggtggccccaagtgggactcgctgccgcgcgaacagcgcccggaacgcggcctgctgggcatccgcaaggatctgaacttgttcgccaacctgcgtccggccattctctacccggaactggccaatgcttcgacgttgaagccggaagtggttgccgggctggatatcctgatcatccgcgaactgaccggcgatatctatttcggccagccgcgtggtgtgcgcgaagaaaatggcgaacgcgtcggcttcaacaccatggtctatagcgagtcggaaatccgccgcattggccatgtcgccttccaggccgcccaaaagcgcgacaaaaggctgtgttcagtcgacaagatgaacgtgctggaatgcacccagctctggcgcgacgtgatgatcgagatttcacgcgattacccggatgtcgaactcagccacatgctggtcgataacgctgccatgcaactggtcaaggcgccgaagcagttcgacgtgatggtcaccggcaacatgtttggcgacatcctgtccgacgaagcttcgatgctgaccggttcgatcggcatgctgccgtcagcctcgctggacgacaagaacaagggactctacgagccatcgcacggctcggcgccggacatcgccggtaagggcgtcgccaatccgctggcgaccatcctgtctgcggcgatgatgctgcgttacaccttcggcctcgaagagcaggcacttcgtgtcgaaaacgcggtcaaaaaagtcttggcccaaggttatcgtactggcgacatctacgagcgtggcacgaacaaggtcggcaccagggaaatgggcgacgccgtgctggcggcgctgtaa

SEQ ID NO: 107336 - protein, 350 aa, Dechloromonas aromatica
MKICVLPGDGIGPEITAQAVRVLNSLDLKFEMEEALLGGGAVDATGNPYPEATQKLARAADAVLLGAVGGPKWDSLPREQRPERGLLGIRKDLNLFANLRPAILYPELANASTLKPEVVAGLDILIIRELTGDIYFGQPRGVREENGERVGFNTMVYSESEIRRIGHVAFQAAQKRDKRLCSVDKMNVLECTQLWRDVMIEISRDYPDVELSHMLVDNAAMQLVKAPKQFDVMVTGNMFGDILSDEASMLTGSIGMLPSASLDDKNKGLYEPSHGSAPDIAGKGVANPLATILSAAMMLRYTFGLEEQALRVENAVKKVLAQGYRTGDIYERGTNKVGTREMGDAVLAAL

SEQ ID NO: 107337 - DNA, 1218 bp, Arabidopsis thaliana
  CDS (1)..(1218)
atggcggcggctctgcagacgaatatccggacggtcaaggttccggctacgttcagagctgtaagtaaacagtcattggcaccctttagagtaagatgtgctgttgcttcccctggtaaaaaacgatacaccatcactctccttcccggagacggcatcggtccggaggttgtctccattgccaaaaatgtgcttcagcaagctggatctttggaaggagtggaatttaacttccgtgagatgcccattggaggagctgctttggatttggtcggagtgcccttgccggaggagactatctcagctgcaaaagaatcagatgcagtgcttcttggagccattggagggtacaaatgggataacaatgaaaaacatctgaggcctgagaaggggttacttcagattcgtgcagctctcaaagtctttgcaaatctgagacctgctacagtcctcccacagttagtggatgcttccaccttaaagagagaggtagcagaaggtgttgatctaatggttgtaagggagcttacaggaggtatttactttggagagccaaggggcataaagaccaatgaaaatggcgaggaagttgggtttaatactgaggtttatgctgctcacgagattgatagaattgctcgtgttgccttcgagactgctcggaaacggcgtggcaagctgtgttctgttgacaaagctaatgttttggaagcctcaatcttatggaggaaacgagtaacagcattagcctctgaatatcctgatgttgagctgtcacatatgtatgttgacaatgccgcgatgcagcttgttcgtgacccaaaacagtttgacaccatcgtcacaaacaacatttttggtgatatattatccgatgaagcttcaatgatcacaggaagcataggaatgctgccatctgctagtctcagtgattcgggacctggactctttgaacctatacatggttctgcacctgatattgctggacaggataaggcaaacccattggcaaccattctaagcgctgcaatgcttctgaaatacggacttggagaagaaaaggcagccaagagaattgaagacgcagtgttggttgctctgaacaacggattcagaactggagacatatactccgcgggaacaaaactggtgggctgcaaggagatgggagaggaggttctgaagtcagtggactcccaagttccagcttctgtttaa

SEQ ID NO: 107338 - protein, 405 aa, Arabidopsis thaliana
MAAALQTNIRTVKVPATFRAVSKQSLAPFRVRCAVASPGKKRYTITLLPGDGIGPEVVSIAKNVLQQAGSLEGVEFNFREMPIGGAALDLVGVPLPEETISAAKESDAVLLGAIGGYKWDNNEKHLRPEKGLLQIRAALKVFANLRPATVLPQLVDASTLKREVAEGVDLMVVRELTGGIYFGEPRGIKTNENGEEVGFNTEVYAAHEIDRIARVAFETARKRRGKLCSVDKANVLEASILWRKRVTALASEYPDVELSHMYVDNAAMQLVRDPKQFDTIVTNNIFGDILSDEASMITGSIGMLPSASLSDSGPGLFEPIHGSAPDIAGQDKANPLATILSAAMLLKYGLGEEKAAKRIEDAVLVALNNGFRTGDIYSAGTKLVGCKEMGEEVLKSVDSQVPASV

SEQ ID NO: 107339 - DNA, 1077 bp, Bordetella bronchiseptica
  CDS (1)..(1077): transl_table=11
atgactcatcagatcgcagtccttcccggcgatggcatcggccctgaaatcgtcgagcaggccgagcgcgtgctcaaggcgctggacctgccgctcgaactgcgccaggccccggtgggcggcgcggccttcgaccaattcgagcatcccttgccgccggccacgctggaattggcgcaaggctcgcacgcggtgctgttcggcgccgtgggcgactggaagtacgacacgctgccgcgcgaattccgccccgagcaggcgatcctgggcctgcgcaaggcgctcgggctgttcgccaacctgcgcccggcgattctctatcccgagctggccagcgcctcctcgctcaagcccgagatcgtgtccggtctcgacatcctgatcatccgcgaactgaccggcgacatctatttcggtacgccgcgcggcgtgcgcacggccgccgatggcgccttcgccggcgagcgcgaaggctacgacaccatgcgctacgccgagtcggaagtgcggcgcattgcccgcatcggcttcgagtcggcccgcaagcgcaacaagaagctgtgcagcgtcgacaaggccaacgtgctggaaacctcgcagttctggcgcgacctggtgatcgaggtcagccgggattatcccgacgtggaactgtcgcatatgtatgtcgacaacgccgcgatgcagctggtgcgcaatccgcgccagttcgacgtgatcgtgaccggcaacctgttcggcgacattctttcggatgaggccgccatgctgacgggctcgatcggcatgctgccttcggcctcgctgaacgccgccggccagggcctgtacgagcccagccacggatcggcgcccgacatcgccggccagggcatcgccaatccgctggccaccatcctgtcggccgccatgctgctgcgctattcgctgaatctggccccgcaggccgaccgcgtcgaggccgccgtgcgcaaggtgctggccgacggcctgcgcaccgccgatatccacgaggccggcacgaccaaggtgtccacctcgcagatgggcgacgccgtgctcaaggccctgggctga

SEQ ID NO: 107340 - protein, 358 aa, Bordetella bronchiseptica
MTHQIAVLPGDGIGPEIVEQAERVLKALDLPLELRQAPVGGAAFDQFEHPLPPATLELAQGSHAVLFGAVGDWKYDTLPREFRPEQAILGLRKALGLFANLRPAILYPELASASSLKPEIVSGLDILIIRELTGDIYFGTPRGVRTAADGAFAGEREGYDTMRYAESEVRRIARIGFESARKRNKKLCSVDKANVLETSQFWRDLVIEVSRDYPDVELSHMYVDNAAMQLVRNPRQFDVIVTGNLFGDILSDEAAMLTGSIGMLPSASLNAAGQGLYEPSHGSAPDIAGQGIANPLATILSAAMLLRYSLNLAPQADRVEAAVRKVLADGLRTADIHEAGTTKVSTSQMGDAVLKALG

SEQ ID NO: 107341 - DNA, 1113 bp, Bradyrhizobium japonicum
  CDS (1)..(1113): transl_table=11
atggcgacccacaaactgctgctgctccccggcgacggtatcggccccgaggtgatgggcgaggtgaagcggctgatcgactggctcaattcggccgggatcgccaaattcgagaccgacaccggcctcgtcggcggctccgcctatgacgcgcacaaggtgtcgatctccgagggcgacatggccaaggcgctggccgccgacgccatcatcttcggcgcggtcggtggtcccaagtgggatgccgttccctacgaggtgcgccccgaagccggcctgctgcgcctgcgcaaggatctcggcctgttcgccaatctccgccccgcggtgtgctaccccgcgctggccgatgcctcgagcctgaagcgcgaggcggtcgagggcctcgacatcatgatcgtgcgcgagctcaccggcggcgtctatttcggcgagcccaagaccatcaccgatctcggcaacggccagaagcgcgccatcgatacccaggtctacgacacctatgagatcgagcgcatcgcccgcgtcgccttcgaccttgccaagaagcgcaagaacaaggtgacgtcgatggagaagcgcaacgtcatgaaatcgggcgtgctctggaacgaggtcgtgacccaggtccacaagcgcgaatatcccgacgtcacgctcgagcatcagctcgccgattccggcggcatgatgctggtgaagtggccgaagcagttcgacgtcatcgtcacggacaatctgttcggcgacatgctgtccgacatcgcggcgatgctgaccggctcgcttggcatgctgccctcggcctcgctcggcgaggtcgacgtcaagagcaagaagcgcaaggcgctgtacgagcccgtgcacggctcggcgcccgacatcgccggcaaggggctcgccaatccgatcgcgatgatctcgtcgttcggcatggcgctgcgctactccttcgacatgggcgcgctcgccgacaaggtcgatgccgcgatcgccgccgtgctggccagcggcctgcgcaccgccgacatcaagtcggaaggcaccacggccgcctcgaccacgcagatgggcgaagcgatcctgaaggaattgcagaagctgcacgcgtaa

SEQ ID NO: 107342 - protein, 370 aa, Bradyrhizobium japonicum
MATHKLLLLPGDGIGPEVMGEVKRLIDWLNSAGIAKFETDTGLVGGSAYDAHKVSISEGDMAKALAADAIIFGAVGGPKWDAVPYEVRPEAGLLRLRKDLGLFANLRPAVCYPALADASSLKREAVEGLDIMIVRELTGGVYFGEPKTITDLGNGQKRAIDTQVYDTYEIERIARVAFDLAKKRKNKVTSMEKRNVMKSGVLWNEVVTQVHKREYPDVTLEHQLADSGGMMLVKWPKQFDVIVTDNLFGDMLSDIAAMLTGSLGMLPSASLGEVDVKSKKRKALYEPVHGSAPDIAGKGLANPIAMISSFGMALRYSFDMGALADKVDAAIAAVLASGLRTADIKSEGTTAASTTQMGEAILKELQKLHA

SEQ ID NO: 107343 - DNA, 1230 bp, Arabidopsis thaliana
  CDS (1)..(1230)
atggcggcgtttttgcaaacgaacatcagtctgaatgcgatcaagatcgtcccggggaaatacagttctctcaccgatcatcagtttcgtgcgccgtatcgaattaggtgcgccgccgcttcacctgggaaaaaacggtataacatcgctctgcttcccggagacggtatcggtccagaagttatctctgttgctaagaatgtgcttcagaaagctggatctctcgaaggactggagtttgatttcaaggagatgcctgtcggaggagcagccttggatttggttggagttccattgccggaggaaactttcacggctgcaaaactatctgatgccattcttcttggagctattggagggtacaaatgggacaagaatgagaaacatctgagacctgagatggctctgttttaccttagaagagatctcaaagtctttgctaatttgagacctgctacagttttgccacagctagttgatgcttccacactgaagaaagaagtagcagaaggtgttgatatgatgattgttagggagctcacaggaggtatttactttggagagccaagaggcattacgatcaatgaaaatggcgaagaagtcggcgttagtacagagatctacgctgctcacgagattgacagaattgctcgtgtagcattcgagactgctaggaaaaggcgtggcaaactttgttctgttgacaaagccaatgtgttggatgcatcaatattgtggaggaaaagagtaacagctttagcctctgaatatccagatgttgaactatcacatatgtatgtcgataatgctgcaatgcagcttattcgtgacccgaaacagtttgacacaatcgttaccaataacatttttggtgatatattgtctgatgaagcttcaatgatcactggaagcattggaatgcttccatctgctagtctcggtgaatcgggacctggactctttgaacctatacatggttcagcaccagatatagctggacaagacaaggcaaacccattggccaccattctcagcgcggcgatgcttctgaagtatggacttggagaagaaaaggctgcaaagaggattgaagacgctgtcgtggatgctctgaacaaagggttcagaaccggagacatctactcccctggaaataaactggtgggatgcaaggaaatgggtgaggaggttctcaaatcagtggaatccaaagttccagctactgtttaa

SEQ ID NO: 107344 - protein, 409 aa, Arabidopsis thaliana [sequence omitted]

SEQ ID NO: 107345 - DNA, 1238 bp, Aspergillus niger
  CDS (8)..(1099)
gctcatcatgcccgcctacaacattgtcgttttcgccggtgaccactggggtcccgaggttaccgccgaggccatcaaggtcctccgcgtcatcgagaagagccgcgatgacatcaccctcaacctccaggaccacctgctgggcggtgcctccattgacgccacagcgaaccctctgactgacgaggccctggccgcggccaagaatgccgatgccgttctccttggtgccatcggtggaccgaaatggggcaccggcgccgtccgcccggagcagggtctcctcaacgttcgcaaagagatgggcacattcggcaacctgcgtccctgcaacttcgcggccccctccttggtcgaacactcccccctgaaagcctccgtctgcgagggcgtcgacttcaacatcatccgcgaactgacgggcggaatctacttcggtgaccgcaagaagatgacggcagcggctacgatggacacggagccgtactcgcgcgccgagatcgagcggatcacccctcgcgcccaccttgctctgcagcacaacccccctctccccgtgtggagtctggataaggccaacgtgctggctacgagtcggttgtggaggaagaccgtcaccgagatcatggcgaaggagttcccacagttgaagattgagcaccagcttattgattctgcggctatgattatggttaagaacccccgtcagctgaacggcattattgtcacgagtaacctgttcggtgatatcatcagtgatgaggctagtgttattcctggttctctgggattgttgcctagtgctagtttgagtggtatccctgatggtaagggtagggttaatggtatttatgagcctattcatggctctgcccctgatattgctggcaagggcatcgtcaaccctgtcgctgctatcctgtccgtcgctatgatgatgcagtactctttcggtcgcttcgatgaggcccgcgctattgaggctgctgtccgcaatgtccttgagtccggtgtccgtaccggtgacattggcggtaaggctaccactagcgaggttggtgatgccgttgcggccgagctggagaagttgttgaagtagattaaaccgtgcagtgtttgcatgattgagttttcatgatgtgcgaaaagtattgattgttgggcgggtgaccacgcatgagatatgactggatctaaatgaatataataattacattactactactcaaaaaaaaaaa

SEQ ID NO: 107346 - protein, 363 aa, Aspergillus niger
MPAYNIVVFAGDHWGPEVTAEAIKVLRVIEKSRDDITLNLQDHLLGGASIDATANPLTDEALAAAKNADAVLLGAIGGPKWGTGAVRPEQGLLNVRKEMGTFGNLRPCNFAAPSLVEHSPLKASVCEGVDFNIIRELTGGIYFGDRKKMTAAATMDTEPYSRAEIERITPRAHLALQHNPPLPVWSLDKANVLATSRLWRKTVTEIMAKEFPQLKIEHQLIDSAAMIMVKNPRQLNGIIVTSNLFGDIISDEASVIPGSLGLLPSASLSGIPDGKGRVNGIYEPIHGSAPDIAGKGIVNPVAAILSVAMMMQYSFGRFDEARAIEAAVRNVLESGVRTGDIGGKATTSEVGDAVAAELEKLLK

SEQ ID NO: 107347 - DNA, 1116 bp, Aspergillus niger
  CDS (1)..(1116)
atgtctggtacaagagcctataacatccttgtccttcccggcgacggcatcggcccggaggtcatggccgaagccataaaggtcctgcgaacctttaacagttcctccatgcagttccacctgcaagaagaactcattggcgggatctctatcgatacccatggtcattccgtcacgcaacccgtcaaagacgctgcggtcgctgcagacgctgtactcttcgcagcagtcggggggtccaaggtggatcatatcaggcgcggactcgacgggccagaggggggtctgttacaggtacgcaaagccatggacatatacgcaaatttgagaccgtgttcagtggatgtaccgagtcgggaaattgcgagggacttttcacctttcaggcaggaggttatcgagggggtcgattttgtagtggtgcgggagaattgtggaggggcctattttggcaaaaaggttgaggaagagaattatgcaatggatgagtggggttattccaccaccgaaattcaacgcattgctcgtctcgctgcagagcttgccctgcggcatgacccgccgtggcctgtgatttctcttgacaaagccaatgtactggcctcgtcgcgtctgtggcgtcgcgttgtcgagaacacaatttcagtagagtatccacaagtcaaattggtccaccagctcgcagattcagcatcattgatcatggcaaccgatccacgagtcctcaacggtgtgattctggcagacaataccttcggagacatgttatcagaccaggcggggtcactgattggaacattaggtgtcctgcctagtgccagcttggatggtcttcctcatcctggcaagcaggaaaaggttcgcggtctatatgaaccaacgcatggctctgctccgacaatagccggtaagaacatcgcgaatccaactgcgatgatcctctgtgtgagcctgatgttccggtactctttcaatatggagaacgaagcgcgccaaattgaggatgccgtgcgtgccgttttggataggggacttcgcactcctgaccttggtggaaattcaagcactcaagagtttggagacgccgttgttgcagcactgcaagggaaatattag

SEQ ID NO: 107348 - protein, 371 aa, Aspergillus niger
MSGTRAYNILVLPGDGIGPEVMAEAIKVLRTFNSSSMQFHLQEELIGGISIDTHGHSVTQPVKDAAVAADAVLFAAVGGSKVDHIRRGLDGPEGGLLQVRKAMDIYANLRPCSVDVPSREIARDFSPFRQEVIEGVDFVVVRENCGGAYFGKKVEEENYAMDEWGYSTTEIQRIARLAAELALRHDPPWPVISLDKANVLASSRLWRRVVENTISVEYPQVKLVHQLADSASLIMATDPRVLNGVILADNTFGDMLSDQAGSLIGTLGVLPSASLDGLPHPGKQEKVRGLYEPTHGSAPTIAGKNIANPTAMILCVSLMFRYSFNMENEARQIEDAVRAVLDRGLRTPDLGGNSSTQEFGDAVVAALQGKY

SEQ ID NO: 107349 - DNA, 1113 bp, Agrobacterium tumefaciens
  CDS (1)..(1113): transl_table=11
atgacagtccgttcgcttttcctgctgcccggtgatggtatcggccctgaagccatgactgaggtccgcaagctgatcgaatatatgaacagcgcgcacaatgccggctttaccgtttctgagggcctcgtcggcggttccgcttacgacgcgcatggcgtcgcgatttccgatgcggacatggaaaaggcgcttgccgccgatgcaatcctgttcggtgccgttggcggcccgaaatgggatggcgtgccgtatgagcatcgcccggaagccggactcctgcgcctgcgcaaggatctcgaacttttcgccaatctgcgcccggccatctgctatccggcgctcgctgccgcctcatcgctaaagccggaactggtcgagggtctcgatatcctcatcgttcgcgaactgaccggcggcgtttatttcggtgaaccgaagcagatcatcgatctgggcaacggccagaagcgcggtatcgacacgcagatctacgacaccttcgagatcgagcgcatcgccagcgtcgctttcgaactggcccgcagccgcgacaaccgcgtttgctcgatggaaaagcgcaacgtgatgaaatcgggcgttttgtggaaccaggtcgtcaccgaaacccacgcggccaaatacaaggacgtgcagctagaacatatgctagccgatgccggcggcatgcagctggtgcgcaagcccaagcagttcgacgtgatcgtcaccgacaacctcttcggcgacatgctgtccgacgtggccgccatgctgactggctcgctcggcatgctgccatcggcctcgctcggcgcacctgatgccaagaccggcaagcgcaaggccatgtatgagccggtgcacggttctgcccctgacatcgctggcaagagcattgccaacccgatcgccatgatcgcgtccttcgccatgtgcctgcgctactcgttcaacatggtggacgaagccaccaagctcgaggcggcgatcgccaatgtattggacaagggcatccgcaccgccgacatcatggccgacggttgccgtcaggtcggcacgtctgacatgggtgacgcggttctcgccgaattcaaggcgctttcggcgtaa

SEQ ID NO: 107350 - protein, 370 aa, Agrobacterium tumefaciens
MTVRSLFLLPGDGIGPEAMTEVRKLIEYMNSAHNAGFTVSEGLVGGSAYDAHGVAISDADMEKALAADAILFGAVGGPKWDGVPYEHRPEAGLLRLRKDLELFANLRPAICYPALAAASSLKPELVEGLDILIVRELTGGVYFGEPKQIIDLGNGQKRGIDTQIYDTFEIERIASVAFELARSRDNRVCSMEKRNVMKSGVLWNQVVTETHAAKYKDVQLEHMLADAGGMQLVRKPKQFDVIVTDNLFGDMLSDVAAMLTGSLGMLPSASLGAPDAKTGKRKAMYEPVHGSAPDIAGKSIANPIAMIASFAMCLRYSFNMVDEATKLEAAIANVLDKGIRTADIMADGCRQVGTSDMGDAVLAEFKALSA

SEQ ID NO: 107351 - DNA, 1089 bp, Anabaena variabilis
  CDS (1)..(1089): transl_table=11
atgactcagaactatcgaattaccctactccctggcgatggaattggccctgaaattatggcagtggcggtagatgtgctgaaagtcgtagggcagcaatttgatattcagtttgatttccaagaagctttgattggcggtgcagcgattgacgcgactggcgaacctctgccatcggctactttagatacttgtcgccaaagtgatgctgtattactcgctgctattggtggttataagtgggattccttaccccctcaccaacgcccagaagggggcttgctgggattgcgggcgggattagaattatttgccaatttacgcccagcccaaattttaccgcagttaattgacgcttcgactttgaagcgggaagttgtggaaggtgtagatattatggtggtgcgggaactcactggtggcatttactttggtaaacccagaggtatctttactactgagactggtgagaaacgtggtgttaatacgatggtttatacagaatcagaaattgaccgaattggccggatagcttttgagactgcgcgcaaacgtcggggcaaactctgttcagtagataaagctaatgtattagatgtatcccaattgtggcgcgatcgcatcaccaaactttcccaagaatacccggatgtggaactttcccatctatatgtagataatgccgctatgcaattggtacgcgctcctaagcagttcgataccatcgttacaggcaacttgtttggggatattctctcggatgcggctgctatgctcacgggtagtattggaatgttaccttcagctagccttggggcttctgggccgggagtatttgagccagtccacggttctgccccagatatcgcaggacttgataaagccaacccccttgcccaagttttaagtgcggcgatgatgttgcgttacgctttaaaccaaccacaagcagcagacaaaatagaacaggctgtgttacaagttttagagcaaggcgatcgcacaggggatataatgtcggtgggtatgaatcttttgggttgccgggctatgggtgactccctcattaaagcattagaaaaatcataa

SEQ ID NO: 107352 - protein, 362 aa, Anabaena variabilis
MTQNYRITLLPGDGIGPEIMAVAVDVLKVVGQQFDIQFDFQEALIGGAAIDATGEPLPSATLDTCRQSDAVLLAAIGGYKWDSLPPHQRPEGGLLGLRAGLELFANLRPAQILPQLIDASTLKREVVEGVDIMVVRELTGGIYFGKPRGIFTTETGEKRGVNTMVYTESEIDRIGRIAFETARKRRGKLCSVDKANVLDVSQLWRDRITKLSQEYPDVELSHLYVDNAAMQLVRAPKQFDTIVTGNLFGDILSDAAAMLTGSIGMLPSASLGASGPGVFEPVHGSAPDIAGLDKANPLAQVLSAAMMLRYALNQPQAADKIEQAVLQVLEQGDRTGDIMSVGMNLLGCRAMGDSLIKALEKS

SEQ ID NO: 107353 - DNA, 1095 bp, Aquifex aeolicus
  CDS (1)..(1095): transl_table=11
atgaaaaaatacaagatagcagtactcaaaggagacgggataggtccagaaatagtggaacaagccctcagagttcttgacaaaataggtgagatttacggcgttgagtttgagtatagagaggggctaataggcggtgaggcgatagacaaaacgggagatcctcttcccgaagaaactctgaagatatgcaaagaatcggacgctatactccttggtgcagtcgggggaccgaagtgggacaaccttcctaccgataaaagaccggagaagggacttttaaggattagaaaggaactcgacctttacgcaaatctcagacctgcaaaagtctgggacgcactgatatcctcttctcctttaaaagaagaagtcgtaaaaggaacggacatgatcgttataagggaacttacctctggaatatactatggagagccgagggggatttttgaagaaaacggaaagaggtacgcgataaacactatgaagtacacagaagacgaaataaggaggatagttagaaaaggatttgaaattgcaaggaaaaggagaaagaagttaacgagcgtggataaggcaaacgtccttgaagtaagtgccctttggagacagattgtagaggaagaaaaagaaaactacccggacgttgaactggaacacctctacattgacaactgtgctatgcaactcgtaaggagaccaacaagctttgacgttatagtcacgggaaatatcttcggtgatatcctatccgacgaagcgggagttgttgtgggaagcctcggaatgcttccttctgcgagcataggggacaggtacgcactttacgagccggttcacggctctgctcccgacatagcgggtaaaggtatagcaaatccgatagccactatactttccgccgccatgatgctcaagtactcctttaacatggacaaggcccacgacctgatagagaaggcaatagaggaaacactaaatcagggctacagaacgccggatatatactctgagggttgcataaaagtcggcacgaaggaaataactgacaagattttagaaaacttagagaggttaaaagatgcgtacacttag

SEQ ID NO: 107354 - protein, 364 aa, Aquifex aeolicus
MKKYKIAVLKGDGIGPEIVEQALRVLDKIGEIYGVEFEYREGLIGGEAIDKTGDPLPEETLKICKESDAILLGAVGGPKWDNLPTDKRPEKGLLRIRKELDLYANLRPAKVWDALISSSPLKEEVVKGTDMIVIRELTSGIYYGEPRGIFEENGKRYAINTMKYTEDEIRRIVRKGFEIARKRRKKLTSVDKANVLEVSALWRQIVEEEKENYPDVELEHLYIDNCAMQLVRRPTSFDVIVTGNIFGDILSDEAGVVVGSLGMLPSASIGDRYALYEPVHGSAPDIAGKGIANPIATILSAAMMLKYSFNMDKAHDLIEKAIEETLNQGYRTPDIYSEGCIKVGTKEITDKILENLERLKDAYT

SEQ ID NO: 107355 - DNA, 1089 bp, Arxula adeninivorans
  CDS (1)..(1089)
atgagcaaaaacattatcattctgtctggagatcacgtaggacctgaggtcactgctgaggccattaaggtgctcgaagccattacccaggctcgtcctaacgtaaagttcaacttcgatcacaagctaattggaggagctgctatcgatgccaccggatctccccttcctgatgagactctggaggcttctaagaaagccgatgccgtgttgctgggagctgtaggaggtcccaagtggggaactggtgccgtccgtcctgagcagggtctgctcaagattcgaaaggaactcaacctgtatgccaacctgcgtccttgcaatttcatgtcagaaaagcttctggatctgtcccctctcaggtccgagattgtcaagggaaccaacttcactgttgttcgagagctcgtgggaggcatctattttggtacccgaaaggaagatgagggcaatggagaggcatgggacactgaaaaatacactgtggaggaggtaaagcgaattactcgaatggctgcttttctggcccttcagtctaaccctcctttgcctgtgtggagtttggacaaggctaacgtattggcttcttctcgtctgtggagaaagactgtgaccgagacaattgagaaggagttcccacagctgaccctcaaccaccagctgattgattctgcggccatgattcttatccagaacccatccaagatgaatggagtaattgtcacttcgaacatgtttggagacatcatttctgatgaggcctcagttattcctggatctctgggtctgctgccttctgcctctctgtcctctcttcccgacaagaacacggcctttggactgtacgagccttgtcacggaagtgcccccgacttgcctcctaataaggtgaaccccattgccacaattttgtctgctgccatgatgttgcgactttctttgaacctcaaggaggaagctgatgctgttgagaaggccgtcagtaaggtaattgacaatggcattgtcaccgccgatctcaagggtgcttcatctactaccgaggttggagatgccgttgctgctgaggtacagaagcttcttaaataa

SEQ ID NO: 107356 - protein, 362 aa, Arxula adeninivorans
MSKNIIILSGDHVGPEVTAEAIKVLEAITQARPNVKFNFDHKLIGGAAIDATGSPLPDETLEASKKADAVLLGAVGGPKWGTGAVRPEQGLLKIRKELNLYANLRPCNFMSEKLLDLSPLRSEIVKGTNFTVVRELVGGIYFGTRKEDEGNGEAWDTEKYTVEEVKRITRMAAFLALQSNPPLPVWSLDKANVLASSRLWRKTVTETIEKEFPQLTLNHQLIDSAAMILIQNPSKMNGVIVTSNMFGDIISDEASVIPGSLGLLPSASLSSLPDKNTAFGLYEPCHGSAPDLPPNKVNPIATILSAAMMLRLSLNLKEEADAVEKAVSKVIDNGIVTADLKGASSTTEVGDAVAAEVQKLLK

SEQ ID NO: 107357 - DNA, 1119 bp, Ashbya gossypii
  CDS (1)..(1119)
atggctgcggtaaagagaattgtggtgcttccgggcgaccacatcggccgcgaggtcgtggaggaggcggtgaaggtgcttggcgccgtggagcagagcctgtcggacgtgcactttgacttccagtaccacctggtcggcggtgcggccatcgacgccacggggtcggcgctgccggacgaggcgctgggcgcggcgaaggaggcggacgcggtactgctgggggcagttggcggaccgaagtggcagggcggcgcggtcaggccggagcagggcctgctgaaactgagacaggagttgggcgtgtacgcgaacctgcgtccctgcaactttgcggcggactcgctgctcgagctgtcgccgctgcgccccgagattgcccgggataccgatattatggtggtgcgggagctgctgggcgggagctacttcggcgagcgccacgaggacgagggcgacggagtcgcgtgggacaccgacaagtacaccgtgaaggaggtgcagcgcatcgcgcgcatggcggggttcctggctctgcagcacgacccgccgctacctgtgtggtcgctggacaaggcgaacgtcctggccagctcccgcctgtggcgcaagaccgtggaggaaaccttccagagtgagttcccaaacgtgcaattgcaacaccagttgatagattcagctgcaatgattttggtcaagaacccgcgggcgttcaacggggtcgtggtgacgagcaacatgttcggggacattatctctgacgaagcgtcggtgatcccagggtccctagggttgctgccatcggcctcgctcgcgtctttgccggatagcaagagcgcctttggcctctacgagccctgccacggctctgcgcccgatctgcccgccgggaaggcgaacccgatcggatgcatcctctctgctgccatgatgctgaagttgtcgttgaacatggttgctgccggcgaggcggtcgagcaggcagtgcaggaggtgttggactcgggagtcagaacgggcgacctgctcggctcgagctccacttcggaggttggcgacgccattgcgcttgcagttaaggaagccttgcgcaggcaatccgcagctggtctgagctag

SEQ ID NO: 107358 - protein, 372 aa, Ashbya gossypii
MAAVKRIVVLPGDHIGREVVEEAVKVLGAVEQSLSDVHFDFQYHLVGGAAIDATGSALPDEALGAAKEADAVLLGAVGGPKWQGGAVRPEQGLLKLRQELGVYANLRPCNFAADSLLELSPLRPEIARDTDIMVVRELLGGSYFGERHEDEGDGVAWDTDKYTVKEVQRIARMAGFLALQHDPPLPVWSLDKANVLASSRLWRKTVEETFQSEFPNVQLQHQLIDSAAMILVKNPRAFNGVVVTSNMFGDIISDEASVIPGSLGLLPSASLASLPDSKSAFGLYEPCHGSAPDLPAGKANPIGCILSAAMMLKLSLNMVAAGEAVEQAVQEVLDSGVRTGDLLGSSSTSEVGDAIALAVKEALRRQSAAGLS

SEQ ID NO: 107359 - DNA, 1083 bp, Azotobacter vinelandii
  CDS (1)..(1083): transl_table=11
atgagcaagcagattctggttcttccgggcgacggcatcggcccggaaatcatggccgaggcggttaaggtcctgcagttggccaacgagaagtaccaactgggcttcgtactgggctacgacgaactgggcggggcggccgtcgacaagtacggcgtgccgctggccgacgagaccctggagcgcgcgcggcgccgatgccatcctgctcggcgccgtcggcggtccgaaatgggacgccatcgacccggccatccgcccggagcgcggcctgctgaaaatccgttcgcaactgggcctgttcggcaacctgcgcccggcgtgctctatccgcaactggccgaggcctccaccctcaggcccgaagtggtcgccggcctggacatcctcatcgtccgcgaactgaccggcggcatctacttcggcgccccgcgcgagagccggttgcttgcgaacggcgagcgcatggcctacgacaccctgccgtacagcgaaagcgagatccgccgcatcgccaaggtcggtttcgacatggcgcgcgtgcgcggcaagaagctgtgctcggtggacaaggccaacgtactggcctccagccaactgtggcgtgcggtggtcgaggaggtcgccaaggactatccggacgtcgtgctgtcgcacatgtacgtcgacaacgcggccatgcaactggtgcgtgcgcccaagcaattcgacgtgatcgtcaccgacaacatgttcggcgacatcctgtcggacgaggcttccatgctcaccggctcgatcggcatgctgccgtcggcttcgctggacgccgacaacaagggcatgtacgagccgtgccacggcagtcgtcgtccggacatcgccggcaagggtatcgccaatccgctggccaccatcctctcggtatcgatgatgctgcgttacagcttcggccaggtcgaggcggccaacgccatcgagcaggcggtcagcaaggtgctggaccaggggctgcgcaccggcgacatctggtcggagggctgccggaaggtcggcacggccgagatgggcgatgcggtagtcgcagcgcttgccacgttgtaa

SEQ ID NO: 107360 - protein, 360 aa, Azotobacter vinelandii
MSKQILVLPGDGIGPEIMAEAVKVLQLANEKYQLGFVLGYDELGGAAVDKYGVPLADETLERARRRCHPARRRRRSEMGRHRPGHPPGARPAENPFATGPVRQPAPGVLYPQLAEASTLRPEVVAGLDILIVRELTGGIYFGAPRESRLLANGERMAYDTLPYSESEIRRIAKVGFDMARVRGKKLCSVDKANVLASSQLWRAVVEEVAKDYPDVVLSHMYVDNAAMQLVRAPKQFDVIVTDNMFGDILSDEASMLTGSIGMLPSASLDADNKGMYEPCHGSRRPDIAGKGIANPLATILSVSMMLRYSFGQVEAANAIEQAVSKVLDQGLRTGDIWSEGCRKVGTAEMGDAVVAALATL

SEQ ID NO: 107361 - DNA, 1065 bp, Bacillus anthracis
  CDS (1)..(1065): transl_table=11
ttggaaaaacgtatcgtttgtttagctggtgatggtgttggcccagaagttatggaaagtgcgaaggaagtattgcatatggtagagaggctatatggacatcattttcatttgcaagatgagcattttggtggtgttgctatcgatttaacggggcaaccattaccacaacgaacacttgcagcttgtttagcaagtgatgcggttttactaggcgcagttggtggaccaaggtgggatggtgcgaaagaaaggccagagaaaggattattagctttaagaaaagggcttggtgtatttgcgaacgtccgccctgtcacggtagaaagtgcaacggcacatttatcgccattgaaaaaggctgatgaaattgatttcgttgtcgttcgtgaattaacaggtgggatttatttttcttatccgaaagaacgaacggacgaagtagcaacagatacacttacgtatcatcgccatgaaattgaacgtatcgtttcttgcgcctttcaattagcgagtaagcggaagaaaaaagtaacatctattgataaggcgaatgttttagaatctagtaaactatggagaattgtaacagaagaagtagcacttcgttatccagatgttgaactagaacatattttagtagatgcggccgctatggagctaattcggaatccaggacggtttgatgtaattgtaacagaaaatttatttggggatattttaagtgacgaagcttccgtattagctggatcattagggatgcttccgtcagcaagtcacgcggaaaagggaccttccttatatgagcctattcacggatcggcaccggatattgccgggaaaaataaggcgaatccaattgctatgatgcgctctgttgccatgatgcttgggcaatcgttcggattaacgagggaagggtgtgcaattgaagaagcgatttcagcagtccttaaatcaggaaaatgtacagcagatatcggggggactgaaacgacaacttcatttacaaaggcagttatgcaagaaatggaagaacaagcgctagtagggagaggaagataa

SEQ ID NO: 107362 - protein, 354 aa, Bacillus anthracis
MEKRIVCLAGDGVGPEVMESAKEVLHMVERLYGHHFHLQDEHFGGVAIDLTGQPLPQRTLAACLASDAVLLGAVGGPRWDGAKERPEKGLLALRKGLGVFANVRPVTVESATAHLSPLKKADEIDFVVVRELTGGIYFSYPKERTDEVATDTLTYHRHEIERIVSCAFQLASKRKKKVTSIDKANVLESSKLWRIVTEEVALRYPDVELEHILVDAAAMELIRNPGRFDVIVTENLFGDILSDEASVLAGSLGMLPSASHAEKGPSLYEPIHGSAPDIAGKNKANPIAMMRSVAMMLGQSFGLTREGCAIEEAISAVLKSGKCTADIGGTETTTSFTKAVMQEMEEQALVGRGR

SEQ ID NO: 107363 - DNA, 1417 bp, Bacteroides fragilis
  CDS (91)..(1152): transl_table=11
cgcgggttggatgctgaccagacagaggctgctattaaagctaccataaaaatgctgaatataatagaagaatattaattattgaataatatggattttaaaattgctgtattagccggtgacggtatcgggccggaaatctctgtacaaggtgtggaggtaatgagtgccgtctgtgagaagtttggacataaagtaaactatgaatatgccatttgcggtgcggatgccattgataaagtaggcgatccttttccggaagaaacttaccgggtttgtaagaatgccgatgcagttcttttttcggccgtaggtgatcctaagtttgacaatgacccgactgccaaggtgcgtccggagcaggggctactggctatgcgtaaaaaactcggcttatttgccaatatccgtcctgtccaaacatttaagtgtttggtgcacaagtctcctcttcgtgcagagttagtagaaggagccgattttctgtgtattcgcgaattgaccggaggtatgtattttggtgaaaaatatcaggataatgacaaagcatacgacacgaatatgtatacacgtcctgagatagaacgtatcttgaaagtcggtttcgaatatgctatgaagcgtcgtaagcacttgactgttgtagataaagctaatgtgcttgcttccagtcgtctatggaggcagattgcacaagaaatggcgccgcagtatccggaggtgaccactgattatatgtttgtggataatgctgcaatgaagatgattcaggagcctaaattttttgatgtgatggtgacggagaatacttttggtgatattcttaccgatgaagggtctgtcatcagtggctctatggggttgcttccgtctgcttctacaggtgagagtactccggtgttcgagccgattcacggttcgtggccgcaagcaaaaggcttgaatatcgctaatccgctagcgcaaattctttcggtggccatgctgttcgaatacttcgattgtaaagctgaaggtgcgttgatccgcaaagcagttgatgcttctttggatgctaatgtacgtacacccgagattcaagtggaaggtggtgaaaaatttggtacgaaagaagtaggggcatggattgttgattacatccggaaagcatgatttagttttcagatttataaaacagataacaatgccggagaaaatcttatctttctccggcattcttcttatattctaattctgtatgaatgttataatccggttcctttttttctttttgtgctataaaaacataaattagatttggattgttgtttcaataatcctattttatttcatattttttgtacttttgcgggatatttacaatgaggcaatgaataaaacgatcaattatcaactgactatcgttgttcctgtatac

SEQ ID NO: 107364 - protein, 353 aa, Bacteroides fragilis
MDFKIAVLAGDGIGPEISVQGVEVMSAVCEKFGHKVNYEYAICGADAIDKVGDPFPEETYRVCKNADAVLFSAVGDPKFDNDPTAKVRPEQGLLAMRKKLGLFANIRPVQTFKCLVHKSPLRAELVEGADFLCIRELTGGMYFGEKYQDNDKAYDTNMYTRPEIERILKVGFEYAMKRRKHLTVVDKANVLASSRLWRQIAQEMAPQYPEVTTDYMFVDNAAMKMIQEPKFFDVMVTENTFGDILTDEGSVISGSMGLLPSASTGESTPVFEPIHGSWPQAKGLNIANPLAQILSVAMLFEYFDCKAEGALIRKAVDASLDANVRTPEIQVEGGEKFGTKEVGAWIVDYIRKA

SEQ ID NO: 107365 - DNA, 1065 bp, Bacillus thuringiensis subsp
  CDS (1)..(1065): transl_table=11
ttggaaaaacgtatcgtttgtttagctggtgatggtgttggcccagaagttatggaaagtgcgaagggagtattgcacatggtagagaggctatatggacatcattttcatttgcaagatgagcattttggtggtgttgctatcgatttaacggggcaaccattaccacaacgaacacttgcagcttgtttagcaagtgatgcggttttactaggagcagttggtggaccaaggtgggatggtgcgaaagaaagaccagagaaaggattattagctttaagaaaagggctcggtgtatttgcgaacgttcgccctgtcacggtagaaagtgcaacggcacatttatcgccattaaaaaaggctgatgaaattgatttcgttgtcgttcgtgaattaacaggtggaatttatttttcttatccgaaaaaacgaacggacgaagtagcaacggatacacttacgtatcatcgccatgaaattgaacgtatcgtttcttacgcctttcaattagcgagtaagcggaagaaaaaagtaacatctattgataaggcgaatgttttagaatctagtaaactatggagaactgtaacagaagaagtagcacttcgttatccagatgttgaactagaacatattttagtagatgcggccgctatggagctaattcggaatccaggacggtttgatgtaattgtaacagaaaatttatttggggatattttaagtgacgaagcttccgtattagctggatcattagggatgcttccgtcagcaagtcacgcggaaaagggtccttccttatatgagcctattcacggatcggcaccggatattgccgggaaaaataaggcgaatccaattgctatgatgcgctctgttgccatgatgcttgggcaatcgtttggattaacgagggaagggtgtgcaattgaagaagcgatttcagcagtccttaaatcaggaaaatgtacagcggatatcgggggggctgaaacgacaacttcatttacaaaggcagttatgcaagaaatggaagagcaagcgctagtagggagaggaagataa

SEQ ID NO: 107366 - protein, 354 aa, Bacillus thuringiensis subsp
MEKRIVCLAGDGVGPEVMESAKGVLHMVERLYGHHFHLQDEHFGGVAIDLTGQPLPQRTLAACLASDAVLLGAVGGPRWDGAKERPEKGLLALRKGLGVFANVRPVTVESATAHLSPLKKADEIDFVVVRELTGGIYFSYPKKRTDEVATDTLTYHRHEIERIVSYAFQLASKRKKKVTSIDKANVLESSKLWRTVTEEVALRYPDVELEHILVDAAAMELIRNPGRFDVIVTENLFGDILSDEASVLAGSLGMLPSASHAEKGPSLYEPIHGSAPDIAGKNKANPIAMMRSVAMMLGQSFGLTREGCAIEEAISAVLKSGKCTADIGGAETTTSFTKAVMQEMEEQALVGRGR

SEQ ID NO: 107367 - DNA, 1095 bp, Bacillus clausii
  CDS (1)..(1095): transl_table=11
atggaaaaacaaatattgcttttacctggggacggcattggcccggaaattattgccgaaaccaaacgggtgttagaagaaattgcccggctgtatcaccatacatttcagtttgttgaagggcgaattggcggtgatgccattgacgcaactggcagcccccttcctgaggagacgctggatcttgccaaaggtagcgacgcaattttgcttggcgcagtcggcggaccaaagtgggacggcaatgcccctgaaaaacggccagaaaaaggtttgctgcaaatccgcaaggcactgggcctttacgccaaccttcgccctgtccgtgtactgaaaccgttaatgggtgcatccaccttaaaagaggaagtgttggccgacgttgatttgttgattgtacgggagttaacaggcggactttattttggcgagccgcgtgaacggcgacaaatcaatggagaagacggggcagtggatacactcctttatacaaggggtgaaatcgagcggattgtgcaccaagcgtttcaatttgcaagaacgcgcaagaaacgggtagtctctgttgacaaggccaatgtcttggaatcgagcaggttatggcgggaaattgctgatgaagtagcccgcgagtatccagacgtcacgctttcgcacatgcttgtcgataatgcggcgatgcagcttattcgtgatccaaggcagtttgacgtcatcgtaacggaaaatttgtttggcgatattttgagtgatgaagcttcgatgattaccggatccttgggcttattgccctcggcgagcatgaatacgtcaaaagtcggcttgtttgagcctgtgcacggctctgctcctgacatagcagggacgggcgcggccaatccgctagcgacgattttgtcagcagcgatgatgctgcaatatagttttgggttagcggacgaggcaaaagcaatcgaagtcgcagtcgaccgtgtgctcgctcaaggagtacggacaaaagacatcgcaaaagcaagcgaaaacgctgtttcgacaacggcaataacaaatgcggttatggaggcgcttgctctcaaaagtgcctcaagccgctaa

SEQ ID NO: 107368 - protein, 364 aa, Bacillus clausii
MEKQILLLPGDGIGPEIIAETKRVLEEIARLYHHTFQFVEGRIGGDAIDATGSPLPEETLDLAKGSDAILLGAVGGPKWDGNAPEKRPEKGLLQIRKALGLYANLRPVRVLKPLMGASTLKEEVLADVDLLIVRELTGGLYFGEPRERRQINGEDGAVDTLLYTRGEIERIVHQAFQFARTRKKRVVSVDKANVLESSRLWREIADEVAREYPDVTLSHMLVDNAAMQLIRDPRQFDVIVTENLFGDILSDEASMITGSLGLLPSASMNTSKVGLFEPVHGSAPDIAGTGAANPLATILSAAMMLQYSFGLADEAKAIEVAVDRVLAQGVRTKDIAKASENAVSTTAITNAVMEALALKSASSR

SEQ ID NO: 107369 - DNA, 1095 bp, Blochmannia floridanus
  CDS (1)..(1095): transl_table=11
atgaataataatacttaccatattgcaatattaccaggagatggtataggtccagaaattatgcaacaagcatataaaattcttaatacagtaaaaaataaatttaaaattaatattatcacaaccgaatataaagtaggaggtaacgcacttgatctagaaggctctcctttacctaaagatactataaaaaactgtgaaaaatcaaacgctatattgttcggagcagtaggaggaccaaaatggaataatatcaatgaaacatcaagaccagaatttggagctttgctaactctacgcaaacattttaatctatttattaatttaagaccgatatatcttcctattgaattaatcaatttatctcccttgaaaccagaaattatttctcaaggattagatatgatatgtatacgagaattaatcggaggtatttactttggtaaacctcaaggcaaatccggaataagatctcaagaacacgcatttgatactgcaatttaccatcgttttgaaatcgaacgtatcgcccattttgcatttaaattagctcaaaaacgacgcaaacatgttacatctatagataaagcaaacgtcttacatacttccatgttatggagaaaagtagtttcggaagtagcttccaattaccctaatgttcatttacaacatttatatgtggacaatgcttccatgcaacttattcgaaatccatctgcttttgatgtaattttatgcccaaacttatttggagacattttatcagatgaatgcgcagaaattaatggttctataggtatattaccctctgctagccttaatgaacataattttggcttatacgaaccagctggaggatctgctccagatattgcaggaaaaaatatagctaatcctattgctcaaattctatctactgccttattatttcgatatagtttaaaactaaatcatgttgctatcaccattgaaaaagcagtatataaagcattaacattaggatatcgtactcaagatatagcgtataataaacaaaaaagcgtcaatacagatgatatgggtgatatcattgcatcgttaatatataaattataa

SEQ ID NO: 107370 - protein, 364 aa, Blochmannia floridanus
MNNNTYHIAILPGDGIGPEIMQQAYKILNTVKNKFKINIITTEYKVGGNALDLEGSPLPKDTIKNCEKSNAILFGAVGGPKWNNINETSRPEFGALLTLRKHFNLFINLRPIYLPIELINLSPLKPEIISQGLDMICIRELIGGIYFGKPQGKSGIRSQEHAFDTAIYHRFEIERIAHFAFKLAQKRRKHVTSIDKANVLHTSMLWRKVVSEVASNYPNVHLQHLYVDNASMQLIRNPSAFDVILCPNLFGDILSDECAEINGSIGILPSASLNEHNFGLYEPAGGSAPDIAGKNIANPIAQILSTALLFRYSLKLNHVAITIEKAVYKALTLGYRTQDIAYNKQKSVNTDDMGDIIASLIYKL

SEQ ID NO: 107371 - DNA, 1428 bp, Brassica napus
  CDS (17)..(1237)
caaaggcaatcctgaaatggcggcggctctgcagactaacatccgaccggttaagtttccggctacgttgagagctctcaccaaacaatcttctccagcaccctttagagtgagatgcgccgctgcttcccccgggaaaaagagatacaatatcactctccttcccggcgatggaatcggtccggaggtcatctccatcgctaaaaatgtgcttcagcaagctggttccttggaaggtctggagtttagcttccaggaaatgcctgtaggaggagctgctttggatttggtcggagtgcctttgcctgaggagaccgtctcggctgctaaagaatcagatgctgtgcttcttggagccattggagggtacaaatgggataagaatgaaaaacatttgaagcctgagactgggttacttcaacttcgggctggtcttaaagtctttgctaatctgagacctgctacagttcttccacagttagtggatgcttcgaccttgaagagagaggttgcagaaggtgttgatctgatggttgttagggagcttacaggaggtatttactttggagtgccaaggggcattaagactaatgaaaatggtgaggaagttgggtataataccgaggtctatgctgctcacgagattgatagaattgctcgtgttgccttcgagactgctcggaaacggcgtggcaagctgtgttctgttgacaaagctaatgtcttagatgcctcgattttatggaggagacgagtaacagcactagctgctgaatatccggatgttgaactgtcacatatgtatgttgacaatgctgccatgcagcttgttcgtgaccctaaacagtttgacaccattgttacaaacaacatttttggtgatatattatccgatgaagcgtcgatgatcacaggaagcatcggcatgcttccctctgctagtctcagtgattcgggacctggactctttgaacctatacatggttctgcacctgatattgctggacaggataaagcaaacccgttggcaaccatcctcagcgctgcaatgcttctgaaatacggactcggagaggagaaggcagctaagagaatcgaagacgctgtgttgggtgctctgaacaaaggattcagaacaggagacatctactccgcaggaactaaacttgtgggctgcaaggagatgggagaggaagttctgaagtcagtggattcccacgttcaagcttctgtttaatcatctgtataactttgaagagaatttttttttatcattttccaacaataagtgagagtctcagtttcatcagccacaatgtgtgtgatgttaatgttattggacgtatttgatcacattgaaactttcgacgtgcttttctgtaaaataaacatcctagtggagttaagacgaaaaaaaaaaaaaaaaaa

SEQ ID NO: 107372 - protein, 406 aa, Brassica napus
MAAALQTNIRPVKFPATLRALTKQSSPAPFRVRCAAASPGKKRYNITLLPGDGIGPEVISIAKNVLQQAGSLEGLEFSFQEMPVGGAALDLVGVPLPEETVSAAKESDAVLLGAIGGYKWDKNEKHLKPETGLLQLRAGLKVFANLRPATVLPQLVDASTLKREVAEGVDLMVVRELTGGIYFGVPRGIKTNENGEEVGYNTEVYAAHEIDRIARVAFETARKRRGKLCSVDKANVLDASILWRRRVTALAAEYPDVELSHMYVDNAAMQLVRDPKQFDTIVTNNIFGDILSDEASMITGSIGMLPSASLSDSGPGLFEPIHGSAPDIAGQDKANPLATILSAAMLLKYGLGEEKAAKRIEDAVLGALNKGFRTGDIYSAGTKLVGCKEMGEEVLKSVDSHVQASV

SEQ ID NO: 107373 - DNA, 1113 bp, Brucella melitensis
  CDS (1)..(1113): transl_table=11
atggcatccagaaaacttcttctcctgcccggcgatggcatcggtcccgaggccatggcggaggtccgcaaggttatcgctttcctcaactcggacctcaatctcggttttgaaaccgaagaaggtctggttggcggctgtgcttacgatgcacacggccaggcgatttccgatgcggatatggaaaaggcgcttgcggccgatgccgtgctttttggcgcggttggcggcccgaagtgggacagcgtgccttatgaagtgcgcccggaaggcggccttttgcgcctgcgcaaggatatgcagctttatgccaatctgcgccctgccatctgctacccggcgctggcccattcttcctcgctgaagccggaagtgatcgaaggtctcgatattctgattctgcgcgagctgacgggcggcgtttatttcggcgaaccgaaggaaatcatcgatctcggcaacggccagaagcgtggcatcgacacgcaggtctacgacacctacgaaatcgaacgcatcgccgatgtggccttcgagctggcgcgcacgcgccgcaacaaggtcacgtcgatggaaaagcgcaatgtgatgaagtccggcgttctgtggaatcagggcgttacggcgcgccacaaggaaaaacatgccgatgtgcaactggaacatatgctggctgatgctggcggcatgcagctcgtgcgctggccgaagcagttcgacgtcatcctgaccgataatctgttcggcgacctgctgtcggatgtggccgccatgctgaccggctcgctcggcatgcttccctccgcttcgctgggtgcggcggacagcaagaccggcaagcgcaaggcgctttacgagccggtgcacggttctgcacctgatatcgcgggcaagggcattgccaacccgatcgcgatgatcgcgtcgcttgccatgtgcctgcgctattctttcggtctggttgccgaagctgaccgcctggaagctgccattgctggcgttctggacgacggtatccgcaccgccgatatctggtcggaaggcaataccaaggtcggcaccaccgaaatgggcgatgccatccttgcaaagttcaaggcactttcggcctga

SEQ ID NO: 107374 - protein, 370 aa, Brucella melitensis
MASRKLLLLPGDGIGPEAMAEVRKVIAFLNSDLNLGFETEEGLVGGCAYDAHGQAISDADMEKALAADAVLFGAVGGPKWDSVPYEVRPEGGLLRLRKDMQLYANLRPAICYPALAHSSSLKPEVIEGLDILILRELTGGVYFGEPKEIIDLGNGQKRGIDTQVYDTYEIERIADVAFELARTRRNKVTSMEKRNVMKSGVLWNQGVTARHKEKHADVQLEHMLADAGGMQLVRWPKQFDVILTDNLFGDLLSDVAAMLTGSLGMLPSASLGAADSKTGKRKALYEPVHGSAPDIAGKGIANPIAMIASLAMCLRYSFGLVAEADRLEAAIAGVLDDGIRTADIWSEGNTKVGTTEMGDAILAKFKALSA

SEQ ID NO: 107375 - DNA, 1068 bp, Burkholderia cepacia
  CDS (1)..(1068): transl_table=11
atgaagattgcagtgctgccgggcgacggcatcggtccggaaatcgtcaccgaagcggtgaaggtgctgaacgcactcgacgagaagttcgaactcgaacaggcgccggtcggcggcgcgggctacgaggcgaggggtcatccgctgccggacgcgacgctgaagctcgcgaaggaagccgacgcgatcctgttcggcgcggtcggcgactggaagtacgactcgctcgaacgcgcgctgcgtcccgagcaggcgattctcggcctgcgcaagcacctcgagctgttcgcgaacttccgtccggcgatctgctatccgcagctcgtcgacgcgtcgccgctgaagcccgaacttgtcgcgggcctcgacatcctgatcgtgcgcgaactgaacggcgacatctatttcggccagccgcgcggcgtgcgcgcggcaccggacggcccgttcgcgggcgagcgcgaaggcttcgacacgatgcgctattcggagccggaagtgcgccgcatcgcgcacgtcgcgttccaggccgcgcaaaagcgcgcgaagaagctgctgtcggtcgacaagtcgaacgtgctcgagacgtcgcagttctggcgcgacatcatgatcgacgtgtcgaaggaatatgcggacgtcgagctgtcgcacatgtacgtcgacaacgcggcgatgcagctcgcgaaggcgccgaagcagttcgacgtgatcgtgaccggcaacatgttcggcgacatcctgtcggatgaagcgtcgatgctgacgggctcgatcggcatgctgccgtcggcgtcgctcgacaagaacaacaagggtctgtacgagccgtcgcacggttcggcgccggacatcgcgggcaagggcatcgcgaatccgctcgcgacgatcctgtcggccgcgatgctgctgcgctattcgctgaaccgcgccgagcaggccgaccgcatcgagcgcgcggtcaaaacggtgctcgaacagggctaccgcaccggcgacatcgcgacgccgggctgcaagcaggtcggcacggcggcgatgggcgacgcggtggtcgcggccctctga

SEQ ID NO: 107376 - protein, 355 aa, Burkholderia cepacia
MKIAVLPGDGIGPEIVTEAVKVLNALDEKFELEQAPVGGAGYEARGHPLPDATLKLAKEADAILFGAVGDWKYDSLERALRPEQAILGLRKHLELFANFRPAICYPQLVDASPLKPELVAGLDILIVRELNGDIYFGQPRGVRAAPDGPFAGEREGFDTMRYSEPEVRRIAHVAFQAAQKRAKKLLSVDKSNVLETSQFWRDIMIDVSKEYADVELSHMYVDNAAMQLAKAPKQFDVIVTGNMFGDILSDEASMLTGSIGMLPSASLDKNNKGLYEPSHGSAPDIAGKGIANPLATILSAAMLLRYSLNRAEQADRIERAVKTVLEQGYRTGDIATPGCKQVGTAAMGDAVVAAL

SEQ ID NO: 107377 - DNA, 1068 bp, Burkholderia mallei
  CDS (1)..(1068): transl_table=11
atgaagattgcagtgctgcccggcgacggcatcggtccggaaatcgtcaatgaagcggtgaaggtgctgaacgcgctcgacgaaaagttcgaactggagcaggcgccggtcggcggcgccggctacgaggcaagcggccatccgctgcccgacgcgacgctcgcgctcgcgaaggaagcggacgcgatcctgttcggcgcggtcggcgactggaagtacgattcgctcgagcgcgcgctgcgccccgagcaggcgatcctcggcctgcgcaagcatctggagctgttcgcgaacttccgtccggcgatctgctatccgcagctcgtcgacgcttcgccgctcaagcccgagctcgtcgcgggcctcgacatcctgatcgtgcgcgaactgaacggcgatatctacttcggccagccgcgcggcgtgcgcgccgcgccggacggcccgttcgcgggcgcgcgcgaaggcttcgacacgatgcgctattcggagccggaagtgcgccgcatcgcgcacgtcgcgttccaggccgcgcgaaagcgcgcgaagaagctgctgtcggtcgacaaatcgaacgtgctcgagacgtcgcagttctggcgcgacgtgatgatcgacgtgtcgaaggaatacgcggacgtcgagctgtcacacatgtacgtcgacaacgcggcgatgcagctcgcgaaggcgccgaagcagttcgacgtgatcgtgacgggcaacatgttcggcgacattttgtccgacgaggcgtcgatgctgacgggctcgatcggcatgctgccgtccgcgtcgctcgaccagcgcaacaagggcctgtacgagccgtcgcacggctccgcgccggacatcgcgggcaagggcatcgcgaatccgctcgcgacgatcctatcggccgcgatgctgctgcgctactcgctgaaccgcgcggagcaggccgaccgcatcgagcgcgcggtcaaggcggtgctcgagcagggctaccgcacgggcgacatcgcgacgccgggctgcaagcaggtgggcacggccgcgatgggcgacgcggtggtcgcggcgctgtaa

SEQ ID NO: 107378 - protein, 355 aa, Burkholderia mallei
MKIAVLPGDGIGPEIVNEAVKVLNALDEKFELEQAPVGGAGYEASGHPLPDATLALAKEADAILFGAVGDWKYDSLERALRPEQAILGLRKHLELFANFRPAICYPQLVDASPLKPELVAGLDILIVRELNGDIYFGQPRGVRAAPDGPFAGAREGFDTMRYSEPEVRRIAHVAFQAARKRAKKLLSVDKSNVLETSQFWRDVMIDVSKEYADVELSHMYVDNAAMQLAKAPKQFDVIVTGNMFGDILSDEASMLTGSIGMLPSASLDQRNKGLYEPSHGSAPDIAGKGIANPLATILSAAMLLRYSLNRAEQADRIERAVKAVLEQGYRTGDIATPGCKQVGTAAMGDAVVAAL

SEQ ID NO: 107379 - DNA, 1077 bp, Campylobacter jejuni
  CDS (1)..(1077): transl_table=11
atgaaaacttataaagtagctgttttagcaggagatggcatagggcctttggtgatgaaagaggctttaaaaattttaacttttatcgcacaaaaatacaattttagttttgaatttaatgaagctaaaataggcggtgcaagtatagatgcttatggagtggctttaagtgatgaaactttaaagctttgtgagcaaagtgatgcgattttatttggttctgtgggtgggcctaaatgggataatttgcccatagatcaaagacctgaaagagcctcgcttttgcctttaagaaagcattttaatttgtttgcaaatttgcgtccttgtaaaatttatgaaagtttaacccatgcttcacctttaaaaaatgagattatccaaaaaggagtggatattttatgtgttagagagcttacaggtgggatttattttggtaagcaggatttaggtaaagaaagtgcgtatgatactgaaatttacactaaaaaagagatagaaaggatagctcgtatcgcttttgaaagtgcaagaataagaaagaaaaaagtccatttaatcgacaaggcgaatgttttagcaagttctattttgtggcgagaagtggtggcaaatgttgcaaaagattatcaagatataaacttagagtacatgtatgtggataatgctgcgatgcagattgtaaaaaatcctagcatttttgatgttatgctttgttcaaatctttttggtgatattttgagtgatgagttagctgccattaatggatctttgggtttgttaagttcagcaagtttgaatgataaaggttttggactttatgagccagcaggtggaagtgcgcctgatatagctcatttaaatatagccaatcccatagctcaaattttaagtgcggctttgatgttaaagtatagtttcaaagaagaacaagccgcacaggatatagaaaatgctatatctttggcattggcacaaggaaaaatgactaaggatttaaatgctaagtcgtatttaaataccgatgaaatgggggattgtattttagaaattttaaaggagaatgacaatggctaa

SEQ ID NO: 107380 - protein, 358 aa, Campylobacter jejuni
MKTYKVAVLAGDGIGPLVMKEALKILTFIAQKYNFSFEFNEAKIGGASIDAYGVALSDETLKLCEQSDAILFGSVGGPKWDNLPIDQRPERASLLPLRKHFNLFANLRPCKIYESLTHASPLKNEIIQKGVDILCVRELTGGIYFGKQDLGKESAYDTEIYTKKEIERIARIAFESARIRKKKVHLIDKANVLASSILWREVVANVAKDYQDINLEYMYVDNAAMQIVKNPSIFDVMLCSNLFGDILSDELAAINGSLGLLSSASLNDKGFGLYEPAGGSAPDIAHLNIANPIAQILSAALMLKYSFKEEQAAQDIENAISLALAQGKMTKDLNAKSYLNTDEMGDCILEILKENDNG

SEQ ID NO: 107381 - DNA, 1122 bp, Candida albicans
  CDS (1)..(1122): transl_table=12
atgtctgttaaaacccaaaccattactgtcttgcctggtgaccatgtcggtaccgaaattgtcaatgaaccaaccaaagtcttgaaagcaattgaagctcccactccctaccaaaaaatccaatttgatttcaaacaccacttgattggtggtgctgccattgatgccactggcgtcccgcttccagatgatgctcttgaaagtgctaaatcatccgatgcagttttgttgggtgctgttggtggacccaaatggggtactggcactgttcgtcctgaacaaggattgttgaaaatccgtaaagaattgaacctttatgccaacattagaccatgtaactttgccagtgattcgttattagaattgtctccattaaaagctgaagtggtcaaaggaaccaatctaattattgttcgtgaattagttggtggtatatattttggtgaacgtcaagaacaagaagaaagtgaagaccaccaaacagcttggtatagaccaaagtatactgttgacgaagttactcgtatcactcgtatggcagcatttatggctttgcagcacaatccaccattgccaatatggtctttggacaaagctaatgttttggcatcgtcgagattgtggagaaagaccgttgataaagtgatttctgaagaatttccagctttgtctgtgcagcatcaattgattgattcggctgcaatgattttgatccaaaacccaaccaaattgagcggtatcatcattacatctaacatgtttggtgatatcatctcagatgaggcatccgttatcccaggatctttgggtttattgccatctgcttcattggcttcattgccagataccaacactgcttttggtctttatgagccttgccatgggtctgctccagatttaccagccaacaaagtgaatccaattgctacaatcttgtctgccgcttccatgttgagattagccttggattgtgttaaggaaactgaagcattggaagaagctgtcaaacaggttttggatagcggtatcagaacagcagatttaagaggtactagctctactacagaagtcggtgacgcaatagccgaaacagtcactaaaattttaaaacaaaatacataa

SEQ ID NO: 107382 - protein, 373 aa, Candida albicans
MSVKTQTITVLPGDHVGTEIVNEPTKVLKAIEAPTPYQKIQFDFKHHLIGGAAIDATGVPLPDDALESAKSSDAVLLGAVGGPKWGTGTVRPEQGLLKIRKELNLYANIRPCNFASDSLLELSPLKAEVVKGTNLIIVRELVGGIYFGERQEQEESEDHQTAWYRPKYTVDEVTRITRMAAFMALQHNPPLPIWSLDKANVLASSRLWRKTVDKVISEEFPALSVQHQLIDSAAMILIQNPTKLSGIIITSNMFGDIISDEASVIPGSLGLLPSASLASLPDTNTAFGLYEPCHGSAPDLPANKVNPIATILSAASMLRLALDCVKETEALEEAVKQVLDSGIRTADLRGTSSTTEVGDAIAETVTKILKQNT

SEQ ID NO: 107383 - DNA, 1700 bp, Candida boidinii
  CDS (321)..(1418)
agaatgagaaaagttgccggtaccggaaccatatttcttgattacataagccatagtaatattatattagtacaatataagttattattaacacaatcaattattcaattttcaaaattaattgagaaaattgggaattagttatatgactgactaacttattcaacttgtggagaaaatagagtatgaaagttgttcatatatataagttaattattcatttttttaatttaaataattaagtatttaatatatttaagtatatatatatatatatatatatttgagtatagtatagtatagtatataagtatattaaaatgagtataattgaaaaaaaaattgttttattaccaggtgatcatgttggtgttgaagttgttgaagaagcagttaaaattttaaaatcaattagtgaagttaaaccagagattcaatttaaatttgagaatcatttaattggtggtgcagcaattgatgctacaggtgttccattacctgatgaagcattagaagcagctaaaaaatcagatgctgtattattaggagctgttggtggacctaaatggggtactggtgaagttagaccagagcaaggtttattaaagattagaaaagaattaaatttatatgctaatttaaggccatgtaattttgccagtgataaattattagatttatcaccattaaaatctgatattgttaaaggtacagattttacagttgttagagaattagttggtggtatttattttggagatagggttgaagatgatggtagtggatttgccagtgatagtgaaagttattcagttccagaagttgaaaggatcactagaatggcagcatttttatcattacaaaatgatccaccattaccaatttggtcattagataaagccaatgttttagcatctagtagattatggaggaaaacagttgatagagttattaaagaagaatttccaaaattaacagttcaacatcaattaattgattcagcagcaatgatattagttaaatcaccaactaaattaaatggtattgttattacaaataatatgtttggagatattatttctgatgaagcatcagttattccaggatcattaggtttattaccatcagcatcattggcatcattaccagataccaatcaagcatttggattatatgagccatgtcatggatcagcacctgatttaccaaagaataaagtcaatccaattgcaactatattatcagcggcaatgatgcttaaattatcattaaatttagttaaagaaggtaatgcagttgaagaagctgttagaaaagtattagatcaaggtattatgactggagatcttggtggtaataattcaactactgaagttggtgatgctattgctaaagaagttaaattacttttagcttaattaatttaatttaattagatgaatttatataagaattaaattaaatttaataaaaataataagaataatgaatatacagtatatatatatatatgaatacgtaataacatgtaataattgataaatttgaggatagagtctagatcaatttaataatggttacaataatagtatatttggctctgatcaggcgttgttctttctttgtttctttgtttctttgtttctttgtttctttgtttctttgtttctttgtttctttgtttgattgtttgaaagctt

SEQ ID NO: 107384 - protein, 365 aa, Candida boidinii
MSIIEKKIVLLPGDHVGVEVVEEAVKILKSISEVKPEIQFKFENHLIGGAAIDATGVPLPDEALEAAKKSDAVLLGAVGGPKWGTGEVRPEQGLLKIRKELNLYANLRPCNFASDKLLDLSPLKSDIVKGTDFTVVRELVGGIYFGDRVEDDGSGFASDSESYSVPEVERITRMAAFLSLQNDPPLPIWSLDKANVLASSRLWRKTVDRVIKEEFPKLTVQHQLIDSAAMILVKSPTKLNGIVITNNMFGDIISDEASVIPGSLGLLPSASLASLPDTNQAFGLYEPCHGSAPDLPKNKVNPIATILSAAMMLKLSLNLVKEGNAVEEAVRKVLDQGIMTGDLGGNNSTTEVGDAIAKEVKLLLA

SEQ ID NO: 107385 - DNA, 1125 bp, Carboxydothermus hydrogenoformans
  CDS (1)..(1125): transl_table=11
atgtccgggagaagctgcaagggaccgtttaaaattttggtgctgccgggggatggtattggaccggagataattaaggaagcggtgaaggttttaaaagcgttaggggagaaaaagggcattacttttaattttcagtacggtttaatcgggggagcggccatcgacgaaaggggagtgccccttcccgaagaaacggtggaacttggaaaacaatgtgatgctattttgttaggggctgtaggggggcccaagtgggataatttgccgccggaaattcggcccgaattgggagggcttttaaaaattcgcaaagtatttgacctgtatgccaacctgcggccggtaatgttttttccggagctgaaaaatgcttcccctttaaagccggacataattgagggtgtggatattttaatggtccgggagttaacgggaggtctttattttggcgagaagaagcggttcactaccgagcaaggggaacaagcggtaattgataccttgatttataccgaaaaagaagtggaaagggtagtaagacttggttttgagttagcgcaaaaacgaagaggtaaacttactttggtggataaagccaatgttttagaaagctcccgtttttggcgggagataaccggggagattaaaaaagagtatccggatgttgagctttcctacatgtatgttgataactgtgcaatgcagcttataaggaatccccggcagtttgatgtaatcgttaccgaaaacatgtttggggatattttaaccgatgaaggctcggttttggccggttccattggccttttaccctcggccagcttaaacggaaagtttgggttatatgagccgatccacggttcggcaccggatattgccggacaaaacaaagctaaccccctggcgacaattttatccgccgggatgatgttaagatacagtttagactgcccggaagaagcgttacttattgaaaaagcggtaaaagcagtattacaaaaaggttaccggacgggtgatattttggagccgggtactacgttagttacctgtgaagaaatgggtgatttagtagcggaagaaatcttaggtggggtttatgatgaaggtttacctttatga

SEQ ID NO: 107386 - protein, 374 aa, Carboxydothermus hydrogenoformans
MSGRSCKGPFKILVLPGDGIGPEIIKEAVKVLKALGEKKGITFNFQYGLIGGAAIDERGVPLPEETVELGKQCDAILLGAVGGPKWDNLPPEIRPELGGLLKIRKVFDLYANLRPVMFFPELKNASPLKPDIIEGVDILMVRELTGGLYFGEKKRFTTEQGEQAVIDTLIYTEKEVERVVRLGFELAQKRRGKLTLVDKANVLESSRFWREITGEIKKEYPDVELSYMYVDNCAMQLIRNPRQFDVIVTENMFGDILTDEGSVLAGSIGLLPSASLNGKFGLYEPIHGSAPDIAGQNKANPLATILSAGMMLRYSLDCPEEALLIEKAVKAVLQKGYRTGDILEPGTTLVTCEEMGDLVAEEILGGVYDEGLPL

SEQ ID NO: 107387 - DNA, 1053 bp, Caulobacter crescentus
  CDS (1)..(1053): transl_table=11
atggcgactcttctcctcctgcccggcgacggcatcggcccggaagtctgcgcgcaggtgcgccgcgtggcggccgccctcaccccagacctcaaggtggacgaagcgctctatggcggcgccagctacgatacgcacggcacgccgctgaccgacgaggtccgcgagcaggccctcgccagcgacgcggtgctgatgggcgcggtcggcggtcccaaatgggctgacgccccgcgccacctgcgccccgaagcgggccttctgaacctgcgcaaggcgatggacgtgttcgccaacctgcgtccggcctattgcttcgaggccctggccggcgcctccagcctcaagccggagctggtctcgggcctggacatcatgttcgtgcgcgaactggtgggcggcgtctatttcggccagccgcgcggcatcgaagacctggccgacggccagaagaagggcttcgacacccaggtctatacgaccagcgagatcgagcgcgttggacgcgtggcgttcgagctggcgcgcggccgcaccaacaaggtccactcggccgagaagtcgaacgtcatggagtcgggcctgctgtggaagcaggtcatcaccgagctgcacgcgcgcgaatatccggacgtccagctggagcacatcctggccgacaactgcgccatgcagctggtccgcgcgcccaagcagttcgacgtgatcgtcaccgacaacctgttcggcgacatcctgtcggacgcggcggccatgctgaccgggtcgctgggcatgctgccctcggccgccctgggcgcgccgggcaagccgggcctgtacgagccgatccacggctcggcgccggacatcgccggcaagggcctggccaatccgctggccgccatactgtcgttcgagatggccctgcgctggtcgctcaagcagaccgaggccgccgacgccctgctggcggcggtgaaggccgcactcgacaacggcgcccgcacccgtgatctgggcggttcgctgaccacgacgcagatgggcgacgcggtgctggcggcgctttag

SEQ ID NO: 107388 - protein, 350 aa, Caulobacter crescentus
MATLLLLPGDGIGPEVCAQVRRVAAALTPDLKVDEALYGGASYDTHGTPLTDEVREQALASDAVLMGAVGGPKWADAPRHLRPEAGLLNLRKAMDVFANLRPAYCFEALAGASSLKPELVSGLDIMFVRELVGGVYFGQPRGIEDLADGQKKGFDTQVYTTSEIERVGRVAFELARGRTNKVHSAEKSNVMESGLLWKQVITELHAREYPDVQLEHILADNCAMQLVRAPKQFDVIVTDNLFGDILSDAAAMLTGSLGMLPSAALGAPGKPGLYEPIHGSAPDIAGKGLANPLAAILSFEMALRWSLKQTEAADALLAAVKAALDNGARTRDLGGSLTTTQMGDAVLAAL

SEQ ID NO: 107389 - DNA, 2071 bp, Cephalosporium acremonium
  CDS (623)..(1765)
gagctccttggcggctgcttcgccggcttcgctggagaggtccgcgatgatgatgttggcgccttcggcggcgaacttggcggcgatgccccgaccgaagccggatgcggcgccggtcacgatggcggtctttccttggaggcggcctgtcatcttggttcaagtgtacaaagtaaagattgaaaatggtatcatgggaggccttcagattctgcgtcagcttctgaaagatgaggttattgaattatccgaaggatgaaacagggggaggacttctcgtaaacttcaacactgcacacattcatgtaaaataccatcatcccccgcagcagacggggcgaagaccgaaggatgcggggatatgtggagagagtacgggctaacgctgtgccactcgctcttctctcctcctccggagcgtgccacttctcctcgtctcactagcgagtggaggccgattcgggaatctcatacaccgagatcggacaacattacgggatactgaccgtacatgctagagaactttattgcttcttcgtgtccaagcattggggaccagcatcggtatcaatctcacaacatccaagatcaagttacacagcaccaccaacagtccaacactatgacgacgacttacaaaatcctcgtcctcccgggcgaccacatcggccccgaaataatggccgaagccataaaagtcctcacaacaatcgaaacccaccggcccaacctacacttcaaccttaccaccgacctcgtcggcggcacctccatcgacacccacggcgtccccataacccagtccgtcctcgacgccgccaaagctagcgacgccgtcctcttcggcagcatcggcgggcccgagtgggcaggcgtgcaccccactcccgagtccggactcctgcagctgaggcagcatcttgatgcttttgccaacctgagaccgtgcgagttccttgtgccgtcgctggtcggcgcgtcgcctatcagggagcatgttgtgaaggggacgcggtttatcgtcgtgagggagaactgcgggggtgcgtatttcggggagaagaaggaggaggaggatgttgcgtctgatctctgggtgtatactcgtcccgagattgagcgtcttgcccgtgtgagcgccgccgtggcacgcatcatgggccggtcggaggatgacaaccaggcagcgacggtgtggagcgccgacaaggccaacgtcctggcgagcggccgtctctggcgacgcatcacctcggacatcttcgcaaaggagtttccggatataaccctgcagcaccagctagcagacagtatggccatgctcatggtccgcgacccgcgccgcttcaacggcgtgatccacacggacaacacattcggggacatcctctcggacatatccggcgccataacgggaacactcggcctcatgcccagcgcgagtctctgtggcgtgcccggcgaaggtcatcggagcaatgggatctacgagcctgttcatgggagcgcgcctgatatttcgggcaagggccttgcaaatcctgttgcgcagatactgagtgtggcgatgatgttgaggtattcgatggggttggaaaaggaggcgacggcggtggagagggcagttgtaaaggtgcttgatgctaagagtgagggtggtcttgagattcggacgggcgatcttggggggagggcgacgtgtagtcaggttggggatgccgtttgtgaggtgctggggccccttttgcaaggtaagaaggcgtgaggacgggaagcatacagatgtaagtttgttccgactccatcaagtgttcgggggatgagagacatggtctaataatggtaagggtttcccctaaaaagctggagggttggatgtcgctcacacttgggataaaacacagaagagattaccaatacaaaagaactctttaagtcattatctccttcctatactctggtatataccgccaactccatccaagtctaccatcgaccgagacgcgggtcagacgtaactacatgcagatgtaattcatcccgctcgtatactgactgatctggggagctc

SEQ ID NO: 107390 - protein, 380 aa, Cephalosporium acremonium
MTTTYKILVLPGDHIGPEIMAEAIKVLTTIETHRPNLHFNLTTDLVGGTSIDTHGVPITQSVLDAAKASDAVLFGSIGGPEWAGVHPTPESGLLQLRQHLDAFANLRPCEFLVPSLVGASPIREHVVKGTRFIVVRENCGGAYFGEKKEEEDVASDLWVYTRPEIERLARVSAAVARIMGRSEDDNQAATVWSADKANVLASGRLWRRITSDIFAKEFPDITLQHQLADSMAMLMVRDPRRFNGVIHTDNTFGDILSDISGAITGTLGLMPSASLCGVPGEGHRSNGIYEPVHGSAPDISGKGLANPVAQILSVAMMLRYSMGLEKEATAVERAVVKVLDAKSEGGLEIRTGDLGGRATCSQVGDAVCEVLGPLLQGKKA

SEQ ID NO: 107391 - DNA, 1059 bp, Chlorobium tepidum
  CDS (1)..(1059): transl_table=11
atgatgtataaaattgtctctatccccggcgacggcatcggccccgaagtggtagccggtgcgctcgacgtgctgaacgccgtcgcgaaaaagcacggctttgaagtttcggtcgaggagcacctgttcggcggcgcgtcgtatgacgtgcacggctccatgctgaccgacgagacgctcgaggcatgcaagaactgcgacgcggtgctgcttggcgccgtcggcggctacaaatgggagaacctgccgcacgacaaaaagcctgaagcggccctgctgaaaatccgcaaggagctcggcctgtttgcaaacttgcgtccggcgagggtgtacgatgctctcgtggcatcatcgacgctgaaaactgaagtggtgcagggcactgactttatggtgttccgtgaactgaccggcggcatctacttcggtcagccgagaggctacgacgaaacgcgcggctggaacacaatggtttacgagcgttacgaggtagagcgcatcgcgcggcttgcgttcgaatacgcgcagaaacgcggcaacgccaaggtcacctcgatcgacaaggccaacgtacttgaagtctcacagttctggcgcaacatcgtgcatgaagtgcaccaggatttcccggaaatcgagctggtcgatatgtacgttgacaacgccgcaatgcaggtggtgcgcaacccgaagcagtttgaggtgatcgtgacgagcaacctcttcggcgacatcctgagcgacatctccggcatgatcaccggcagcctcggcatgttgccctcggccagcatcggctcggagcacgcgctctacgaaccgattcacggcagcgctcccgacatcgcgggccagaacaaggccaacccgatcgcgaccattgcatcggtggccatgatgttcgagaacagcttcaaccggcccgaagtggcggctgacatttacgcggccatcgaaggcgcgcttgctgcaggcttccgcacgggcgacatcgccgcagcgggcgaggcgatctcttcgacaacagaaatgacggcggctatcgtcgcccgaatttga

SEQ ID NO: 107392 - protein, 352 aa, Chlorobium tepidum
MMYKIVSIPGDGIGPEVVAGALDVLNAVAKKHGFEVSVEEHLFGGASYDVHGSMLTDETLEACKNCDAVLLGAVGGYKWENLPHDKKPEAALLKIRKELGLFANLRPARVYDALVASSTLKTEVVQGTDFMVFRELTGGIYFGQPRGYDETRGWNTMVYERYEVERIARLAFEYAQKRGNAKVTSIDKANVLEVSQFWRNIVHEVHQDFPEIELVDMYVDNAAMQVVRNPKQFEVIVTSNLFGDILSDISGMITGSLGMLPSASIGSEHALYEPIHGSAPDIAGQNKANPIATIASVAMMFENSFNRPEVAADIYAAIEGALAAGFRTGDIAAAGEAISSTTEMTAAIVARI

SEQ ID NO: 107393 - DNA, 1065 bp, Chromobacterium violaceum
  CDS (1)..(1065): transl_table=11
atgaagatcgccattctgccgggagacggcatcggccccgaaatcatcgcccaggccgaacgcgtgctggaggtgctgcgtcgcgacggtctgaagatcgaaaccgagcatgcgccgctgggcggcgccgcttacgaccagtacggcgtgccgtatcccgaggccacgcagaaactggcgcgcgaagccgacgccgtgctgctgggcgcggtgggcggccccgcctacgacaagctggaccgtccgctgcgcccggagcgcggcctgctggcgatccgcaaggacctcaacctgttcgccaacctgcggccggccatcctgtatccggagctggccaacgcctcgacgctgaagccggaagtggtggccgggctggacatcatgatcgtccgcgagctgaccggcgacatctacttcggccagccgcgcggcatcgccgtcaacgagctgggcgagcgcgaggcctacaacaccatgcgctacagcgagagcgaagtgcgccgcatcgcccacgtggccttcggcatcgccatgaagcgcaaccgcaagctgtgctcggtggacaaggccaatgtgctggaaaccaccgaattctggaaggaaatcatgatcgaggtggccaaggagtatccgcaagtggagctcagccacatgtacgtcgacaacgccgcgatgcagctggtgcgcaacccgaagcagttcgacgtgatggtcaccggcaacatcttcggcgacatcctgtccgacgaggcctcgatgctgaccggctccatcggcatgctgccgtccgcctcgctggatcagaacaacaagggcctgtacgagcccagccacggctcggcgccggacatcgccggccagaacctggccaacccgctggccaccatcctgtccgccgcgatgatgctgcgctacagcttcggccaggaagccgccgcccggcgcgtggaggacgcggtgaaaaaggtgctggcccagggctaccgcaccgccgacatctacgaagccggctgcgagaaggtcagttgctccggcatgggcgacgcggtggtggcggcgatgtga

SEQ ID NO: 107394 - protein, 354 aa, Chromobacterium violaceum
MKIAILPGDGIGPEIIAQAERVLEVLRRDGLKIETEHAPLGGAAYDQYGVPYPEATQKLAREADAVLLGAVGGPAYDKLDRPLRPERGLLAIRKDLNLFANLRPAILYPELANASTLKPEVVAGLDIMIVRELTGDIYFGQPRGIAVNELGEREAYNTMRYSESEVRRIAHVAFGIAMKRNRKLCSVDKANVLETTEFWKEIMIEVAKEYPQVELSHMYVDNAAMQLVRNPKQFDVMVTGNIFGDILSDEASMLTGSIGMLPSASLDQNNKGLYEPSHGSAPDIAGQNLANPLATILSAAMMLRYSFGQEAAARRVEDAVKKVLAQGYRTADIYEAGCEKVSCSGMGDAVVAAM

SEQ ID NO: 107395 - DNA, 1074 bp, Clostridium acetobutylicum
  CDS (1)..(1074): transl_table=11
atgaaagaatataaggtggccgttatacctggtgatggaatcggtgttgaaatagtaggagaagctcttaaggttcttgaaaaagtaggagcgaaatacgatactaagtttaattttacagaggttaaggcaggaggatgtgctatagatgaatttggagtacctcttccaaacgaaactttagaaatctgtaaaaactcggatgcagtacttttgggagcggtaggaggacctaagtgggatactcttccgggagaaaaaagacctgaaaaggctcttatgggtttaagaggtggacttggactttatgctaacttaagaccagcaaaggtttatgatattttaaaatctgcatctcctttaaaggaagaaatcataaacaagggagtagatttacttgttgtaagagagcttacaggaggaatttactttggagaaagaggaagagatattcaaaacggaataaactcagcttatgatactgaaagatataatgtagaagagataaagagaattgcacatgttgcttttaaagctgctcttaagagaaataagaaggttacttctgtagataaagcaaatatattggaatcttcaaggctttggagagaaacagtaacagaggttgcaaaggaatatccagaggttgaattaaactatctttacgttgataatgcagcaatgcagcttgtacgtgaaccatcacaatttgatgtaatagtaaccagcaacatattcggagatattcttacagatgaggcttcaatggtaacaggctcaataggaatgctgccatcggcaagtcttagaaatgatacttttggaatgtatgagccaatacacggttctgcaccagatattgcaggacaagatttagcaaatccattagcacaaatattatcagttgcaatgatgcttgaatattcatttaatatgactgaagctgcaagagatgtagaagatgcagtagaaaaagttttaaatagtggatacagaactggtgatatatacacagaaggaagtaaaaaagttggaacaaaagaaatgggtaagcttgttttagctgaactttaa

SEQ ID NO: 107396 - protein, 357 aa, Clostridium acetobutylicum
MKEYKVAVIPGDGIGVEIVGEALKVLEKVGAKYDTKFNFTEVKAGGCAIDEFGVPLPNETLEICKNSDAVLLGAVGGPKWDTLPGEKRPEKALMGLRGGLGLYANLRPAKVYDILKSASPLKEEIINKGVDLLVVRELTGGIYFGERGRDIQNGINSAYDTERYNVEEIKRIAHVAFKAALKRNKKVTSVDKANILESSRLWRETVTEVAKEYPEVELNYLYVDNAAMQLVREPSQFDVIVTSNIFGDILTDEASMVTGSIGMLPSASLRNDTFGMYEPIHGSAPDIAGQDLANPLAQILSVAMMLEYSFNMTEAARDVEDAVEKVLNSGYRTGDIYTEGSKKVGTKEMGKLVLAEL

SEQ ID NO: 107397 - DNA, 1089 bp, Colwellia psychrerythraea
  CDS (1)..(1089): transl_table=11
atgtccaacatagcaattctagccggtgatggtatcggcccagaagtcatggttgaagctaaaaaagtgttaaacacggtagcgagcaagtttgattttgaaataacaactcaagactatgatattggtggtgctgccattgataatcacggtaatgctttgcctgattcaaccatggctggttgtatagagagcgatgctattttatttggtagcgttggtggtcctaaatgggcaaatttaccgccaacagagcaaccagaacgctgtgccttattaggtttacgtagccacttcgatttattttgcaacatgcgcccagcaacattacaacctgcgttatcctcgttatctactttgcgtagcgatatttccgagcaaggttttgatgtattagtgatccgtgaattaaccggtgatatctattttggcgaaccaaaaggccgtagaggtgaaggcgaagaagaaacaggttttgattctatgttttattcacgccgtgaagttaaacgtatcagccaccttgcttttcaagcagcgcaaaagcgtaataacaaagtgacttctgttgataaagccaatgtattagcaaccagtcaattatggcgtcaagtggttgaagaagttgcagtagagtatcctgacgttgaattagagcacctttatgttgataacgctgctatgcagttagttcgcgatcctaaccagtttgatgtgatgctttgccctaacttgttcggtgatattttatctgatatttgcgccatgattaccggctctatgggcctgttaccttcagcgagcttaaacagcgacggttttggtatgtatgagcctgctggtggcagcgcaccagacattgcaggccttggcgtagctaaccctattgctcaaattctatcagcggcattaatgcttcgttatagcttaaatcaaggtgcagcagccaaagcgattgaagatgcagtatcaaatgcacttgataatggtgtgttaactgctgatttattaccagccaacgaacgaaaaaatgctaaatcaaccagtgaagtgggtgattatatttgtaaacagattgagagcgcataa

SEQ ID NO: 107398 - protein, 362 aa, Colwellia psychrerythraea
MSNIAILAGDGIGPEVMVEAKKVLNTVASKFDFEITTQDYDIGGAAIDNHGNALPDSTMAGCIESDAILFGSVGGPKWANLPPTEQPERCALLGLRSHFDLFCNMRPATLQPALSSLSTLRSDISEQGFDVLVIRELTGDIYFGEPKGRRGEGEEETGFDSMFYSRREVKRISHLAFQAAQKRNNKVTSVDKANVLATSQLWRQVVEEVAVEYPDVELEHLYVDNAAMQLVRDPNQFDVMLCPNLFGDILSDICAMITGSMGLLPSASLNSDGFGMYEPAGGSAPDIAGLGVANPIAQILSAALMLRYSLNQGAAAKAIEDAVSNALDNGVLTADLLPANERKNAKSTSEVGDYICKQIESA

SEQ ID NO: 107399 - DNA, 1023 bp, Corynebacterium glutamicum
  CDS (1)..(1023): transl_table=11
atgaaacttgctgttattggtggagatggtatcggcccagaggttactgcagaagccctcaaggttctaaacgctgtccgcgacgacatcgagaccaccgattatgaccttggcgcacgccgttacctcaaaaatggcgagctgctcaccgacgaggatctggcatccctgcgcgagcatgacgcgatccttcttggcgctatcggtgcaccaggttccgtccctccaggaattctcgagcgtggtttgctgctgaagatgcgattcgcactggatcaccacgtgaacctgcgcccatccaagctgtacgacggcgtggagtccccactgcgtaacccaggcaagattgatttcgttgtggtccgcgaaggtaccgaaggcgcctacactggcaacggtggagcaatccgcgtgggaacccctcacgagattgccaatgaaacctccgtgaacactcgctacggcgctgagcgcgttattcgctacgcattcgagctggcacagagccgccgcaagaagctcaccctcgtgcacaagaccaacgtcctggttcacggtggtggcctgtggcagcgcaccgtagatgaggttgcaaaggaatacccagaggtagccgtcgattacaaccacatcgatgcagcaaccatctatctggtcactgatccttcccgcttcgatgtgattgttaccgataacctcttcggcgacatcctcaccgatgaggcaggcgcagtctctggcggaattggcctcgcagcatccggcaacatcgatgccacgggcaccaacccttccatgttcgagccagtccacggctctgcaccagatatcgcaggccagggaatcgcagacccaacggcagcaatcctatccgctgcgatgctgctgcgtcacttaggtgatgaagacaacgcagtacgtattgaaacagccatcgcagctgatgtggctggccgagataactctcagccgatttctaccactgaggtgggagaccgcatcgtcaaggcgctgcaaagctaa

SEQ ID NO: 107400 - protein, 340 aa, Corynebacterium glutamicum
MKLAVIGGDGIGPEVTAEALKVLNAVRDDIETTDYDLGARRYLKNGELLTDEDLASLREHDAILLGAIGAPGSVPPGILERGLLLKMRFALDHHVNLRPSKLYDGVESPLRNPGKIDFVVVREGTEGAYTGNGGAIRVGTPHEIANETSVNTRYGAERVIRYAFELAQSRRKKLTLVHKTNVLVHGGGLWQRTVDEVAKEYPEVAVDYNHIDAATIYLVTDPSRFDVIVTDNLFGDILTDEAGAVSGGIGLAASGNIDATGTNPSMFEPVHGSAPDIAGQGIADPTAAILSAAMLLRHLGDEDNAVRIETAIAADVAGRDNSQPISTTEVGDRIVKALQS

SEQ ID NO: 107401 - DNA, 1149 bp, Debaryomyces hansenii
  CDS (1)..(1149)
atgtcccaacctgaattaaaaaaatcaaaagttgatataagcaaaaccatcacagttttaccaggtgatcatgtcggtgaagaagtttgtaacgaggccatcaaagtcttacaagctattgaggatgctaccccatacagaaacattaagttcaatttgcaaaaacatttgataggtggtgccgcaattgacgctactggtactccattaccagatgaatctttggaggctgcaaaaaattctgatgctgtcttattaggtgctgtcggtggcccaaaatggggtaccggttccgttagacctgagcaaggtttattaaaaattagaaaggaattgaacttatatgctaacttgagaccatgtaactttgcgtccgatagcttattagaattgtctccattaaagtctgagattgtgaagggtactgattttactgttgttcgtgaattagttggtggtatctattttggagaaagacaagaacaagcagaatcagaagacaagcagactgcatgggatactgaaaagtattctactgaagaagtaactagaattactagaatggcagcatttatggcgttacaacataatccaccattaccaatctggtctttagataaggctaatgttttggcgtcttcaagattatggagaacaactgttgataaagttatgtctgaagaatttccacaattaacaattcaacatcaattaattgactcggcggctatgattttggttcaatctccaactaagttaaatggtattattatcacttctaatatgtttggtgatattatttctgatgaagcatctgttatccctgggtcattggggctcttaccttctgcttctttggcttcgttgccagatactaattccgcttttggtttgtatgaaccatgtcatggttcagctccagatttgacggaaaacaaagttaatcctgtcgctaccatattatccgtagcaatgatgttaaggttatctttggattgtgtaccagaagctgaagctttggaaaaggcagtcggtcaagtcttagattccggaataagaacaggagatttacgtggttcaagctccactaaagaagtcggtgatgcgatcgcggaagcagtcaagaaggtattgaatcaatcagtctag

SEQ ID NO: 107402 - protein, 382 aa, Debaryomyces hansenii
MSQPELKKSKVDISKTITVLPGDHVGEEVCNEAIKVLQAIEDATPYRNIKFNLQKHLIGGAAIDATGTPLPDESLEAAKNSDAVLLGAVGGPKWGTGSVRPEQGLLKIRKELNLYANLRPCNFASDSLLELSPLKSEIVKGTDFTVVRELVGGIYFGERQEQAESEDKQTAWDTEKYSTEEVTRITRMAAFMALQHNPPLPIWSLDKANVLASSRLWRTTVDKVMSEEFPQLTIQHQLIDSAAMILVQSPTKLNGIIITSNMFGDIISDEASVIPGSLGLLPSASLASLPDTNSAFGLYEPCHGSAPDLTENKVNPVATILSVAMMLRLSLDCVPEAEALEKAVGQVLDSGIRTGDLRGSSSTKEVGDAIAEAVKKVLNQSV

SEQ ID NO: 107403 - DNA, 1059 bp, Deinococcus radiodurans
  CDS (1)..(1059): transl_table=11
atgcctaaagtcattaccctgcccggcgacggcatcggccccgaagtgacggcggcggcagttcaggtgctgcgcgaagtggcgcccgacgtgacggtggaggagcacgccatcggcggcggcgcctacgacgctcacggcgaaccgtttcctacgtccacccgcgacgccctcaaggaagccgacgcggtgctgctcggcacggtgggcggtgcccacgacagcgcgtggaaccagttgccccggcacctgcgccccgagtcgggcctgctcgcgctgcgtaaggcgctcggctgctacgccaacctgcgcccagtgcgcgtgcagccggggctcgaacacctctcgccgctcaaggccgaactggcgcgcggcgtggacatcctgatcgtgcgggagctgctgggcgggatttatttcgaccaggaccgcaaaatcgagggtgacaccgcctacaacaccatgcgctacaccaccagcgaggtggagcgggtcgccaaagtcgccttctgggccgccgagcagcgcaagggccgcgtgaccagcgtggacaaggcgaacgtgctcgaagtgtccgagttgtggcggcgcgacgtgcaggcgttgcgtgaccgcgactaccgctcgattcacctgaaccacgagtacgtggacagcgtggcgatgctgatcgtggccgaccccagccgctacgacgtgattctgaccgagaacctcttcggcgacatcctttccgacctcgccgccgtgattcctggctcgctgggcctgatgccctcggccagcctgggcgacggggcggggctgtttgaaccgattcacggctcggcgcccgacatcgccgggcagggcgtcgccaaccccgccgccgccatcatgagcgtgggcatgttgctgcggcacgggctggagcgcagcgaggccgccaatcaggtggaccgggcggtggcgctcgccctgcgtgagcagcccacccgcgacctcggcggcagcgccgacacgcagacctttacccgcgcggtcctcaaggcgctggggagttcgccgagcgtgggctga

SEQ ID NO: 107404 - protein, 352 aa, Deinococcus radiodurans
MPKVITLPGDGIGPEVTAAAVQVLREVAPDVTVEEHAIGGGAYDAHGEPFPTSTRDALKEADAVLLGTVGGAHDSAWNQLPRHLRPESGLLALRKALGCYANLRPVRVQPGLEHLSPLKAELARGVDILIVRELLGGIYFDQDRKIEGDTAYNTMRYTTSEVERVAKVAFWAAEQRKGRVTSVDKANVLEVSELWRRDVQALRDRDYRSIHLNHEYVDSVAMLIVADPSRYDVILTENLFGDILSDLAAVIPGSLGLMPSASLGDGAGLFEPIHGSAPDIAGQGVANPAAAIMSVGMLLRHGLERSEAANQVDRAVALALREQPTRDLGGSADTQTFTRAVLKALGSSPSVG

SEQ ID NO: 107405 - DNA, 1077 bp, Desulfovibrio desulfuricans
  CDS (1)..(1077): transl_table=11
atggaaatgcgcatatgcctgcttgccggtgacggcatagggccggagataatggaacagggcgtgcgggtgctggaaaccgtggccggaaaattcggccacgacatggaatttaccgatgcgcttatcggcggagcggccattgacgaaacaggcgatcccctgccgcaggaaaccgtggaagcctgcaaagcggcccaagccgtgctgctgggtgctgtgggcggcccccgctgggacaacctgaccggcgccgaacgacccgaagccggtctgctcggcatccgcaaagctctcggcctgtttgccaacctgcgccccgcaaaactttttcccgaactggcaagcgcctgctttctgcggcctgacatagttgccaacggcattgatgtcatggtggtacgcgaactgaccggcggcatttatttcggcactccggccggtgaagaaacccgtgacggcctgcggaccgcctttaacaccatggtgtacaacgaagaagaagtccgccgcatcgcccgcgtggcttttgaagccgcccgcaagcgctccggcagggtctgctcggtggacaaggccaacgtgctggccgtgtcgcgtctgtggcgcgagatagtcacagccacccacgccgacgaattccccgacgtggagctttcgcacatgtatgttgacaacgcggccatgcagctggtgcgcgacccatcgcagtttgacgtcatcgtgaccggcaacctgttcggcgacattctttcggatgaagcttcggtcatcaccggttccattggcatgctgccatcggcttcgctgggtgccggagggcccggactgttcgaacccatccacggctccgcccccgacatcgccgggcagaacaaagccaacccgctggctaccattctttccacagccatgatgctgcgccacagcttcgggctggaaaaagaagccgaagccgtcgaaggcgccgtgcaacaggtactcaaagccggctaccgcaccggtgacataatggatcagggcggcacgctggtgggatgcaacaccatgggcaaccttgtcaacgaacgcatctga

SEQ ID NO: 107406 - protein, 358 aa, Desulfovibrio desulfuricans
MEMRICLLAGDGIGPEIMEQGVRVLETVAGKFGHDMEFTDALIGGAAIDETGDPLPQETVEACKAAQAVLLGAVGGPRWDNLTGAERPEAGLLGIRKALGLFANLRPAKLFPELASACFLRPDIVANGIDVMVVRELTGGIYFGTPAGEETRDGLRTAFNTMVYNEEEVRRIARVAFEAARKRSGRVCSVDKANVLAVSRLWREIVTATHADEFPDVELSHMYVDNAAMQLVRDPSQFDVIVTGNLFGDILSDEASVITGSIGMLPSASLGAGGPGLFEPIHGSAPDIAGQNKANPLATILSTAMMLRHSFGLEKEAEAVEGAVQQVLKAGYRTGDIMDQGGTLVGCNTMGNLVNERI

SEQ ID NO: 107407 - DNA, 1059 bp, Desulfitobacterium hafniense
  CDS (1)..(1059): transl_table=11
atgcctaaaattgcagtattgcccggcgatggcatcgggcaggaaattattccccaggccgtacgggtgctgaaagcagtcttggctgaaacggatgctgaatttgagtttcaggactatcccatagggggagcggccatcgaattggtggggaaagccttgccggatgagaccttgcagggttgccgggaagctgacgcggttctgttaggtgccgtagggggacatcaatgggatcatctccctgcctcggaacgtccggaaacagcggctcttttaggcctgcgcaaagggctgaacttctatgccaatatccgccctgtgcgcatgattcccagcctgttggccacttctacccttaaagagaacgtgctggacggggtggatatggtggttatccgggaattgaccggaggggtttatttcggggaaaaaggccgttcagataaccctcgttcagcatacgataagatgacctattcagaagaagagattcggcgcatcctgatccaaggctttgagacagctatgctccgcagcaaaaagctttgctccgtggataaggccaatgttctggaaacctcccgcctttggagagagatagccaatgaattagctaaagagtatcctgaagtggagctcacgcatatgtatgtggataatgcggccatgcaattggtccgcaaccccaagcaattcgatgtcatcgtcacggagaacatgttcggggatattctcaccgatctggcctccatgttgggcggctccatcggtatgctctcctcagcaagcttgagcggcacccaggggatgtatgaaccggctcatggttctgcccccgatatcgccggtaagaacctggctaatcctctggccactattctttccgcagctttgatgcttcgctattcttttggtatggaggccgaagcattacgcattgagagcgctgtggaaaaggtcctggagcaagggtatcggactggggatctggcccaggcaggggataaggttgtgggaacgatagagatgggcgatgcagtgctggctgcactgtaa

SEQ ID NO: 107408 - protein, 352 aa, Desulfitobacterium hafniense
MPKIAVLPGDGIGQEIIPQAVRVLKAVLAETDAEFEFQDYPIGGAAIELVGKALPDETLQGCREADAVLLGAVGGHQWDHLPASERPETAALLGLRKGLNFYANIRPVRMIPSLLATSTLKENVLDGVDMVVIRELTGGVYFGEKGRSDNPRSAYDKMTYSEEEIRRILIQGFETAMLRSKKLCSVDKANVLETSRLWREIANELAKEYPEVELTHMYVDNAAMQLVRNPKQFDVIVTENMFGDILTDLASMLGGSIGMLSSASLSGTQGMYEPAHGSAPDIAGKNLANPLATILSAALMLRYSFGMEAEALRIESAVEKVLEQGYRTGDLAQAGDKVVGTIEMGDAVLAAL

SEQ ID NO: 107409 - DNA, 1074 bp, Desulfovibrio vulgaris
  CDS (1)..(1074): transl_table=11
atgcacatgaacatatgccttctgccaggtgacggcatcggcccggaaatcgtggcgcagggcaccaaggtgctggacgccgtggcacgccgcttcggtcacacggtgagcacctcctccgccctcatcggcggcgctgccatcgacgccaccgggtcgccgctgcccgacgccaccgtggaagcgtgccgcaccagtgacgccgtactgctgggcgccgtgggcggcccgaaatgggacgacctgcccagcgagaaacgcccggagaagggactgctcggcatacgcaaggcccttggactgttcgcgaacctccgtcccgccgcccttttccccgaactggcaggggcgtgcctgctgcgtgcagacatcgccgctgcggggctcgacctcgtggtggtgcgcgaactcacgggcgacgtctatttcgggcagcctgccggaatcgagacgcgcgacggcctgcgtaccggcttcaacaccatgatctatgacgaggatgaggtgcgccgcatcgcccgcgttgcgttcgacaccgcacgggcacgcaagcggcgggtctgctccgtggacaaggccaacgtgctcgccacgtcgcgcctgtggcgcgaggtcgtcgaagaggtggcccgcgactaccccgatgtggaactctcgcacatgtacgtcgacaacgccgccatgcagcttgtgcgctggcccgcacagttcgacgtcatcgtcaccggcaacctcttcggcgacatcctctccgacgaggcggccgtcatcacgggttccatcggcatgttgccctcggcctccatggggtctggcggccctgccctgttcgagcccatccacggttcggcacccgacatcgccggacaggacaaggccaaccccatcgccaccatcctgtcggtgggcatgatgctgcgcctcggcttcgggctggccgcagaagcagacgccatcgacgcggcggtacgccgtgttctcgcggaaggctaccgcaccggcgacatcatggagaacggtcgcaccctcgtgggtaccgtgagcatgggcaacctcatcgccgaacgcatctga

SEQ ID NO: 107410 - protein, 357 aa, Desulfovibrio vulgaris
MHMNICLLPGDGIGPEIVAQGTKVLDAVARRFGHTVSTSSALIGGAAIDATGSPLPDATVEACRTSDAVLLGAVGGPKWDDLPSEKRPEKGLLGIRKALGLFANLRPAALFPELAGACLLRADIAAAGLDLVVVRELTGDVYFGQPAGIETRDGLRTGFNTMIYDEDEVRRIARVAFDTARARKRRVCSVDKANVLATSRLWREVVEEVARDYPDVELSHMYVDNAAMQLVRWPAQFDVIVTGNLFGDILSDEAAVITGSIGMLPSASMGSGGPALFEPIHGSAPDIAGQDKANPIATILSVGMMLRLGFGLAAEADAIDAAVRRVLAEGYRTGDIMENGRTLVGTVSMGNLIAERI

SEQ ID NO: 107411 - DNA, 1735 bp, Escherichia coli
  CDS (28)..(1119): transl_table=11
caacgaaaacaacaaggaaaccgtgtgatgtcgaagaattaccatattgccgtattgccgggggacggtattggtccggaagtgatgacccaggcgctgaaagtgctggatgccgtgcgcaaccgctttgcgatgcgcatcaccaccagccattacgatgtaggcggcgcagccattgataaccacgggcaaccactgccgcctgcgacggttgaaggttgtgagcaagccgatgccgtgctgtttggctcggtaggcggcccgaagtgggaacatttaccaccagaccagcaaccagaacgcggcgcgctgctgcctctgcgtaagcacttcaaattattcagcaacctgcgcccggcaaaactgtatcaggggctggaagcattctgtccgctgcgtgcagacattgccgcaaacggcttcgacatcctgtgtgtgcgcgaactgaccggcggcatctatttcggtcagccaaaaggccgcgaaggtagcggacaatatgaaaaagcctttgataccgaggtgtatcaccgttttgagatcgaacgtatcgcccgcatcgcgtttgaatctgctcgcaagcgtcgccacaaagtgacgtcgatcgataaagccaacgtgctgcaatcctctattttatggcgggagatcgttaacgagatcgccacggaatacccggatgtcgaactggcgcatatgtacatcgacaacgccaccatgcagctgattaaagatccatcacagtttgacgttctgctgtgctccaacctgtttggcgacattctgtctgacgagtgcgcaatgatcactggctcgatggggatgttgccttccgccagcctgaacgagcaaggttttggactgtatgaaccggcgggcggctcggcaccagatatcgcaggcaaaaacatcgccaacccgattgcacaaatcctttcgctggcactgctgctgcgttacagcctggatgccgatgatgcggcttgcgccattgaacgcgccattaaccgcgcattagaagaaggcattcgcaccggggatttagcccgtggcgctgccgccgttagtaccgatgaaatgggcgatatcattgcccgctatgtagcagaaggggtgtaatcatggctaagacgttatacgaaaaattgttcgacgctcacgttgtgtacgaagccgaaaacgaaaccccactgttatatatcgaccgccacctggtgcatgaagtgacctcaccgcaggcgttcgatggtctgcgcgcccacggtcgcccggtacgtcagccgggcaaaaccttcgctaccatggatcacaacgtctctacccagaccaaagacattaatggctgcggtgaaatggcgcgtatccagatgcaggaactgatcaaaaactgcaaagaatttggcgtcgaactgtatgacctgaatcacccgtatcaggggatcgtccacgtaatggggccggaacagggcgtcaccttgccggggatgaccattgtctgcggcgactcgcataccgccacccacggcgcgtttggcgcactggcctttggtatcggcacttccgaagttgaacacgtactggcaacgcaaaccctgaaacagggccgcgcaaaaaccatgaaaattgaagtccagggcaaagccgcgccgggcattaccgcaaaagatatcgtgctggcaattatcggtaaaaccggtagcgcaggcggcaccgggcatgtggtggagttttgcgg

SEQ ID NO: 107412 - protein, 363 aa, Escherichia coli
MSKNYHIAVLPGDGIGPEVMTQALKVLDAVRNRFAMRITTSHYDVGGAAIDNHGQPLPPATVEGCEQADAVLFGSVGGPKWEHLPPDQQPERGALLPLRKHFKLFSNLRPAKLYQGLEAFCPLRADIAANGFDILCVRELTGGIYFGQPKGREGSGQYEKAFDTEVYHRFEIERIARIAFESARKRRHKVTSIDKANVLQSSILWREIVNEIATEYPDVELAHMYIDNATMQLIKDPSQFDVLLCSNLFGDILSDECAMITGSMGMLPSASLNEQGFGLYEPAGGSAPDIAGKNIANPIAQILSLALLLRYSLDADDAACAIERAINRALEEGIRTGDLARGAAAVSTDEMGDIIARYVAEGV

SEQ ID NO: 107413 - DNA, 1116 bp, Geobacillus kaustophilus
  CDS (1)..(1116): transl_table=11
atgggaaactatcggattgccgtcttgccaggggatggcatcggcaaagaagtgacgtccggagcggtcgaggtattaaaagcggtcggcatccggtttggccacgagtttacgtttgaatatggattgatcggtggagcggcgatcgatgaggcggggacgccgctccccgaggaaacgctccgcctttgccgagaaagcgatgcggtgctgcttggggcggtcggcggtccgaagtgggatgacaaccctccgcatttgcgcccggaaaaaggattgcttgccattcgcaagcagctcgacttatatgccaacttgcggccggttgtttgctatgacagtttggtttccgcttcgccgttaaaaccggatctcgtgcaaggcgtcgattttgtcatcgtccgcgagctgaccggcggcatttacttcggccagccgagcggccgcgtcgtcgaaaacggcgaagaaaaagcagtggacaccttgttatataaaaaggaagaaattgagcggatcgtccgcatggcgtttatactcgcacgcgggcggaagaaaaaagtgacttcggtcgacaaggcgaacgtcctttcgtcaagccgtctatggagggaagtggccgaagaggtggcgaagcagtttccggacgtcacgcttgagcatatgcttgttgacaatgccgcgatgcagctcatccgcgcgccgaagcagtttgatgtcattgtgacagaaaacatgtttggcgacattttaagcgatgaagcctccatgttgtccggttcgctcgggatgctgccgtcagccagcttatccgcttccggtccgagcttgtatgagccggtgcacggttcagcgcctgatatcgccggcatgaacaaagccaatccgattgcggcgattttgtcagccgcgatgatgcttcgcctgtcgttcgggctcaccgcggaagcggaggcggtagagcacgcggtgcggcaggcgctcgatcaaggtttgcgcaccgccgacttggcgccaagcggcggccgcatcgtatcaacgaacgaaatggtcgaagaaatcaaaacagcggtgctggattatacggccattgctcaaattatgaccgtttatgcctaa

SEQ ID NO: 107414 - protein, 371 aa, Geobacillus kaustophilus
MGNYRIAVLPGDGIGKEVTSGAVEVLKAVGIRFGHEFTFEYGLIGGAAIDEAGTPLPEETLRLCRESDAVLLGAVGGPKWDDNPPHLRPEKGLLAIRKQLDLYANLRPVVCYDSLVSASPLKPDLVQGVDFVIVRELTGGIYFGQPSGRVVENGEEKAVDTLLYKKEEIERIVRMAFILARGRKKKVTSVDKANVLSSSRLWREVAEEVAKQFPDVTLEHMLVDNAAMQLIRAPKQFDVIVTENMFGDILSDEASMLSGSLGMLPSASLSASGPSLYEPVHGSAPDIAGMNKANPIAAILSAAMMLRLSFGLTAEAEAVEHAVRQALDQGLRTADLAPSGGRIVSTNEMVEEIKTAVLDYTAIAQIMTVYA

SEQ ID NO: 107415 - DNA, 1089 bp, Geobacter metallireducens
  CDS (1)..(1089): transl_table=11
atgtctcaggtgttcaaggtggcggttcttcccggtgacggcatcggtcccgaggttatggccgaggcgctccgggtgctggacgccatagagaagaagtacgacgtgaaattcgagcggacccacgccaatgtcgggggcgccggtattgaccttgaagggaaggccctccccgaaactaccattactatctgcaagacgtccgatgccatcctcttcggctccgtgggcggccccaagtgggagacgcttcccccggatgagcagcccgagcggggcgcgctccttcccctcagaaagatcttcggtctctacgccaacctgcggccggccatcattttcccgtccctgacgggcgcttcttccctcaaggaggaggtcatcgccggcggtttcaacgtgctggttatccgcgagctgaccggcggcatctactttgcccagcccaaggggatcgaaggcgaggggcgcgaccgggtcggcttcgacaccatgcgctacagtgtccccgagatcgaacggatcacccacgttgccttccaggcggctcgcaagcggggcaaaaaggtctgctccatcgacaaggccaacgttctctcctcgtcggtcctctggcgcgaggtggtcaccggcattgccaaggaatacccggacgtggagctctcccacatgtacgtggacaatgctgccatgcagctggtccgctggcccaagcagttcgatgtcatcctctgcgagaacatgttcggcgatatcctctccgatgaggcagccatgctgaccggctccctggggatgctcccctccgcgtcgcttgccgaggggaccttcggcatgtacgagccctccggcggcagcgccccggacattgcggggcaagggattgcgaaccccatcgcccagatcctctccatggggatgatgctccgcttctccttcggcatggtggacgcggccgatgccattgacaacgccgtggccaaggtgctcgaccagggatgtcggacccgtgacatctttcaggagaagccgggcgaaaagctcgtcaacaccaaagagatgggtgacgcgatcatcgtggccctgtaa

SEQ ID NO: 107416 - protein, 362 aa, Geobacter metallireducens
MSQVFKVAVLPGDGIGPEVMAEALRVLDAIEKKYDVKFERTHANVGGAGIDLEGKALPETTITICKTSDAILFGSVGGPKWETLPPDEQPERGALLPLRKIFGLYANLRPAIIFPSLTGASSLKEEVIAGGFNVLVIRELTGGIYFAQPKGIEGEGRDRVGFDTMRYSVPEIERITHVAFQAARKRGKKVCSIDKANVLSSSVLWREVVTGIAKEYPDVELSHMYVDNAAMQLVRWPKQFDVILCENMFGDILSDEAAMLTGSLGMLPSASLAEGTFGMYEPSGGSAPDIAGQGIANPIAQILSMGMMLRFSFGMVDAADAIDNAVAKVLDQGCRTRDIFQEKPGEKLVNTKEMGDAIIVAL

SEQ ID NO: 107417 - DNA, 1110 bp, Gluconobacter oxydans
  CDS (1)..(1110): transl_table=11
atgagcgacgcatacaagcttctggttctggccggagacgggatcggtccagaagtcatgcgcgaagtcgcgcggatcgtgcactggatgagtgcgcatcgcgggctgaagcttgaaattacggaagaactcgtcggtgcggcttctctggccgtccatggcgtgccgatccgtgatgaggtcattgaactggcccgtcagtctgacgcggtgctgttcggctcggtgggcgatccggcttggagccatgtgggcttcgacaagcgtcccgaagtggcgatcctcaagctccgcaaggaacttgaactgttcgccaatctgcgtcccgccaagctgttcgatgccctgatcgatgcctctgcgctgaagcctgaagtggtgcgcgggctggacctgatgatcgtccgtgagacggtcgggggcatctatttcggtgagccgcgtgggatcgagacgctgcccgatggctcgcgtcgtggcatcaacacggaagtctacacgacgtccgaaatcgagcgtgtggcacgggttgctttcgatcttgcccgcaagcgcgacaaccgcgtgtgttcggtcgagaagtgcaatgtcatggaaagcggccttctgtggaaggaggtcgtgaccgatgtccacaagcgtgaatatccggacgtccagctgtctcacatgctggcggataactgcgcgatgcagctggtccgcgacccgaaccagttcgacgttatcgttacgggcaacctgttcggcgacatcctgtccgatctggcctccatgctgacgggctcgctcggcatgctgccttcggccacgcttggcccggttcgcgcggatggcaagcgcaatgccctgtacgagccgatccatggcagcgcaccggacatcgcgggcaaggggatcgccaatccgctggcccagatcctttcgtttgccatgctgctgcgttactcgctcaatcgtgccgaggatgccgacctgatcgagatggcggtttcgaatgtcctggcttcgggtctgcggaccggcgacatcatgtcaccgggaatggctcgagtcggcaccgaaatgatggggcaggcggtacttcgcgaaatggaaaagctggcctga

SEQ ID NO: 107418 - protein, 369 aa, Gluconobacter oxydans
MSDAYKLLVLAGDGIGPEVMREVARIVHWMSAHRGLKLEITEELVGAASLAVHGVPIRDEVIELARQSDAVLFGSVGDPAWSHVGFDKRPEVAILKLRKELELFANLRPAKLFDALIDASALKPEVVRGLDLMIVRETVGGIYFGEPRGIETLPDGSRRGINTEVYTTSEIERVARVAFDLARKRDNRVCSVEKCNVMESGLLWKEVVTDVHKREYPDVQLSHMLADNCAMQLVRDPNQFDVIVTGNLFGDILSDLASMLTGSLGMLPSATLGPVRADGKRNALYEPIHGSAPDIAGKGIANPLAQILSFAMLLRYSLNRAEDADLIEMAVSNVLASGLRTGDIMSPGMARVGTEMMGQAVLREMEKLA

SEQ ID NO: 107419 - DNA, 1095 bp, Hansenula anomala
  CDS (1)..(1095)
atgagtgaaaagacaattgttgttttaccaggtgaccacgttggtactgaaattactaatgaagctatcaaagttttgaaagccattgaagaagttcgtccaaacgtcaaatttaactttcaacaccatttaatcggaggtgctgccattgatgctactggtgttccattacctgatgaagctttagaagctgctaaaaaggctgatgctgttttattaggtgctgttggtggtccaaaatggggaactggtgctgtcagaccagaacaaggtttattgaaaattagaaaagaattaaacctctatgctaatctaagaccttgtaattttgcaagtgaatctttactagaactatcaccaatcaaagctgaatttgcaaaaggtactgacttcaccgttgttagagaattagttggtggtatctattttggtgaaagaaaagaagatgacggttctggtgttgcttcagatactgaaacttactcggttccagaagttcaaagaatcactagaatggctgcattcatggcgttacaacataacccacctttaccaatctggtccttagataaagctaatgttttagcatcatcaagattatggagaaaaactgttactgaaacaattgaaaaggaatttccacaattgactgttcaacatcaattgattgactccgctgctatgatcttgatcaaatctccaacaactttgaatggtatagttattacttcaaacatgtttggtgatattatttcagatgaagcatccgttatcccaggttcattgggtttattaccatcagcttctttagcttctttacctgatacaaacaaagcttttggtttatatgaaccttgtcacggttctgccccagatttgcctgctaataaagtcaatccaattgcaaccattctttcagctgctatgatgttgaagctttcattagatttatttgaagaaggtgttgctcttgaaaaagctgttaaagaagttttggatgccggtgttagaactggtgatttaagaggttcaaactcaacaaaggaagttggtgatgctgctgttgaagctgctaaaagaattcttaaaaattaa

SEQ ID NO: 107420 - protein, 364 aa, Hansenula anomala
MSEKTIVVLPGDHVGTEITNEAIKVLKAIEEVRPNVKFNFQHHLIGGAAIDATGVPLPDEALEAAKKADAVLLGAVGGPKWGTGAVRPEQGLLKIRKELNLYANLRPCNFASESLLELSPIKAEFAKGTDFTVVRELVGGIYFGERKEDDGSGVASDTETYSVPEVQRITRMAAFMALQHNPPLPIWSLDKANVLASSRLWRKTVTETIEKEFPQLTVQHQLIDSAAMILIKSPTTLNGIVITSNMFGDIISDEASVIPGSLGLLPSASLASLPDTNKAFGLYEPCHGSAPDLPANKVNPIATILSAAMMLKLSLDLFEEGVALEKAVKEVLDAGVRTGDLRGSNSTKEVGDAAVEAAKRILKN

SEQ ID NO: 107421 - DNA, 1074 bp, Helicobacter hepaticus
  CDS (1)..(1074): transl_table=11
atgcaaaaacgcattgcagtaatatatggtgatggtattggcaaagaagtcatcacacaggcattaaagattctaaaagcagtagcaaaaaaatatgagcatacattcatatttgaagaggttttggcaggtggagctgccattgatgaatgcggggaatgtctcccaatgaaaagtttgcaaatttgcaaacaaagcgatagtgtgcttttgggtgcagtaggtggtcccaaatgggataatgagcctagccataatcgcccagaaaaagcgcttcttacattgcgaaaagagctaggattatttgccaatatccgtccagcgacacttttaccccaactaagcaaagctagtccattaaaagatgagattttaaatcgtggcattgattttatcattgtgcgcgaactcatcggtggagtatattttggcgaacataagctagaagaaatcaatggtgaaaaagtagcaagtgatgcgatgacttatagtgcttcacagatagaatccattgcgaaagttgcttttaatattgctagaaatcgcaaaaaagaaattgtttgcgttgataaagcaaatgtgttaagttcttcaagattgtggcgagaagtggtagataaagtggctcaaaactacaaagatgtgcatcttagctatatgtatgtagataatgcagcaatgcaaatttgtcgtgcaccgagccaatttgatgtgattctcactgaaaatatgtttggcgatattctaagtgatgaggcaagtatcattactggcactattggcgttattccttccgcttctctctcaaatggcactttgggtatgtatgagcctatacacggtagtgcgcccgatattgcagggcaagataaagcaaatcccatagggacaattctatctgcagcgatgatgttagagctttcatttggattaacaaaagagagtgaggtgatacaaaaagcagtgcaaaatgcacttgataaaggctaccgcacaggagatatgatgagtgagggaatgcagcttgtaggctgtgagcaaatgggtgatgtgattttagaatcggttatataa

SEQ ID NO: 107422 - protein, 357 aa, Helicobacter hepaticus
MQKRIAVIYGDGIGKEVITQALKILKAVAKKYEHTFIFEEVLAGGAAIDECGECLPMKSLQICKQSDSVLLGAVGGPKWDNEPSHNRPEKALLTLRKELGLFANIRPATLLPQLSKASPLKDEILNRGIDFIIVRELIGGVYFGEHKLEEINGEKVASDAMTYSASQIESIAKVAFNIARNRKKEIVCVDKANVLSSSRLWREVVDKVAQNYKDVHLSYMYVDNAAMQICRAPSQFDVILTENMFGDILSDEASIITGTIGVIPSASLSNGTLGMYEPIHGSAPDIAGQDKANPIGTILSAAMMLELSFGLTKESEVIQKAVQNALDKGYRTGDMMSEGMQLVGCEQMGDVILESVI

SEQ ID NO: 107423 - DNA, 1089 bp, Kluyveromyces lactis
  CDS (1)..(1089)
atgtctaagaatatcgttgtcctaccgggtgatcacgtcggtaaagaagttactgacgaagctattaaggtcttgaatgccattgctgaagtccgtccagaaattaagttcaatttccaacatcacttgatcgggggtgctgccatcgatgccactggcactcctttaccagatgaagctctagaagcctctaagaaagccgatgctgtcttactaggtgctgttggtggtccaaaatggggtacgggcgcagttagaccagaacaaggtctattgaagatcagaaaggaattgggtctatacgccaacttgagaccatgtaactttgcttctgattctttactagatctttctcctttgaagcctgaatatgcaaagggtaccgatttcgtcgtcgttagagaattggttggtggtatctactttggtgaaagaaaagaagatgaaggtgacggagttgcttgggactctgagaaatacagtgttcctgaagttcaaagaattacaagaatggctgctttcttggcattgcaacaaaacccaccattaccaatctggtctcttgacaaggctaacgtgcttgcctcttccagattgtggagaaagactgttgaagaaaccatcaagactgagttcccacaattaactgttcagcaccaattgatcgactctgctgctatgattttggttaaatcaccaactaagctaaacggtgttgttattaccaacaacatgtttggtgatattatctccgatgaagcctctgttattccaggttctttgggtttattaccttctgcatctctagcttccctacctgacactaacaaggcattcggtttgtacgaaccatgtcatggttctgccccagatttaccagcaaacaaggttaacccaattgctaccatcttatctgcagctatgatgttgaagttatccttggatttggttgaagaaggtagggctcttgaagaagctgttagaaatgtcttggatgcaggtgtcagaaccggtgaccttggtggttctaactctaccactgaggttggcgatgctatcgccaaggctgtcaaggaaatcttggcttaa

SEQ ID NO: 107424 - protein, 362 aa, Kluyveromyces lactis
MSKNIVVLPGDHVGKEVTDEAIKVLNAIAEVRPEIKFNFQHHLIGGAAIDATGTPLPDEALEASKKADAVLLGAVGGPKWGTGAVRPEQGLLKIRKELGLYANLRPCNFASDSLLDLSPLKPEYAKGTDFVVVRELVGGIYFGERKEDEGDGVAWDSEKYSVPEVQRITRMAAFLALQQNPPLPIWSLDKANVLASSRLWRKTVEETIKTEFPQLTVQHQLIDSAAMILVKSPTKLNGVVITNNMFGDIISDEASVIPGSLGLLPSASLASLPDTNKAFGLYEPCHGSAPDLPANKVNPIATILSAAMMLKLSLDLVEEGRALEEAVRNVLDAGVRTGDLGGSNSTTEVGDAIAKAVKEILA

SEQ ID NO: 107425 - DNA, 1080 bp, Kluyveromyces marxianus
  CDS (1)..(1080)
atgtcaaagaatatcgttgtcttaccaggtgatcatgtcggtactgaaattaccaatgaagcgatcaaagttttgaacgctatttcagaagcacgcccttctatcaagtttaattttgaacatcatttgattggtggtgctgcaattgatgctactggtgtgccattgccagacgaagcttccaagaaagctgatgcagtattattgggtgcagttggtggtccaaagtggggtacaggttccgttagacctgaacaaggtttattgaagatcagaaaggaattgggattatacgctaacttgaggccttgtaattttgcttcagactctttgcttgatctatctccattgaaacctgagtacgccaagggaactgactttgttgtcgttagagaattggtgggtggtatctactttggtgagaggaaggaagatgaaggtgatggtgttgcttgggattctgaaaagtacagtgtaccagaagttcaaagaatcaccagaatggctgcatttttagctttacaacacaacccacctttaccaatctggtcattggataaagcaaatgtcttggcatcatctagattgtggagaaaaacagtagaagaaaccatcaagaatgagttccctcaattgactgtccaacatcaattgatcgattccgctgctatgatcctcgtcaagtctccaaccaagttaaatggtatagttattacgaataacatgtttggtgatatcatttctgatgaagcttccgtcattccaggttcattgggcttactaccatccgcttctttggcctcgctaccagacaccaacaaagcattcggtttgtacgaaccatgtcacggttctgcacccgacttaccagcaaataaggtcaacccaattgcaacaattctatctgcagctatgatgttaaaactttccctagatctagtggaagaaggtagagccgttgaagaagccgttagaaaagttttggattctggaatcagaactggcgatctaggcggttccaactctaccacggaggttggtgacgctgttgcaaaggctgtaaaggagattttggcataa

SEQ ID NO: 107426 - protein, 359 aa, Kluyveromyces marxianus
MSKNIVVLPGDHVGTEITNEAIKVLNAISEARPSIKFNFEHHLIGGAAIDATGVPLPDEASKKADAVLLGAVGGPKWGTGSVRPEQGLLKIRKELGLYANLRPCNFASDSLLDLSPLKPEYAKGTDFVVVRELVGGIYFGERKEDEGDGVAWDSEKYSVPEVQRITRMAAFLALQHNPPLPIWSLDKANVLASSRLWRKTVEETIKNEFPQLTVQHQLIDSAAMILVKSPTKLNGIVITNNMFGDIISDEASVIPGSLGLLPSASLASLPDTNKAFGLYEPCHGSAPDLPANKVNPIATILSAAMMLKLSLDLVEEGRAVEEAVRKVLDSGIRTGDLGGSNSTTEVGDAVAKAVKEILA

SEQ ID NO: 107427 - DNA, 1077 bp, Mannheimia succiniciproducens
  CDS (1)..(1077): transl_table=11
atgtcaacatacaacgtagcggtacttccgggtgacggtattggccctgaggtaatggcggaagccattaaagtgttagataaagtccaggcaaaattcggttttaaattgaatttcactcaataccttgtgggcggtgcggcaatcgatgcgaaaggggaacctttaccggcggaaaccttacaaggttgtgacaatgccgatgcgattttattcggttccgtaggcggcccgaaatggacccatcttccgccggatcaacagccggaacgaggcgcgttattgccgttgcgtaaacatttcaaattattctgtaatctgcgtccagccaccctttataaaggcttggaaaaattctgcccgttacgtgcggatattgcggcaaaaggctttgatatggtggtggtccgcgagttaaccggcggcatttatttcggtcagccgaaaggccgtgacggcgaaggttccgatacccgcgcatttgataccgaagtatattacaaatatgaaatcgagcgcattgcccgcgccgcattcgacgccgcgatgaaacgccgtaaacaggtgacttccgtggataaagcgaacgtattgcaaagttctattttatggcgcgaaaccgtggcggaaatcgctaaagaatatccggaagttcaggtggaaaatatgtatattgataacgccaccatgcaacttatcaaagcgcccgaaagttttgacgtgttgctttgttccaacatcttcggcgatattatttccgatgaagcggcgatgattaccggctcaatgggaatgttgccgtctgccagtctgaacgaagagggattcggtttatacgaacccgcaggcggcagcgcaccggatatcgccggcaaaggtattgcaaatccgattgcacaaattctttccgccgccatgatgttgcgttacagctttaacttaaatgaagcggcaactgcaattgaaaacgccgtacaaaaagttttggctgacggccatcgtaccggcgatttagcggataattcgacaccggtttcaaccgctgaaatgggtacgctgattgcaaatgcaatttaa

SEQ ID NO: 107428 - protein, 358 aa, Mannheimia succiniciproducens
MSTYNVAVLPGDGIGPEVMAEAIKVLDKVQAKFGFKLNFTQYLVGGAAIDAKGEPLPAETLQGCDNADAILFGSVGGPKWTHLPPDQQPERGALLPLRKHFKLFCNLRPATLYKGLEKFCPLRADIAAKGFDMVVVRELTGGIYFGQPKGRDGEGSDTRAFDTEVYYKYEIERIARAAFDAAMKRRKQVTSVDKANVLQSSILWRETVAEIAKEYPEVQVENMYIDNATMQLIKAPESFDVLLCSNIFGDIISDEAAMITGSMGMLPSASLNEEGFGLYEPAGGSAPDIAGKGIANPIAQILSAAMMLRYSFNLNEAATAIENAVQKVLADGHRTGDLADNSTPVSTAEMGTLIANAI

SEQ ID NO: 107429 - DNA, 1083 bp, Methylococcus capsulatus
  CDS (1)..(1083): transl_table=11
atgactatcaaaatcgctgtcttgcccggtgacggcatcggtcccgaaatcgtcgccgaggccctgaaggttctggactgcctgcggtccgacttcggcctcgcggtcgaaaccgaacacgccctgatcggcggcgcagcctatgatgcgcacggcacgccgttccccaaggaaaccctggagctgtgccgggctgccgattcgatcctgcttggagcggtcggcggtcccaaatgggagccgttggattattcgctgcggcccgagcgggggctcctgggcttgcgttcggagctggaactgttttccaacctgcgcccggcggtgctctaccctcagctggtgtcggcttcgaccctcaagcccgaggtggtcgccggcctcgacatcatgatcgtgcgggagctgaccggcggcatatatttcggcaagccgcgcggtcgtcgcatcaacgaggacggagagcgggagggctacaacaccctggtatacagcgaatcggaaatccgccgcatagcccatagcgcgttccagatcgcccggaagcgtaacaggcgcctgtgcagcatcgacaaggccaatgtgctggaatgcacggaactgtggcgcgaggtggtgatcgaggtcggcaaggactatcccgacgtggcgctgagccacatgtacgtggacaacgccgcgatgcagctggtccgtaacccgaagcagttcgacgtgatgctgaccgacaacatgttcggcgacatcctgtccgactgtgccgccatgctgaccggctcgatcggcatgctgccttcggcttccctcgccgagagcggcaaggggatgtacgagcccatccacggttcggccccggatatcgccggccgcggcatcgccaacccgatcgccaccatcctgtcgctggccatgatgttgcgctacagcttcgatgacgcggtctcggcagagcggatcgggaaggcggtgcagacggcgctggatcagggtttccgcacggcggacatcgcctcggaaggcaccgtcgaggtcggtaccgctgcgatgggcgatgccatcgtcgccgccttgcgcgccgtctga

SEQ ID NO: 107430 - protein, 360 aa, Methylococcus capsulatus
MTIKIAVLPGDGIGPEIVAEALKVLDCLRSDFGLAVETEHALIGGAAYDAHGTPFPKETLELCRAADSILLGAVGGPKWEPLDYSLRPERGLLGLRSELELFSNLRPAVLYPQLVSASTLKPEVVAGLDIMIVRELTGGIYFGKPRGRRINEDGEREGYNTLVYSESEIRRIAHSAFQIARKRNRRLCSIDKANVLECTELWREVVIEVGKDYPDVALSHMYVDNAAMQLVRNPKQFDVMLTDNMFGDILSDCAAMLTGSIGMLPSASLAESGKGMYEPIHGSAPDIAGRGIANPIATILSLAMMLRYSFDDAVSAERIGKAVQTALDQGFRTADIASEGTVEVGTAAMGDAIVAALRAV

SEQ ID NO: 107431 - DNA, 1011 bp, Mycobacterium bovis
  CDS (1)..(1011): transl_table=11
atgaaactcgcgatcattgccggtgacgggatcgggcccgaggtaaccgccgaggcggtcaaagtgctcgacgcggttgtgccgggcgtccagaaaaccagctatgacctgggtgcgcggcgctttcatgccaccggcgaggtgctgccggactcggtggtggccgagctgcgcaaccacgacgcgatcctgctcggggcgatcggtgacccgtcggtgccaagcggcgtcttggagcgcggtctgttgctgcgactgcgcttcgagctggatcaccacatcaacctgcgtccggcccggctgtatccgggggtggccagcccgctgtccggcaatcccggcatcgacttcgtggtggtgcgcgagggcaccgagggaccctacaccggcaacggcggggcgattcgcgtcggcacgcccaacgaggtggccaccgaagtcagcgtgaacaccgcgttcggtgtgcggcgtgtggttgccgacgcgttcgagcgggctcgacggcgtcgcaagcatctgacattggtgcacaaaaccaacgtgttgaccctcgccgggggattgtggttgcggaccgtcgacgaggtcggcgaatgctacccggacgtcgaggtggcctaccagcacgtcgacgccgccaccatccacatgatcaccgacccgggtcgcttcgacgtgatcgtcaccgacaacctgttcggcgacatcatcaccgatctggccgcggcggtatgtggcggtatcggcttggcggccagtgggaatatcgacgcgacccgggccaacccgtcgatgttcgagccggtgcatggcagcgcgccggacatcgccggtcagggcatcgccgacccgacggcggcgatcatgtcggtggcgttattgctgtcccaccttggcgaacacgacgcggctgcccgggtggaccgggccgtcgaggcccatttggccacgcgtggcagcgaacggcttgccaccagcgatgtcggcgaacggattgccgccgcgctctag

SEQ ID NO: 107432 - protein, 336 aa, Mycobacterium bovis
MKLAIIAGDGIGPEVTAEAVKVLDAVVPGVQKTSYDLGARRFHATGEVLPDSVVAELRNHDAILLGAIGDPSVPSGVLERGLLLRLRFELDHHINLRPARLYPGVASPLSGNPGIDFVVVREGTEGPYTGNGGAIRVGTPNEVATEVSVNTAFGVRRVVADAFERARRRRKHLTLVHKTNVLTLAGGLWLRTVDEVGECYPDVEVAYQHVDAATIHMITDPGRFDVIVTDNLFGDIITDLAAAVCGGIGLAASGNIDATRANPSMFEPVHGSAPDIAGQGIADPTAAIMSVALLLSHLGEHDAAARVDRAVEAHLATRGSERLATSDVGERIAAAL

SEQ ID NO: 107433 - DNA, 1098 bp, Mycosphaerella graminicola
  CDS (1)..(1098)
atgcccacttacaacatcgtcgtctttggaggtgatcactgcggtcctgaagtcaccgccgaggcgctgaaggtgctcgacgtgatcgacaacagcaatgccgacgttcacttcaacattcaaccacacctgctcggtggcgcctcgatcgatgcccacggcgagcctctaacagacgaagcactcgccgctgccaaagcagccgacgccgtgatcctcggagccatcggcggtcccaaatggggcacgggcaaagtccgtccagagcaaggcatcctgcgcctccgcaaagaaatgggcacatatggaaacctgcgcccatgcttcttcgcgtctgagagcctcgtcaagacttctccattgaaggaggaagtctgccgcggcgtcaacttcaacatcgtccgtgagctgacaggtggcatctacttcggtgaacgcaccgaggacgacggctccggctacgcagtggacacggaaccctactcgcgcgctgagatcgagcgtgtggcacgactggcgggtttcttggctttggctgaagacccgccgtgtccggtctggtcgctcgacaaggcgaacgtcatggctacaagcagactgtggcgcaagaccgtgacggatgtgtttgccaacgagttcccgcagttgaagatcgggcatcacctcattgattccgcggcgatgttgatggtcaagaacccgagagcgttgaacggagtcatcgtcactagcaatttgttcggcgatatcattagtgacgaggcgagcgtcattccaggatcgctgggtttgttgcccagtgcgagtttgactgcctcgccggatggcaagagcaagtgcaatggcatttacgagccgattcacggctctgcaccagacatcagcggcaagggtatcgtcaaccccgtcgccatgatcttgtctttgggcatgatgtgcaagtactctctccagcagcccgagctggccaagaagatcgacgaggccgtgaggaacgtgattgagaagggtatcaacactgccgatattggtggttcggccaagactgccgaggtgggtgacgctattgcgaaggagctcgaggccctgctgaagtaa

SEQ ID NO: 107434 - protein, 365 aa, Mycosphaerella graminicola
MPTYNIVVFGGDHCGPEVTAEALKVLDVIDNSNADVHFNIQPHLLGGASIDAHGEPLTDEALAAAKAADAVILGAIGGPKWGTGKVRPEQGILRLRKEMGTYGNLRPCFFASESLVKTSPLKEEVCRGVNFNIVRELTGGIYFGERTEDDGSGYAVDTEPYSRAEIERVARLAGFLALAEDPPCPVWSLDKANVMATSRLWRKTVTDVFANEFPQLKIGHHLIDSAAMLMVKNPRALNGVIVTSNLFGDIISDEASVIPGSLGLLPSASLTASPDGKSKCNGIYEPIHGSAPDISGKGIVNPVAMILSLGMMCKYSLQQPELAKKIDEAVRNVIEKGINTADIGGSAKTAEVGDAIAKELEALLK

SEQ ID NO: 107435 - DNA, 1071 bp, Neisseria meningitidis serogroup A
  CDS (1)..(1071): transl_table=11
atgaccaaacatatcgccatcctccgaggcgacggcatcggccctgaaatcgttgcagaaaccgtccgcgtactcgacaaactcatcgcccaaggcttggacgtcggctacgaatacgccccattgggcggcgaagcctacgacgaatacggccatccttatccggaattcacacaaaacctttgccgtaaagccgatgcggtcctgcttggtgcagtcggttctcctcaatacgataatctcgaccgtccgctgcgccctgagcgcggcttgttggccatccgtaaagacctgaatctgtttgccaatttgcgccccgctatcctctatcccgagctagccaacgcctccacgctcaagtctgaaatcgttgcgggtttggatattttgattgtgcgcgaactcaccggcgatatttatttcggcgaaccgcgcggcatccgtgttctggaaaacggcgaacgcgaaggctacaacaccatgaaatacagcgaaagcgaaatccgccgtattgcccacgtcgccttccaatccgcccaaaaacgcagcaaaaaagtctgctccgtaggcaaagccaacgttttggaaaccaccgaattgtggcgcgaaatctttgaagaaatcggcaaagaataccctgatgtcgagctttcccatatgtacgttgataacgcagccatgcagttggtacgcgcgcccaaacaatttgacgtgattgccaccggcaacatcttcggcgacatcctctctgacgaagcgtctatgctgaccggctctatcggtatgttgccttctgcttctttggatgaaaacggcaaaggcctgtacgaaccttctcatggctccgctcccgatattgccggtcaaaacaaagccaatccgctggcgaccgtattgtctcttgccatgttgctgcgttacagcctgaacgacgaagcacgcgcgcaacaagttgaaaacgccgtccaaaaagtgctgcaacaaggcttgcgtaccggcgacatttatgaagaaggcacgaaactcgtttcctgctccgaaatgggcgacgcggtactcgccaccttgtaa

SEQ ID NO: 107436 - protein, 356 aa, Neisseria meningitidis serogroup A
MTKHIAILRGDGIGPEIVAETVRVLDKLIAQGLDVGYEYAPLGGEAYDEYGHPYPEFTQNLCRKADAVLLGAVGSPQYDNLDRPLRPERGLLAIRKDLNLFANLRPAILYPELANASTLKSEIVAGLDILIVRELTGDIYFGEPRGIRVLENGEREGYNTMKYSESEIRRIAHVAFQSAQKRSKKVCSVGKANVLETTELWREIFEEIGKEYPDVELSHMYVDNAAMQLVRAPKQFDVIATGNIFGDILSDEASMLTGSIGMLPSASLDENGKGLYEPSHGSAPDIAGQNKANPLATVLSLAMLLRYSLNDEARAQQVENAVQKVLQQGLRTGDIYEEGTKLVSCSEMGDAVLATL

SEQ ID NO: 107437 - DNA, 1071 bp, Nitrosomonas europaea
  CDS (1)..(1071): transl_table=11
atgaaaattgcgctgcttgccggtgacgggatcgggcctgaaatcatggctcaggctgagcgggtattacgctacttccagcaggaaggtttgcagatcgagcttgaacctggtttgctgggtggttgtgcggtggatgccaccggtgaaccttttccggaagcaacacgccagttggcgatcgaggcagatgccatactgctgggggcagtaggtggaactcagtacgatggtctgcctcgcgaaaaacggccagagcaggggttgctggccattcggaaggaactcaacctgtttgccaatttgcggccggtagtgctgtatccggagctgtcgaatgcttcgacactgaagccggaggttgtcgctggtctggatattctgattgtgcgtgagctgactggagatatttatttcgggagaccgcgaggcatcgaataccgagacggacagaaagtgggctttaatacgatgatttattctgaatcagaaatcaggcgtatcgctcatgtggcgtttcaggcagcaggtaggcgaaacggcaggctttgctcggtggacaaaatgaatgtcctggaatgcacgcagttatggcgtgatgtggtgacggaaactgcgcagtcgtatccggacgttacgctctcacacatgctggtggacaatgcagcgatgcagctggtacgcaacccccggcaattcgatgtggtggttacgggaaatatgttcggtgatattttatcagatgaagcatccatgctgacaggctcgatcggaatgcttccttctgcttctctggatgaccgaaataaaggtttgtatgagcctattcacggatctgccccggatatcgccggtaaagggattgccaacccgttggcaactatcttatctgcggcaatgatgttgcgatactctttcaatcaggaaacggccgcatcacgaatcgagcatgccgttcagaagacattgcagcaaagctatcgtaccgaagatatttatgaagcgggtatgaaaaaggtcggtactgtggaaatgggggatcgtgtcctggcaaacttgcaatcccggtga

SEQ ID NO: 107438 - protein, 356 aa, Nitrosomonas europaea
MKIALLAGDGIGPEIMAQAERVLRYFQQEGLQIELEPGLLGGCAVDATGEPFPEATRQLAIEADAILLGAVGGTQYDGLPREKRPEQGLLAIRKELNLFANLRPVVLYPELSNASTLKPEVVAGLDILIVRELTGDIYFGRPRGIEYRDGQKVGFNTMIYSESEIRRIAHVAFQAAGRRNGRLCSVDKMNVLECTQLWRDVVTETAQSYPDVTLSHMLVDNAAMQLVRNPRQFDVVVTGNMFGDILSDEASMLTGSIGMLPSASLDDRNKGLYEPIHGSAPDIAGKGIANPLATILSAAMMLRYSFNQETAASRIEHAVQKTLQQSYRTEDIYEAGMKKVGTVEMGDRVLANLQSR

SEQ ID NO: 107439 - DNA, 1008 bp, Nocardia farcinica
  CDS (1)..(1008): transl_table=11
atgaagcttgcggtcatccccggtgacggcatcggtcccgaggtcatcgccgaggcgctgaaggtgctcgacgtggtcgtgcccggcgtcgagaagaccgaatacgacctgggcgccaagcgctatcacgcgaccggcgagatcctgcccgactcggtgctgccggaactgcgcgagcacgacgcgatcctgctcggcgcgattggtgacccgtcggtgcccagcggcgtgctcgagcgcggcctgctgctgcgcacccgtttcgagctcgaccaccacgtgaacctgcggccgtcgaggctgttcaccggcgtgcggagcccactggccggtgcacccgacatcgatttcgtcgtcgtgcgcgagggcaccgagggcccctacaccggcaccggcggcgcgatccgggtgcggacgccgcacgaggtcgccaccgaggtcagcaccaacacccgcttcggcatcgagcgggtcgtgcgctacgccttcgccaaggcgcaggccaggcgcaagcacctcacactggtgcacaagaccaatgtgctgaccttcgccgggtcgctgtggcagcgcaccgtcgacgaggtgggcgcggagttccccgaggtcacggtcgcctaccagcacatcgacgccgccaccatccacatggtcaccgacccgggccgcttcgacgtgatcgtcaccgacaacctgttcggcgacatcatcaccgacctcgcggccgcggtgagcggcggcatcggcctggcggccagcggcaacatcgacgcctccggcaccaacccgagcatgttcgagccggtgcacggcagcgcgcccgacatcgcgggccagtcgaaggccgacccgaccgccgccatcctgtcggtctcgctgctgctgaaccacctcggcgacaccgaggccgccgcgcggatcgacgccgcggtcgccaaggacctggccgcccgctcgggcaccgcctccaccgtcgagatcggcgaccggatcgccgcggcggtctga

SEQ ID NO: 107440 - protein, 335 aa, Nocardia farcinica
MKLAVIPGDGIGPEVIAEALKVLDVVVPGVEKTEYDLGAKRYHATGEILPDSVLPELREHDAILLGAIGDPSVPSGVLERGLLLRTRFELDHHVNLRPSRLFTGVRSPLAGAPDIDFVVVREGTEGPYTGTGGAIRVRTPHEVATEVSTNTRFGIERVVRYAFAKAQARRKHLTLVHKTNVLTFAGSLWQRTVDEVGAEFPEVTVAYQHIDAATIHMVTDPGRFDVIVTDNLFGDIITDLAAAVSGGIGLAASGNIDASGTNPSMFEPVHGSAPDIAGQSKADPTAAILSVSLLLNHLGDTEAAARIDAAVAKDLAARSGTASTVEIGDRIAAAV

SEQ ID NO: 107441 - DNA, 1101 bp, Oceanobacillus iheyensis
  CDS (1)..(1101): transl_table=11
atggagaaacatattattttgcttcctggtgatggaataggtagagagattattgattctgctaaacaagtattaacagcaatagcaagcgaatataatcatcgatttacatttgaagagcatgcaattggtggaagtgctattgatgaatatggtacaccattgcctgataaaacagtagatgcctgttcgaaagcagatgcaattttattgggagctgttggtggtcctaaatgggatgccaacccgtctcatttaagaccagaaaaaggattgctagggatacgaaaacaacttggactttttgccaatttacgaccagttaaaacaatttcttccttattatatgcgtcaccattaaaagaagaaattgtaagtcaggcagatatgttaatcattcgcgagttaactggaggaatttattttggcacacctagtgaacgaacaactaatggcgtagtagatacacttcagtactcacgagaagaaatagaacgaattgtcgagcgcggattcgaagctgcaagaattcgaaaaaaacatcttacgtccgttgataaggcaaatgtactagagtctagcaaactatggagagaaatcgtggaagaaaagtcgaaagattatcctgatgtagctgtaaaccatctacttgtcgatgcagctgcaatgaagcttgttacacagccgagtttctttgatgtaatcgtaacggagaatttgtttggagacatattgagtgatgaagcatccgtactcaccgggtctttaggaatgctgccatcagcgagtttacgtgctgatggacttggcttatatgaacctgtacacgggtcagctcctgatatcgcaggaaaaggaatcgctaatccattagcaatgattttatctgctgcattaatgttagagcattcttttggcttagtagatgaagcgaaggaaatagagcgagcggtaaatgattgtttattacaaggttttcacacagcagatattcatataccaggtggagttcaagttggtacaaagcaaatgacagacgcagttttggaaaatgtaacaacaaaaagtatttcagattctatatgtagctcgtatgtatag

SEQ ID NO: 107442 - protein, 366 aa, Oceanobacillus iheyensis
MEKHIILLPGDGIGREIIDSAKQVLTAIASEYNHRFTFEEHAIGGSAIDEYGTPLPDKTVDACSKADAILLGAVGGPKWDANPSHLRPEKGLLGIRKQLGLFANLRPVKTISSLLYASPLKEEIVSQADMLIIRELTGGIYFGTPSERTTNGVVDTLQYSREEIERIVERGFEAARIRKKHLTSVDKANVLESSKLWREIVEEKSKDYPDVAVNHLLVDAAAMKLVTQPSFFDVIVTENLFGDILSDEASVLTGSLGMLPSASLRADGLGLYEPVHGSAPDIAGKGIANPLAMILSAALMLEHSFGLVDEAKEIERAVNDCLLQGFHTADIHIPGGVQVGTKQMTDAVLENVTTKSISDSICSSYV

SEQ ID NO: 107443 - DNA, 1080 bp, Pasteurella multocida
  CDS (1)..(1080): transl_table=11
atgcaaacattcaacatcgcggtattaagtggcgacggtatcggaccagaaatcatagcagaagccattaaagtcttagacgtggtacaacaaaaatacgcattcaaattaaactatcgtacttttgatgtgggtggcattgccatcgacaaccacggtacaccactacctgaagcgaccttaaaaggctgtgaagaaagcgatgcgattttatttggctcggtaggcggaccaaaatgggaacatttgccaccagcacaacaacccgaacgaggcgccttattgccactacgcaaacactttgccttattctgtaacttacgtccagccaccctttacaaagggttagaaaaattctgtccattgcgtgccgatatttctgccaaaggctttgatatggtcactgtgcgtgaattaaccggtggcatttattttggtcaaccgaaaggacgtgaaggcgaaggtgccaatgaaaaagcctttgatacggaagtgtatcatcgttatgaaattgaacgtattgctcgcgttgcttttgaaactgcaatgaaacgtagcaaacacgtgacgtccgtagataaagccaatgtgttgatcagttctgtcttatggcgtgaagtggtatgtgacgtggcgaaagattaccctgaggtgacattagatcatatctacattgataacgctactatgcaattaatcaaacaacctgaatttttcgatgtgttactctgttcgaatattttcggcgatattatttccgatgaatgtgcgatgatcacgggttcaatggggatgttgccttctgccagcctgaacgaaaaaggctttggtttatacgaacctgcgggtggctccgcgcctgatatcgcaggcaaaggcatcgctaacccgattgcacaaattttatcggctgccatgatgctacgccacagtttcaacttaaacgacgccgcgacagccattgaaaacgctgtgaaaaatgtcctcgcagaaggacaccgcaccgccgatttagccgatgaaagccaaccactttcaaccaaacaaatgggcgacctcatcgcccaagcggtagaataa

SEQ ID NO: 107444 - protein, 359 aa, Pasteurella multocida
MQTFNIAVLSGDGIGPEIIAEAIKVLDVVQQKYAFKLNYRTFDVGGIAIDNHGTPLPEATLKGCEESDAILFGSVGGPKWEHLPPAQQPERGALLPLRKHFALFCNLRPATLYKGLEKFCPLRADISAKGFDMVTVRELTGGIYFGQPKGREGEGANEKAFDTEVYHRYEIERIARVAFETAMKRSKHVTSVDKANVLISSVLWREVVCDVAKDYPEVTLDHIYIDNATMQLIKQPEFFDVLLCSNIFGDIISDECAMITGSMGMLPSASLNEKGFGLYEPAGGSAPDIAGKGIANPIAQILSAAMMLRHSFNLNDAATAIENAVKNVLAEGHRTADLADESQPLSTKQMGDLIAQAVE

SEQ ID NO: 107445 - DNA, 1268 bp, Phanerochaete chrysosporium
  CDS (26)..(1168)
atcacccgcccgctgaacagcaccaatgtccaagagaacgttcaaaatcgtgatcctcccaggagacggaatcgggcccgaggtcgtcgcagaggctactcgagtacttgaggttgtttccgcgtcctcgagcgatgtcgagatcaagctggagacacacgacttcggtggttgctctatcgacaagcacggagagccgttgactgccgctacgctggaggcatgcaagctcgcagacgccatcctccttggtgctattggtggtcccaagtggggtgtgaacagcaaggttcgccccgagcaggccctgctcgcgctgcgcaaggcgctcgggctgtacgcgaacatccggcccgcgaacttcgcgtcggacagcctgctcgcgtactccccgctgaagccgtccgtcgccaggggagtcgacatcatcgtcatccgcgagctcatcggcggcgcgtactttggcgagcgcaaggagctcggcgcccgcgcgcaggaggacgccgcgtgggacacgatgatctacagcgtgcccgaggtgcagcgcatcacgcgcagccgtcggcaggtcgcgtcgccggacccgccgctccccgtgcactcaatcgacaaggcgaacgtgctcgcgagctcgcgcctctggcgcaaggtcgcgaccgagacgatccagaacgagttcccccagctcaagctcgaccaccacctcgtcgactccgcctcgatgctcatcgtcgcgaacccgaagaagctcaacggcgtgattctgaccgagaacctattcggcgacatcctctcagacgagtcgtccgtcatccccggctccctcggcctgcttccctcggcatcgctcgcggcgcgccctctgtggccgaatacagctcaccgtcgttcaagcccacgccgggtctacgagcccatccacggctcggcaccggacatcgcgggccagggcatcgcgaaccccatcggcacgatcctcagcgcagcgatgctctgcggtactcgctcggtatggagaagccccgcgaaggcgatcgaggccgccgtcgaaggtgctcgacgacaaggagatcggcgcgagggcctgcgcacggcggacctcggaggcagcagcaagacgaaggacatcgggcacaaggtcgtcgagatcctgaaagctactctctgagccagtaatctctggcatagtaccacaaataccaatgtatgaatagcaaaagtgcagcctatattgatcctgctcaactctgaaaaaaaaaaaaaaaaaa

SEQ ID NO: 107446 - protein, 380 aa, Phanerochaete chrysosporium
MSKRTFKIVILPGDGIGPEVVAEATRVLEVVSASSSDVEIKLETHDFGGCSIDKHGEPLTAATLEACKLADAILLGAIGGPKWGVNSKVRPEQALLALRKALGLYANIRPANFASDSLLAYSPLKPSVARGVDIIVIRELIGGAYFGERKELGARAQEDAAWDTMIYSVPEVQRITRSRRQVASPDPPLPVHSIDKANVLASSRLWRKVATETIQNEFPQLKLDHHLVDSASMLIVANPKKLNGVILTENLFGDILSDESSVIPGSLGLLPSASLAARPLWPNTAHRRSSPRRVYEPIHGSAPDIAGQGIANPIGTILSAAMLCGTRSVWRSPAKAIEAAVEGARRQGDRREGLRTADLGGSSKTKDIGHKVVEILKATL

SEQ ID NO: 107447 - DNA, 1089 bp, Pichia angusta
  CDS (1)..(1089)
atgagtaagaacattgtgcttctccctggtgatcacgtgggccccgaggttgttgcggaggccgtcaaggttctcgaggctgtctcgtcggcaatcggcgttaagttcaacttttccaagcacctgatcggcggtgcctcgatcgatgcttatggggtgccattgtccgacgaggccctcgaagccgccaagaaggctgacgccgttttgcttggagccgtcggaggacctaagtggggaaccggctccgtgcgtcctgagcagggtctgttgaagatcagaaaagagctcaacttgtacgcgaacctgcgtccatgcagttttgcttccgacgctcttctgaagctatctccactgaaatcagaaatcgtcaagggcactgactttgttgttgtgcgtgagttggttggtggaatctactttggtgaccgcaaggaggatgccggcgacggagttgccagcgacactgagagctattctgttccagaggtgcagagaatcacgagaatggcggcctttttggcgctgcagagcgacccaccgctcccactgtggtcgctggacaaagccaacgtgcttgcatcctcgcgtttgtggcggaagactgttgaggagaccatcaagaacgagttcccgcagctgacggtgcagcaccagctgatcgactcggcagccatgattttggtcaagtcgccaacgaaactcaacggtgtcattgtcaccaacaacatgtttggcgacatcatcagtgacgaggccagtgtgattcctgggtctctgggcctgctgccttctgcctcgttggcgtctctgccagacacaaacaaggcgtttggtctttacgagccctgccacggctcggcgccagatttgggcccgggcaaggtcaatccattggccacaattttgtctgccgccatgatgctgaagctgtcgctggacttggtggatgccggccgtgcgatcgagcaggccgtcaagaacgtcctggatgcaggtatcatgactgccgatttgggtggaagctcctcaacacaggaagttggtgatgctgttgcgcaggaggtggccaagctactcaagaactaa

SEQ ID NO: 107448 - protein, 362 aa, Pichia angusta
MSKNIVLLPGDHVGPEVVAEAVKVLEAVSSAIGVKFNFSKHLIGGASIDAYGVPLSDEALEAAKKADAVLLGAVGGPKWGTGSVRPEQGLLKIRKELNLYANLRPCSFASDALLKLSPLKSEIVKGTDFVVVRELVGGIYFGDRKEDAGDGVASDTESYSVPEVQRITRMAAFLALQSDPPLPLWSLDKANVLASSRLWRKTVEETIKNEFPQLTVQHQLIDSAAMILVKSPTKLNGVIVTNNMFGDIISDEASVIPGSLGLLPSASLASLPDTNKAFGLYEPCHGSAPDLGPGKVNPLATILSAAMMLKLSLDLVDAGRAIEQAVKNVLDAGIMTADLGGSSSTQEVGDAVAQEVAKLLKN

SEQ ID NO: 107449 - DNA, 1092 bp, Pichia jadinii
  CDS (1)..(1092)
atgccagagaaaacaattgtcgttcttccaggtgaccacgtcggtactgagatcactgctgaggccatcaaggtcctcaaggccatcgaggaggtgaagccggagatcaagttcaacttccaacaccacctgattggaggagctgctatcgatgccaccggtgttccattgccagacgatgccttggaggcctccaagaaggctgatgctgttctgctcggtgctgttggtggtccaaaatggggtaccggtgccgtcagaccagagcaaggtcttctgaagatcagaaaagagctgaacctttacgccaacttgagaccatgtaactttgcttctgagtccttgttggacttgtctccaatcaaggccgaggtcgtcaagggcacagactttgtcgttgtcagagagcttgtcggtggtatctactttggtgaaagaaaggaggatgacggttcaggcgttgcgtccgatactgaaacatactctgttccagaggttcaaagaatcaccagaatggctgcattcatggccttgcaacacaacccaccattgccaatctggtctttggacaaggccaacgtcttggcctcctccagattgtggagaaaggttgtcactgagaccatcgagaaggaattcccacaattgaccgttcaacaccagttgatcgactccgctgccatgatcctcatcaagtacccaacacagctcaacggtatagtcatcacctccaacatgtttggtgatatcatctctgatgaggcatctgtcattccaggttctctgggtttgttgccatctgcctctttggcatctctgccagactcgaacaaggcctttggtttgtacgagccatgccatggatccgctccagacttgccagccaataaggtgaacccaattgccactatcttgtctgctgcaatgatgttgaagttgtctttggacttgtacgaggaaggtgttgcggttgagactgctgttaagcaagttctcgatgctggtatcagaactggtgacttgaagggaacaaactcaaccaccgaggttggtgatgctgttgctgaagccgtcaagaagatcttggcttga

SEQ ID NO: 107450 - protein, 363 aa, Pichia jadinii
MPEKTIVVLPGDHVGTEITAEAIKVLKAIEEVKPEIKFNFQHHLIGGAAIDATGVPLPDDALEASKKADAVLLGAVGGPKWGTGAVRPEQGLLKIRKELNLYANLRPCNFASESLLDLSPIKAEVVKGTDFVVVRELVGGIYFGERKEDDGSGVASDTETYSVPEVQRITRMAAFMALQHNPPLPIWSLDKANVLASSRLWRKVVTETIEKEFPQLTVQHQLIDSAAMILIKYPTQLNGIVITSNMFGDIISDEASVIPGSLGLLPSASLASLPDSNKAFGLYEPCHGSAPDLPANKVNPIATILSAAMMLKLSLDLYEEGVAVETAVKQVLDAGIRTGDLKGTNSTTEVGDAVAEAVKKILA

SEQ ID NO: 107451 - DNA, 1678 bp, Pichia stipitis
  CDS (310)..(1431)
gggatgtaagacttatcccgttttcgctccggcgccggcatgactaaccaaagtgaaaaatcggcgaacgatgttctccagattctatataaagtcttctatttcctattgcgaatgcttttgtatttgaattgaacacagacgcaagcttctacgtactattacaggtatcctgatacagatttctgtagaaaacatttcaagacagcaatatagccttaacttatcaaagttttgattttctagacttttttcagtgttcaacgaagtttttcagttatccttttacctatactcttcggatttaccatgtctaccgttaccaagaccatcactgttctcccaggagatcacgtcggtactgagatttgtaatgaggctatcaaggtgcttgaagccattgagcaagctactccttaccaaaagatccactttgagttcaagcatcatttaattggaggtgctgccattgactccacgggagttcctttgccagatgactctcttgctgcagccaaactgtctgatgctgttttgcttggagcagttggtggtcccaagtggggaactggtgctgttagaccagaacaaggtttgttgaagatcagaaaggagttgaacttgtatgccaacttgagaccttgcaactttgcatccgatgctcttttagaactctctcccttgaagtcagaaatcgtcaagggcaccaacttcactgttgtccgtgaacttgttggtggtatttactttggcgaaagacaagaacaggaagagtctgccgacggagagtctgcttgggacaccgaaaagtattctgtggctgaagtcaccagaatcaccagaatggcagctttcatggcattgcaacacaacccacctttaccaatctggtcattggataaggctaatgtgttggcctcctccagattatggagaaagactgtggataaggtaatgaaagaagagttcccacaattgaccatccagcaccagttgatcgattctgctgccatgattttggttcaatctcctaccaaattgaatggtattgtcatcacttcaaacatgtttggctatattatcagtgacgaagcctcggtgatccctggctcgttgggtctcttaccttctgcatccttggcttcgttgccagacaccaattctgccttcggtttatacgagccatgccacggttctgctcctgacttgcccgaaaacaaggtcaacccaattgccaccatcttgtcggtcgccatgatgttgagattgtcgttggacagcttgaaggaagccgaagccttggaagaagccgtccgtcaagttttggactctggagtcagaactgctgacttacgtggtaccaactctaccaaggaagtcggtgaagctgttgttgctggcgtcaccaagatcttgaaggatgctgcctagtcagtaatataatggccactcattatttatacatatatattaacttcatactccaaaaaactattagaaataaatagtacgattaatggcaaataagaaaagtacagtaccaaaaagttcgtgattctctaatctattagtaaagtcaaattgggcaagaactaagtagcaaaagcatcaattttgggggctttgttaatgctctcacaagagcgaacgtttgaagatgctatccttaatgaaccat

SEQ ID NO: 107452 - protein, 373 aa, Pichia stipitis
MSTVTKTITVLPGDHVGTEICNEAIKVLEAIEQATPYQKIHFEFKHHLIGGAAIDSTGVPLPDDSLAAAKLSDAVLLGAVGGPKWGTGAVRPEQGLLKIRKELNLYANLRPCNFASDALLELSPLKSEIVKGTNFTVVRELVGGIYFGERQEQEESADGESAWDTEKYSVAEVTRITRMAAFMALQHNPPLPIWSLDKANVLASSRLWRKTVDKVMKEEFPQLTIQHQLIDSAAMILVQSPTKLNGIVITSNMFGYIISDEASVIPGSLGLLPSASLASLPDTNSAFGLYEPCHGSAPDLPENKVNPIATILSVAMMLRLSLDSLKEAEALEEAVRQVLDSGVRTADLRGTNSTKEVGEAVVAGVTKILKDAA

SEQ ID NO: 107453 - DNA, 1074 bp, Prochlorococcus marinus
  CDS (1)..(1074): transl_table=11
atgcgccagcaccgcatcgttctgctgcctggtgatggtatcggtcctgaaatcactgctgtagcaaagcttttacttgatgcattaggccaccaacacggtttcaagctgaatttcgagcaacaccccatcggtggggttgccatagacgcaagcggatcgcccttgcccgccagcacccttgaggcatgtcaagccagtgatgcggtgctccttgcagcaattggtagccctcgctttgacgccctgcccagggagcaacggccggaaacaggcttgctatcccttcgggcaggactgaaactatttgcgaacctcaggccggtgacgatcctgccggccctgatcgatgccagcagcctgaaagcaaatgtgatcaaaggcgttgatctaatggtggtgcgtgagctcacaggtgggatttatttcggccaaccgaaagggcggattgaggccgatggggatgagcgcgctttcaacacaatgacctactccagaactgaggtggatcgaatcgccaaggtcgctttcgagctcgcccgcgatcgcagcggaaagctttgttcagtagataaggcaaacgtgcttgatgtcagtcaactgtggcgtgatcgtgtcgatgctttggctgccaactatggagatgtagagctcagccacatgtatgtggacaatgccgcgatgcaattggtgcgcaaccccaggcaatttgacgtgctgcttaccggcaacctattcggagacatccttagtgacgaagcagcgatgcttaccggttcgattggcatgctgccctcagcttcgctcggcagcgaaggaccaggactgtttgaaccggtgcatggctccgcacccgatattgcaggacaagacctggccaatccaatggcaatggtgctttgcgcagcaatgatgctgagaattggcttaaaggaaaacgatgccgccagggctcttgaaggatcagtagagcgtgttctcgcggcaggtttccgtacaggtgacctcatgagtgagggttgtacccaactgggctgcgcagagatgggtgagcaattgctgcaagcgctttaa

SEQ ID NO: 107454 - protein, 357 aa, Prochlorococcus marinus
MRQHRIVLLPGDGIGPEITAVAKLLLDALGHQHGFKLNFEQHPIGGVAIDASGSPLPASTLEACQASDAVLLAAIGSPRFDALPREQRPETGLLSLRAGLKLFANLRPVTILPALIDASSLKANVIKGVDLMVVRELTGGIYFGQPKGRIEADGDERAFNTMTYSRTEVDRIAKVAFELARDRSGKLCSVDKANVLDVSQLWRDRVDALAANYGDVELSHMYVDNAAMQLVRNPRQFDVLLTGNLFGDILSDEAAMLTGSIGMLPSASLGSEGPGLFEPVHGSAPDIAGQDLANPMAMVLCAAMMLRIGLKENDAARALEGSVERVLAAGFRTGDLMSEGCTQLGCAEMGEQLLQAL

SEQ ID NO: 107455 - DNA, 1083 bp, Pseudomonas aeruginosa
  CDS (1)..(1083): transl_table=11
atgagcaagcagatcctggttctccccggtgacggtatcggcccggaaatcatggcggaagcggtcaaggtgctggaactggccaacgacaggttccagctcggcttcgaactggccgaggacgtcatcggtggcgcggccatcgacaagcacggcgtgccgctggccgaccagaccctgcagcgcgcgcgccaggccgatgcggtgctgctgggcgcggtaggggggccgaaatgggacaggatcgaacgcgatatccgtcccgagcgcggtctgctgaagattcgctcgcaactgggcctgttcgccaacctgcgtccggccatcctctatccgcaactggccgcggcctccagcctgaagccggaagtggtcgccgggctggacatcctcatcgtccgcgaactgaccggcggcatctacttcggccagccccgcgagcagcgcgtgctggagaacggcgagcgccaggcctacgacaccctgccgtacagcgagagcgaaatccgtcgtatcgcccgcgtcggtttcgacatggcccgcgtacgcaacaacaggctctgctcggtggacaaggccaacgttctcgcctccagccaactgtggcgggaagtggtggaagaggtggcgaaggactacccggacgtcgagctttcccatatgtacgtggataacgccgccatgcaactggtgcgcgcgcccaagcagttcgacgtgatggtcaccgacaacatgttcggcgacatcctgtcggatgaggcttccatgctgaccggttccatcggcatgctgccttctgcctcgctcgacgcgaacaacaagggcatgtacgaaccctgccacggttccgccccggacatcgccggtcagggcatcgccaacccgttggcgaccatcctctcggtctcgatgatgttgcgctacagcttcagccaggcgaccgccgccgacgccatcgagcaggcggtgagcaaggtcctcgatcaggggctgcgcaccggcgacatctggtccgaaggctgccgcaaggtcggcacccgggaaatgggcgatgccgtagtcgcggcactcaagaatctgtaa

SEQ ID NO: 107456 - protein, 360 aa, Pseudomonas aeruginosa
MSKQILVLPGDGIGPEIMAEAVKVLELANDRFQLGFELAEDVIGGAAIDKHGVPLADQTLQRARQADAVLLGAVGGPKWDRIERDIRPERGLLKIRSQLGLFANLRPAILYPQLAAASSLKPEVVAGLDILIVRELTGGIYFGQPREQRVLENGERQAYDTLPYSESEIRRIARVGFDMARVRNNRLCSVDKANVLASSQLWREVVEEVAKDYPDVELSHMYVDNAAMQLVRAPKQFDVMVTDNMFGDILSDEASMLTGSIGMLPSASLDANNKGMYEPCHGSAPDIAGQGIANPLATILSVSMMLRYSFSQATAADAIEQAVSKVLDQGLRTGDIWSEGCRKVGTREMGDAVVAALKNL

SEQ ID NO: 107457 - DNA, 1083 bp, Pseudomonas putida
  CDS (1)..(1083): transl_table=11
atgagcaagcagattctgattctcccaggtgacggtatcggcccggaaatcatggccgaggcagtcaaggtactggagctggccaacgacaagttccagctcggcttcagcctggcgcacgacgtgattggcggtgccgccatcgacaagcacggtgtgccgctggccgacgaaaccctggagcgtgcgcgcaaggccgatgcagtgctgctgggggctgtgggcgggccgaagtgggacaagatcgagcgagacattcgcccggagcgcggcctgctgaagatccgctcgcaactgggcctgttcgccaacctgcgcccggccatcctttacccgcaactggccgatgcctcgtcgctgaagccggaaatcgtgtcgggcctggacatcctcattgtccgtgagctgaccggcggcatctacttcggtgccccgcgtggccagcgcgagctggaaggtggcgaacgccaggcctacgacaccctgccgtacagcgaaagcgaagtgcgccgcattgcccgtgtcggcttcgacatggcccgcgtgcgcggcaagaagctgtgctcggtggacaaggccaacgttctggcctccagccagctgtggcgtgaagtggtcgaagacgtggccaaggactacccggacgtggaactgagccacatgtacgtcgacaacgctgccatgcagctggtgcgtgcccccaaacagttcgacgtgatggtgaccgacaacatgttcggtgacattctgtcggatgaagcttccatgttgaccggttccatcggcatgctgccttcggcgtccctggatgccgacaacaaaggcatgtacgagccttgccacggctcggcaccggacatcgccggccttggcatcgccaacccactggcgaccatcctgtcggtgtcgatgatgttgcgttacagcttcaatcagtcggctgccgccgaggcgatcgagaaggccgtgagcctggttctggaccaggggctgcgtaccggcgacatcttctcggaaggctgccgcaaagttggtacgcaggaaatgggcgacgcagtagtcgcagcgctgcggaatctgtaa

SEQ ID NO: 107458 - protein, 360 aa, Pseudomonas putida
MSKQILILPGDGIGPEIMAEAVKVLELANDKFQLGFSLAHDVIGGAAIDKHGVPLADETLERARKADAVLLGAVGGPKWDKIERDIRPERGLLKIRSQLGLFANLRPAILYPQLADASSLKPEIVSGLDILIVRELTGGIYFGAPRGQRELEGGERQAYDTLPYSESEVRRIARVGFDMARVRGKKLCSVDKANVLASSQLWREVVEDVAKDYPDVELSHMYVDNAAMQLVRAPKQFDVMVTDNMFGDILSDEASMLTGSIGMLPSASLDADNKGMYEPCHGSAPDIAGLGIANPLATILSVSMMLRYSFNQSAAAEAIEKAVSLVLDQGLRTGDIFSEGCRKVGTQEMGDAVVAALRNL

SEQ ID NO: 107459 - DNA, 1068 bp, Ralstonia eutropha
  CDS (1)..(1068): transl_table=11
atgaagatcgcagtcctgccaggtgacggcatcggtccggaaatcgttgccgaggccgtcaaggtcctgaacgcgctcgacgagaagttcgagatggaaaccgccccggtgggcggcgccggctacgaggccgaaggccacccactgccggagaacacgctgaagctggccaaggaagccgatgccatcctgttcggcgccgtgggcgactggaagtacgacagcctggagcgcgcgctgcgccccgagcaggccatcctgggcctgcgcaagcacctgcagctgttcgccaacttccgcccggcgatctgctatccggaattgacgggcgcatcgagcctgaagccggaactggtcgcgggcctggacatcctgatcgtgcgcgaactgaatggcgacatttacttcggccagccgcgcggcgtgcgtgaggcgccggacggcctgttcaagggcgcccgcgaaggtttcgacaccatgcgctacagcgagccggaaatccgccgcatcgcgcatgtggcgttccaggccgcggccaagcgcggcaagaagctgtgcagcgtcgacaaggccaacgtgctcgagacctttcagttctggaaggacatcgtgatcgatgtcagcaaggagtatccggacgtcgagctgtcgcacatgtacgtcgacaacgccgcgatgcagctggtcaaggcgcccaagagcttcgatgtaatcgtcaccggcaatatgttcggcgacatcctgtcggacgaggccgcgatgctgaccggctcgatcggcatgctgccgtcggcctcgctggatgcgaacaacaagggcctgtacgagccgtcgcacggttcggccccggacatcgcgggcaagggcgtcgccaatccgctggcgaccatcctgtcggcggcgatgatgctgcgctactcgctgaacaaggccgaacaggccgaccgcatcgagaacgccgtgaagaaggtgctggcacagggctatcgcaccggcgacatcctgacgccgggctgcaagcaggtcggcacgcgcgaaatgggcgaggccgtactggccgctctgtaa

SEQ ID NO: 107460 - protein, 355 aa, Ralstonia eutropha
MKIAVLPGDGIGPEIVAEAVKVLNALDEKFEMETAPVGGAGYEAEGHPLPENTLKLAKEADAILFGAVGDWKYDSLERALRPEQAILGLRKHLQLFANFRPAICYPELTGASSLKPELVAGLDILIVRELNGDIYFGQPRGVREAPDGLFKGAREGFDTMRYSEPEIRRIAHVAFQAAAKRGKKLCSVDKANVLETFQFWKDIVIDVSKEYPDVELSHMYVDNAAMQLVKAPKSFDVIVTGNMFGDILSDEAAMLTGSIGMLPSASLDANNKGLYEPSHGSAPDIAGKGVANPLATILSAAMMLRYSLNKAEQADRIENAVKKVLAQGYRTGDILTPGCKQVGTREMGEAVLAAL

SEQ ID NO: 107461 - DNA, 1104 bp, Rhizobium loti
  CDS (1)..(1104): transl_table=11
atggcaacgaagcatcttttcctgctccccggcgacggcatcggccccgaggccatggccgaggtcaagaagctgatatcggccatgaacgaaaagctcggcagcggcttcgccaccgatgagggcctggtcggcggctgcgcctacgacgcgcatggcgcggcgatttccgatgccgacatggccaaggcgatggcggcggacgcggtgctgttcggcgcggtcggcggaccgaaatgggatgcggtgccttacgaggtgcgccccgaggccggcctgctgcggctgcgcaaggacatggagctgttcgccaatctgcgccccgccatctgctatccggcgctcgccgcatcctcctcgctcaagcaggaggtggtcgaagggctcgacatcctcatcgtgcgcgagctgactggcggcgtctatttcggcgagcccaagcagatcatcgatctcggcaacggccagaagcgcggcatcgacacgcaggtctatgacacgttcgagatcgagcgcatttcgggcgtcgccttcgagctcgcgcgcacccgcaagaaccacgtcacctcgatggaaaagcgcaacgtcatgaagtcgggcgtgctgtggaacgaggtggtcacccagacgcacaaggcgcgctacgccgacgtcaagctcgaccacatgctggccgatgccggcggcatgcagttggtgcgctggccaaaacagttcgacgtcatcgtcaccgacaatctgttcggcgacatgctgtccgacatcgccgccatgctgaccggctcgatcggcatgctgccgtccgcctcgctcggcgcgcccgacgtcaagaccaagaagcgcaaggcgctctacgagcccgtgcacggctcggcgcccgacatcgccggcaagggcatcgccaacccgatcgccatgatcgcttccttcgccatgtgcctgcgctattccttcggcatggtcgatgaggccgacaggctggaaggcgcgatcgccgccgtgctcgatcagggcctgcggacgaaggacattttctcgccgggcatgaccgaggtcggcacggtcgagatgggcgacgcgatcatcgccaagttcctgggttaa

SEQ ID NO: 107462 - protein, 367 aa, Rhizobium loti
MATKHLFLLPGDGIGPEAMAEVKKLISAMNEKLGSGFATDEGLVGGCAYDAHGAAISDADMAKAMAADAVLFGAVGGPKWDAVPYEVRPEAGLLRLRKDMELFANLRPAICYPALAASSSLKQEVVEGLDILIVRELTGGVYFGEPKQIIDLGNGQKRGIDTQVYDTFEIERISGVAFELARTRKNHVTSMEKRNVMKSGVLWNEVVTQTHKARYADVKLDHMLADAGGMQLVRWPKQFDVIVTDNLFGDMLSDIAAMLTGSIGMLPSASLGAPDVKTKKRKALYEPVHGSAPDIAGKGIANPIAMIASFAMCLRYSFGMVDEADRLEGAIAAVLDQGLRTKDIFSPGMTEVGTVEMGDAIIAKFLG

SEQ ID NO: 107463 - DNA, 1113 bp, Rhizobium meliloti
  CDS (1)..(1113): transl_table=11
atgactgtgcgcaatctcttccttctgcctggcgacggcatcggcccggaagccatggcggaagtccgcaaaatcatcgcttacatgaatgccgaacgtgacgccggcttcgtgacggacgagggacttgtgggtgggtccgcctatgacgcccatggcgcggcgatctccgaaggggatatggcgaaggcgcttgccgccgatgcggtgctcttcggcgccgtcggcggaccgaaatgggatgcggtgccctacgaggtgcggccggaagccgggctcctgcgcctgcgcaaggacctcgagctattcgccaacctgcgcccggccatctgctacccggcgctcgccaacgcatcgtcgctgaagcccgagctggtcgagggcctcgacattctcatcgtgcgcgagctgacgggcggcgtctatttcggcgagcccaaggagatcgtcgatctcggcaacggccagaagcgcggtatcgacacgcaggtctacgacacctacgagatcgagcgcatcgccggggtcgccttcgaactcgcccgtacccgcaacaatcgcgtctgctcgatggaaaagcgcaacgtgatgaagtcgggcgtgctctggaaccaggtcgtgacggagacgcacaaggcgaaatattccgatgtccagctcgagcacatgctggcggatgccggcggcatgcagctcgtgcggcagccgaaacagttcgacgtgatcgtcaccgacaaccttttcggcgacatgctgtcggacgtcgccgccatgctgaccggctcgctcggcatgctgccctccgcctcgctcggcgcaccggatgccaagaccggcaagcgcaaggcgctctacgagccggtgcacggctcggcacccgacatcgccggcacgggcgtcgccaacccgatcgccatgatcgcttccttcgccatgtgcctgcgctactccttcaacctcgtgaaggaagccgacgacctggagaaggcgatcgccaacgtgctcgatcagggcatccgcaccggcgacatcatggcggagggctgccggaaggtcggtaccgccgagatgggcgacgcgatcctcgccgagttcaagagcctctcggcctga

SEQ ID NO: 107464 - protein, 370 aa, Rhizobium meliloti
MTVRNLFLLPGDGIGPEAMAEVRKIIAYMNAERDAGFVTDEGLVGGSAYDAHGAAISEGDMAKALAADAVLFGAVGGPKWDAVPYEVRPEAGLLRLRKDLELFANLRPAICYPALANASSLKPELVEGLDILIVRELTGGVYFGEPKEIVDLGNGQKRGIDTQVYDTYEIERIAGVAFELARTRNNRVCSMEKRNVMKSGVLWNQVVTETHKAKYSDVQLEHMLADAGGMQLVRQPKQFDVIVTDNLFGDMLSDVAAMLTGSLGMLPSASLGAPDAKTGKRKALYEPVHGSAPDIAGTGVANPIAMIASFAMCLRYSFNLVKEADDLEKAIANVLDQGIRTGDIMAEGCRKVGTAEMGDAILAEFKSLSA

SEQ ID NO: 107465 - DNA, 1080 bp, Rhodopirellula baltica
  CDS (1)..(1080): transl_table=11
atgaattcctccatcgttttgttgcccggtgacgggatcggacctgaaatcgtcgaacaagcccgtttggtcctcgtgaaggtcgcggagcgtttcgggcacacctttgatttcagttcacaccaaatcggtgggatcgcgatcgacgaaaccggtgatcctcttcctcagccaaccattgatgcctgccgcaacgctgccgcgattcttttgggagccgttggtgggccgaaatgggacgatccttcggccaagacgcgccccgaggctggtctgctgaaaattcgcaaggagttggggctgtttgccaatctgcgaccgatcaaactgttcgacgaattggccgacgcatcaccgttgcgagccgacatcgtcaaaggcaccgacatcttgtttttccgcgaattgactggcgggatttactttggtgaatcaggcacatccggcagcggcgaagaggagaccgcattccagtcgatgacctactcggttggcgaagtcaaacgaattgtccgcatggctgcccaagcggctcgcggtcgttcgaaccgattgaccagcgtcgacaaagcgaacgttttggagccaagtcggttgtggcgtcgagtggctgcggaagtcatggccaacgagttccccgatgtccaatacgacgtcgtgttggtggattcgatggcgatgcacttgatcaaccgaccatcggagttcgatgtggttgtcaccggcaacatgttcggcgacatcttgaccgacgaggcgtccatgttgcccggttcgctcggcatgttgccaagtgcctccttgggcgatggtggtcctggactgtacgagcccattcacggatcggctccggacatcgccggcaaaagcgtcgccaatccgttggcgaccatcttggcagcagcgatgatgctgcgtcactcgttgggactgaccgacgaagccgaggcgatcgaaaaggccgtcgccggcgtgatcaccgatggtttgcgaacacctgacttggctcgtggcgatcaatctaagagcgtctcgaccgaagaaatgggcgccgccgtggtcgctaaacttgccagctag

SEQ ID NO: 107466 - protein, 359 aa, Rhodopirellula baltica
MNSSIVLLPGDGIGPEIVEQARLVLVKVAERFGHTFDFSSHQIGGIAIDETGDPLPQPTIDACRNAAAILLGAVGGPKWDDPSAKTRPEAGLLKIRKELGLFANLRPIKLFDELADASPLRADIVKGTDILFFRELTGGIYFGESGTSGSGEEETAFQSMTYSVGEVKRIVRMAAQAARGRSNRLTSVDKANVLEPSRLWRRVAAEVMANEFPDVQYDVVLVDSMAMHLINRPSEFDVVVTGNMFGDILTDEASMLPGSLGMLPSASLGDGGPGLYEPIHGSAPDIAGKSVANPLATILAAAMMLRHSLGLTDEAEAIEKAVAGVITDGLRTPDLARGDQSKSVSTEEMGAAVVAKLAS

SEQ ID NO: 107467 - DNA, 1113 bp, Rhodopseudomonas palustris
  CDS (1)..(1113): transl_table=11
atggcaacgcacaaactgcttcttctccccggcgacggcatcggcaccgaagtgatggccgaggtcagccggctgatcgactggctcaacaaggccggcattgccagcttcgagaccgagcacggcctggtcggcggcgccgcctatgacgccgacaaggtggcgatcaccgacgccaccatggcgctggcgcaggcctccgacgcggtgatcttcggcgcggtcggcggcccgaagtgggacggcgtgccctacgacgcccgccccgaagccggcctgctgcggctgcgcaaggatctcggcctgttcgccaatctgcggccggcggtgtgctacccggcgctggcggactcctcgagcctgaagcgcgacgtggtcgaaggcctcgacatcatgatcgtccgcgaattaaccggcggcgtgtatttcggcgagccgaagaccatcaccgatctcggcaacggccagaagcgggcggtcgacactcaggtctacgacacctacgagatcgagcggatcggccgggtcgcgttcgacctcgcccgcaagcgccgcaacaaggtcacctcgatggagaagcgcaacgtcatgaagacgggcgtgctctggaacgaagtgatcaccgccgtgcatgaccgcgaatacaaggacgtccagctcgaccaccagctcgccgactcgggcggcatgaatctggtcaagtggccgaagcagttcgacgtcatcgtcaccgacaacctgttcggcgacatgctgtccgacatcgccgcgatgctgaccggctcgctcggcatgctgccgtcggcctcgctcggcgaagtcgacgccaagaccggcaagcgcaagtcgatgtacgaaccggtacacggctcggccccggacatcgccggcaagggcatggccaatccggtggcgatgctggcctcgttcggcatggcgctgcgctattcgctcgacatgggtgcgctcgccgacaagcttgacgaagcgatcgccgcggtcctggccaagggcctgcgcaccgccgacatcaagagcgaaggcaccacggtgatctcgacctcgcagatgggcgaagcgatcgtcaccgaactgcaggccctgcacgcctga

SEQ ID NO: 107468 - protein, 370 aa, Rhodopseudomonas palustris
MATHKLLLLPGDGIGTEVMAEVSRLIDWLNKAGIASFETEHGLVGGAAYDADKVAITDATMALAQASDAVIFGAVGGPKWDGVPYDARPEAGLLRLRKDLGLFANLRPAVCYPALADSSSLKRDVVEGLDIMIVRELTGGVYFGEPKTITDLGNGQKRAVDTQVYDTYEIERIGRVAFDLARKRRNKVTSMEKRNVMKTGVLWNEVITAVHDREYKDVQLDHQLADSGGMNLVKWPKQFDVIVTDNLFGDMLSDIAAMLTGSLGMLPSASLGEVDAKTGKRKSMYEPVHGSAPDIAGKGMANPVAMLASFGMALRYSLDMGALADKLDEAIAAVLAKGLRTADIKSEGTTVISTSQMGEAIVTELQALHA

SEQ ID NO: 107469 - DNA, 1113 bp, Rhodospirillum rubrum
  CDS (1)..(1113): transl_table=11
atgcccgtttccaagaagatcctgttccttgccggcgacggcatcggccccgaagtcatggcccaggtgcgccgggtcatggactggctgaaccaaaccggccgcaccgcctttgaagtcgaagacgccttggttggcggcgccgcctatgacgcccagggcacgcccctgcatgacgacaccgtcgccctggccctggccgccgacgccgtgctgctgggcgccgtcggcgggccgaaatgggatgcctccctgcctttcgagcttaagcccgagcgtgggcttttgcgcctgcgcaaggacctggagctgtttgccaatctgcgtccggcgatggtcttcgacgccctggccgaggcttcgaccctgaagaccgagctggtctcgggccttgacgtgatgatcgtgcgcgagctgaccggcggcgtttatttcggccagccgcgcggcatcagcgccctgcccaacggcgagcgccgcggcgtcaacacccaggtctatgacacccacgagatcgtgcgcgtcgccaaggtggccttcgatctggcgggcaagcgcggcaagcggctgtgcagcgtcgaaaaggccaatgtcatggaaagcggcctgctgtggcgcgaggaggtgaccaagctgggcgccgactaccccgagatcgccctgtcgcatatgtacgccgataactgcgccatgcagttggtccgccagcccaagcagttcgatgtcatcgtcaccgacaacctgtttggcgatatcctgtccgattgcgccgccatgctcaccgggtcgctgggcatgctgccctcggccagcctgggcgccgccgacgcggcgggcaaccgtcgggcgatgtacgaaccggtccatggctcggcccccgatatcgccggccaggacaaggccaatccgctggcgaccatcctcagcttctcgatgatgctgcgctacagcttcgatctggccgaagaggccgatctggtcgacaacgccgtgcggggcgttctggccaagggcctgcgcaccggcgacatcttccagcccggcaagaccctggtcggcaccaccggcatgggcgacgccctgctggccgagatggcccaattggccaactaa

SEQ ID NO: 107470 - protein, 370 aa, Rhodospirillum rubrum
MPVSKKILFLAGDGIGPEVMAQVRRVMDWLNQTGRTAFEVEDALVGGAAYDAQGTPLHDDTVALALAADAVLLGAVGGPKWDASLPFELKPERGLLRLRKDLELFANLRPAMVFDALAEASTLKTELVSGLDVMIVRELTGGVYFGQPRGISALPNGERRGVNTQVYDTHEIVRVAKVAFDLAGKRGKRLCSVEKANVMESGLLWREEVTKLGADYPEIALSHMYADNCAMQLVRQPKQFDVIVTDNLFGDILSDCAAMLTGSLGMLPSASLGAADAAGNRRAMYEPVHGSAPDIAGQDKANPLATILSFSMMLRYSFDLAEEADLVDNAVRGVLAKGLRTGDIFQPGKTLVGTTGMGDALLAEMAQLAN

SEQ ID NO: 107471 - DNA, 1116 bp, Schizosaccharomyces pombe
  CDS (1)..(1116)
atgtgtgcaaagaaaatcgtcgtcttaccaggagaccatattggccctgaaattgttgcttctgccttggaggttttgaaagtcgttgagaagaagcgacctgagttaaaactcgagtttgaagaacacaagattggaggtgcctctattgatgcctatggaacccctttgactgacgagactgtgaaggcttgtttggaagctgacggtgttcttttgggtgccgttggtggtcctgaatggaccaaccccaattgtcgtcctgagcaaggtttattgaagcttcgtaagagtatgggtgtttgggccaaccttcgaccttgcaactttgccagcaagtctttagtcaagtacagccctttgaagcctgaaatcgttgaaggtgtcgatttttgtgttgtacgagaacttactggaggttgttactttggtgagcgcactgaggacaacggatcgggttatgctatggacacttggccttacagtttggaagaagtttctcgtattgctcgtttggctgcttggttagctgaaacttccaaccctcctgctcccgtcacattactcgacaaagctaatgttttggcaacttctcgtctttggcgcaagactgtagctaagatttttaaggaggaatatcctcaccttaccttaaaaaaccagctcattgactccgcagccatgcttttggtcaagagccctcgtacacttaacggtgttgttttgactgacaacttgtttggtgacattatttcagatgaggcttctgtcattcctggtagcttgggccttttgccttctgcctccctttccggtgtggtaggaaaatcagaagaaaaggttcattgtttggttgagcccattcacggtagcgctcccgatatcgctggtaagggcattgttaatcctgttggtacaattttatctgcttcccttctccttcgttatggtttgaatgctcctaaggaggctgaagctatcgaagccgccgtacgcaaggtcttggatgatacttcaattggtggacgtggtctttatactcgcgatttgggaggtgaggcttctaccgctgatattactaaggctgttgttgaagaacttgaaaaaattttgtaa

SEQ ID NO: 107472 - protein, 371 aa, Schizosaccharomyces pombe
MCAKKIVVLPGDHIGPEIVASALEVLKVVEKKRPELKLEFEEHKIGGASIDAYGTPLTDETVKACLEADGVLLGAVGGPEWTNPNCRPEQGLLKLRKSMGVWANLRPCNFASKSLVKYSPLKPEIVEGVDFCVVRELTGGCYFGERTEDNGSGYAMDTWPYSLEEVSRIARLAAWLAETSNPPAPVTLLDKANVLATSRLWRKTVAKIFKEEYPHLTLKNQLIDSAAMLLVKSPRTLNGVVLTDNLFGDIISDEASVIPGSLGLLPSASLSGVVGKSEEKVHCLVEPIHGSAPDIAGKGIVNPVGTILSASLLLRYGLNAPKEAEAIEAAVRKVLDDTSIGGRGLYTRDLGGEASTADITKAVVEELEKIL

SEQ ID NO: 107473 - DNA, 1092 bp, Shigella flexneri
  CDS (1)..(1092): transl_table=11
atgtcgaagaattaccatattgccgtattgccgggagacggtattggtccggaagtgatgacccaggcgctgaaagtgctgaatgccgtgcgcaaccgctttgcgatgcgcatcaccaccagccattacgatgtaggcggcgcagccattgataaccacgggcaaccactgccgcctgcgacggttgaaggttgtgagcaagccgatgccgtgctgtttggctcggtaggcggcccgaagtgggaacatttaccaccagaccagcaaccagaacgcggcgcgctgctgccgctgcgtaagcacttcaaattattcagcaacctgcgcccggcaaaactgtatcaggggctggaagcattctgtccgctgcgtgcagacattgccgctaacggcttcgacatccagtgcgtgcgcgaactgaccggcggcatctatttcggtcagccaaaaggccgcgaaggtagcggacaatatgaaaaagcgtttgataccgaggtgtatcaccgttttgagatcgagcgtattgcccgcatcgcgtttgaatctgctcgtaaacgtcgccacaaagtcacctcaatcgacaaagctaacgtgctgcaatcctctattttatggcgtgaaatcgtcaacgagatcgccacggaatacccggatgtcgaactggcgcatatgtacatcgacaacgccaccatgcagctgattaaagatccatcacagtttgacgttctgctgtgctccaacctgtttggcgacattctgtctgacgagtgcgcaatgatcactggctcgatgggcatgttgccttccgccagcctgaacgagcaaggttttggactgtatgaaccggcgggcggctcggcaccagatatcgcaggcaaaaacatcgccaacccgattgcacaaatcctgtcgctggcactgctgctgcgttacagcctggatgccgatgatgcggcttccgccattgaacgcgccattaaccgtgcattagaagaaggcattcgcaccggggatttagcccgtggcgctgccgccgttagtaccgatgaaatgggcgatatcattgcccgctatgtggcagaaggggtgtaa

SEQ ID NO: 107474 - protein, 363 aa, Shigella flexneri
MSKNYHIAVLPGDGIGPEVMTQALKVLNAVRNRFAMRITTSHYDVGGAAIDNHGQPLPPATVEGCEQADAVLFGSVGGPKWEHLPPDQQPERGALLPLRKHFKLFSNLRPAKLYQGLEAFCPLRADIAANGFDIQCVRELTGGIYFGQPKGREGSGQYEKAFDTEVYHRFEIERIARIAFESARKRRHKVTSIDKANVLQSSILWREIVNEIATEYPDVELAHMYIDNATMQLIKDPSQFDVLLCSNLFGDILSDECAMITGSMGMLPSASLNEQGFGLYEPAGGSAPDIAGKNIANPIAQILSLALLLRYSLDADDAASAIERAINRALEEGIRTGDLARGAAAVSTDEMGDIIARYVAEGV

SEQ ID NO: 107475 - DNA, 1074 bp, Solanum tuberosum; identical to SEQ ID NO: 37319
  CDS (1)..(1074)

SEQ ID NO: 107476 - protein, 357 aa, Solanum tuberosum; identical to SEQ ID NO: 37320

SEQ ID NO: 107477 - DNA, 1107 bp, Sordaria macrospora
  CDS (1)..(1107)
atggctactcataacattgttgtgttcggtggtgaccactgcggtcctgaggttgttgttgaggccatcaaggtcctcaagtcgatcgagaccaacagcccttcggctggcaagtttaacctccagaaccacctccttggcggtgcctccattgacaagcaccatgaccccctcaccgatgaggccctcaacgccgctaaggctgctgatgccgtccttctcggtgccatcggcggtcccgaatggggcacttcctccaccgtccgtcccgagcagggtctcctgaagctccgcaaggagctcggcacctatggcaacctccgcccttgcaacttcgcttccgagtccctcgtcgacagctctcccctcaaggccgaggtctgccgcggtaccgacttcattgtcgtccgtgagcttaccggcggtatctacttcggcgatcgcaccgaggacgacggctccggctacgcctgcgacaccgagccctacagccgcgccgagattgagcgcatcgccagactcgccggcttcctcgccctggccaagaaccctcccgccaaggtctggtctttggacaaggccaacgtgcttgccacctcccgcctctggcgcaagaccgtgaccgacgtcatcagcaaggagttcccccagctccagctcgagcaccagctcattgacagcgccgccatgttgctcgtcaagaacccccgcgccctcaacggcgtcgtcatcaccagcaacctctttggcgacatcatttccgacgaggcttccgtcatccccggctccatcggcctgctcccctccgcttccttgggcggcattcctgacggcaagggcaagtgcaacggcatctacgagcccatccacggctccgctcccgatatcagcggcaagggcattgtcaaccccgtcggcaccatcctctccgtcgccatgatgctccgctactcgctcaacctccccaaggaggccgacgctgtcgaggccgctgtcaaggctgccatcgacaacggcaccaagaccaaggaccttggcggcagcgctaccacttcggacatgggtaacgctgttgttgctgagctggagaagatccttaaggcctag

SEQ ID NO: 107478 - protein, 368 aa, Sordaria macrospora
MATHNIVVFGGDHCGPEVVVEAIKVLKSIETNSPSAGKFNLQNHLLGGASIDKHHDPLTDEALNAAKAADAVLLGAIGGPEWGTSSTVRPEQGLLKLRKELGTYGNLRPCNFASESLVDSSPLKAEVCRGTDFIVVRELTGGIYFGDRTEDDGSGYACDTEPYSRAEIERIARLAGFLALAKNPPAKVWSLDKANVLATSRLWRKTVTDVISKEFPQLQLEHQLIDSAAMLLVKNPRALNGVVITSNLFGDIISDEASVIPGSIGLLPSASLGGIPDGKGKCNGIYEPIHGSAPDISGKGIVNPVGTILSVAMMLRYSLNLPKEADAVEAAVKAAIDNGTKTKDLGGSATTSDMGNAVVAELEKILKA

SEQ ID NO: 107479 - DNA, 1044 bp, Streptomyces avermitilis
  CDS (1)..(1044): transl_table=11
atggctcgcagcatcaatctcgcagtgattcccggtgacggcatcggccaggaggtcgtggcccaggggctcaaggtcctctccgccgcccttccctcggacgtgaagctggagaccaaggagttcgacttcggcgcccggcgctaccacgccaccggtgagaccctcaccgacgccgacctcgacgccctgaagcagcacgacgcgatcctgctcggcgcgatcggcgacccgtcggtcccgtccggcgtcctggagcgcggcttcctgctcaagctgcgcttcgccttcgaccaccacgtcaacctgcggccctcgaagctgctccccggcgtcgagaccccgctcgccggccagcccgagatcgacttcgtggtggtgcgcgagggcaccgaaggcccgtacaccggcaacggcggcaccatccgcaccggcaccccgcacgcggtcgccaccgaggtctcgctgaacaccgccttcggcatcgagcgcgtggtgcgcgacgcctatgcccgcgcccaggcccgcccccgcaagaagctggcgctcgtccacaagaacaacgtgctcgtgcacgccggtcacctgtggacggacatcttcaacaaggtgggcgaggagttcccggacgtcaccaccgagtacatgcacgtggacgcggcgaccatctacctcgtcacgcagcccgagcgcttcgacgtgatcgtcaccgacaacctcttcggtgacatcatcaccgacctcgccgcggcgatctccggcggcatcggagtcgccgcctccggcaacatcaacccgtccggcgcgtacccgtcgatgttcgagcccgtgcacggctcggcacccgacatcgccggccagggcaaggcggacccgtccgccacgatcctgtccgtcgccctcctgctgcgccacctcggctacgaggccgaggccgcgcgtatcgaggaggccgtctccgccgacctcgcggagcgtgtgggcaagcccgcccgcagcaccgacgagatcggtgacgcgctcaccgtacgagtagcaggctga

SEQ ID NO: 107480 - protein, 347 aa, Streptomyces avermitilis
MARSINLAVIPGDGIGQEVVAQGLKVLSAALPSDVKLETKEFDFGARRYHATGETLTDADLDALKQHDAILLGAIGDPSVPSGVLERGFLLKLRFAFDHHVNLRPSKLLPGVETPLAGQPEIDFVVVREGTEGPYTGNGGTIRTGTPHAVATEVSLNTAFGIERVVRDAYARAQARPRKKLALVHKNNVLVHAGHLWTDIFNKVGEEFPDVTTEYMHVDAATIYLVTQPERFDVIVTDNLFGDIITDLAAAISGGIGVAASGNINPSGAYPSMFEPVHGSAPDIAGQGKADPSATILSVALLLRHLGYEAEAARIEEAVSADLAERVGKPARSTDEIGDALTVRVAG

SEQ ID NO: 107481 - DNA, 1044 bp, Streptomyces coelicolor
  CDS (1)..(1044): transl_table=11
atgtctcgcagcctcaatctcgcagtgatccccggtgacggcatcggccaggaggtcgtggccgagggtctcaaggtcctctccgccgtccttccgcaggatgtgaagctggagaccaaggagttcgacttcggcgcccggcgctaccacgccaccggtgagaccctcaccgacgccgacctcgacgccctcaaggcgcacgacgccatcctgctcggcgccatcggcgacccctcggtgccgtccggcgtgctggagcgcggcttcctgctcaagctccgcttcgccttcgaccaccacgtcaacctgcggccgagcaagctcctgcccggcgtcgccaccccgctcgccggccagcccgagatcgacttcgtcgtcgtccgcgagggcaccgagggcccgtacaccggcaacggcggcaccatccgcaagggcaccgagcacgaggtcgccaccgaggtctccgtcaacacggcctacggcgtcgagcgcgtcgtccgcgacgccttcgcccgcgcccaggcccgcccgcgcaagaagctcacgctggtccacaagaacaacgtgctgaccttcgcgggccacctgtggaccaacatcttcaacaaggtcgcggcggagtaccccgaggtcaccaccgactacctccacgtcgacgccgcgaccatcttcctggtcaccgacccggcccggttcgacgtgatcgtcaccgacaacctcttcggcgacatcatcaccgacctcgccgcggccgtctccggcggcatcggcgtcgccgccagtgggaacatcaacccgtccggcgacttcccctcgatgttcgagccggtgcacggctccgcgccggacatcgccggccagggcaaggccgaccccaccgccacggtcctgtccgtcgccctgctgctgcgccacctcgggtacgaggacgaggccgcccggatcgaggacgccgtctccgccgacctcggcgagcgcggcgacctgcccgcccgcagcacctccgagatcggcgacactctcgccgcacgagtagcgggctga

SEQ ID NO: 107482 - protein, 347 aa, Streptomyces coelicolor
MSRSLNLAVIPGDGIGQEVVAEGLKVLSAVLPQDVKLETKEFDFGARRYHATGETLTDADLDALKAHDAILLGAIGDPSVPSGVLERGFLLKLRFAFDHHVNLRPSKLLPGVATPLAGQPEIDFVVVREGTEGPYTGNGGTIRKGTEHEVATEVSVNTAYGVERVVRDAFARAQARPRKKLTLVHKNNVLTFAGHLWTNIFNKVAAEYPEVTTDYLHVDAATIFLVTDPARFDVIVTDNLFGDIITDLAAAVSGGIGVAASGNINPSGDFPSMFEPVHGSAPDIAGQGKADPTATVLSVALLLRHLGYEDEAARIEDAVSADLGERGDLPARSTSEIGDTLAARVAG

SEQ ID NO: 107483 - DNA, 1035 bp, Streptococcus mutans
  CDS (1)..(1035): transl_table=11
atgaaaaaaatcgtaacgctggcaggagatggtattggtccagaaattatggcagcaggtttagaggtttttgacgctgttgctcaaaagattaactttgactatgaaattgaagcaaaagcttttggaggtgcaggaattgatgccagtgggcatccgcttcctgatgataccttagcagcagcaaaaactgctgatgcgattctattggcggccattggcagtccgcaatacgacaaggcacctgttcgtccggaacaaggtctgttagctatacgtaaagaacttaatctttttgctaatattcgtccagtgcgtatttttgatgccctcaggcacttatcgcctttaaaagcagaacgtattgctggtgttgattttgtggttgttcgtgaattgactggtggtatctactttggtcaacatactttaactgaaaattcggcatgtgatattaatgagtactcagctagtgaaatccgtcgaattatgcgtaaggcctttgccattgcacgtggtcgcagtaaaaaagtaaccagtattgataagcaaaatgttttggcgacttcaaagctttggcgacagatagcagaagaagtagcaaaagaatattcagatgtcactttggagcatcaattggtggacagtgcagccatggttatgattactaatccagcttgttttgatgttgtagtgactgaaaatctttttggggatattctgtccgatgaatccagtgtactgcctggcaccttaggggtcatgccgtctgccagtcattcagaaagcggtcctagcctttatgaacccattcacggttcagcacctgatattgctggaaaaggtattgctaacccaatttctatgattttatcagttgctatgatgctgcgtgacagtttcggagaaactgctggtgctgaaatgattgaacacgctgttaataaaaccttgacgcaggggattctaacgcgtgatttaggcggtttggctaatacaaaacagatgacagctgctattattgccaatctctaa

SEQ ID NO: 107484 - protein, 344 aa, Streptococcus mutans
MKKIVTLAGDGIGPEIMAAGLEVFDAVAQKINFDYEIEAKAFGGAGIDASGHPLPDDTLAAAKTADAILLAAIGSPQYDKAPVRPEQGLLAIRKELNLFANIRPVRIFDALRHLSPLKAERIAGVDFVVVRELTGGIYFGQHTLTENSACDINEYSASEIRRIMRKAFAIARGRSKKVTSIDKQNVLATSKLWRQIAEEVAKEYSDVTLEHQLVDSAAMVMITNPACFDVVVTENLFGDILSDESSVLPGTLGVMPSASHSESGPSLYEPIHGSAPDIAGKGIANPISMILSVAMMLRDSFGETAGAEMIEHAVNKTLTQGILTRDLGGLANTKQMTAAIIANL

SEQ ID NO: 107485 - DNA, 1488 bp, Thermus aquaticus
  CDS (289)..(1323): transl_table=11
gatcttcttcgtcaacgccatcgccatcggccttcccgccgtgaccatggcccccgaagacctggcggccctcttccaggccgtggaggccaaccccgagctggaggtggagattgacctggtcaacaaggaggtccgcttcgggggccgcaccgcccccctcttcatccgggaggaggcccgggaggctttggtggaggggctttgggaccccatcggcgagcttctggaggccggggagcttttggacgagtttgaccgcaagctcccctaccccaaggaggccccatgagggtagcggtcctgcccggggacggcatcggccccgaggtcacggaggcggccctcagggtccttaaggccctggacgagcgggagggccttggcctcacctacgagaccttccccttcgggggcgccgccatagacgggtacggggagcccttcccggaggtgacccgaaagggggtggaggcggcggaggcggtgcttttgggaagcgtggggggacccaagtgggacgcccttccccgcaagatccggcccgagtcggggctcctcgccctcagaaagagccaggacctcttcgccaacctgcgcccggccaaggtcttccccgggctggagaggctttcccccctcaaggaggagatcgcccggggggtggacgtgctgatcgtgcgggagctcaccggggggatctacttcggggagcccagggggatgtcggaggccgaggcctggaacaccgagcgctactccaaacccgaggtggagcgggtggccaaggtggcctttgaggcggccaggaagcgcagaaggcacctgaccagcgtggacaaggccaacgtgctggaggtgggggagttctggcggaagaccgtggaggaggtccacaagggctaccccgacgtggccctcgatcaccagtacgtggacgccatggccatgcacctggtgaagaaccccgcccgctttgacgtggtggtcaccggcaacatcttcggcgacatcctctcggacctggccagcgtcctcccgggctccttgggcctcctcccctcggcctccttagggcggggcaccccggtctttgagcccgtgcacggctcggcccccgacatcgccggcaagggcatcgccaaccccacggccgccatcctctccgccgccatgatgctggagcacgccttcggcctggtggagctggcgaggcgggtggaggccgccgtggccaaggccctccgggaaacccccccgcccgacctgggggggagcgccggaacccaggccttcacggaggaggttctgcggcacctgtaacaccaccccatgctggcttgcgccagcatgggggccccggcaaaaggttcctggggaagttaccagggtgggccgaaggaaacaggaaacaagggtattaagatgggggtatgatccggcaccgcttcagcgccgaggacttccaccgcatggccgaggggggga

SEQ ID NO: 107486 - protein, 344 aa, Thermus aquaticus
MRVAVLPGDGIGPEVTEAALRVLKALDEREGLGLTYETFPFGGAAIDGYGEPFPEVTRKGVEAAEAVLLGSVGGPKWDALPRKIRPESGLLALRKSQDLFANLRPAKVFPGLERLSPLKEEIARGVDVLIVRELTGGIYFGEPRGMSEAEAWNTERYSKPEVERVAKVAFEAARKRRRHLTSVDKANVLEVGEFWRKTVEEVHKGYPDVALDHQYVDAMAMHLVKNPARFDVVVTGNIFGDILSDLASVLPGSLGLLPSASLGRGTPVFEPVHGSAPDIAGKGIANPTAAILSAAMMLEHAFGLVELARRVEAAVAKALRETPPPDLGGSAGTQAFTEEVLRHL

SEQ ID NO: 107487 - DNA, 1065 bp, Thermotoga maritima
  CDS (1)..(1065): transl_table=11
atgaagatagcggttttacctggagacggtataggtcctgaagttgtaagggaagctctgaaagtgctcgaggtggtggaaaagaaaacggggaaaacctttgagaaagtctttggacacatcggaggggatgccatagacagattcggtgaaccccttcctgaggagacaaaaaagatatgtctggaagccgacgcgatcttccttggaagcgtcggaggacctaaatgggacgatcttcctccggagaagaggccggaaataggggggcttcttgccctaaggaagatgctcaacctttacgcaaacatcaggcctataaaggtctacagatcgcttgtgcatgtctctcctctgaaagaaaaggtgattggatccggggtcgatcttgtgaccgtcagggaactttcctacggagtttactacggccagccgaggggattggatgaagaaaagggattcgacaccatgatctacgacagaaaaaccgtggaacggatcgcgagaactgcctttgaaatcgcaaaaaacagaagaaaaaaggtcacctccgtcgacaaagcgaacgtcctctacagttctatgctgtggaggaaagttgtgaacgaagtagcgagagaataccctgatgtggagctgacgcacatatatgtggacaacgctgctatgcagctcatcctgaaaccatcgcagttcgatgtgatcctcacaacgaacatgtttggagacattctctcggatgagagcgcggcacttcctggttctcttggtcttctgccgtccgcgtctttcggtgataagaacctctacgaaccggcaggaggttccgctcctgatatagccggaaagaacatcgccaacccgatcgcacagatcctctctctcgccatgatgctcgagcattcctttggaatggtggaagaggcaagaaagatagaaagagcggttgagctggtgatagaagagggatacagaaccagagacatcgcagaggatccagaaaaggcggtttcgacctctcagatgggagatctcatatgtaaaaaactcgaagaaatatggtga

SEQ ID NO: 107488 - protein, 354 aa, Thermotoga maritima
MKIAVLPGDGIGPEVVREALKVLEVVEKKTGKTFEKVFGHIGGDAIDRFGEPLPEETKKICLEADAIFLGSVGGPKWDDLPPEKRPEIGGLLALRKMLNLYANIRPIKVYRSLVHVSPLKEKVIGSGVDLVTVRELSYGVYYGQPRGLDEEKGFDTMIYDRKTVERIARTAFEIAKNRRKKVTSVDKANVLYSSMLWRKVVNEVAREYPDVELTHIYVDNAAMQLILKPSQFDVILTTNMFGDILSDESAALPGSLGLLPSASFGDKNLYEPAGGSAPDIAGKNIANPIAQILSLAMMLEHSFGMVEEARKIERAVELVIEEGYRTRDIAEDPEKAVSTSQMGDLICKKLEEIW

SEQ ID NO: 107489 - DNA, 1062 bp, Thiobacillus denitrificans
  CDS (1)..(1062): transl_table=11
atgaagattgcagttttgccgggtgacggcatcggtccggaaatcatctcccaggcagtcaaggtgctggaggcgctcaagtccgaaggcgcgaagatcgagatggaaaccgcgccgatcggcggcgccggctacgacgcggcgggcgatccgctgccggaggcgacgctgaaactcgcgcgcgaagccgacgcggtgctgctcggcgccgtgggggggccgcagtacgacacgctcgatcgcccgctgcgcccggaacgcggcctgctgcgcattcgcaaggaactgaacctcttcgccaacctgcgcccggcactcttgtatcccgaactcgcgtcggcgtcgtcgctgaagcccgaggtcgtgtccggcctcgatctgatgatcgtgcgcgaactgaccggcgatgtgtacttcggccagccgcgcggcatcgaaacacggaatggcgagcgcgtcggcttcaacaccatgctgtattcggagtccgaggtgcgccgcgtcgcccacgtcgccttcggcatcgcgatgaagcgcgggaagaagctctgctcggtcgaaaaggccaacgtgctcgaatgctcggagctgtggaaggaaatcatgatcgaggtggccaaggactaccccgaggtcgagctttcgcacatgtacgtcgacaacgccgcgatgcagctcatccgcgcccccaagcagttcgacaccatcgtcaccggcaacatctttggcgacatcctgtccgacgccgcctcgatgctgtcgggatcgatcggcatgctgccgtcggcctcgctcgacgaacacaacaagggcatgtacgagccgatccacggctcggcgcccgacatcgccgggaagaacctcgccaacccgctcgcgacgatcctgtcggtcgcgatgatgtaccgctacaccttcgccgatctggcgactgccgaccgcatcgagaacgcagtcaagcaggtgatcgcgaagggctatcgcaccggcgacatctggaccgagggtacgcagaaggtgtcgtgcagcgagatgggcgacgcggtggtcgtggcactttga

SEQ ID NO: 107490 - protein, 353 aa, Thiobacillus denitrificans
MKIAVLPGDGIGPEIISQAVKVLEALKSEGAKIEMETAPIGGAGYDAAGDPLPEATLKLAREADAVLLGAVGGPQYDTLDRPLRPERGLLRIRKELNLFANLRPALLYPELASASSLKPEVVSGLDLMIVRELTGDVYFGQPRGIETRNGERVGFNTMLYSESEVRRVAHVAFGIAMKRGKKLCSVEKANVLECSELWKEIMIEVAKDYPEVELSHMYVDNAAMQLIRAPKQFDTIVTGNIFGDILSDAASMLSGSIGMLPSASLDEHNKGMYEPIHGSAPDIAGKNLANPLATILSVAMMYRYTFADLATADRIENAVKQVIAKGYRTGDIWTEGTQKVSCSEMGDAVVVAL

SEQ ID NO: 107491 - DNA, 1681 bp, Thiobacillus ferrooxidans
  CDS (126)..(1202): transl_table=11
atggccttggtgccggggtctatccctttacccatattcccgaaaaccccatccggggacggaaaaccccatccggggacggaaaacccttttattattcgcgtcgtgatgaaaaaggatctggtatgaaaaaaatagccatcttcgccggtgacggcatcggtccggaaatcgtggcagccgcccggcaagtgctggatgcagtggatcaggccgcccaccttggcctgcgttgtaccgaaggcctggtgggcggggccgcgctggatgccagcgatgatcccttgccggcggcttctttgcagttggccatggcggcggatgcagtcattttgggtgcggtgggcggcccccgctgggacgcgtatccacccgccaagcgcccggaacagggactgctgcgtctgcgcaaaggcctggacctttatgcgaacctgcgtcccgcacagatttttccgcagttgctggatgcctcgcccctacgcccggagctggtgcgcgacgtcgatatcctggtggtgcgcgagctgaccggggatatctacttcggccagccacgcggtctggaggtcatcgacggcaagcgccgcggctttaacaccatggtctatgacgaggatgaaattcgccgtatcgctcatgtggccttccgcgctgcccaggggcgtcgcaagcagttgtgctcggtggacaaggccaatgtcctggagaccacgcgtctgtggcgcgaggtggtcaccgaggtagcgcgggactatcccgatgtgcggctcagccacatgtatgtggataatgccgccatgcaactgatccgcgccccggcacagttcgacgtgctgttgaccggcaatatgttcggcgacattctttccgacgaggccagtcaattgactggttccatcggtatgctgccctcggcctcgctgggcgagggacgggcgatgtatgaacccatccatggctcggcgccggatattgccgggcaggacaaggcgaatcccctggccacgattctatccgtggcgatgatgctgcggcattccctcaacgccgaaccctgggcgcaacgggtggaggcggcagtgcagcgagtgctggatcagggcctgcgcactgcggatattgcagcgccgggaacgccggtaatcggcaccaaagccatgggtgccgcggtggtcaacgccctgaacctgaaggattgatacgcagatgcaaaaatcacgatacaacgtggctattctgggagctaccggagctgttggtgaggtcatgctacaaattctcgagcagcggaagtttccggtggataaactctatctgctggccagcagccattcggcgggggggcgcctgtccttcatgggtaagcaggttctggtgtgcgatgcggcgacttttgactggtcgcaggccgatatcgggctgttttctgccggtgccaaggtcagcgcggagtatgccccaaaggcggtggccgccgggtgtgtggtcatcgacaacacctctcagttccgctatgacgacgaaattccgttggtggtgcccgaagtgaacccgcagcggattgccgattaccggcgccacggtattattgccaaccccaattgctcgactatccagatgctactggcgctaaaacccatcgccgacgtggcgggcatcgagcgcgtggtggtcgcga

SEQ ID NO: 107492 - protein, 358 aa, Thiobacillus ferrooxidans
MKKIAIFAGDGIGPEIVAAARQVLDAVDQAAHLGLRCTEGLVGGAALDASDDPLPAASLQLAMAADAVILGAVGGPRWDAYPPAKRPEQGLLRLRKGLDLYANLRPAQIFPQLLDASPLRPELVRDVDILVVRELTGDIYFGQPRGLEVIDGKRRGFNTMVYDEDEIRRIAHVAFRAAQGRRKQLCSVDKANVLETTRLWREVVTEVARDYPDVRLSHMYVDNAAMQLIRAPAQFDVLLTGNMFGDILSDEASQLTGSIGMLPSASLGEGRAMYEPIHGSAPDIAGQDKANPLATILSVAMMLRHSLNAEPWAQRVEAAVQRVLDQGLRTADIAAPGTPVIGTKAMGAAVVNALNLKD

SEQ ID NO: 107493 - DNA, 1074 bp, Xylella fastidiosa
  CDS (1)..(1074): transl_table=11
atgagtaagcaaattttgattctccccggcgatggcattggacatgaaatcgttgctgaagccgttaaagtgttagagcatgtcaatgtccgtcatacgctgaatctgagattgagtttcgacgcacttggtggggctgcttatgaaaaatatggaagtccactggctgacgaaaccttggcgcgcgcacgtgatgcggatgcagtgttgcttggtgcggtcggtggaccacagtgggatacgattgatccggcacttcgtccagagcgggggttgctgaagattcgtgctcaattagggctgttcgccaatctgcgtcctgctttgttgtacccgcaattggcagatgcatccacccttaaacctgaagttgttgccggactcgatattctcatcgtgcgtgaactgacaggtggcctttattttggacagccacgcggcagccgtatatcaaaaaatggtgagcgtgaagcgtttgatacgttgccgtattgcgagagtgaaatccgtcgtattctcaaggttggttttgaaatggcgcgtctgcgtggtaaaaaactctgctctgtggacaaagcaaatgtgcttgcttccagtcagttatggcgcacagtggcgggagaaatggctaaagattatccagatgtgaccctctcgcatatgtatgtggataacgcagcaatgcaattagtgcgtcatccaaaacagtttgatgtgattgtcactgaaaatatgtttggtgacattctttcggatcaggcgtcaatgttaaccggttcgattggtatgttgccgtctgcgtcgttggacgccaataacaaagggatgtacgagccgtgtcatggttcggcgcccgatattgcaggacaaggggtcgcgaatccattagcgacgattttgtcagtggcgatgttattgcgttatagcatggggcatatcaaaacagcggatgcgattgaacatgcggttggtgtcgtccttgatagtggtttgcgtacagccgatatctggtccgaagggatgaccaaggtaggaactgtagcaatgggagatgcagtggtcgcagcgctctaa

SEQ ID NO: 107494 - protein, 357 aa, Xylella fastidiosa
MSKQILILPGDGIGHEIVAEAVKVLEHVNVRHTLNLRLSFDALGGAAYEKYGSPLADETLARARDADAVLLGAVGGPQWDTIDPALRPERGLLKIRAQLGLFANLRPALLYPQLADASTLKPEVVAGLDILIVRELTGGLYFGQPRGSRISKNGEREAFDTLPYCESEIRRILKVGFEMARLRGKKLCSVDKANVLASSQLWRTVAGEMAKDYPDVTLSHMYVDNAAMQLVRHPKQFDVIVTENMFGDILSDQASMLTGSIGMLPSASLDANNKGMYEPCHGSAPDIAGQGVANPLATILSVAMLLRYSMGHIKTADAIEHAVGVVLDSGLRTADIWSEGMTKVGTVAMGDAVVAAL

SEQ ID NO: 107495 - DNA, 1107 bp, Yamadazyma ohmeri
  CDS (1)..(1107)
atgtctaccaaaaccattactgttgtgcctggcgaccatgtcggcactgaaatctgcgatgaagctatcaaagttctcaaggccattgagaaagtttctccagtcaagtttgagttcaaacaccatttgattggtggtgctgctattgatgctactggtgtcccacttccagacgagacccttgaggctgccaagtcctcggatgctgttttgctcggtgctgttggtggccctaaatggggaactggagctgtgagacctgaacaaggtcttctcaagattagaaaggaattgaacttgtatgctaacttgagaccatgcaactttgtgtcggactctttgctcgagttgtcgcctttgaagtctgagattgtcaagggtactaacttcactgtggtacgtgaattggttggtggtatctactttggagaaagacaggaacaggaggagagttctgatggtcaatccgcatgggacactgagaagtactcggtggaagaagtcactagaatcactagaatggcagcattcatggctttgcaacacaacccacctttgccaatctggtctttggacaaggcaaatgttctcgcactgtcgagattgtggagaaagaccgttgaccacgtcatgtctactgaattcccacagcttaaggtccagcaccagttgattgactctgctgctatgattttagtcaagtctccaagtcaattaaacggtgtgatcatcacttccaacatgtttggagatattatctctgatgaagcatctgtgattccaggttctcttggtcttttgccatctgcatccttggcttccttacctgacaccaactctgcttttggtctctatgagccatgtcacggatctgcaccagatttgccagccaacaaggtcaaccctgttgccaccatcttatctgtggctatgatgttgcgtttatcattggattgcttgaaggaggccgaagctttggaaaaggctgttggccaggttttggatgcgggcatcagaaccgccgatttgcgcggatccagctccactaaggaggttggtgatgctgtggctgccgctgttgagaaaatcttggctgagggaaagtag

SEQ ID NO: 107496 - protein, 368 aa, Yamadazyma ohmeri
MSTKTITVVPGDHVGTEICDEAIKVLKAIEKVSPVKFEFKHHLIGGAAIDATGVPLPDETLEAAKSSDAVLLGAVGGPKWGTGAVRPEQGLLKIRKELNLYANLRPCNFVSDSLLELSPLKSEIVKGTNFTVVRELVGGIYFGERQEQEESSDGQSAWDTEKYSVEEVTRITRMAAFMALQHNPPLPIWSLDKANVLALSRLWRKTVDHVMSTEFPQLKVQHQLIDSAAMILVKSPSQLNGVIITSNMFGDIISDEASVIPGSLGLLPSASLASLPDTNSAFGLYEPCHGSAPDLPANKVNPVATILSVAMMLRLSLDCLKEAEALEKAVGQVLDAGIRTADLRGSSSTKEVGDAVAAAVEKILAEGK

SEQ ID NO: 107497 - DNA, 1218 bp, Yarrowia lipolytica
  CDS (1)..(1218)
atggaacccgaaactaagaagaccaagactgactccaagaagattgttcttctcggcggcgacttctgtggccccgaggtgattgccgaggccgtcaaggtgctcaagtctgttgctgaggcctccggcaccgagtttgtgtttgaggaccgactcattggaggagctgccattgagaaggagggcgagcccatcaccgacgctactctcgacatctgccgaaaggctgactctattatgctcggtgctgtcggaggcgctgccaacaccgtatggaccactcccgacggacgaaccgacgtgcgacccgagcagggtctcctcaagctgcgaaaggacctgaacctgtacgccaacctgcgaccctgccagctgctgtcgcccaagctcgccgatctctcccccatccgaaacgttgagggcaccgacttcatcattgtccgagagctcgtcggaggtatctactttggagagcgaaaggaggatgacggatctggcgtcgcttccgacaccgagacctactccgttcctgaggttgagcgaattgcccgaatggccgccttcctggcccttcagcacaacccccctcttcccgtgtggtctcttgacaaggccaacgtgctggcctcctctcgactttggcgaaagactgtcactcgagtcctcaaggacgaattcccccagctcgagctcaaccaccagctgatcgactcggccgccatgatcctcatcaagcagccctccaagatgaatggtatcatcatcaccaccaacatgtttggcgatatcatctccgacgaggcctccgtcatccccggttctctgggtctgctgccctccgcctctctggcttctctgcccgacaccaacgaggcgttcggtctgtacgagccctgtcacggatctgcccccgatctcggcaagcagaaggtcaaccccattgccaccattctgtctgccgccatgatgctcaagttctctcttaacatgaagcccgccggtgacgctgttgaggctgccgtcaaggagtccgtcgaggctggtatcactaccgccgatatcggaggctcttcctccacctccgaggtcggagacttgttgccaacaaggtcaaggagctgctcaagaaggagtaagtcgtttctacgacgcattgatggaaggagcaaactgacgcgcctgcgggttggtctaccggcagggtccgctagtgtataa

SEQ ID NO: 107498 - protein, 405 aa, Yarrowia lipolytica
MEPETKKTKTDSKKIVLLGGDFCGPEVIAEAVKVLKSVAEASGTEFVFEDRLIGGAAIEKEGEPITDATLDICRKADSIMLGAVGGAANTVWTTPDGRTDVRPEQGLLKLRKDLNLYANLRPCQLLSPKLADLSPIRNVEGTDFIIVRELVGGIYFGERKEDDGSGVASDTETYSVPEVERIARMAAFLALQHNPPLPVWSLDKANVLASSRLWRKTVTRVLKDEFPQLELNHQLIDSAAMILIKQPSKMNGIIITTNMFGDIISDEASVIPGSLGLLPSASLASLPDTNEAFGLYEPCHGSAPDLGKQKVNPIATILSAAMMLKFSLNMKPAGDAVEAAVKESVEAGITTADIGGSSSTSEVGDLLPTRSRSCSRRSKSFLRRIDGRSKLTRLRVGLPAGSASV

SEQ ID NO: 107499 - DNA, 1095 bp, Saccharomyces cerevisiae
  CDS (1)..(1095)
atgtctgcccctaagaagatcgtcgttttgccaggtgaccacgttggtcaagaaatcacagccgaagccattaaggttcttaaagctatttctgatgttcgttccaatgtcaagttcgatttcgaaaatcatttaattggtggtgctgctatcgatgctacaggtgttccacttccagatgaggcgctggaagcctccaagaaggctgatgccgttttgttaggtgctgtgggtggtcctaaatggggtaccggtagtgttagacctgaacaaggtttactaaaaatccgtaaagaacttcaattgtacgccaacttaagaccatgtaactttgcatccgactctcttttagacttatctccaatcaagccacaatttgctaaaggtactgacttcgttgttgtcagagaattagtgggaggtatttactttggtaagagaaaggaagacgatggtgatggtgtcgcttgggatagtgaacaatacaccgttccagaagtgcaaagaatcacaagaatggccgctttcatggccctacaacatgagccaccattgcctatttggtccttggataaagctaatgttttggcctcttcaagattatggagaaaaactgtggaggaaaccatcaagaacgaattccctacattgaaggttcaacatcaattgattgattctgccgccatgatcctagttaagaacccaacccacctaaatggtattataatcaccagcaacatgtttggtgatatcatctccgatgaagcctccgttatcccaggttccttgggtttgttgccatctgcgtccttggcctctttgccagacaagaacaccgcatttggtttgtacgaaccatgccacggttctgctccagatttgccaaagaataaggtcaaccctatcgccactatcttgtctgctgcaatgatgttgaaattgtcattgaacttgcctgaagaaggtaaggccattgaagatgcagttaaaaaggttttggatgcaggtatcagaactggtgatttaggtggttccaacagtaccaccgaagtcggtgatgctgtcgccgaagaagttaagaaaatccttgcttaa

SEQ ID NO: 107500 - protein, 364 aa, Saccharomyces cerevisiae
MSAPKKIVVLPGDHVGQEITAEAIKVLKAISDVRSNVKFDFENHLIGGAAIDATGVPLPDEALEASKKADAVLLGAVGGPKWGTGSVRPEQGLLKIRKELQLYANLRPCNFASDSLLDLSPIKPQFAKGTDFVVVRELVGGIYFGKRKEDDGDGVAWDSEQYTVPEVQRITRMAAFMALQHEPPLPIWSLDKANVLASSRLWRKTVEETIKNEFPTLKVQHQLIDSAAMILVKNPTHLNGIIITSNMFGDIISDEASVIPGSLGLLPSASLASLPDKNTAFGLYEPCHGSAPDLPKNKVNPIATILSAAMMLKLSLNLPEEGKAIEDAVKKVLDAGIRTGDLGGSNSTTEVGDAVAEEVKKILA

SEQ ID NO: 107501 - DNA, 1089 bp, Zygosaccharomyces bailii
  CDS (1)..(1089)
atgtctaaaaacatcgttgttctaccaggtgaccacgttggtcaagaaatcgcacaagaagctattaaagtgctggaggcgatctctgaagtcagccctaaggccaaattcaactttcagcatcatttgatcgggggtagtgcaattgatgcaactggatctcctttgccggatgaagctcttgcggctgctaagaaggccgacgctgtgcttctcggtgccgtcggcggtcctaaatggggtacaggcgccgttaggcctgagcaaggtttgctaaagattcgtaaggaattgcaattgtacgcaaacttgagaccttgcaactttgcttctgaatctttactcgaactttctcctttgaaaccacaacatgccagaggtacagattttatcgttgttagagaactagttggaggtatctacttcgggcagcgtaaagaagacgatggtgacggtgtcgcttgggacagtgaaaggtacaccaagccagaagtccagcgtatcactagaatggctgcatttttagctcttcagcacaatcctcctctgccgatttggtcccttgacaaggccaatgtgctggcctcctccagattatggagaaagacagtggaggagactatcaagaacgagttccctcaattgacagttaaacaccaattgattgactctgccgccatgattttgattaagaacccaactcagttgaatggtatcattattactagcaacatgtttgaggatattatatctgatgaagcatcagtaattcctggttctctcggtctgctaccctcggcttctttggcctctttgccagacacgaatgaagcctttggtctttacgagccttgtcatggttcggcgcctgatttaccaaagggtaaagtgaatcctgttgcgatgattctttctgcagcgatgatgttgaaactttctttgaatatggccaaagagggagaggctctcgaaactgccgtaaagcaggttctagattcgggtgttagaactggcgacttgggcggttccaatagcacctccgaggttggcgatgccatcgccaaggctgtaaagcaaattttggcttga

SEQ ID NO: 107502 - protein, 362 aa, Zygosaccharomyces bailii
MSKNIVVLPGDHVGQEIAQEAIKVLEAISEVSPKAKFNFQHHLIGGSAIDATGSPLPDEALAAAKKADAVLLGAVGGPKWGTGAVRPEQGLLKIRKELQLYANLRPCNFASESLLELSPLKPQHARGTDFIVVRELVGGIYFGQRKEDDGDGVAWDSERYTKPEVQRITRMAAFLALQHNPPLPIWSLDKANVLASSRLWRKTVEETIKNEFPQLTVKHQLIDSAAMILIKNPTQLNGIIITSNMFEDIISDEASVIPGSLGLLPSASLASLPDTNEAFGLYEPCHGSAPDLPKGKVNPVAMILSAAMMLKLSLNMAKEGEALETAVKQVLDSGVRTGDLGGSNSTSEVGDAIAKAVKQILA

SEQ ID NO: 107503 - DNA, 1089 bp, Zygosaccharomyces rouxii
  CDS (1)..(1089)
atgtcaaaaaacatcgttgtcctaccaggtgaccatgccggtcaagaaatcgctcaagaagccatcaaagtgttagaggccatctctgaagttagtcctgaggccaaatttaactttcaacaccatttaattggtggtgctgctattgatgcaactggatctcctttaccagatgatgctcttgctgctgctaagaaagcagatgcagtgctattaggtgctgttggtggtccaaaatggggtaccggttccgttagacctgaacaaggtctgctaaagatccgtaaggaattgcaattgtacgccaatttgagaccatgcaactttgcatctgaatctctacttgatctttcaccattgaagccacagcatgcaaagggaaccgattttgttgttgtaagagaattagtgggcggtatctacttcggtgaacgtaaagaagatgaaggtgatggcgttgcttgggacagtgaaaaatacaccaagcccgaagttcaacgtttaaccagaatggcagcattcttggccctacaacacaacccacctctacctatctggtctttggacaaggctaacgtcttggcttcttccagactttggagaaagactgtagaagaaaccattaagaatgagttccctcaattgaaactcaaccaccaattgattgactctgctgccatgattttagtcaagagcccaactcaattgaatggtatcgttttaacaagtaacttgttcggtgacatcatttctgatgaggcctctgtgatcccaggttcgcttggtctattaccatcagcttcattggcttctttgccagacaccaatgaggcctttggtctgtacgaaccctgtcacggttctgctcctgatctaccaaagggtaaagttaaccctattgctatgattttatctgccgctatgatgttgaaactttcattgaacttatccaaggaaggtgaagctgtggagaaagcagttaagcaagttctagattccggagtgagaactggtgatttaggtggttctaacagcacttctgaagtcggtgacgccatcgccaaggcagtcaaggaaatcttggcatga

SEQ ID NO: 107504 - protein, 362 aa, Zygosaccharomyces rouxii
MSKNIVVLPGDHAGQEIAQEAIKVLEAISEVSPEAKFNFQHHLIGGAAIDATGSPLPDDALAAAKKADAVLLGAVGGPKWGTGSVRPEQGLLKIRKELQLYANLRPCNFASESLLDLSPLKPQHAKGTDFVVVRELVGGIYFGERKEDEGDGVAWDSEKYTKPEVQRLTRMAAFLALQHNPPLPIWSLDKANVLASSRLWRKTVEETIKNEFPQLKLNHQLIDSAAMILVKSPTQLNGIVLTSNLFGDIISDEASVIPGSLGLLPSASLASLPDTNEAFGLYEPCHGSAPDLPKGKVNPIAMILSAAMMLKLSLNLSKEGEAVEKAVKQVLDSGVRTGDLGGSNSTSEVGDAIAKAVKEILA

SEQ ID NO: 107505 - DNA, 1050 bp, Zymomonas mobilis
  CDS (1)..(1050): transl_table=11
atgcgcattgcattgttggccggagatggaatcggccctgaaattacagctgaagccgtcaaaatcttaaaggcggttgtcggtcaggaaatcgaatttgacgaagctttgatcggcggcgctgcatggaaagtaacgggaagcccgttaccggaagaaaccctgaaattatgcaaaaatagtgatgcaatcctgtttggttcagtcggtgacccagaatgcgatcatcttgaacgcgctttacgtccagaacaggctattttaggtcttagaaaagaactggatttattcgccaatttgagacctgcgcgtttattccctgaattacaggcagaatcacctttaaaagaaaatattgtcaccggcaccgatcttatgatcgttcgtgaattgacgggtgatgtctatttcggcacgccccgtggccaacgcaaagatgatcagaatcgccgtgaaggttttgatacgatgcgctataacgaagatgaagtaaaacgcatcgctcgcattggttttgaaacagcacgctcccgcagcgggaacctctgttcgattgacaagtccaatgttctcgaaacctcgcagttatggcggactgttgtgctggaaatcgctcaggaatatcctgatgttgaactcagccatatgtatgttgataatgcagcgatgcagcttgttcgcgcaccagatcagtttgatgttattgttaccggtaatctctttggcgacattctttctgacctggcctcagcttgcgtcggctcaatcggcttattgccctccgcttcacttaatagcgaaggtaaaggcctctacgaaccgattcacggctctgctcctgatattgccggactgggtaaagccaatccactggcaacgattctgtccggtgctatgatgctgcgctacagcctgaagcgtgaagcagacgctgatcgcatcgaaaaagctgtttcgacagctcttgaaaaaggcgctcgtacggctgaccttggtggtaaaatgactacctctgaaatgggaaatgctgttttagcggctcttaactga

SEQ ID NO: 107506 - protein, 349 aa, Zymomonas mobilis
MRIALLAGDGIGPEITAEAVKILKAVVGQEIEFDEALIGGAAWKVTGSPLPEETLKLCKNSDAILFGSVGDPECDHLERALRPEQAILGLRKELDLFANLRPARLFPELQAESPLKENIVTGTDLMIVRELTGDVYFGTPRGQRKDDQNRREGFDTMRYNEDEVKRIARIGFETARSRSGNLCSIDKSNVLETSQLWRTVVLEIAQEYPDVELSHMYVDNAAMQLVRAPDQFDVIVTGNLFGDILSDLASACVGSIGLLPSASLNSEGKGLYEPIHGSAPDIAGLGKANPLATILSGAMMLRYSLKREADADRIEKAVSTALEKGARTADLGGKMTTSEMGNAVLAALN

SEQ ID NO: 107507 - DNA, 1116 bp, Saccharomyces cerevisiae
  CDS (1)..(1116)
atgtttagatctgttgctactagattatctgcctgccgtgggttagcatctaacgctgctcgcaaatcactcactattggtcttatccccggtgacggtatcggtaaggaagtcattcctgctggtaagcaagttttggaaaaccttaactccaagcacggcctaagcttcaactttattgatctctacgccggtttccaaacattccaagaaacaggaaaggcgttgcctgatgagactgttaaagtgttgaaggaacaatgtcaaggtgctcttttcggtgcagttcagtctccaactactaaggtggaaggttactcctcaccaattgttgctctaaggagggaaatgggccttttcgctaatgttcgtcctgttaagtctgtagagggagaaaagggtaaaccaattgacatggttatcgtcagagaaaatactgaggacctgtacattaaaattgaaaaaacatacattgacaaggccacaggtacaagagttgctgatgccacaaagagaatatccgaaattgcaacaagaagaattgcaaccattgcattagatattgccttgaaaagattacaaacaagaggccaagccactttgacagtgactcataaatcaaatgttctatctcaaagtgatggtctattcagagaaatctgtaaggaagtctacgaatctaacaaggacaagtacggtcaaatcaaatataacgaacaaattgtggattccatggtttataggctgttcagagaaccacaatgttttgatgtgatagtggcaccaaacctatacggggatatattatctgacggtgctgctgctttagtcggttcattaggtgttgttccaagcgccaacgtaggtccagaaattgtcattggtgaaccatgccatggttctgcaccagatattgctggtaaaggtattgctaacccaatcgccactataagatctactgctttgatgttggaattcttgggccacaacgaagctgcccaagatatctacaaggctgttgatgctaacttaagagagggttctatcaagacaccagatttaggtggtaaggcttctactcaacaagtcgttgacgacgttttgtcgagattatag

SEQ ID NO: 107508 - protein, 371 aa, Saccharomyces cerevisiae
MFRSVATRLSACRGLASNAARKSLTIGLIPGDGIGKEVIPAGKQVLENLNSKHGLSFNFIDLYAGFQTFQETGKALPDETVKVLKEQCQGALFGAVQSPTTKVEGYSSPIVALRREMGLFANVRPVKSVEGEKGKPIDMVIVRENTEDLYIKIEKTYIDKATGTRVADATKRISEIATRRIATIALDIALKRLQTRGQATLTVTHKSNVLSQSDGLFREICKEVYESNKDKYGQIKYNEQIVDSMVYRLFREPQCFDVIVAPNLYGDILSDGAAALVGSLGVVPSANVGPEIVIGEPCHGSAPDIAGKGIANPIATIRSTALMLEFLGHNEAAQDIYKAVDANLREGSIKTPDLGGKASTQQVVDDVLSRL

SEQ ID NO: 107509 - DNA, 1065 bp, Bacillus subtilis
  CDS (1)..(1065): transl_table=11
atgacgatgaaacaatttgagattgcggcaataccgggagacggagtaggaaaagaggttgtagcggctgctgagaaagtgcttcatacagcggctgaggtacacggaggtttgtcattctcattcacagcttttccatggagctgtgattattacttggagcacggcaaaatgatgcccgaagatggaatacatacgcttactcaatttgaagcagtttttttgggagctgtcggaaatccgaagctggttcccgatcatatatcgttatgggggctgctgctgaaaatccggagggagcttgagctttccattaatatgagacccgccaaacaaatggcaggcattacgtcgccgcttctgcatccaaatgattttgacttcgtggtgattcgcgagaacagtgaaggtgaatacagtgaagttggcgggcgcattcacagaggcgatgatgaaatcgccatccagaatgccgtgtttacgagaaaagcgacagaacgtgtcatgcgctttgccttcgaattggcgaaaaaacggcgcagccatgtgacaagcgccacaaagtctaacggcatttatcacgcgatgccgttttgggatgaagtctttcagcagacagccgctgattatagcggaatcgagacatcatctcagcatattgatgcgctggccgctttttttgtgacgcgtccggaaacgtttgatgtcattgtggcgagcaaattgttcggtgatattttaaccgacatcagctcaagcctgatggaaagcatcggcattgcgcctcctgcgaacatcaatccatccggcaaatatccgtccatgtttgaaccggttcacggctcagctcctgacattgccggacagggccttgccaatccgatcggccagatttggacagcgaagctgatgctcgaccacttcggagaggaagaattgggggcgaaaattctggatgtaatggagcaagtgactgccgacggcatcaaaacacgcgacattgggggacaaagcacaacggctgaggtcactgatgaaatctgttcgcgcttaagaaagctctga

SEQ ID NO: 107510 - protein, 354 aa, Bacillus subtilis
MTMKQFEIAAIPGDGVGKEVVAAAEKVLHTAAEVHGGLSFSFTAFPWSCDYYLEHGKMMPEDGIHTLTQFEAVFLGAVGNPKLVPDHISLWGLLLKIRRELELSINMRPAKQMAGITSPLLHPNDFDFVVIRENSEGEYSEVGGRIHRGDDEIAIQNAVFTRKATERVMRFAFELAKKRRSHVTSATKSNGIYHAMPFWDEVFQQTAADYSGIETSSQHIDALAAFFVTRPETFDVIVASKLFGDILTDISSSLMESIGIAPPANINPSGKYPSMFEPVHGSAPDIAGQGLANPIGQIWTAKLMLDHFGEEELGAKILDVMEQVTADGIKTRDIGGQSTTAEVTDEICSRLRKL

SEQ ID NO: 107511 - DNA, 1098 bp, Pseudomonas putida
  CDS (1)..(1098): transl_table=11
atgcctgcacactctttccgcatcgctgccatccctggggacggtatcggcctcgaagtcctgccagaaggcatccgtgtattggaagccgccgcgctcaagcatggcctggcgctggagttcgacaccttcgaatgggccagctgcgactactacttgcaacacggcaagatgatgccggatgactgggccgaacaactcaagcagtacgacgccatctacttcggtgccgtggattggcctgacaaggtacctgaccacatttccctgtggggctcactgctcaagttccgccgcgagttcgaccagtacgtgaacatccgcccggtgcgcctgttcccaggggtgccgtgcgccttggccaaccgcaaggtcggcgacatcgatttcgtggtggtgcgggagaacaccgaaggcgaatactcgtcgctcggtggcatcatgttcgagaacactgaaaacgaaatcgtcatacaggaatcgatcttcacccgccgtggagtcgatcgtatcctcaagtacgcgttcgacctcgccgagaaacgcgagcgcaagcacgtgacttcggccaccaagtccaacggtatggccatcagcatgccgtactgggacaagcgcaccgaagcaatggcggctcactatccgcacgtcagctgggacaagcagcatatcgacatcctctgtgcgcgtttcgtgttgcagccagagcgcttcgatgtagtagtggtggcgtccaacctgttcggcgacatcctgtcggacctggggccggcctgcgcgggcaccattggcattgccccgtcggccaacctcaaccctgaacgcaacttcccgtcactgttcgaacctgtgcatggttctgcaccggacatcttcggcaagaacatcgccaacccgatcgcgatgatctggtcaggtgcgctgatgctggaattcctgggccagggagatgagcgttaccagcgcgcccacgacgacatgctcaatgccatcgaacgggtaattgccgacggttcggtcacacctgacatgggcggcacactttccacccagcaggtgggcgccgccatcagcgacaccctggcccggttagactga

SEQ ID NO: 107512 - protein, 365 aa, Pseudomonas putida
MPAHSFRIAAIPGDGIGLEVLPEGIRVLEAAALKHGLALEFDTFEWASCDYYLQHGKMMPDDWAEQLKQYDAIYFGAVDWPDKVPDHISLWGSLLKFRREFDQYVNIRPVRLFPGVPCALANRKVGDIDFVVVRENTEGEYSSLGGIMFENTENEIVIQESIFTRRGVDRILKYAFDLAEKRERKHVTSATKSNGMAISMPYWDKRTEAMAAHYPHVSWDKQHIDILCARFVLQPERFDVVVVASNLFGDILSDLGPACAGTIGIAPSANLNPERNFPSLFEPVHGSAPDIFGKNIANPIAMIWSGALMLEFLGQGDERYQRAHDDMLNAIERVIADGSVTPDMGGTLSTQQVGAAISDTLARLD

SEQ ID NO: 107513 - DNA, 1101 bp, Brassica napus; identical to SEQ ID NO: 37325
  CDS (1)..(1101)

SEQ ID NO: 107514 - protein, 366 aa, Brassica napus; identical to SEQ ID NO: 37326

SEQ ID NO: 107515 - DNA, 1218 bp, Glycine max; identical to SEQ ID NO: 37333
  CDS (1)..(1218)

SEQ ID NO: 107516 - protein, 405 aa, Glycine max; identical to SEQ ID NO: 37334

SEQ ID NO: 107517 - DNA, 1092 bp, Linum usitatissimum; identical to SEQ ID NO: 37335
  CDS (1)..(1092)

SEQ ID NO: 107518 - protein, 363 aa, Linum usitatissimum; identical to SEQ ID NO: 37336

SEQ ID NO: 107519 - DNA, 1215 bp, Linum usitatissimum; identical to SEQ ID NO: 37337
  CDS (1)..(1215)

SEQ ID NO: 107520 - protein, 404 aa, Linum usitatissimum; identical to SEQ ID NO: 37338

SEQ ID NO: 107521 - DNA, 1098 bp, Zea mays; identical to SEQ ID NO: 37339
  CDS (1)..(1098)

SEQ ID NO: 107522 - protein, 365 aa, Zea mays; identical to SEQ ID NO: 37340

SEQ ID NO: 107523 - DNA, 1104 bp, Helianthus annuus; identical to SEQ ID NO: 37341
  CDS (1)..(1104)

SEQ ID NO: 107524 - protein, 367 aa, Helianthus annuus; identical to SEQ ID NO: 37342

SEQ ID NO: 107525 - DNA, 1239 bp, Brassica napus; identical to SEQ ID NO: 37345
  CDS (1)..(1239)

SEQ ID NO: 107526 - protein, 412 aa, Brassica napus; identical to SEQ ID NO: 37346

SEQ ID NO: 107527 - DNA, 1221 bp, Brassica napus; identical to SEQ ID NO: 37347
  CDS (1)..(1221)

SEQ ID NO: 107528 - protein, 406 aa, Brassica napus; identical to SEQ ID NO: 37348

SEQ ID NO: 107529 - DNA, 1101 bp, Brassica napus; identical to SEQ ID NO: 37349
  CDS (1)..(1101)

SEQ ID NO: 107530 - protein, 366 aa, Brassica napus; identical to SEQ ID NO: 37350

SEQ ID NO: 107531 - DNA, 1098 bp, Brassica napus; identical to SEQ ID NO: 37353
  CDS (1)..(1098)

SEQ ID NO: 107532 - protein, 365 aa, Brassica napus; identical to SEQ ID NO: 37354

SEQ ID NO: 107533 - DNA, 1224 bp, Zea mays; identical to SEQ ID NO: 37357
  CDS (1)..(1224)

SEQ ID NO: 107534 - protein, 407 aa, Zea mays; identical to SEQ ID NO: 37358

SEQ ID NO: 107535 - DNA, 1080 bp, Glycine max; identical to SEQ ID NO: 37361
  CDS (1)..(1080)

SEQ ID NO: 107536 - protein, 359 aa, Glycine max; identical to SEQ ID NO: 37362

SEQ ID NO: 107537 - DNA, 1218 bp, Glycine max
  CDS (1)..(1218)
atggcggcttctctgcaactgttccaatgcaaactagcgagaccctttcggtccttccctttgcgaaggtcaactccccctctgagtctgaggtgttgcgcttcgcccccttcttcctacagcatcactctcatccccggcgacggcatcggccccgaaatcatctcggtggccaaagacgttcttgtcctcgccggttatctcgaagggatcaaatacgacttccaagagatgcttatgggtggagctgcattggatgccaccggactccctttaccccatgaaaccctttctgccgctaagcaatctcatgccgttctccttggtgccgtcggaggttataaatgggataagaacgacaaacatctcaagcctgagactggcttgcttcagatacgtaaagagcttggagtatttgcaaatcttagaccagctaccgtatactctccgttagtggatgcttcaactttgaagagagaggttgctgaaggggtcgatatcatgcttataagagaactcactggaggtatctattttggagaacccaggggctttggcaccaatgaaaatggtgaagagattggctttaatactgagatttatgctacacatgagatagatcgcatagctcattttgcatttaaggttgctcagaagcgttgtgggaaactttgctctgttgacaaagccaatgtactagaggcatcaatgttatggagaaagagatttttggcaatagcacaagaatatcctgatgttgagctctcacacatgtatgttgataatgcctcaatgcaactaatccgcgatccaaaacagtttgacaccatggtgacaaacaacatttttggcgatatattatcagatgaggcttcaatggtcactggaagtattgggatgcttccttctgctagcctgggggcttcgggacctggactttttgaacccatacatggttctgcacctgatattgctggacaggacaaggcaaatccatttgccactgttcttagtgctgctatgcttttgagatatggcctaggagaagaaaaggcagctgaaagaatagagaatgcagtgatggacactttgaacaggggatttcgaactggtgacatatattctgctggaacgaagctggtaggatgcaaacagctaggtgaggagatactgaagtcagttgaatctaacgttcctgctggtgctgctgcagtgtga

SEQ ID NO: 107538 - protein, 405 aa, Glycine max
MAASLQLFQCKLARPFRSFPLRRSTPPLSLRCCASPPSSYSITLIPGDGIGPEIISVAKDVLVLAGYLEGIKYDFQEMLMGGAALDATGLPLPHETLSAAKQSHAVLLGAVGGYKWDKNDKHLKPETGLLQIRKELGVFANLRPATVYSPLVDASTLKREVAEGVDIMLIRELTGGIYFGEPRGFGTNENGEEIGFNTEIYATHEIDRIAHFAFKVAQKRCGKLCSVDKANVLEASMLWRKRFLAIAQEYPDVELSHMYVDNASMQLIRDPKQFDTMVTNNIFGDILSDEASMVTGSIGMLPSASLGASGPGLFEPIHGSAPDIAGQDKANPFATVLSAAMLLRYGLGEEKAAERIENAVMDTLNRGFRTGDIYSAGTKLVGCKQLGEEILKSVESNVPAGAAAV

SEQ ID NO: 107539 - DNA, 1230 bp, Glycine max
  CDS (1)..(1230)
atggcggcttgtctgcaactgtggcaatgcaaactagcgagaccctttgactcattaccggtgcgaaggtcaattcctttgagtctgaggtgttcggccgcgccctcttcttccaagccgacgcgctcctacagcatcactctcatccccggcgacggcatcggccccgaaatcatctcggtggccaaagacgttcttgtcctcgccggttatctcgaagggattaaatacgacttccgcgagatgcttatgggtggagctgcattggatgccacgggactccctttaccccatgaaaccctttctgccgctaagcaatctcatgccgttctccttggtgccgtcggaggttataaatgggataggaacgacaaacatctcaagcctgagactggcttgcttcagatacgtaaagagcttggagtatttgcaaatcttagaccggctaccgtatactctccgttagttgatgcttctactttgaagagagaggttgctgaaggggttgatatcatgcttataagagaactcactggaggtatctattttggagaacccaggggctttggcaccaatgataatggtgaagagattggctttaatactgagatttatgctacacatgagatagatcgcatagctcattttgcatttaaggttgctcaaaagcgtcgtcggaaactttgctctgttgacaaagccaatgtactagaggcatcaatgttatggaggaagagatttttggcaatagcacaagaatatcctgatgttgagctctcacacatgtatgttgataatgcctcaatgcaactaatccgcgatccaaaacagtttgacaccatggtgacaaacaacatttttggcgatatattatcagatgaggcttcaatggtcactggaagtattgggatgcttccttctgctagcctgggggcttcgggacctggactttttgaacccatacatggttctgcacctgatattgctggacaggacaaggcaaatccatttgccactgttcttagtgctgctatgcttttgagatatggcctaggagaagaaaaggcagctgaaagaatagagaatgcagtgatggacactttgaacaggggatttcgaactggtgacatatattctgctggaacgaagctggtaggatgcaaacagctaggtgaggagatactgaagtcagttgaatctaacgttcctgctggtgctgctgcagtgtga

SEQ ID NO: 107540 - protein, 409 aa, Glycine max
MAACLQLWQCKLARPFDSLPVRRSIPLSLRCSAAPSSSKPTRSYSITLIPGDGIGPEIISVAKDVLVLAGYLEGIKYDFREMLMGGAALDATGLPLPHETLSAAKQSHAVLLGAVGGYKWDRNDKHLKPETGLLQIRKELGVFANLRPATVYSPLVDASTLKREVAEGVDIMLIRELTGGIYFGEPRGFGTNDNGEEIGFNTEIYATHEIDRIAHFAFKVAQKRRRKLCSVDKANVLEASMLWRKRFLAIAQEYPDVELSHMYVDNASMQLIRDPKQFDTMVTNNIFGDILSDEASMVTGSIGMLPSASLGASGPGLFEPIHGSAPDIAGQDKANPFATVLSAAMLLRYGLGEEKAAERIENAVMDTLNRGFRTGDIYSAGTKLVGCKQLGEEILKSVESNVPAGAAAV

SEQ ID NO: 107541 - DNA, 1086 bp, Glycine max; identical to SEQ ID NO: 37365
  CDS (1)..(1086)

SEQ ID NO: 107542 - protein, 361 aa, Glycine max; identical to SEQ ID NO: 37366

SEQ ID NO: 107543 - DNA, 1086 bp, Glycine max; identical to SEQ ID NO: 37369
  CDS (1)..(1086)

SEQ ID NO: 107544 - protein, 361 aa, Glycine max; identical to SEQ ID NO: 37370

SEQ ID NO: 107545 - DNA, 1098 bp, Zea mays; identical to SEQ ID NO: 37373
  CDS (1)..(1098)

SEQ ID NO: 107546 - protein, 365 aa, Zea mays; identical to SEQ ID NO: 37374

SEQ ID NO: 107547 - DNA, 1098 bp, Zea mays; identical to SEQ ID NO: 37377
  CDS (1)..(1098)

SEQ ID NO: 107548 - protein, 365 aa, Zea mays; identical to SEQ ID NO: 37378

SEQ ID NO: 107549 - DNA, 23 bp, Artificial sequence
  primer
atgtcccagacctataacgtaac

SEQ ID NO: 107550 - DNA, 20 bp, Artificial sequence
  primer
ttacatttcatctaggatgc

SEQ ID NO: 107551 - protein, 400 aa, Artificial sequence
  consensus sequence
  Variant (6)..(6): Xaa in position 6 is any amino acid
  Variant (8)..(30): Xaa in position 8 to 30 is any amino acid
  Variant (31)..(37): Xaa in position 31 to 37 is any or no amino acid
  Variant (39)..(45): Xaa in position 39 to 45 is any amino acid
  Variant (46)..(46): Xaa in position 46 is any or no amino acid
  Variant (48)..(59): Xaa in position 48 to 59 is any amino acid
  Variant (60)..(62): Xaa in position 60 to 62 is any or no amino acid
  Variant (64)..(64): Xaa in position 64 is any amino acid
  Variant (66)..(66): Xaa in position 66 is any amino acid
  Variant (68)..(69): Xaa in position 68 to 69 is any amino acid
  Variant (71)..(76): Xaa in position 71 to 76 is any amino acid
  Variant (77)..(88): Xaa in position 77 to 88 is any or no amino acid
  Variant (90)..(92): Xaa in position 90 to 92 is any amino acid
  Variant (93)..(93): Xaa in position 93 is any or no amino acid
  Variant (95)..(96): Xaa in position 95 to 96 is any amino acid
  Variant (98)..(104): Xaa in position 98 to 104 is any amino acid
  Variant (106)..(106): Xaa in position 106 is any amino acid
  Variant (109)..(120): Xaa in position 109 to 120 is any amino acid
  Variant (121)..(133): Xaa in position 121 to 133 is any or no amino acid
  Variant (135)..(138): Xaa in position 135 to 138 is any amino acid
  Variant (141)..(143): Xaa in position 141 to 143 is any amino acid
  Variant (145)..(145): Xaa in position 145 is any amino acid
  Variant (147)..(147): Xaa in position 147 is any amino acid
  Variant (149)..(169): Xaa in position 149 to 169 is any amino acid
  Variant (170)..(190): Xaa in position 170 to 190 is any or no amino acid
  Variant (192)..(194): Xaa in position 192 to 194 is any amino acid
  Variant (195)..(195): Xaa in position 195 is any or no amino acid
  Variant (198)..(199): Xaa in position 198 to 199 is any amino acid
  Variant (201)..(211): Xaa in position 201 to 211 is any amino acid
  Variant (212)..(219): Xaa in position 212 to 219 is any or no amino acid
  Variant (221)..(221): Xaa in position 221 is any amino acid
  Variant (224)..(228): Xaa in position 224 to 228 is any amino acid
  Variant (229)..(229): Xaa in position 229 is any or no amino acid
  Variant (231)..(242): Xaa in position 231 to 242 is any amino acid
  Variant (243)..(246): Xaa in position 243 to 246 is any or no amino acid
  Variant (248)..(256): Xaa in position 248 to 256 is any amino acid
  Variant (257)..(258): Xaa in position 257 to 258 is any or no amino acid
  Variant (260)..(262): Xaa in position 260 to 262 is any amino acid
  Variant (264)..(268): Xaa in position 264 to 268 is any amino acid
  Variant (270)..(272): Xaa in position 270 to 272 is any amino acid
  Variant (274)..(278): Xaa in position 274 to 278 is any amino acid
  Variant (279)..(280): Xaa in position 279 to 280 is any or no amino acid
  Variant (282)..(282): Xaa in position 282 is any amino acid
  Variant (287)..(287): Xaa in position 287 is any amino acid
  Variant (290)..(295): Xaa in position 290 to 295 is any amino acid
  Variant (297)..(298): Xaa in position 297 to 298 is any amino acid
  Variant (299)..(299): Xaa in position 299 is any or no amino acid
  Variant (301)..(302): Xaa in position 301 to 302 is any amino acid
  Variant (306)..(313): Xaa in position 306 to 313 is any amino acid
  Variant (314)..(327): Xaa in position 314 to 327 is any or no amino acid
  Variant (330)..(330): Xaa in position 330 is any amino acid
  Variant (334)..(334): Xaa in position 334 is any amino acid
  Variant (341)..(343): Xaa in position 341 to 343 is any amino acid
  Variant (347)..(347): Xaa in position 347 is any amino acid
  Variant (349)..(350): Xaa in position 349 to 350 is any amino acid
  Variant (353)..(356): Xaa in position 353 to 356 is any amino acid
  Variant (358)..(365): Xaa in position 358 to 365 is any amino acid
  Variant (366)..(372): Xaa in position 366 to 372 is any or no amino acid
  Variant (374)..(378): Xaa in position 374 to 378 is any amino acid
  Variant (380)..(387): Xaa in position 380 to 387 is any amino acid
  Variant (388)..(397): Xaa in position 388 to 397 is any or no amino acid
  Variant (399)..(399): Xaa in position 399 is any amino acid
GDGIGXEXXXXXXXXXXXXXXXXXXXXXXXXXXXXXXGXXXXXXXXGXXXXXXXXXXXXXXXAXLXGXXGXXXXXXXXXXXXXXXXXXEXXXXLXXRXXXXXXXNXRPXXXXXXXXXXXXXXXXXXXXXXXXXDXXXXREXXXGXYXGXXXXXXXXXXXXXXXXXXXXXXXXXXXXXXXXXXXXXXXXXXRXXXXAFXXAXXXXXXXXXXXXXXXXXXXKXNVXXXXXXLXXXXXXXXXXXXXXXXPXXXXXXXXXXXDXXXMXXXXXPXXXDXXXXXXXNXFGDIXSDXXXXXXGXXXGXXPSAXXXXXXXXXXXXXXXXXXXXXXEPXHGSXAPDIAGXXXANPXAXXLSXXXXLXXXXXXXXXXXXXXXAXXXXXAXXXXXXXXXXXXXXXXXXTXD

SEQ ID NO: 107552 - protein, 9 aa, Artificial sequence
  protein pattern
  Variant (2)..(2): Xaa in position 2 is Ile, Leu or Met
  Variant (3)..(3): Xaa in position 3 is Phe or Tyr
  Variant (7)..(7): Xaa in position 7 is Ile or Leu
NXXGDIXSD

SEQ ID NO: 107553 - protein, 10 aa, Artificial sequence
  protein pattern
  Variant (2)..(2): Xaa in position 2 is Ala or Pro
  Variant (3)..(3): Xaa in position 3 is any amino acid
  Variant (10)..(10): Xaa in position 10 is Ile or Leu
EXXHGSAPDX

SEQ ID NO: 107554 - protein, 18 aa, Artificial sequence
  protein pattern
  Variant (2)..(2): Xaa in position 2 is any amino acid
  Variant (3)..(3): Xaa in position 3 is Ile or Leu
  Variant (5)..(6): Xaa in position 5 to 6 is any amino acid
  Variant (7)..(8): Xaa in position 7 to 8 is any or no amino acid
  Variant (10)..(11): Xaa in position 10 to 11 is any amino acid
  Variant (12)..(13): Xaa in position 12 to 13 is any or no amino acid
  Variant (15)..(15): Xaa in position 15 is Phe, Ile, Leu or Val
  Variant (18)..(18): Xaa in position 18 is Ala, Cys or Val
LXXRXXXXLXXXXNXRPX

SEQ ID NO: 107555 - protein, 16 aa, Artificial sequence
  protein pattern
  Variant (2)..(4): Xaa in position 2 to 4 is any amino acid
  Variant (5)..(5): Xaa in position 5 is any or no amino acid
  Variant (7)..(7): Xaa in position 7 is Gly, Ser or Thr
  Variant (8)..(8): Xaa in position 8 is Ile, Leu, Met or Val
  Variant (10)..(10): Xaa in position 10 is any or no amino acid
  Variant (12)..(12): Xaa in position 12 is any or no amino acid
  Variant (15)..(15): Xaa in position 15 is any amino acid
  Variant (16)..(16): Xaa in position 16 is Ala, Asn, Ser or Thr
AXXXXGXXGXLXPSXX

SEQ ID NO: 107556 - DNA, 1563 bp, Thermus thermophilus
  CDS (1)..(1563): transl_table=11
atggagaaggaacggcacatccggatctttgacaccacgctcagggacggggagcaaagcccaggggtggccctctccctggaccagaagctggagatcgcccaggccctcgcccagctcaacgtggacatcattgaggcgggcttccccgtatcggggcccatggagtttgaggcggtgcgccgcatcgccaccgaggtcaagggccccatcatcgccgccctcgcccgcacccacaccctggacattgaccaggcggccaaggccctggagaaggcggagaagcccaggatccacgtcttcacctccgcctccaaggtccacctgcagtacatgctgaggaagacggaggaggaggtcctggagatggcggatagaatggtccgctacgccaggaggtacgtggacgacgtggagttctccgcccaggacgtgatgcgggcggactgggagttcgtcaagaggctttacgaggtggccattgaggccggggccaccaccatcaacatccccgacaccacgggctacggcacgccccaggagtacggggccctgatccgcaggatccgggacgaggtggtgcgggggcgggacgtgatcatctccacccacacccacgacgacctgggcatggccacggccaacgccctggcgggcgtggagaacggggcgggccagattgagtgcaccatcaacggcatcggggagcgggcggggaactgcgccctggaggaggtggtcatggccctctacgtccgccgggactggtacaaggcctacacgcggatcaacacccgggagatctaccgggtgagccgcctggtggagcgctacaccgggatgcccgtcccccccaacaaggccatcgtgggggacaacgccttcgcgcacgagtccggcatccaccaggacggggtcatcaagcaccgggccacctacgagatcatggacgccgagctcatcgggaggcggcccgccgtgctcgtcctcggcaagcactcgggccgggcggcttttaaaaaggccctcgaggacctgggctacaaggacctctccgaggaggaggtgaagaagctcttcgcccgcttcaaggagatcgccgagaagaaggggcccctttccgccgaggagctccaagccctggtggaaagcgagcgggagcccacctctcacttcttccagctggagcatgtccagtttttctcgggctccgggctcctgcccacggccacggtcaaggtgaagaccccggacggggagagggtggccacccacaccggggacggtcccgtggacgccgtgtacaaggccatccaggaggccatcggcctgaggccggaacttgagctctaccgggtggaggccatcacggggagcaccgaagccctgggccaggtcacggtgcgcctccggctcggcgagctccaggccgtgggggtgggggtctccccggacatcattgaggcgagcgccttggcctttttggacgccgccgggaagctcgcctcgggccgggccacccgccacccgccctccattgaggaggtccaccgtggggtctaa

SEQ ID NO: 107557 - protein, 520 aa, Thermus thermophilus; identical to SEQ ID NO: 13051

SEQ ID NO: 107558 - DNA, 2358 bp, Oryza sativa
  CDS (206)..(2110)
ggtcttcttcgccgcaaaaaccacgccgccatcacagcattcgtgcatcccacgaaacccccgttgtcatgtccagataagagctccacctctgactcacacacacatcaccgagaagcagagcaagtgcatctccctctcccaccatttgattcgattcccctaaacccccgagtcgtcgacgccacaaaccccggcgaccaccatggcctcctccctcctctcctccccaaaaccctcctccttctcctccgcaaaccccacctccactccacgcccacgcgcccaaactctctcccccttccgcgccgccgccccacgcttctcccatggcctcgccaccgccgccgccgccgcaaaccctagcgcctcccgccgctgctaccaccgcgccttcgcccgccccgtccgggcgtccatggcgcagccgcggcgcccggagtacgtccccaaccgcatcgacgaccccaactacgtccgcatcttcgacaccaccctccgcgacggggagcagtcccccggggccaccatgaccagcgccgagaagctcgtcgtcgcgcgccagctcgcccgcctcggcgtcgacatcatcgaggccgggttcccggcctcctcccccgacgacctcgacgccgtgcgctccatcgccatcgaggtcgggaacacgcccgtcggggaggacggccacgtgccggtcatctgtggcctctcgagatgcaataagcgagacattgatgctgcctgggaggccgtgcggcacgcgcggcggccgcgcatccacaccttcattgccaccagcgagatccatatgcagcacaagctaaggaagacgcccgagcaggtggtgaccattgccaaggaaatggtggcctacgcccgcagcctaggctgccctgatgtcgagttcagccctgaagacgctggcaggtcaaacagagagtttctatatcatatactagaggaagtcataaaagctggagcaacaacactcaatatcccagacactgttggatacactcttccttatgaatttgggaaactaattgctgatataaaaaacactccaggaattgaaaatgccattatttctactcattgccagaatgaccttggtctagcaaccgcaaatacattagcgggcgctcatgcaggagcacggcaattagaggtgactatcaatggtattggtgaaagggctggaaatgcttctttggaagaggttgtgatggcaattaaatgtcgtcgagaactcttaggaggtctgtatactggaatcaatacccaacatatcactatgtcaagcaaaatggtacaagagcacagtggacttcatgtacaaccacataaagctattgtcggtgccaatgcctttgcacatgaaagtggaattcatcaggatgggatgcttaagtacaaaggaacttatgaaataatttctcctgatgatattggtctaacacgtgcaaatgagtttggtattgttcttgggaagctcagtggaaggcatgctgtgagatctaaactagtggagcttggatatgaaatcactgacaaggaatttgaggatttctttaaacgctacaaagaggttgcagagaagaaaaagcgtgtaactgatgaagacattgaggcgctgttgtctgatgagatatttcagcccaaggttttttggtcccttgctgatgtacaggcaacttgtggaacacttggtctgtctacagcaactgtcaaactgataggtccggatggagatgagaagattgcatgtgcagttggaacaggtccagttgatgcagcttacaaggctgttgatgatataatacagatcccaactgttcttcgagaatatagcatgacatcggtcacagaaggcattgatgcaattgcaactactagagtggttgtcactggagatgtcagcgactctaaacatgctttgactggtcactccttcaaccgggcattcagtgggagtggtgccgcactggatattgttgtttccagtgtgcgagcttacctgagtgccctgaacaagatgtccagttttgttggggctatcaaggctagtagtgaagtatctgaaagccaaagagttcaaaccacagaatgagtcttgacgctccttggttttcatatcggatggttctatgtttcacattcccagcaaggagtatgtgcttgttgaaacatggtttttccgtttagtgcatctggaggatgttctgggtttctttggtggagcctgacttaaggttgaacatccaggaagttttggggtatgtagtgtataattcatatttgaaaattgtatttccaataagacaataataaataattgtttgacatatgagtattgct

SEQ ID NO: 107559 - protein, 634 aa, Oryza sativa
MASSLLSSPKPSSFSSANPTSTPRPRAQTLSPFRAAAPRFSHGLATAAAAANPSASRRCYHRAFARPVRASMAQPRRPEYVPNRIDDPNYVRIFDTTLRDGEQSPGATMTSAEKLVVARQLARLGVDIIEAGFPASSPDDLDAVRSIAIEVGNTPVGEDGHVPVICGLSRCNKRDIDAAWEAVRHARRPRIHTFIATSEIHMQHKLRKTPEQVVTIAKEMVAYARSLGCPDVEFSPEDAGRSNREFLYHILEEVIKAGATTLNIPDTVGYTLPYEFGKLIADIKNTPGIENAIISTHCQNDLGLATANTLAGAHAGARQLEVTINGIGERAGNASLEEVVMAIKCRRELLGGLYTGINTQHITMSSKMVQEHSGLHVQPHKAIVGANAFAHESGIHQDGMLKYKGTYEIISPDDIGLTRANEFGIVLGKLSGRHAVRSKLVELGYEITDKEFEDFFKRYKEVAEKKKRVTDEDIEALLSDEIFQPKVFWSLADVQATCGTLGLSTATVKLIGPDGDEKIACAVGTGPVDAAYKAVDDIIQIPTVLREYSMTSVTEGIDAIATTRVVVTGDVSDSKHALTGHSFNRAFSGSGAALDIVVSSVRAYLSALNKMSSFVGAIKASSEVSESQRVQTTE

SEQ ID NO: 107560 - DNA, 2231 bp, Zea mays
  CDS (41)..(1921)
ccggccgggagcgccactaaacccgcgacgacggtcgaccatggcgtcctcgctgctctcctcccccgctaaacccaccaccgccaccaccaccaaaacgaccccggccccaagacccgcccgctccgcccatgtcctctccgccgcccgctgcctccgcctccgcctccgcgcggtccccgcccgagcgtcgtcgcagcatcctccgcctccgcccaccccgcggtcgcggcggccggattacgtcccgaaccgcatcgacgaccccaactacgtgcgcatcttcgacaccacgctgcgcgacggggagcagtcgccgggcgccaccatgacgagcgcccagaagctcgtcgtcgcgcgccagctggcccgcctcggcgtcgacatcatcgaggccgggttcccggcctcctcccccgacgacctcgacgccgtgcgctccatcgccatcgaggtcggcaacccgccgcccgccggggaggagaccgcccacgtgcccgtcatctgcggcctgtcgcggtgcaacaggaaggacatcgacgccgcatgggaggccgtcaggcacgctcggaggccccggatccacactttcatcgccaccagcgagatccatatgcagcataagctcaggaagacgcccgagcaggtcgtcgctattgccagggagatggtggcgtacgcgcgcagcctcgggtgccccgatgttgaattcagccctgaggatgccggcaggtcaaatcgagaattcctgtatcatatactggaggaagtcattaaagctggagcaaccactcttaatatcccagacactgtcggatacactcttccttatgaatttgggaaattaattgctgacataaaggcaaacacttctggaattgaaaatgctatcatttccactcattgccagaatgaccttggtcttgcgactgccaacacattagcgggtgctcgctcaggagcaagacagttagaggtgactattaatggtattggtgaaagagctggaaatgcttcattggaagaggttgtcatggcaattaaatgtcgtggggagctcttagatggtctatatacgggaattaattcccagcatattactttgacaagcaaaatggtacaagagcatagtggacttcatgtgcaaccacataaggctattgttggtgccaatgcctttgctcatgaaagtggaattcatcaggatgggatgcttaaatataaaggaacatatgaaataatatcgcctgatgatattggtttagcacgtgcaaatgaatttggtattgttcttgggaaactcagtggaaggcatgcagtgagatctaagctggtagagcttggatatgaaatcagtgacaaggaatttgaagatttctttaaacgctacaaagaggtcgcagagaagaaaaagcgtgtaactgatgaagacatagaagcgttattgtcagatgagatattccagcctaaggttatttggtcccttgctgatgtacaggcaacatgtggaacacttggcttatctacagcaacagtgaaactgatagcaccagatggagaggagagaatagcatgttcagttggaacaggtccagttgatgcagcttacaaggctattgaccaaataatccagatcccaactgttctccgagaatatggtatgacctcagtcaccgaaggcatcgacgcaatcgcaacaacccgggtggttgtcaccggagatgtgaccaacaactccaaacatgccttgactggccgcgctttcaaccgctccttcagcgggagcggggcagcaatggacatcgtcgtctccagtgtcagagcttacctgagtgccctgaacaagatgtgtagctttgctggtgccgcgaaagccagcggcgaggtacctgagagtgcaagcgtccaaagcgcagagtgagcttggcgacgatttggttctcatgtggactgggcggcgtaagagccagagcaactgttaaagagggtgacatttcgtttctgtattaggctgttcaatgttgggggttttgccttgtcagtgtggtgtgactgtactgttctttttttggaggatagcccagcttggaacgtgcaggcaattttggacctaggtagtgtacaatttgtatcttatatgaacaatacttccaataatcgaaagacttaagatgggttgctggagtcaaaaaaaaaaaaaaaaaaaaaaaaaaaaaaaaaaaaaaaaaaaa

SEQ ID NO: 107561 - protein, 626 aa, Zea mays
MASSLLSSPAKPTTATTTKTTPAPRPARSAHVLSAARCLRLRLRAVPARASSQHPPPPPTPRSRRPDYVPNRIDDPNYVRIFDTTLRDGEQSPGATMTSAQKLVVARQLARLGVDIIEAGFPASSPDDLDAVRSIAIEVGNPPPAGEETAHVPVICGLSRCNRKDIDAAWEAVRHARRPRIHTFIATSEIHMQHKLRKTPEQVVAIAREMVAYARSLGCPDVEFSPEDAGRSNREFLYHILEEVIKAGATTLNIPDTVGYTLPYEFGKLIADIKANTSGIENAIISTHCQNDLGLATANTLAGARSGARQLEVTINGIGERAGNASLEEVVMAIKCRGELLDGLYTGINSQHITLTSKMVQEHSGLHVQPHKAIVGANAFAHESGIHQDGMLKYKGTYEIISPDDIGLARANEFGIVLGKLSGRHAVRSKLVELGYEISDKEFEDFFKRYKEVAEKKKRVTDEDIEALLSDEIFQPKVIWSLADVQATCGTLGLSTATVKLIAPDGEERIACSVGTGPVDAAYKAIDQIIQIPTVLREYGMTSVTEGIDAIATTRVVVTGDVTNNSKHALTGRAFNRSFSGSGAAMDIVVSSVRAYLSALNKMCSFAGAAKASGEVPESASVQSAE

SEQ ID NO: 107562 - DNA, 1826 bp, Glycine max
  CDS (5)..(1672)
atccatggcagccaaaacatctaccaacggcactcattattctcgctctcgccccgagtacattccaaaccgcatccccgacccgcattatgtccgcatcctggacaccacgcttcgcgacggcgagcaagcccccggagcctccatggtttccagccagaagcttgctcgccagctcgcgaagcttggcgtcgatgtcatcgaaggaggctttccttcagcgtcgcaggaagacttcaatgctgtcaagatgatagcacaagaagttggcaacaactgtgatgctgatggctatgttcccgtcattgccgccctctgtaggtgcaatgagaaggacattgccacagcgtgggaggctctgaaatacgccaagaggccgaggcttatgcctttcatagcagtgagccccattcacatggagtacaagctcaataagactaaagaagaggtgcttcaaatagctaaagatatgatcaaatttgcacgcagtttaggttgcagtgacatccagttctgttccgaagatgcagccagatcggatagagagtttctttatcaaattttggaagaagttatcaaagctggggcaacaactttgggcataggtgacactgtgggcataacaatgccattcgagattagacaattgattgctgatataaaagccaatgtccctggagcagaaaatgttattatttctatgcactgtcataatgatcttggacatgctactgcaaacgcaatagaggctgctcaagctggtgcaatgcaattagaagtaacaattaatgggattggtgaaagggctggtaatgcctcattagaagaggttgtgatggccctaaaatgcaggggagatcaagtcttaggtggtttgtatactggaattaatacaaggcacttattgaagacaagcaagatggtcgaagagttttctggtatgtatttacaaccacacaaagctgttgtaggtgataatgcctttctccatgaaagtggcgttcaccaggctggattgttaaagcatagagctacatatgaaataatgtctcccgaagatattggtcatgaaaagtccagtggagttaatatggtactagggaagctaagtggacgccaagctttgaaaagtcgtctcaaagagcttggctatgaacttagggatgaagaagttgagagtgtgtttaggaacttcaaagcaatagccgagaaaaaaaagagagttaccgatgttgacctcaaagcattggtgtcaaatcaagtttctcatgatgaacctatttggaagcttgatggtttgcaggtgacttgtggaactatgggttcttcaacagcaactatcaaacttgtcactagtgatggtatcacacatgttgcttgttctgttggtgtaggaccagtagattcagcttacaaggctatcaatctcatcgtgaaggaaactgtaaaagtacttgagtactcactaagtacagttacagaaggcactgatgcaattgcaactacacgtgttgtaattcgtagagagaataagcaatcaccaactcctgctttgaatggaaacgtaatttatccaacatttagtggaaccggagaaggggtggatgttgttacttcaagtgtagaggcttatcttactgcactaaacaaaatgctcgatttaaaggaatgatttatatttgatgaaagaattctagcacctaaatgttagaattaacacttcaagttatatattgttctagaatgttacctttgtcaagtctccatataatgtacgagaaatggacttaataatgtcttcttaaaatatgtgaatttcaaatatc

SEQ ID NO: 107563 - protein, 555 aa, Glycine max
MAAKTSTNGTHYSRSRPEYIPNRIPDPHYVRILDTTLRDGEQAPGASMVSSQKLARQLAKLGVDVIEGGFPSASQEDFNAVKMIAQEVGNNCDADGYVPVIAALCRCNEKDIATAWEALKYAKRPRLMPFIAVSPIHMEYKLNKTKEEVLQIAKDMIKFARSLGCSDIQFCSEDAARSDREFLYQILEEVIKAGATTLGIGDTVGITMPFEIRQLIADIKANVPGAENVIISMHCHNDLGHATANAIEAAQAGAMQLEVTINGIGERAGNASLEEVVMALKCRGDQVLGGLYTGINTRHLLKTSKMVEEFSGMYLQPHKAVVGDNAFLHESGVHQAGLLKHRATYEIMSPEDIGHEKSSGVNMVLGKLSGRQALKSRLKELGYELRDEEVESVFRNFKAIAEKKKRVTDVDLKALVSNQVSHDEPIWKLDGLQVTCGTMGSSTATIKLVTSDGITHVACSVGVGPVDSAYKAINLIVKETVKVLEYSLSTVTEGTDAIATTRVVIRRENKQSPTPALNGNVIYPTFSGTGEGVDVVTSSVEAYLTALNKMLDLKE

SEQ ID NO: 107564 - DNA, 1572 bp, Klebsiella pneumoniae subsp. pneumoniae MGH 78578
  CDS (1)..(1572): transl_table=11
atgagccagcaagtcattattttcgatacgaccttacgtgatggcgaacaagcgttacaggcaagcctgagtgtcaaagagaagctgcagatcgcactggcccttgagcgaatgggggtcgacgtaatggaagtcggtttcccggtatcctcgccgggcgattttgaatcggtgcaaaccatcgcgcgcaccattaaaaacagccgcgtgtgcgctctggcgcgctgcgttgagaaagatatcgacgtggcggcggaatcgttaaaagtggccgaggctttccgtattcatacctttattgccacctcgccgatgcatatcgccaccaaactgcgcagtacgctggatgaggttattgagcgcgcgatctatatggtgaagcgggcacgcaactacactgacgacgttgagttctcctgtgaagacgccggccgtacgccgattgccgatctggctcgcgtcgtggaagcggcgatcaacgccggtgccaccaccattaatatcccggataccgtcggctataccatgccgttcgaatatgccaacatcatcagcggcctgtatgatcgcgtgccgaatatcgacaaagcaattatttccgtccacacccatgatgatctgggcatcgctgtcggtaacgccctcgccgcggtccacgccggtgcgcgccaggtagaaggtgcgatgaacggtatcggcgaacgcgccggcaactgcgcgctggaagaagtgatcatggcgatcaaagtgcgcaaagacatcatgaacgtgcacaccaacattaatcatcatgaaatctggcgcaccagccagaccgtcagccagatctgcaatatgccgatcccggcgaacaaggccatcgtcggcaccggcgccttcgcccactcctccggcattcaccaggacggcgtgctgaagaaccgcgaaaactacgagatcatgaccccggaatctatcggcctgaaccaggtgcaactgaacctgacttcccgctccggccgcgcggcggtgaaacaccggatggaagagatgggctaccaggagagcgattacaacctggatcatctgtacgacgcattcctgaagctggcggacaaaaaaggccaggtcttcgattacgatctggaagcgctggcctttatcaacaagcagcaggaagagccagagcatttccgcctggattacttcaacgtccaatccggatccagcgatatcgccaccgcctcgatcaaactggtctgcggggatgagatcaaaaccgaagccgccaacggcaacggtccggtcgatgctatctaccaggcgattaatcgcgtcaccgactacaacattgaattagtgaagtatggcttaagcgcgaaaggccacggcaaagacgccctgggccaggtggatatcgtcgttgactacaatggccgccgcttccatggcgttggtctggcaacggatatcgtagagtcgtcagccaaagcgatggttcacgtgctgaacaacatctggcgcgccgccgaagtcgaaaaagaattgcaacgcaaagctcagaataaagagaacaataaggaaaccgtgtaa

SEQ ID NO: 107565 - protein, 523 aa, Klebsiella pneumoniae subsp. pneumoniae MGH 78578
MSQQVIIFDTTLRDGEQALQASLSVKEKLQIALALERMGVDVMEVGFPVSSPGDFESVQTIARTIKNSRVCALARCVEKDIDVAAESLKVAEAFRIHTFIATSPMHIATKLRSTLDEVIERAIYMVKRARNYTDDVEFSCEDAGRTPIADLARVVEAAINAGATTINIPDTVGYTMPFEYANIISGLYDRVPNIDKAIISVHTHDDLGIAVGNALAAVHAGARQVEGAMNGIGERAGNCALEEVIMAIKVRKDIMNVHTNINHHEIWRTSQTVSQICNMPIPANKAIVGTGAFAHSSGIHQDGVLKNRENYEIMTPESIGLNQVQLNLTSRSGRAAVKHRMEEMGYQESDYNLDHLYDAFLKLADKKGQVFDYDLEALAFINKQQEEPEHFRLDYFNVQSGSSDIATASIKLVCGDEIKTEAANGNGPVDAIYQAINRVTDYNIELVKYGLSAKGHGKDALGQVDIVVDYNGRRFHGVGLATDIVESSAKAMVHVLNNIWRAAEVEKELQRKAQNKENNKETV

SEQ ID NO: 107566 - DNA, 1584 bp, Xanthobacter autotrophicus Py2
  CDS (1)..(1584): transl_table=11
atgaccgacacttcctctgcccccgtctccgggaagcccgtatccgaccgcgaccgcgtggtcatcttcgacaccaccctgcgcgacggcgagcagtgccccggcgcctccatgaccttcgaggagaagctggaagtggccgcgctcctcgacgagatgggcgtggacgtgatcgaggccggcttccccatcgcctccatcggcgatttcgagagcgtggccgagatcgcgcggcgcacgcagaacgccaccgtcgccggcctgtcgcgcgccgcgctgaacgacatcgaccgctgcgccgaggcggtgaagcacgcccgccgcggccgcatccacaccttcctgtccacctctccggtgcacatgaagtacaagctccagaagcagccccacgaggtgctggagatggtggtggcgtccgtcacccgcgcccgcaaccatgtggaggacgtggagtggtcgtccgaggacggcacccgcaccgagatcgacttcctgtgccgctgcgtggaagccgccatcaaggccggcgccaccaccatcaacatccccgacaccgtgggctacaccaccccggccgagtatgaggccctgttccgcaccgtgatcgagcgcgtgccgaactcggacaaggccattttctcggtgcattgccatgacgacctcggcatggcggtggcgaactcgctggccggcctcgccggcggcgcgcggcagatcgagtgcaccgtcaacggcatcggcgagcgcgcgggcaatgcggcgctcgaagaagtggtgatggccatcgagacccgctcggacgtgctgccctatcgctccggcatcaacaccaagatgctcacccgcgcctccaagctggtatcggcggtgacctcgttcccagtgcagtacaacaaggccatcgtgggccggaacgccttcgcccatgagagcggcatccaccaggacggcatgctcaagcacacccagacctatgagatcatgacgccggagagcgtcggcgtctccaagacctcgctggtcatgggcaagcattcgggccgcgccgccttccgcgacaagctcaagaccatgggctacgagctgggcgagaacgccctgaacgacgccttcacccgcttcaaggacctcgccgaccgcaagaaggtggtctacgacgaggacatcgaggcgctggtggaccagggcatcgccgccgcctacgaccgcatcaagctcatctccctgtcggtcatcgccggcacccgcgggccgcagcgcgccaccatgcggctggaggtggacggccaggtgaagaccgaggaagccgagggcaacggcccggtggacgccaccttcaacgccatcaaggcgctggtgccccaccaggtgaagctcgacctctaccaggtccatgccgtgaccgagggcaccgacgcccaggccgaggtctcggtacggctggaagagaacggcaaggccgtgaccgcccgcgcggcggacccggacacgctggtcgcctcggcgcaggcctacatcaccgcgctcaacaagctgcacatgaagcgccagaccatgaacccgcagagcgccgtgggctga

SEQ ID NO: 107567 - protein, 527 aa, Xanthobacter autotrophicus Py2
MTDTSSAPVSGKPVSDRDRVVIFDTTLRDGEQCPGASMTFEEKLEVAALLDEMGVDVIEAGFPIASIGDFESVAEIARRTQNATVAGLSRAALNDIDRCAEAVKHARRGRIHTFLSTSPVHMKYKLQKQPHEVLEMVVASVTRARNHVEDVEWSSEDGTRTEIDFLCRCVEAAIKAGATTINIPDTVGYTTPAEYEALFRTVIERVPNSDKAIFSVHCHDDLGMAVANSLAGLAGGARQIECTVNGIGERAGNAALEEVVMAIETRSDVLPYRSGINTKMLTRASKLVSAVTSFPVQYNKAIVGRNAFAHESGIHQDGMLKHTQTYEIMTPESVGVSKTSLVMGKHSGRAAFRDKLKTMGYELGENALNDAFTRFKDLADRKKVVYDEDIEALVDQGIAAAYDRIKLISLSVIAGTRGPQRATMRLEVDGQVKTEEAEGNGPVDATFNAIKALVPHQVKLDLYQVHAVTEGTDAQAEVSVRLEENGKAVTARAADPDTLVASAQAYITALNKLHMKRQTMNPQSAVG

SEQ ID NO: 107568 - DNA, 1920 bp, Oryza sativa (japonica cultivar-group); identical to SEQ ID NO: 12980
  CDS (1)..(1920)

SEQ ID NO: 107569 - protein, 639 aa, Oryza sativa (japonica cultivar-group); identical to SEQ ID NO: 12981

SEQ ID NO: 107570 - DNA, 1623 bp, Mesorhizobium loti MAFF303099
  CDS (1)..(1623): transl_table=11
atgaccatgacccgcgagcgcctctatctcttcgacaccacattgcgcgatggccagcagacgccgggcatcgacttttccgtcgaggacaagatcgcaattgcaaaactgctcgacgaattcggcatggactatgtcgagggcggctatcccggcgccaatccgaccgacacggccttcttccagcagaaacgcacggcaagcgccaaattcgttgctttcggaatgaccaagcgggcaggggtgtcggcatccaacgaccccggccttgcggcgcttgtgcagtcgaaatccgacgccatctgcttcgtcgccaagagctgggattatcatgtccgcgtcgcgctcggctgcaccaacgaggagaatctggagtcgatcaagacttcggtggaaaccgctgtcgcttcgggcaaggaggcgatggtcgattgcgagcatttcttcgatggcttcaaggccaatccggactatgccttggcctgcgccaagacggcatacgacgccggcgcacgctgggtggtgttgtgcgacaccaatggcggcacgcagccctcggaagtgcgtaccatcgtcgccaaggtcatcgcctcgagcataccgggagatcatctcggcatccatgcccatgacgacaccggccaggcggtcgccaattcgctggccgcggtcgaggccggcgtgcgccagatccagggcactctgaacggcataggcgagcgctgcggcaacgccaatctgatctcgatcgtgccgacactggcgctgaagccggcattcgcggatcgctttgtatcaggcatttcggccgaagcgctgaccggcatttcgcgcctgtcgcgcgcattcgatgaattgctgaaccgcgcgccggaagcgcaggcgccctatgtcggcgcctcggcttttgccactaaggccggcatccatgcctccgccctggccaaagaaccggcgacctatgagcatgtgccgccggaatccgtcggcaaccgccgccgcgtcatggtctccgaccagggcggcaaggccaatttcctcgccgagctgaagcggcgcggcatcgaggtgcccagggacgatcaccggctcgacgcgctgatatcagtcgtcaaggagcgcgaggccgaaggctatgcctatgagggcgccgacgcatccttcgagctcctggcgcgcaagatgctgcatggcctgccggaattcttcaatgtcacctcattccgctgcatggtcgagcgccgcttcgacgccaacggcaatctgaagaccgtctccgaggccatcgtgaaggtcgaggtcgacggcgaggagaagatgtcggtggcggaaggccatggtccggtcaacgcgctcgacatcgcgctgcgcaaggatctcggcaaatatcagagcgagatcgtcgacctcgaactcgccgacttcaaggtgcgtatcctcaatggcggcaccgaggccatcacccgcgttctgatcgaatcgcatgacggtaccggtgcgcgctggtggacggtcggggtttccgaaaacatcatcgacgcctcgttccaggcgctgatggattcgatcatctacaagctgatgaagaaccgtgagatggccgggcttgttgccgccgaataa

SEQ ID NO: 107571 - protein, 540 aa, Mesorhizobium loti MAFF303099
MTMTRERLYLFDTTLRDGQQTPGIDFSVEDKIAIAKLLDEFGMDYVEGGYPGANPTDTAFFQQKRTASAKFVAFGMTKRAGVSASNDPGLAALVQSKSDAICFVAKSWDYHVRVALGCTNEENLESIKTSVETAVASGKEAMVDCEHFFDGFKANPDYALACAKTAYDAGARWVVLCDTNGGTQPSEVRTIVAKVIASSIPGDHLGIHAHDDTGQAVANSLAAVEAGVRQIQGTLNGIGERCGNANLISIVPTLALKPAFADRFVSGISAEALTGISRLSRAFDELLNRAPEAQAPYVGASAFATKAGIHASALAKEPATYEHVPPESVGNRRRVMVSDQGGKANFLAELKRRGIEVPRDDHRLDALISVVKEREAEGYAYEGADASFELLARKMLHGLPEFFNVTSFRCMVERRFDANGNLKTVSEAIVKVEVDGEEKMSVAEGHGPVNALDIALRKDLGKYQSEIVDLELADFKVRILNGGTEAITRVLIESHDGTGARWWTVGVSENIIDASFQALMDSIIYKLMKNREMAGLVAAE

SEQ ID NO: 107572 - DNA, 1581 bp, Pyrococcus abyssi GE5
  CDS (1)..(1581): transl_table=11
ttgctaatgaagaggagggttgagctctacgatactacccttagagatggatcccagatggaagggataagcttttcccttgaggataagctcaagataactgagaagctcgacgagtttggaatccactacatagagggaggatggcccggttccaatcctaaagatattcaatacttcaaggctgtgagagatctaccgcttgagaacgcaaaaatagccgcattcgggagtacaagaagaccaaggcttaggccagaagaagatcccaaccttaacgcgttagtcgaatccgaagcgccaatagcaactatattcggaaagagttgggacctccacgtcaccgaagccctaaggacaaccctggaaaataatatacaaatgataatcgattcaattgagtacctaagggatcatgggatggtcgtgttttacgacgctgagcacttctttgatggttacagggaaaatccagagtacgcaatgaaaactataaaggctgctgaagaggcaggagcagagaggattgtccttgctgacacaaacggaggttcgctcccctcgttcatcaaggaagtagttgagaaggttaaagaggaggtaaagactcctctcggcattcatgcacataacgattcagaactggcagttgctaactccctaattgcgtttgaagctggtgtagttcagatacagggaacgataaatggttatggtgagaggtgtggaaacgctaatttaatctcaataataccagctctagaacttaagtatggcgttgaagttgttggaaaggaaaggctaaggaaactgaaagagttagctcatttcgtcgctgagctagcgaacatggagattccaaggaaccaaccctacgttggggatagcgcgttcgctcacaaaggcggagtccacgtttcagcagtccttaagaatcccagaacttacgagcacatagacccagagctcgttggtaacaggagaaaggtcgtcgtctcagagctctcaggtaggagtaatctaatatacaaagcgaaggagcttggaatagagctcgaggaaagagatattaagaggatagttgaggagataaagaagcttgaattcgaaggttaccatttcgaagcggcggaagcatcacttgaactcctaatagagaggttaaggggaagatacaaacccttcttcgaacttgaaagggcaagggtaataacggagatattccagggacaaccaccaatctcagaggctaacgttgtcgtgagggttaattccaggagagttcacacaaccgcagaaggtaatggaccagttaacgcactcgacctagcccttaggaaagctttgacaaaattctacccagagctcaaagagatcaagctggttgattataaggttagggttcttggaagtgagaagggaaccgcggctaaggttagagtcctggttcagacgagcgatggaaagaaaacctggggaaccgtcggagcttcaacaaacataatagaggcgagcttgaacgctataatggagagcatggaatactggcttatgaaggagcgtgaaaaggatgagaagtga

SEQ ID NO: 107573 - protein, 526 aa, Pyrococcus abyssi GE5
MLMKRRVELYDTTLRDGSQMEGISFSLEDKLKITEKLDEFGIHYIEGGWPGSNPKDIQYFKAVRDLPLENAKIAAFGSTRRPRLRPEEDPNLNALVESEAPIATIFGKSWDLHVTEALRTTLENNIQMIIDSIEYLRDHGMVVFYDAEHFFDGYRENPEYAMKTIKAAEEAGAERIVLADTNGGSLPSFIKEVVEKVKEEVKTPLGIHAHNDSELAVANSLIAFEAGVVQIQGTINGYGERCGNANLISIIPALELKYGVEVVGKERLRKLKELAHFVAELANMEIPRNQPYVGDSAFAHKGGVHVSAVLKNPRTYEHIDPELVGNRRKVVVSELSGRSNLIYKAKELGIELEERDIKRIVEEIKKLEFEGYHFEAAEASLELLIERLRGRYKPFFELERARVITEIFQGQPPISEANVVVRVNSRRVHTTAEGNGPVNALDLALRKALTKFYPELKEIKLVDYKVRVLGSEKGTAAKVRVLVQTSDGKKTWGTVGASTNIIEASLNAIMESMEYWLMKEREKDEK

SEQ ID NO: 107574 - DNA, 1896 bp, Arabidopsis thaliana; identical to SEQ ID NO: 12982
  CDS (1)..(1896)

SEQ ID NO: 107575 - protein, 631 aa, Arabidopsis thaliana; identical to SEQ ID NO: 12983

SEQ ID NO: 107576 - DNA, 1896 bp, Arabidopsis thaliana; identical to SEQ ID NO: 12984
  CDS (1)..(1896)

SEQ ID NO: 107577 - protein, 631 aa, Arabidopsis thaliana; identical to SEQ ID NO: 12985

SEQ ID NO: 107578 - DNA, 1521 bp, Arabidopsis thaliana; identical to SEQ ID NO: 12986
  CDS (1)..(1521)

SEQ ID NO: 107579 - protein, 506 aa, Arabidopsis thaliana; identical to SEQ ID NO: 12987

SEQ ID NO: 107580 - DNA, 1512 bp, Arabidopsis thaliana; identical to SEQ ID NO: 12988
  CDS (1)..(1512)

SEQ ID NO: 107581 - protein, 503 aa, Arabidopsis thaliana; identical to SEQ ID NO: 12989

SEQ ID NO: 107582 - DNA, 1575 bp, Aquifex aeolicus VF5
  CDS (1)..(1575): transl_table=11
atggaggcgaaaatgggcgaaaaggtctacatattcgacaccactctgagagacggagaacaggctcccggtttttccatgaccacggaagaaaagctacagatggctcatcagctcgcaaaactcaacgtagatattatagaggctggatttgcagcagcgtccaagggggactttgaagccgtaaacaggatagcaaaagaagtcaaaggtcctgttatatgctcccttgcaagggcactcgaaagtgacatagaaattgccgcaaaggcactcgaacctgcggagagaaaaaggatacacaccttcatagccacctctcccatacatatggagtacaaactccgtatgacgccggaccaagttttagagagaattaaaaaagctgtttcctttgcgaggaacttcaccgacgacgttgagttttcctgcgaagacgccacgagaagcgagagggaatttctctacagggccatagaaacagccatcaagcacggggcaaccgttataaatatcccagacacagtgggatacgccatacccgaggagttcggtcaattaatagaggacataatgaacaacgtcccgaatatagataaggttattctgagcgttcactgtcacgacgacctcggacttgccactgcaaactccctgaccgcggtaaaacacggggccagacaggttgaatgtaccataaatgggataggggaaagagctggaaacgcagctcttgaagaggtggtaatggcactaaaagtgagaaaggactttttcggagacctttacaccgatgtgaatacgaaagagatttacaaaacttccagactgctttgtaggattacaggaaacttcgttcagcctaacaaggcaatcgtcggggataacgcctttgcccacgagagcggaatacaccagcacggagtactcagccacagaatgacctacgagataatgaaccccgaagacgttggattccccatgagcagaatagttctcggaaagcacagcggaagacacgccctgaagagaagacttgaagaactcggctttaagttcaccaaagaagaactcgacaggatattcgaaaagttcaaggagcttgccgacagaaagaaggaagtttacgacgaagacctcgaagcactaatataccaggagttcatgaagatagaggaccacgaacccgtaaaggttctccactttcaagttcaaagcggtgataacatgataccgacagcaacggtaaagctcgagtttaaaggagaagagagggaagcgagttccacaggaaacggacccgttgacgcgaccattaaagcaattcagaaagccctcggcatagaacctaaactcctggactactcaattaaagccctcactcccaacacggacgctcaggcagaggcaagggtagtcttggagcttgacggggtgaaagcctccggaaggggtgtggatacagacataataaaggcgagtgttaaggcgtttaccgacgccctgaatagggctatagtcaggaaagagtacataatccagagacaggaaatcagagaagaaggtaccgtttga

SEQ ID NO: 107583 - protein, 524 aa, Aquifex aeolicus VF5
MEAKMGEKVYIFDTTLRDGEQAPGFSMTTEEKLQMAHQLAKLNVDIIEAGFAAASKGDFEAVNRIAKEVKGPVICSLARALESDIEIAAKALEPAERKRIHTFIATSPIHMEYKLRMTPDQVLERIKKAVSFARNFTDDVEFSCEDATRSEREFLYRAIETAIKHGATVINIPDTVGYAIPEEFGQLIEDIMNNVPNIDKVILSVHCHDDLGLATANSLTAVKHGARQVECTINGIGERAGNAALEEVVMALKVRKDFFGDLYTDVNTKEIYKTSRLLCRITGNFVQPNKAIVGDNAFAHESGIHQHGVLSHRMTYEIMNPEDVGFPMSRIVLGKHSGRHALKRRLEELGFKFTKEELDRIFEKFKELADRKKEVYDEDLEALIYQEFMKIEDHEPVKVLHFQVQSGDNMIPTATVKLEFKGEEREASSTGNGPVDATIKAIQKALGIEPKLLDYSIKALTPNTDAQAEARVVLELDGVKASGRGVDTDIIKASVKAFTDALNRAIVRKEYIIQRQEIREEGTV

SEQ ID NO: 107584 - DNA, 1644 bp, Clostridium acetobutylicum ATCC 824
  CDS (1)..(1644): transl_table=11
atgggcaaggaaaagaaggtgtacatttttgatagtatacttagagacggttctcaagcacaaggtgtttcctttagtgtggctgataagattaaaatagtaaaaaagttagatgaactgggaattgactatatagaagctggaaatcctagctcaaacccaaaagatagagaattctttgaagaaataagaagtttaaagcttaaacattctaagttgtgtgcatttggaagtactagaagagcaggtgcaaaggctgaggaagatgaaggaataaaaaaactcgtagatagtggagtaaatgtattctctatatttggtaaggcatgggactttcatgttacagatataataaaaacctctattgaagaaaatttaaacatgattagagatagcataaaatacttagtttctttgaataaggaagttgtatttgacgcagaacacttctttgatggttttaaaagcaataaagaatatgccatagaagttttaaatactgcgagattagcaggagcaaaatggattgtgctttgtgacaccaatggaggaactatgccaaatgaagtgagtgacatagtcaagtacttagtaagggatttaaactttgataatttgggagtacattttcatgatgacagcggcatggcagtagccaattcagttgtagcagtgcattatggagttaatcatgttcaaggaacctttacaggtgtaggagaaagatgtggaaatgctaatttatcaaacataatagcaaatctaagccttaaaatgggctataataccataaaaaatgataagcttgaatatttgacagtggcttttagatatatatgtgaagcctgtaatatgacacctaatgagagggttgcttatgttggaaattgtgctttctctcataaaggtggtatgcatatagatgctgtaagaaagaatccaaagtcctttgaacacatagatccatctagggttggaaactcaagaagaatacttgtatctgaggtatctggaaggagtacaatacttccagctttaaaaaggataaatcctaaaatagacaaggattctcccgaaacaaaggcagtagttaaaagaataaaggacttagagtatcttggatatcaatttgaaggagcagaaggaagttttgagcttcttatgagaaaagaacttaacgtatttagaccatcttttgaacttgtagagtataaggtaattgctgaaaggccatatctaagtgacttaagtgctacagcaatagttaaaataatggttaatggcaaacttgaaacaaccgcagcagatggtaaaggacctgtaaacgcacttgataaagctttaagaaaagcacttggagtgttctacaaagaattagcaaatgtttatcttacagactataaggtaagagtaatcagtggaactaaggctacaagtgcaaaaataagagtattaattgagtctacagatggtgtatcaacatggacaacagttggtgtttcctatgacataatagaagccagctggctagcacttgtagattcagtagaatataaattaatacaatgcaataaggaggaaaataacaatgaaaaaaccgatgactatgacacaaaaaatacttgcgaaccatgcagggcttga

SEQ ID NO: 107585 - protein, 547 aa, Clostridium acetobutylicum ATCC 824
MGKEKKVYIFDSILRDGSQAQGVSFSVADKIKIVKKLDELGIDYIEAGNPSSNPKDREFFEEIRSLKLKHSKLCAFGSTRRAGAKAEEDEGIKKLVDSGVNVFSIFGKAWDFHVTDIIKTSIEENLNMIRDSIKYLVSLNKEVVFDAEHFFDGFKSNKEYAIEVLNTARLAGAKWIVLCDTNGGTMPNEVSDIVKYLVRDLNFDNLGVHFHDDSGMAVANSVVAVHYGVNHVQGTFTGVGERCGNANLSNIIANLSLKMGYNTIKNDKLEYLTVAFRYICEACNMTPNERVAYVGNCAFSHKGGMHIDAVRKNPKSFEHIDPSRVGNSRRILVSEVSGRSTILPALKRINPKIDKDSPETKAVVKRIKDLEYLGYQFEGAEGSFELLMRKELNVFRPSFELVEYKVIAERPYLSDLSATAIVKIMVNGKLETTAADGKGPVNALDKALRKALGVFYKELANVYLTDYKVRVISGTKATSAKIRVLIESTDGVSTWTTVGVSYDIIEASWLALVDSVEYKLIQCNKEENNNEKTDDYDTKNTCEPCRA

SEQ ID NO: 107586 - DNA, 1617 bp, Sinorhizobium meliloti 1021
  CDS (1)..(1617): transl_table=11
atgaccagggaacgcatctatctcttcgacacgacgcttcgggacgggcagcagacgcccggcatcgacttttccgtcgaggacaagatcgcgattgcgtcgctgcttgatcaattcggcatggattatgtcgagggcggatatcccggcgccaatcccacggatacggagttcttcaagtgccggcgcaccgacaaggcctccttcgtcgccttcggcatgaccaagcgcgccggcgtctccgcctccaacgacccgggcctgagcgcgctgctgagcgccaagagcgatgcgatctgtcttgtcgccaagagctgggattatcatgtcgaggtggcgctcggctgtacgaacgaggaaaatctcgacaatatccgcgcttccgtggaggcggtcgtggcttccggccgcgaggcgatggtcgattgcgagcatttcttcgacggctacaaggcgaactccgcctatgcgctcgcctgcgcgaaaacggctttcgaggccggcgcgcgctgggtcgtgctttgcgacacgaatggcggcacgcagcctcccgagatccgcgagatcgtctcggccgtgattgcggagggagtgcccggtgcaaatctcggcatccatgcgcataatgatacggggcaggcggtggccaactcgctggctgcggtggaagccggcgttcgtcagatccagggcacgctcaacggcatcggcgaacgctgcggcaatgccaatctcgtgacgctgattgcgacgcttgccctgaaggaaacctattcgagccgtttcgagacgggaatcgatgccgagaggctccaggaactgaccaagctcgcccatgccttcgacgagttgctcaaccgctctccggatccccaggccccctatgtcggcgcttcggcttttgccaccaaggccggcattcacgcctccgcgttgctcaaggatccgaggacctacgagcatgtcgcgccggaaagcgtcggcaacctgcgcaaggtcatggtctccgatcagggaggcaaggccaacttcatcaatgctctcaagcggcgcggcatcacggtctccaaggacgatccgcggctcgacaagctgatctcgatcgtcaaggaacgcgaggcgacgggctatgcctatgaaggtgcggatgcgagcttcgcgctgctcgcgagccgcattctcggcaccgtgcccgattttttccgggtggagagcttccgggtgatggtcgagcgccgcttcgatgcgaacggcaagctgaagacggtatcggaggccgtggtcagggtgatcgtcgacggcgaaacgatgatgtcggtcgccgaggggcatggcccggtcaacgcgctcgacctcgcgcttcgcaaggatctcggcaagtaccagtccgagatcgccgatctggaacttgccgattacaaggtgcgcatcctcaacggcggcaccgaggccgtcacccgcgtcctgatcgaatcgacggaccgctcaggggcgcgctggtggacggtcggcgtatccgacaacatcatcgacgcctcatttcaggcattgatggacagtatcgtctacaagctgctcaaaaaccgcgatcaggtcggatcgatcgcggccgagtag

SEQ ID NO: 107587 - protein, 538 aa, Sinorhizobium meliloti 1021
MTRERIYLFDTTLRDGQQTPGIDFSVEDKIAIASLLDQFGMDYVEGGYPGANPTDTEFFKCRRTDKASFVAFGMTKRAGVSASNDPGLSALLSAKSDAICLVAKSWDYHVEVALGCTNEENLDNIRASVEAVVASGREAMVDCEHFFDGYKANSAYALACAKTAFEAGARWVVLCDTNGGTQPPEIREIVSAVIAEGVPGANLGIHAHNDTGQAVANSLAAVEAGVRQIQGTLNGIGERCGNANLVTLIATLALKETYSSRFETGIDAERLQELTKLAHAFDELLNRSPDPQAPYVGASAFATKAGIHASALLKDPRTYEHVAPESVGNLRKVMVSDQGGKANFINALKRRGITVSKDDPRLDKLISIVKEREATGYAYEGADASFALLASRILGTVPDFFRVESFRVMVERRFDANGKLKTVSEAVVRVIVDGETMMSVAEGHGPVNALDLALRKDLGKYQSEIADLELADYKVRILNGGTEAVTRVLIESTDRSGARWWTVGVSDNIIDASFQALMDSIVYKLLKNRDQVGSIAAE

SEQ ID NO: 107588 - DNA, 1635 bp, Nostoc sp. PCC 7120; identical to SEQ ID NO: 12992
  CDS (1)..(1635): transl_table=11

SEQ ID NO: 107589 - protein, 544 aa, Nostoc sp. PCC 7120; identical to SEQ ID NO: 12993

SEQ ID NO: 107590 - DNA, 1632 bp, Brucella melitensis 16M
  CDS (1)..(1632): transl_table=11
ttgcctgggagggcaataatggcacgcgagcgcatttatatttacgatacgaccctgcgggatgggcagcaaacgcccggcgttgacttctctgtggaggacaaaaagtcgattgtcacgctgttggaagagctgggcgtcgattatgtggaaggcggttatccgggggccaacccgactgatacggctttcttcaagcgtcgccagaccgctcgcgccaagttcgtggctttcgggatgacaaagcgggcgggcgtttccgtttccaacgatcccggcctgtcgagcttgttgcaggcttctgccgatgcggtctgctttgtcgccaagagctgggattatcatgtgcgtctggcgctcggctgcaccaatgaggaaaatctggaatccatcacggcttcggtaacggcggcgcgcatggctggccgtgaggcgctggtcgattgcgaacatttcttcgatggatacaaggcgaacccggaatatgcgctggcctgcgcgaaggcggcctattcggcgggtgcgcgctgggtggtgctgtgcgataccaacggcggcacgcagcctctggaagtggcggcaatcgttgaagcggtgaaggcggttgttcccggtgagagcctcgggatccatgcccataacgataccgaacaggctgttgcggtttcccttgctgcaatcgatgcgggggtgcgtcatgtgcagggcaccttgaacggcattggcgagcgttgcggcaatgccaatctcgtttcactcatcccgacgctggttctcaaaccatattgggcggagcggttcgagcttggcatcaagcctgcatcgctgaaatccatcacgcgcatttcgcgcgctttcgatgatatcctgaaccgcccggccacggagcaggcaccctatacgggcacttcggcctttgccacgaaggctggcatccacgcttcggcgctgatgaaagagccgcagacctacgagcatattccgccggaatcggttggcaatagccgccgtgtcatggtgtcggatcagggcggcaagtcgaatttcattgccgagctggagcgccggggtatccgcgttgccaaggacgatgttcggctcgatacgctgattgcgctggtcaaggagcgtgaggccgagggttatgcctatgagggtgcggacgcaagttttgagcttctggcacgcggtatgctcaatccgcaaccggagttcttcaaggttgaatcgttccgctgcctcgtggagcgccggtttgatgccaacggcatgttgaaaaccgtgtccgaggcggtggtcaaggtcgaggtggatggcgagatgcatatgtcggtcgcggagggccatggccctgtcaacgcgctcgatatcgcattgcgcaaggatctgggccgctttcaggccgagatcgaggatctcgaactggtcgatttcaaggtgcgtattctcaacggcggcacggcggcgatcacccgcgttctgatcgaatcgggtgatgccacgggtgcgcgctggcgcacggtgggcgtttccgacaatatcatcgatgcttcctttcaggctttgatggattccgtcaattacaagctgatgaaaaaccgggccatggcaggtctggccgctgccgaatag

SEQ ID NO: 107591 - protein, 543 aa, Brucella melitensis 16M
MPGRAIMARERIYIYDTTLRDGQQTPGVDFSVEDKKSIVTLLEELGVDYVEGGYPGANPTDTAFFKRRQTARAKFVAFGMTKRAGVSVSNDPGLSSLLQASADAVCFVAKSWDYHVRLALGCTNEENLESITASVTAARMAGREALVDCEHFFDGYKANPEYALACAKAAYSAGARWVVLCDTNGGTQPLEVAAIVEAVKAVVPGESLGIHAHNDTEQAVAVSLAAIDAGVRHVQGTLNGIGERCGNANLVSLIPTLVLKPYWAERFELGIKPASLKSITRISRAFDDILNRPATEQAPYTGTSAFATKAGIHASALMKEPQTYEHIPPESVGNSRRVMVSDQGGKSNFIAELERRGIRVAKDDVRLDTLIALVKEREAEGYAYEGADASFELLARGMLNPQPEFFKVESFRCLVERRFDANGMLKTVSEAVVKVEVDGEMHMSVAEGHGPVNALDIALRKDLGRFQAEIEDLELVDFKVRILNGGTAAITRVLIESGDATGARWRTVGVSDNIIDASFQALMDSVNYKLMKNRAMAGLAAAE

SEQ ID NO: 107592 - DNA, 1578 bp, Pyrobaculum aerophilum str. IM2; identical to SEQ ID NO: 12994
  CDS (1)..(1578): transl_table=11

SEQ ID NO: 107593 - protein, 525 aa, Pyrobaculum aerophilum str. IM2; identical to SEQ ID NO: 12995

SEQ ID NO: 107594 - DNA, 1578 bp, Pyrococcus furiosus DSM 3638
  CDS (1)..(1578): transl_table=11
atgagggagaggagagttgagctatatgatacaacacttagagatggctcccaaatggaggggataagcttttcccttgaggataagctaaagataactgaaaagctcgatgaatttggaattcactacatagaaggaggatggccgggttccaatccaaaggacattgaatactttagagctgtgaaagatttgcccttagaaaatgcggaaatagcggcttttggaagtacaaggaggcctagggtgagggcagaggaggatgcaaacttaaatgccttggttgactctgaggccccaatagccacaatctttggcaagagctgggacctccacgtaactagagctctaaagacaactcttgagaacaacctccagatgattgcggagtcaatagaatacttaagagagcacggaatgagggttttctacgatgcagagcacttcttcgatggttatagagcaaatcctgaatatgcaataaccaccataaaggtagcggaagaagctggggccgagagaatagtcttggctgacacaaacggaggatctcttccctcctttgttaaaagcgtagtggagaaagtaaaggaagaaataaagactcccctaggaattcacgcccacaatgattctgagttggcagtggcaaattccttaatggcatttgaggccggagtaatccaaatccagggtactataaacggatatggagagagatgcggaaatgctaacttaatctcgataatcccagctttggagttaaagtatggagttgaagtcgttgggagggagaggcttaaaaagttgaaggagttggcccactttgttgcggaactagctaacatggaaattcccaggaaccaaccatacgttggtgacagtgcctttgcccacaaaggaggagttcacgtttcggcagttctcaaggatccaagaacgtacgagcatattcccccagaggcagttgggaacagaagaaaggttgtagtatccgagctctctggaaggagcaatctgatatacaaggctaaagagcttggcatagatatcaacgaaaatgatccaaagcttcaagaggttgttaagaagataaaagagcttgaattcctgggctatcactttgaagccgctgaagcttcactggagcttctaataaagaaggtgaagggagagtataccccaacttttgagctggagagggcaatggtcgttagtgagattctcccagatcactctccaatatcagaggcaaccgttgtcgttaaagtaggtgataaaaaggttcacacggcggcagagggaaatgggccggtaaatgccctggatttggcccttagaaaagccctctcagagttctatccagagctcaaaaagattagtttggtggactacaaggttagggttcttggaagtgaaaagggaacagctgcaaaggttagagtcctcatccaaaccagcgatggaaggaggacatggggcactgtgggagtgtcaacaaacatcatcgaggcgagcttaaacgcaataattgacagtatggagtactggctcatgaaggggagggagaacaaatga

SEQ ID NO: 107595 - protein, 525 aa, Pyrococcus furiosus DSM 3638
MRERRVELYDTTLRDGSQMEGISFSLEDKLKITEKLDEFGIHYIEGGWPGSNPKDIEYFRAVKDLPLENAEIAAFGSTRRPRVRAEEDANLNALVDSEAPIATIFGKSWDLHVTRALKTTLENNLQMIAESIEYLREHGMRVFYDAEHFFDGYRANPEYAITTIKVAEEAGAERIVLADTNGGSLPSFVKSVVEKVKEEIKTPLGIHAHNDSELAVANSLMAFEAGVIQIQGTINGYGERCGNANLISIIPALELKYGVEVVGRERLKKLKELAHFVAELANMEIPRNQPYVGDSAFAHKGGVHVSAVLKDPRTYEHIPPEAVGNRRKVVVSELSGRSNLIYKAKELGIDINENDPKLQEVVKKIKELEFLGYHFEAAEASLELLIKKVKGEYTPTFELERAMVVSEILPDHSPISEATVVVKVGDKKVHTAAEGNGPVNALDLALRKALSEFYPELKKISLVDYKVRVLGSEKGTAAKVRVLIQTSDGRRTWGTVGVSTNIIEASLNAIIDSMEYWLMKGRENK

SEQ ID NO: 107596 - DNA, 1563 bp, Yersinia pestis KIM
  CDS (1)..(1563): transl_table=11
atgagccaacaagtcattatttttgatacaacattgcgcgacggtgaacaagcattgcaagccagtctgagtgtgaaagagaagctgcaaatcgcgctggcattggaaagaatgggggtcgatatcatggaggtgggtttccctgtctcctcccctggtgattttgaatcggttcgtactatcgctcagcaagtgaaaaatagccgggtttgcgccttggcacgttgtgtggataaagatattgatgttgcggcagaggcattgcgaattgcagaagctttccgtattcatgtgtttttggccacctcaaccttgcatatcgaatccaagttaaagcgttcgtttgacgatgtgctggcgatggcggtccactccgtgaaacgtgctcgtaactataccgatgacgtcgagttttcttgtgaagatgctggccgtactccaattgataacttatgccgtgtcgtcgaggccgcgattaccgccggtgccaccacaatcaatatcccggataccgtcggttacacccccccttatcaatttggtggcatcatcactgacttgtatgaacgtgttcccaatattgataaagccattatctctgttcattgccatgatgacttgggcatgtccgttgccaactccattactgcagtacaagccggggcgcgtcaggtcgaagggaccatcaacggcttaggtgagcgtgcaggtaactgttcattggaagaggtgatcatggccattaaagtgcgccatgaaatgttgggcgtgcacaccaatatcaatcatcaggaaatttaccgtaccagccagttggtcagtaaaatttgcaatatgcctattcccggcaataaagccattgtcggcagtaatgccttcgctcactcctccggtattcatcaggatggtgtcctgaaaaatcgcgaaaactacgaaatcatgaccccggaatccatcggtctgaaagaagtccaattgaacctgacatcccgttcaggtcgtgcggcagtgaagcaccggatggaagagatgggttatcaggataaagattacaatttagattctttgtacgatgccttcttgaaattagccgataaaaaaggccaggtctttgactacgatttggaagcattggcctttattaataagcagcaggaagagcctgaatattatcgtttggactatttcagcgtccagtcgggttccagtgtcatggcaactgcctcagtaaaattggtctgtggtgaagaaataaaatcagaagcggccaccggtaacggcccggttgatgcggtgtatcaggccatcaatcgcattaccgactacccaattgaactggtgaagtatcaactgtcggccaaaggtcagggtaaagatgcattgggtcaggttgatatcgtggttgaccacaaggggcgtcgcttccatggcgtaggtttggcaactgacattgttgagtcatccgctaaggcgttggttcacgtattaaataacatctggcgcgcccatcaggtcgaaaaagagaagcagcgtctgcaacaaaataatcaggaaatggtgtga

SEQ ID NO: 107597 - protein, 520 aa, Yersinia pestis KIM
MSQQVIIFDTTLRDGEQALQASLSVKEKLQIALALERMGVDIMEVGFPVSSPGDFESVRTIAQQVKNSRVCALARCVDKDIDVAAEALRIAEAFRIHVFLATSTLHIESKLKRSFDDVLAMAVHSVKRARNYTDDVEFSCEDAGRTPIDNLCRVVEAAITAGATTINIPDTVGYTPPYQFGGIITDLYERVPNIDKAIISVHCHDDLGMSVANSITAVQAGARQVEGTINGLGERAGNCSLEEVIMAIKVRHEMLGVHTNINHQEIYRTSQLVSKICNMPIPGNKAIVGSNAFAHSSGIHQDGVLKNRENYEIMTPESIGLKEVQLNLTSRSGRAAVKHRMEEMGYQDKDYNLDSLYDAFLKLADKKGQVFDYDLEALAFINKQQEEPEYYRLDYFSVQSGSSVMATASVKLVCGEEIKSEAATGNGPVDAVYQAINRITDYPIELVKYQLSAKGQGKDALGQVDIVVDHKGRRFHGVGLATDIVESSAKALVHVLNNIWRAHQVEKEKQRLQQNNQEMV

SEQ ID NO: 107598 - DNA, 1551 bp, Leptospira interrogans serovar Lai str. 56601
  CDS (1)..(1551): transl_table=11
atgacaaaagtagaaactcgattggaaattttagacgtaactttgagagacggggagcagaccagaggggtcagtttttccacttccgaaaaactaaatatcgcaaaatttctattacaaaaactaaatgtagatcgggtagagattgcgtctgcaagagtttctaaaggggaattggaaacggtccaaaaaatcatggaatgggctgcaacagaacagcttacggaaagaatcgaaatcttaggttttgtagacgggaataaaaccgtagattggatcaaagatagtggggctaaggttttaaatcttttgactaagggatcgcttcatcatttagaaaaacaattaggcaaaactccgaaagaattctttacagacgtttcttttgtaatagaatacgcgatcaaaagcggacttaaaataaacgtatatttagaagattggtccaacggtttcagaaacagtccagattacgtcaaatcgctcgtagaacatctaagtaaagaacatatagaaagaatttttcttccagacacgttaggcgttctttcgccagaagagacgtttcaaggagtggattcactcattcaaaaatacccggatattcattttgaatttcacggacataacgactacgatctttccgtggcaaatagtcttcaagcgattcgtgccggagtcaaaggtcttcacgcttctataaatggtctcggagaaagagccggaaatactccgttggaagcactcgtaaccacgattcatgataagtctaactctaaaacgaacataaacgaaattgcaattacggaagcaagccgtcttgtagaagtattcagcggaaaaagaatttctgcaaatagaccgatcgtaggagaagacgtgtttactcagaccgcgggagtacacgcagacggagacaaaaaaggaaatttatacgcaaatcctattttaccggaaagatttggtaggaaaagaagttacgcgttaggcaaacttgcaggtaaggcgagtatctccgaaaatgtaaaacaactcggaatggttttaagtgaagtggttttacaaaaggttttagaaagggtgatcgaattaggagatcagaataaactagtgacacctgaagatcttccatttatcattgcggacgtttctggaagaaccggagaaaaggtacttacaatcaaatcttgtaatattcattccggaattggaattcgtcctcacgcacaaattgaattggaatatcagggaaagattcataaggaaatttctgaaggagacggagggtatgatgcgtttatgaatgcacttactaaaattacgaatcgcctcggtattagtattcctaaattgatagattacgaagtaaggattcctcctggtggaaaaacagatgcacttgtagaaactaggatcacctggaacaagtccttagatttagaagaggaccagactttcaaaacgatgggagttcatccggatcaaacggttgcagcggttcatgcaactgaaaagatgctcaatcaaattctacaaccatggcaaatctaa

SEQ ID NO: 107599 - protein, 516 aa, Leptospira interrogans serovar Lai str. 56601
MTKVETRLEILDVTLRDGEQTRGVSFSTSEKLNIAKFLLQKLNVDRVEIASARVSKGELETVQKIMEWAATEQLTERIEILGFVDGNKTVDWIKDSGAKVLNLLTKGSLHHLEKQLGKTPKEFFTDVSFVIEYAIKSGLKINVYLEDWSNGFRNSPDYVKSLVEHLSKEHIERIFLPDTLGVLSPEETFQGVDSLIQKYPDIHFEFHGHNDYDLSVANSLQAIRAGVKGLHASINGLGERAGNTPLEALVTTIHDKSNSKTNINEIAITEASRLVEVFSGKRISANRPIVGEDVFTQTAGVHADGDKKGNLYANPILPERFGRKRSYALGKLAGKASISENVKQLGMVLSEVVLQKVLERVIELGDQNKLVTPEDLPFIIADVSGRTGEKVLTIKSCNIHSGIGIRPHAQIELEYQGKIHKEISEGDGGYDAFMNALTKITNRLGISIPKLIDYEVRIPPGGKTDALVETRITWNKSLDLEEDQTFKTMGVHPDQTVAAVHATEKMLNQILQPWQI

SEQ ID NO: 107600 - DNA, 1566 bp, Streptococcus mutans UA159; identical to SEQ ID NO: 12998
  CDS (1)..(1566): transl_table=11

SEQ ID NO: 107601 - protein, 521 aa, Streptococcus mutans UA159; identical to SEQ ID NO: 12999

SEQ ID NO: 107602 - DNA, 1614 bp, Escherichia coli CFT073
  CDS (1)..(1614): transl_table=11
atgcccgaagcgaggcgctcaaaagagacaaggacccaaaccatgagccagcaagtcattattttcgataccacattgcgcgacggtgaacaggcgttacaggcaagcttgagtgtgaaagaaaaactgcaaattgcgctggcccttgagcgtatgggtgttgacgttatggaagtcggtttccccgtctcttcgccgggtgattttgaatcagtgcagaccatcgctcgccaggttaaaaacagccgtgtatgcgcgttagctcgctgcgtggaaaaagatattgacgtggcagccgaatccctgaaagtcgccgaagccttccgtattcatacctttattgccacttcgccaatgcacatcgccaccaagctgcgcagcacgctggacgaagtgatcgaacgcgctatctatatggtgaaacgcgcccgtaattacaccgatgatgttgaattttcttgcgaagatgccggacgcaccccaattgccgatctggcgcgagtggtcgaagcggcgattaatgccggtgccaccaccatcaacattccggacaccgtgggctacaccatgccatttgagttcgccggaatcatcagcggcctgtatgaacgcgtacccaacatcgacaaagccattatttccgtacatacccacgacgatttgggcctggcggtcggcaactcactggcggcggtacatgccggagcacggcaggtagaaggcgcaatgaacgggatcggcgagcgtgccggtaactgttcccttgaagaagtcatcatggcgatcaaagttcgtaaggatattctcaacgtccacaccgccatcaatcaccaggagatatggcgcaccagccagttagttagccagatttgtaatatgccgatcccggcaaacaaagccattgttggcagcggcgcattcgcacactcctccggtatccaccaggatggtgtactgaaaaaccgcgaaaactacgaaatcatgacaccagaatctattggtctgaaccaaatccagctgaatctgacctctcgttcggggcgtgcggcggtgaaacatcgcatggatgagatgggatataaagaaagtgaatataatttagacaacctgtacgacgctttcctgaagctggcggacaaaaaaggccaggtgtttgattacgatctggaggcgctggccttcatcggtaagcagcaagaagagccggagcatttccgtctggattacttcagcgtgcagtcaggttctaacgatattgccactgccgccgtcaaactggcctgtggcgaagaagtcaaagcagaagccgccaacggtaacggtccggtcgatgccgtctaccaggcgataaaccgcatcactgactataacgtcgaactggtgaaatacagcctgaccgccaaaggccacggtaaagatgcgctgggtcaggtggatattgtcgccaactacaacggtcgccgcttccacggcgtcggcctggccaccgatattgtcgagtcctccgccaaagccatggtgcacgtactgaacaatatctggcgtgccgcagaagtcgaaaaagagttgcaacgcaaagctcaacacaacgaaaacaacaaggaaaccgtgtga

SEQ ID NO: 107603 - protein, 537 aa, Escherichia coli CFT073
MPEARRSKETRTQTMSQQVIIFDTTLRDGEQALQASLSVKEKLQIALALERMGVDVMEVGFPVSSPGDFESVQTIARQVKNSRVCALARCVEKDIDVAAESLKVAEAFRIHTFIATSPMHIATKLRSTLDEVIERAIYMVKRARNYTDDVEFSCEDAGRTPIADLARVVEAAINAGATTINIPDTVGYTMPFEFAGIISGLYERVPNIDKAIISVHTHDDLGLAVGNSLAAVHAGARQVEGAMNGIGERAGNCSLEEVIMAIKVRKDILNVHTAINHQEIWRTSQLVSQICNMPIPANKAIVGSGAFAHSSGIHQDGVLKNRENYEIMTPESIGLNQIQLNLTSRSGRAAVKHRMDEMGYKESEYNLDNLYDAFLKLADKKGQVFDYDLEALAFIGKQQEEPEHFRLDYFSVQSGSNDIATAAVKLACGEEVKAEAANGNGPVDAVYQAINRITDYNVELVKYSLTAKGHGKDALGQVDIVANYNGRRFHGVGLATDIVESSAKAMVHVLNNIWRAAEVEKELQRKAQHNENNKETV

SEQ ID NO: 107604 - DNA, 1614 bp, Bradyrhizobium japonicum USDA 110
  CDS (1)..(1614): transl_table=11
atgagctcggcacaagcaaagaaagagcgcctctatctgttcgacaccacgctgcgcgacggagcgcagaccaacggtgtcgatttcacgctgaccgacaagcagatcatcgccgcgatgctggacgagctcggcatcgactatgtcgagggcggctatcccggcgccaatccgaccgacaccgagttcttcggcagcaagccgaagctcaatcacgcgcgcttcaccgccttcggcatgacgcgccgggcagggcgctcggtctcgaacgatccgggcgttgccggtctgctggaagccaaggccgacgcgatctgcttcgtggcaaagtcttccgcctatcaggtgcgcgtcgcgctggagacgaccaaggaggaaaacctcgcttcgatccgcgacagcgtcgcggccgccaaggccgccggccgcgaggtgatgctcgactgcgagcatttcttcgacggctacaaggaggattccagcttcgcgctcgcctgcgcgaaagccgcctatgaggccggcgcgcgctgggtggtgctgtgcgacaccaatggcggcaccatgccgaacgaggtcgaggccatcgtcaccgaggtgaccaggcacatccccggcgctcacgtcggcattcacgctcataacgacaccgagcaggcggtggcgaattcgctcgccgccgtgcgcgccggtgcgcggcagatccagggcacgctgaacggtctcggcgagcgctgcggcaacgccaatctctgctcgctgatcccgaccctgaagctgaagcaggagtttgccgacgccttcgagatcggtgtgacgccggagaagctcgcgactctcgtcaaggtgtcgcgcacgcttgacgacatgctcaaccgcgtgccgaaccggcatgcggcctatgtcggcgagagcgccttcgtcaccaagaccggcatccatgcctccgccgtgctgaaggatccgcagacctacgagcatgtcttgccggaactggtcggcaatcaccgcaaggtgctggtctcagaccaggccggccgctccaacgtgatcgccgagctcgaccgcgccggcatcgcctacgagaagagcgatccgaagctgacgcgcctggtcgaggagctgaaggagcgcgaggcggccggctacgcctatgaatccgccaacgcctcgttcgatcttttggcgcgccgcacgctcggcaaggtgccgcattatttcgaggtcgagcagttcgacgtcaatgtcgagcagcgctacaacgcgctcggcgagcgcgtcacggtggcgcttgcggtggtcaaggtcgacgttgccggcgagcatctgatctcggcggccgaaggcaacggtcccgtcaacgcgctcgacgtcgccttgcgcaaggacctcggcaagtaccagaaatatatcgagggcctgaagctgatcgactaccgcgtccgtatcctcaatggcggcaccggcgcggtcacgcgcgtgctgatcgagagcgaggacgagaacggcgacagctggaccacggtcggcgtgtccccgaacatcatcgacgcctcgttccaggcgctgatggattcggtgatctacaagctcgtgaaatcgggcgcgccggcgtag

SEQ ID NO: 107605 - protein, 537 aa, Bradyrhizobium japonicum USDA 110
MSSAQAKKERLYLFDTTLRDGAQTNGVDFTLTDKQIIAAMLDELGIDYVEGGYPGANPTDTEFFGSKPKLNHARFTAFGMTRRAGRSVSNDPGVAGLLEAKADAICFVAKSSAYQVRVALETTKEENLASIRDSVAAAKAAGREVMLDCEHFFDGYKEDSSFALACAKAAYEAGARWVVLCDTNGGTMPNEVEAIVTEVTRHIPGAHVGIHAHNDTEQAVANSLAAVRAGARQIQGTLNGLGERCGNANLCSLIPTLKLKQEFADAFEIGVTPEKLATLVKVSRTLDDMLNRVPNRHAAYVGESAFVTKTGIHASAVLKDPQTYEHVLPELVGNHRKVLVSDQAGRSNVIAELDRAGIAYEKSDPKLTRLVEELKEREAAGYAYESANASFDLLARRTLGKVPHYFEVEQFDVNVEQRYNALGERVTVALAVVKVDVAGEHLISAAEGNGPVNALDVALRKDLGKYQKYIEGLKLIDYRVRILNGGTGAVTRVLIESEDENGDSWTTVGVSPNIIDASFQALMDSVIYKLVKSGAPA

SEQ ID NO: 107606 - DNA, 1605 bp, Streptomyces avermitilis MA-4680
  CDS (1)..(1605): transl_table=11
atgacggaaaccagcgaactcgacgattcgttccacgtcttcgacacgaccctgcgcgacggcgcacagcgcgagggcattaacctcacggtcgccgacaagctggccatcgcacggcacctggacgacttcggcgtgggcttcatcgagggcggctggcccggcgccaacccgcgggacaccgagttcttcgcccgcgcccagcaggagatcgacttcaagcacgcccagctggtggccttcggagccacgcgccgcgcgggcgccaaggcgagcgaggacccgcaggtcaaggcgctgctggaggcgggcgcccaggtgatcaccctggtcgccaagtcgcacgaccgccatgtcgaactggctctgcgcacgacgctcgacgagaacctggagatggtccgcgacacggtctcgtacctgtgctcccaggggcgccgggtcttcgtcgactgtgagcacttcttcgacggttaccgggcgaacccggagtacgcgaaggcggtcgtacgggccgcggccgaggccggcgccgatgtggtcgtgctctgcgacaccaacggcggcatgctccccgcccaggtccaggcggtcgtcgccacggtcctcgcggacaccggtgcccggctcggcatccacgcccaggacgacacgggctgcgcggtggcgaacacgctggccgcggtggacgcgggcgcgacccatgtgcagtgcacggcgaacgggtacggcgagcgggtcggcaactccaacctgttcccggtggtggcggccctggagctgaagtacggcaagaaggtgctccccgaaggcgcgctgcgcgagatgacgaggatctcgcacgcgatcgccgaggtcgtgaacctcaccccctccacgcaccagccgtacgtcggtgtctcggccttcgcgcacaaggcgggcctgcacgcctccgcgatcaaggtcgacccggacctgtaccagcacatcgaccccgagcgggtcggcaacaccatgcggatgctggtgtccgacatggcgggccgcgcctccatcgagctcaagggcaaggagctcggcgtcgacatcagcggcgaccgcgagctggtcggccgggtcgtggagcgggtgaaggagcgcgagctcaagggctacacgtacgaggcggcggacgcgagcttcgaactcctgctgcgcgcggaggcggagggcaaggcccgcacgtacttcgaggtcgagtcctggcgggcgatcgtcgaggaccgcccggacggcacccacgccaacgaggccacggtcaagctcttcgccaagggcgagcggatcgtcgccaccgccgagggcaacggcccggtcaacgccctcgaccgggccctgcgcgtcgccctcgaaatgatctacccccagctcgccaagctggagctggtggactacaaggtccgcatcctggagggcaagcacggcacgtcctccacgacccgcgtgctcatctccacctccgacggcaccggtgaatggtcgacggtcggtgtcgcggagaacgtgatcgccgcgtcctggcaggccctggaggacgcctacacgtacggcctgctgcgggccggcgtggagccggccgagtag

SEQ ID NO: 107607 - protein, 534 aa, Streptomyces avermitilis MA-4680
MTETSELDDSFHVFDTTLRDGAQREGINLTVADKLAIARHLDDFGVGFIEGGWPGANPRDTEFFARAQQEIDFKHAQLVAFGATRRAGAKASEDPQVKALLEAGAQVITLVAKSHDRHVELALRTTLDENLEMVRDTVSYLCSQGRRVFVDCEHFFDGYRANPEYAKAVVRAAAEAGADVVVLCDTNGGMLPAQVQAVVATVLADTGARLGIHAQDDTGCAVANTLAAVDAGATHVQCTANGYGERVGNSNLFPVVAALELKYGKKVLPEGALREMTRISHAIAEVVNLTPSTHQPYVGVSAFAHKAGLHASAIKVDPDLYQHIDPERVGNTMRMLVSDMAGRASIELKGKELGVDISGDRELVGRVVERVKERELKGYTYEAADASFELLLRAEAEGKARTYFEVESWRAIVEDRPDGTHANEATVKLFAKGERIVATAEGNGPVNALDRALRVALEMIYPQLAKLELVDYKVRILEGKHGTSSTTRVLISTSDGTGEWSTVGVAENVIAASWQALEDAYTYGLLRAGVEPAE

SEQ ID NO: 107608 - DNA, 1509 bp, Bacillus cereus ATCC 14579
  CDS (1)..(1509): transl_table=11
ttgttcatggatacaacgcttcgtgatggcgaacaatcaccaggagtaaatttaaatgaacaagagaaattacaaattgctaggcaattagagaggcttggtattcatgtaatggaagctggattcgcggcagcttccgaaggcgacttccaatcggtaaaacgtattgcgaatacaattcaaaatgctacggttatgagtttagctagagcgaaagaaagtgacattcgaagagcatatgaagctgtgaaaggcgctgtatctcctcgtctacacgtatttctagctacgagtgatattcatatgaaatataaactttgtatgtcaaaagaagatgtgttaaatagtattcatcgctcggttacgctcggaaaatcattatttccgacagtacaattttctgcagaagatgcgacaagaacatcgagagcatttttagctgaagcagtagaaattgcgattcgagcaggagcgaatgtaattaatattccggatacagttggatatacaaatccggaagagtattattctctttttgaatacttacaagaatccgttccatcatatgaaaaagcgattttttcttgtcattgtcacgatgatcttggtatggcagtagcaaattcgttagctgcggttgaagggggagcattgcaagtagaaggaacgattaatggcattggagaaagagcagggaatgcagcgttagaagaagttgcggtagctcttcatattagaaaagatttttataaagcagagccttcgatgactttaaaagaaattaaggcgacgagtatattagtaagcaggttaacgggtatggttgtaccgaaaaataaagcaatcgttggagcgaatgcatttgctcatgaatcgggcatccaccaagacggggttttaaaagaagtaacaacttatgaaattatcgaaccagcgcttataggagaatcccaaaatctctttgtacttgggaaacactctggccgtcatgcgtttacggaaaaaatgaaagagcttggttatgaatttacaaatgaagagcgagatgcggcattcgaagcatttaaaaaattggctgatcgtaaaaaggaaattactgaagaagatttacgcgcacttatgcttggtgaagcagcatttgcagctcagcaatataacattacgcaattacaagtgcatttcgtatcaaatagtacacaatgcgcaacagttgtgttgaaggatgaggaaggaaatgtatatgaagatgcagccactggttctggtagtattgaagcgatatacaatgcgattcaaagaattttaggattagaatgtgaattggcagattatcgcatacaatctattacacaaggtcaagatgcacttgctcacgttcatgttgaattaaaagaaggtagtcaccaaatatcaggtttcggagttgcgcaagacgtattggaagcgtcggcgagagcttatgtccatgcagcagggaaattaaaatctcttatagcgcttgtgaaataa

SEQ ID NO: 107609 - protein, 502 aa, Bacillus cereus ATCC 14579
MFMDTTLRDGEQSPGVNLNEQEKLQIARQLERLGIHVMEAGFAAASEGDFQSVKRIANTIQNATVMSLARAKESDIRRAYEAVKGAVSPRLHVFLATSDIHMKYKLCMSKEDVLNSIHRSVTLGKSLFPTVQFSAEDATRTSRAFLAEAVEIAIRAGANVINIPDTVGYTNPEEYYSLFEYLQESVPSYEKAIFSCHCHDDLGMAVANSLAAVEGGALQVEGTINGIGERAGNAALEEVAVALHIRKDFYKAEPSMTLKEIKATSILVSRLTGMVVPKNKAIVGANAFAHESGIHQDGVLKEVTTYEIIEPALIGESQNLFVLGKHSGRHAFTEKMKELGYEFTNEERDAAFEAFKKLADRKKEITEEDLRALMLGEAAFAAQQYNITQLQVHFVSNSTQCATVVLKDEEGNVYEDAATGSGSIEAIYNAIQRILGLECELADYRIQSITQGQDALAHVHVELKEGSHQISGFGVAQDVLEASARAYVHAAGKLKSLIALVK

SEQ ID NO: 107610 - DNA, 1701 bp, Bordetella pertussis Tohama I
  CDS (1)..(1701): transl_table=11
atgatgctcgccaaccccgccaccaaatacgtaccgttccaaccctttgcgcgcgacttcgccgagcgcacctggcccagccgccgcatcacccagccgcccatctggatgagcaccgacttgcgcgacggcaaccagtcgctgatcgagcccatgagcgtcgaacgcaaggtgcgttttttcgagcagctggtgaagatcggcttcaaggaaatcgaagtgggcttcccgtcggcgtcgcaaaccgacttcgacttcgtgcgcaagctgatcgatgaaaagcgcatcccggacgacgtcaccatcatcgtcctgacccagtcgcgcgaagatctcatcagccgcaccgtcgaggccgccgccggcgccaggcaggccatgatccacctgtacaacgcctgcgctccggctttccgcaagatcgtgttcaacatgagccgcgacgaaatcaagaacatcgcggtcaccggcacgcgcatggtcaagcagtacatggcgaagtacccgcaaacgcaatggcgctacgagtactcgcccgaagtcttcagcaccaccgagcccgaattcgcgctcgacgtctccaacgcggtggccgacgaatgggacgccacgccccagcgcaagatggtgctcaacctgccggccaccatcgaggcgacttcgcccaacatgtacgccgaccagatcgagtggatgcacaagaacctcgcgcgccgcgacagcatcgtgttgagcgtgcacccgcacaatgaccgcggcaccgccgtggcggccgccgaattcgccgtgatggccggcgccgaccgcatcgagggctgcctgttcggcagcggcgagcgcaccggcaacgtcgacctggtcacgctggcgctcaacctctatacgcagggcgtgcaccccggcctggacttctccgacatcgacgaagtgcgccgctgcgccgagtactgcaaccagttgccggtccatccgcgccatccgtacgcgggcgacctggtcttcacggcattctccggctcgcaccaggacgccatcaagaagggcttcgcgcaacagcaggccgacgctccctgggaagtgccttacctgccgatcgaccctgccgacctgggccgcagctatgacgccgtcatccgcgtcaacagccagtcgggcaagggcggggtgtcctacctgctcgaacaggagcacggcctggtcttgccgcgccgcctgcagatcgaattcagccgcgccatccagcgcgttaccgacgaaaccggccgcgaggtatcctcggacgacgtctacacgatcttcgacagcgaatacctggcgcagcagcagccctggcagctggtccgccaccgtatcgacggcgatccgtcggccggcgagggcaagcacttcagcatcgaggccgaactcagcttcaacggcgagcgccgcatcgtgaagggtagcggcgacggcgcgatctcggccttcgtggcggcgctggacgtgcctgtgcgcatcatggactaccacgagcacgccatcggcaccgacacccgcgccgcctgctacgtggaagtgcgcgttggcgattcgcccaccggcttcggcgtaggcatcgaccgcgacatcgtcactgcctccttcaaggctgtgctgggcgccgtcaaccgccatcacgtcgccgctacgcaagccaccgaaaccgaagccgtcgccgcgtaa

SEQ ID NO: 107611 - protein, 566 aa, Bordetella pertussis Tohama I
MMLANPATKYVPFQPFARDFAERTWPSRRITQPPIWMSTDLRDGNQSLIEPMSVERKVRFFEQLVKIGFKEIEVGFPSASQTDFDFVRKLIDEKRIPDDVTIIVLTQSREDLISRTVEAAAGARQAMIHLYNACAPAFRKIVFNMSRDEIKNIAVTGTRMVKQYMAKYPQTQWRYEYSPEVFSTTEPEFALDVSNAVADEWDATPQRKMVLNLPATIEATSPNMYADQIEWMHKNLARRDSIVLSVHPHNDRGTAVAAAEFAVMAGADRIEGCLFGSGERTGNVDLVTLALNLYTQGVHPGLDFSDIDEVRRCAEYCNQLPVHPRHPYAGDLVFTAFSGSHQDAIKKGFAQQQADAPWEVPYLPIDPADLGRSYDAVIRVNSQSGKGGVSYLLEQEHGLVLPRRLQIEFSRAIQRVTDETGREVSSDDVYTIFDSEYLAQQQPWQLVRHRIDGDPSAGEGKHFSIEAELSFNGERRIVKGSGDGAISAFVAALDVPVRIMDYHEHAIGTDTRAACYVEVRVGDSPTGFGVGIDRDIVTASFKAVLGAVNRHHVAATQATETEAVAA

SEQ ID NO: 107612 - DNA, 1572 bp, Gloeobacter violaceus PCC 7421
  CDS (1)..(1572): transl_table=11
gtggaacgcatctatctttacgacacaacattgcgcgatggcgcccagcgcgaggggatgagcctctcagtcgaggacaaattgcgcatcgcccacaaactcgacgaactgggggtgccttttatcgaaggcggttggccgggggccaatcccaaggacgatcagtttttcgagcgcctgcacagtacccgttttaagcacagcgcggtggttcctttttgttcgacccggcgaccgcaggtgcgcgcgtcggaagatgccggattgcgcaaaattctcgctgcggggaccgaatgggtcaccaccttcggcaagtgctgggagctgcacgtgcacgaaggtttgcgcaccagcctcgaagaaaatttggcgatgatcgaagataccgtcgccttctttcgcacccaggatcggcgggtaattttcgactgcgaacactggttcgacggctactacaaaaatcccgaatatgccctggccgccctgcgcgccgcagcccatgccggagcgcagtgggtggtgctgtgcgacaccaacggcggcatgcttccccagcagatccgcacgagcgtcgaagcagtccgggattactgccgggagcacaatctcgaagtgcaactcggcatccacacccacaacgattcagaaactgccgtggccaatgccctggccgccgtcgaagcgggggcgcgcatggtgcacggtaccgtcaacggttacggcgagcgctgcggcaacgccaatctctgcgcgctcatcccgaatttgcaactcaagatgaactacgcgctcatcgccccggagcagttggcccggttgacggaagtctcccatttcgtgagcgaagtggcaaatctcgctcccaacgatcacgccgcctacgtcggggcgagcgcctttgcccacaaagggggcatccacgtgagcgccgtgcagcgcaacccccagacctacgagcacatcgtgccggagagcgtcggcaaccgccgccgcattgtcatctccgaccaggcgggcctcagcaacgtgctcactaagctcaccgagatgggcttcagtttcgagcgccacgacccggcggtgggccgtatcctgcagcaaatcaagctgctggagtccgagggttaccagttcgaggcggccgaagccagtttcgagttgctggtgcgtgagtgcctggagatccgcaaatccctattctccctcgaaggactctacaccgcctgccagaccttcccggacggtacagtgcgctcggaggccaccgtgcgtgtgcgcgtcggcgaagtgctccagcacaccgccgccgacggcaacgggccggtctcagccctcgatgccgccctgcgcaaggcgttggtcggctgctatccccaggtggcgggcatgcacctggtcgactacaaagtgcgcatcctggatagcgcccacggcacctccgcccgcacccgggttctggtcgaatcgagcgacggtctgggccgctggacgaccatcggggtgtcggccaacattatcgaggccagttgccgggcggtcatcgaagggattgagtacggcctcagccgttga

SEQ ID NO: 107613 - protein, 523 aa, Gloeobacter violaceus PCC 7421
MERIYLYDTTLRDGAQREGMSLSVEDKLRIAHKLDELGVPFIEGGWPGANPKDDQFFERLHSTRFKHSAVVPFCSTRRPQVRASEDAGLRKILAAGTEWVTTFGKCWELHVHEGLRTSLEENLAMIEDTVAFFRTQDRRVIFDCEHWFDGYYKNPEYALAALRAAAHAGAQWVVLCDTNGGMLPQQIRTSVEAVRDYCREHNLEVQLGIHTHNDSETAVANALAAVEAGARMVHGTVNGYGERCGNANLCALIPNLQLKMNYALIAPEQLARLTEVSHFVSEVANLAPNDHAAYVGASAFAHKGGIHVSAVQRNPQTYEHIVPESVGNRRRIVISDQAGLSNVLTKLTEMGFSFERHDPAVGRILQQIKLLESEGYQFEAAEASFELLVRECLEIRKSLFSLEGLYTACQTFPDGTVRSEATVRVRVGEVLQHTAADGNGPVSALDAALRKALVGCYPQVAGMHLVDYKVRILDSAHGTSARTRVLVESSDGLGRWTTIGVSANIIEASCRAVIEGIEYGLSR

SEQ ID NO: 107614 - DNA, 1575 bp, Rhodopseudomonas palustris CGA009
  CDS (1)..(1575): transl_table=11
atgaccaccaccacccagtccgaacaggaccgcgtcatcattttcgacaccaccttgcgcgacggcgagcagtgccccggcgccaccatgacgttcgaggagaagctgaacgtcgcccggatgctcgacgacatgggtgtcgacgtgatcgaggccggctacccgttcgcctccgatggtgacttcgaagcggtgcacgagatcgccaagcgctcgaagaattcggtgatctgcggtttgtcgcgcgccgcccacaaggacatcgaccgctgcgccgaagcgatcaagccggccgagcgcggccgcatccacaccttcctgtccacctcgccggtgcacatgaagtacaagctgcagatggaagcagcccaggtgtacgagatggtgatctcgtcggtgacgcgcgcgcgcaaccataccgacgacgtcgagtggtcggccgaggacgccacccgcaccgagttcgacttcctgtgccgctgcatcgaggccgcgatcaaggccggcgccaccaccatcaacctgcccgacaccgtcggctacgcggtgcctgaggagtaccgcgagttgttccgcaaggtgcgcgagacggtgccgaattccgacaaggcgcggttctcggtccactgccataacgacctgggcatggcggttgccaattcgatggccggcgtcgccggcggcgcgcgccagatcgaatgcaccatcaacggcatcggcgagcgcgctggtaacgccgccttggaagaggtggtgatggcgatgcgggtgcggcaggacaggttgccgtactggaaccggatcgagacgacaatgctgactcacgcctcgaagacggtgtcggccgcgacctcgttcccggtccagtacaacaaggcgatcgtcggccggaacgcgtttgcgcacgagagcggcatccaccaggacggcatgatcaagaacgcccagacctacgagatcatgaccccggagacggtgggcgtgaagggcacctcgctggtgatgggtaagcactccggccgcgccggcttgatccacaagatggaagagctgggctacaagctgtcgcgcaaccagatcgaggacgtgttcgtgcggttcaaggccttggccgaccgcaagaaggacgtctacgacgaggacatcgaggcgctggtcgacgagcaactgctgcacggccaagaccagatcaagctgatgtccttgacggtgatcgccggtacccacggcccgcagcgcgccaccatgaagctggacgtcgacggccagatccggatcgaggaagccgaaggcaacggcccggtggatgcggtgttcaactgcatcaaggcgctggtgccgcacgatgccaagctggaactgtatcaggtccatgccgtcaccgagggcaccgacgcgcaggcggaagtgtcggttcggctgagccatgaaggccgctcgatgaccgctcgcgcggccgatcccgacaccttggtggcgtcggcgaaggcttacctgggcgcgctcaacaagatcgtcgccaagcgtcagcgtagcgttcgcgaagatgcgccggcggtggcggtcgccggctga

SEQ ID NO: 107615 - protein, 524 aa, Rhodopseudomonas palustris CGA009
MTTTTQSEQDRVIIFDTTLRDGEQCPGATMTFEEKLNVARMLDDMGVDVIEAGYPFASDGDFEAVHEIAKRSKNSVICGLSRAAHKDIDRCAEAIKPAERGRIHTFLSTSPVHMKYKLQMEAAQVYEMVISSVTRARNHTDDVEWSAEDATRTEFDFLCRCIEAAIKAGATTINLPDTVGYAVPEEYRELFRKVRETVPNSDKARFSVHCHNDLGMAVANSMAGVAGGARQIECTINGIGERAGNAALEEVVMAMRVRQDRLPYWNRIETTMLTHASKTVSAATSFPVQYNKAIVGRNAFAHESGIHQDGMIKNAQTYEIMTPETVGVKGTSLVMGKHSGRAGLIHKMEELGYKLSRNQIEDVFVRFKALADRKKDVYDEDIEALVDEQLLHGQDQIKLMSLTVIAGTHGPQRATMKLDVDGQIRIEEAEGNGPVDAVFNCIKALVPHDAKLELYQVHAVTEGTDAQAEVSVRLSHEGRSMTARAADPDTLVASAKAYLGALNKIVAKRQRSVREDAPAVAVAG

SEQ ID NO: 107616 - DNA, 1539 bp, Geobacter sulfurreducens PCA; identical to SEQ ID NO: 13004
  CDS (1)..(1539): transl_table=11

SEQ ID NO: 107617 - protein, 512 aa, Geobacter sulfurreducens PCA; identical to SEQ ID NO: 13005

SEQ ID NO: 107618 - DNA, 1521 bp, Bacillus cereus ATCC 10987
  CDS (1)..(1521): transl_table=11
atgaagcagattttgttcatggatacgacgctacgtgatggcgaacaatcaccaggagtgaatttaaatgaacaagagaaattgcaaattgcaaggcaattagagagactagggatccatgttatggaagctggctttgcagcagcttccgaaggggattttcaatcggtaaaacgcatcgcgaatacaattcaaaatgctacagttatgagtttagctagagcaaaagaaagcgatattcgaagagcatatgaagctgtgaaaggtgcggtatctcctcgtttacacgtatttttagctacaagtgatattcatatgaaatataaactttgtatgtcaaaagaggatgtattagatagtattcatcgttctgttacacttggaaaatcattatttccaacagtacaattttctgcagaagatgcgacaagaacagcaagagattttttagctgaggcagtagaagttgcgattcgtgcaggagcgaatgtaattaatattccagatacagttggatatacgaatccagaagaatattattctctttttaagtacttacaagaatccgttccttcatatgaaaaagcaattttctcttgtcattgtcacgatgaccttgggatggctgtagcaaattcgctagctgcggttgaagggggagcattgcaagtagagggaacaattaatggaattggagagagagcagggaatgcggcattagaagaagtcgcagttgctcttcatattagaaaagatttctatcaagcagagccttctatgacgctaaaagaaattaaagcgacaagtacattagtaagcagattaacaggtatggttgtaccgaaaaataaagcaatcgttggagcgaatgcattcgctcatgaatccggaattcatcaagatggtgtattaaaagaagtgacaacgtatgaaattattgaaccagagttagtaggcgaatctcaaaacctatttgtacttggaaaacattctggacgtcacgcgtttacagaaaaaatgaaagagcttggctatgaatttacaacggaagaacgagatgcagtgtttgaagcgtttaaaaaattagctgatcgtaagaaggaaattactgaggaagatttacgagcacttatgcttggtgaagcagcatttgcggctcagcaatataatattacgcaactgcaagtacatttcgtatcaaatagtacacaatgtgcgacagttgtactaaaagatgaggaaggaaatgtattcgaagatgcagctactggctctggtagtattgaagcaatttataatgcaatccaaagaattttaggattagaatgtgaattggcggattatcgcatacaatctattacgcaaggtcaagatgcactggctcatgttcatgttgaattaaaagaaggaacacatcaagtatcaggttttggtgttgcgcaagacgtattggaagcgtcggcgagagcatatgtccacgcagcggggaaattgaaatcttttatccagcttgtgaaataa

SEQ ID NO: 107619 - protein, 506 aa, Bacillus cereus ATCC 10987
MKQILFMDTTLRDGEQSPGVNLNEQEKLQIARQLERLGIHVMEAGFAAASEGDFQSVKRIANTIQNATVMSLARAKESDIRRAYEAVKGAVSPRLHVFLATSDIHMKYKLCMSKEDVLDSIHRSVTLGKSLFPTVQFSAEDATRTARDFLAEAVEVAIRAGANVINIPDTVGYTNPEEYYSLFKYLQESVPSYEKAIFSCHCHDDLGMAVANSLAAVEGGALQVEGTINGIGERAGNAALEEVAVALHIRKDFYQAEPSMTLKEIKATSTLVSRLTGMVVPKNKAIVGANAFAHESGIHQDGVLKEVTTYEIIEPELVGESQNLFVLGKHSGRHAFTEKMKELGYEFTTEERDAVFEAFKKLADRKKEITEEDLRALMLGEAAFAAQQYNITQLQVHFVSNSTQCATVVLKDEEGNVFEDAATGSGSIEAIYNAIQRILGLECELADYRIQSITQGQDALAHVHVELKEGTHQVSGFGVAQDVLEASARAYVHAAGKLKSFIQLVK

SEQ ID NO: 107620 - DNA, 1545 bp, Methanococcus maripaludis S2; identical to SEQ ID NO: 13008
  CDS (1)..(1545): transl_table=11

SEQ ID NO: 107621 - protein, 514 aa, Methanococcus maripaludis S2; identical to SEQ ID NO: 13009

SEQ ID NO: 107622 - DNA, 1818 bp, Candida glabrata CBS 138
  CDS (1)..(1818)
atgagacaaacaattccaaattttgcagagcatgtctctcgtgcagccaagacaattgctccagtcaaattgggtttcaagaatatgcttgctaatccaagtgtcaaatatagaccatttcaaggcccaaaattgacaaatagacaatggcctaacaagacaattaagagagctccaagatggctttctaccgatttgagagatggtaaccaatctctcccggaccctatgtcagtagagcaaaagaaagaatactttcacaaacttgttgaaatcgggtttaaagagatagaagtcagttttccgtcagcatcgcaaaccgatttcgatttcacaagatacgctgtagaaaacgcaccagacgatgtttctatccagtgtcttgtccaatctagggagcatctgatcaagaggacagttgaagcattgaccggtgctaagcgtgctaccatacatacatacttggccacaagtgatatgttccgtgagattgttttcaatatgtctcaagaagaagccattgccaaagctgtagaagcaaccaagctagtacggaaattgaccaaggatgatccatctcaaaaagcaactaggtggtcttacgaattttctccagaatgttttagtgatacaccagtagaatttgccgttgaaatctgtgaggctgtgaaagctgcatgggaaccaacggttgataatcctattatctttaacttacctgcaaccgttgaagtagcaactccaaatgtatacgctgatcagatcgaatacttctctactcatattagcgaacgtgaaaaggtttgtatctccacccatgctcacaatgaccgtggctgtggcgttgctgctacagagttgggtatcttggctggtgctgatcgagttgaaggctgtatattcgggaatggtgaacgtacaggtaatgtcgacctggtaaccgtcgccttaaacatgtatacccagggtgtttctcccggtcttgacttttcagacatgagaagtgttatcgagatcgttgaacgttgtaacaagattccagtaccagctagagctccatatggtggtgaccttgttgtttgcgccttttcaggctctcaccaagatgctattaaaaaaggatttgctttacaacaaaagaagcgtgctcaaggtgaaactttatggaggattccatatttgccattagatccaaaggacatcggccgtgactatgaagcggttatcagggtcaactcacaatctggtaagggtggtgctgcttgggttattttaaggtctttgggtctagacaccccaagaaacatgcaaatgcaattctctaccattgtgcaaaatgaagctgacacaagaggcaaggaattatctgcagaggagattactgcattattcaagtctacctataattacaacaacgaaacccatcaatacgtatctttgctcgactatgatgtgaagaagattgacaacgaccgtagaatcctaacagggcaagttgaaattaacgacaagatcattccaattaagggtattggtaacggtcctatttcttctttagtagatgccctatcaaacttattcaacgtcaaatttggtgttgaaaactatacagaacatgctttaggttccggttccaaaacccaagccgcctctttcattcacatctcttacagagatgctgctaccaatgaaaaggagtacagttggggtgtcggtgtctctgaagatgttggtgaagcatctgttagggccattttctcaaccattaacagcattatccattcaggtgaagtcactcttcctactgaaaacaattag

SEQ ID NO: 107623 - protein, 605 aa, Candida glabrata CBS 138
MRQTIPNFAEHVSRAAKTIAPVKLGFKNMLANPSVKYRPFQGPKLTNRQWPNKTIKRAPRWLSTDLRDGNQSLPDPMSVEQKKEYFHKLVEIGFKEIEVSFPSASQTDFDFTRYAVENAPDDVSIQCLVQSREHLIKRTVEALTGAKRATIHTYLATSDMFREIVFNMSQEEAIAKAVEATKLVRKLTKDDPSQKATRWSYEFSPECFSDTPVEFAVEICEAVKAAWEPTVDNPIIFNLPATVEVATPNVYADQIEYFSTHISEREKVCISTHAHNDRGCGVAATELGILAGADRVEGCIFGNGERTGNVDLVTVALNMYTQGVSPGLDFSDMRSVIEIVERCNKIPVPARAPYGGDLVVCAFSGSHQDAIKKGFALQQKKRAQGETLWRIPYLPLDPKDIGRDYEAVIRVNSQSGKGGAAWVILRSLGLDTPRNMQMQFSTIVQNEADTRGKELSAEEITALFKSTYNYNNETHQYVSLLDYDVKKIDNDRRILTGQVEINDKIIPIKGIGNGPISSLVDALSNLFNVKFGVENYTEHALGSGSKTQAASFIHISYRDAATNEKEYSWGVGVSEDVGEASVRAIFSTINSIIHSGEVTLPTENN

SEQ ID NO: 107624 - DNA, 1827 bp, Candida glabrata CBS 138
  CDS (1)..(1827)
atgagagctaccgttatcagactctcgagggctgcgaagtcaattccgcccgtgaaattggcgtataagaacatgttgaaagacccttccatcaaatacaaaccattctccattgctccaaagcttactgacaggaaatggccagacaataccattaccaaggcaccaaggtggttgtctacagacttgagagacggtaaccagtctctcccggacccgatgtccattgagcagaagaaagagtacttccacaagctggtggagattggcttcaaagagatagaagtcagttttccatctgcctcgcagaccgacttcgatttcacaaggtacgctgtggagaatgctccagatgatgttaccatacagtgtcttgtgcaatccagagaacacttgatcagaagaactgtggagtcgttgactggtgccaagcgtgccactatacatacttacttggccaccagcgacatgttcagagagatagtcttcaacatgtctaaggaagacgctatcgccaaagccgtcgaagccactaaactggtcagaagcttgaccaaggacgacccttctcagcaggctacccgttggtcctatgagttctctccagaatgtttcagtgataccccagtcgaatttgccgttgaaatctgtgaagcagtaaaagctgcctgggaaccaaccgaggacaaccctatcatatttaacctacctgccacagtcgaggtcgcctctccaaacatctacgctgaccaaatcgaatatttctgcacacacatcaccgaaagagagaaggtgtgtgtctctacgcatacccacaacgaccgtggctgcggtgttgccgctaccgaacttggtataatggcaggcgctgatcgtgttgaaggttgtgtcttcggaaatggtgaacgtactggtaacgttgacttggtaaccgtggcattgaacatgtacacgcaaggtgtctctcctaacttggacttctccgacataaggtctgtaatcgaggttgttgaacgttgtaacaaattgcctgtcccagccagagcaccatacggtggtgacttggtcgtatgtgcattctctggttctcaccaggacgccatcaagaagggtttctcggttcaacaaaagaagcgtgaccaaggcgacattcaatggagaatcccatatttgccattggatccaaaggatatcggccgtgactacgaagctgtcatcagagtcaactctcaatctggtaagggtggtgctgcttgggttgtcctaagagccttgggcctagacatgccaagaaccatgcaaattgagttctccaccagtgtacaagaacacgctgactctctaggtagagaactaaaggccgaagagattgtcaacttgtttaaggaatcttacaactacaacaacgaaatcttccaacatatctctttggttgattacaacgttgagaaattcggtgctgagcgcagaattctaaatggtcaagttgaaatcaatggtgaagttgtcgacatcaagggtaccggtaacggtccaatctcttctttggtcgatgctttgtccaacttattgaacatcaaacttggtgtcagcaactatagtgaacactctttgggttcaggttcatccactcaagccgcttctttcatcaacttaacttacagacgtgatgaagataatgaaaaggcttaccaatggggtgtaggtgtgtctgaggatgttggtgatgcttctgtcaaggcaatctttgccactttgaattctgtaattcaaaaaggtgacattagtatcccaaagtctaagaaggctgcctctggttctgcttaa

SEQ ID NO: 107625 - protein, 608 aa, Candida glabrata CBS 138
MRATVIRLSRAAKSIPPVKLAYKNMLKDPSIKYKPFSIAPKLTDRKWPDNTITKAPRWLSTDLRDGNQSLPDPMSIEQKKEYFHKLVEIGFKEIEVSFPSASQTDFDFTRYAVENAPDDVTIQCLVQSREHLIRRTVESLTGAKRATIHTYLATSDMFREIVFNMSKEDAIAKAVEATKLVRSLTKDDPSQQATRWSYEFSPECFSDTPVEFAVEICEAVKAAWEPTEDNPIIFNLPATVEVASPNIYADQIEYFCTHITEREKVCVSTHTHNDRGCGVAATELGIMAGADRVEGCVFGNGERTGNVDLVTVALNMYTQGVSPNLDFSDIRSVIEVVERCNKLPVPARAPYGGDLVVCAFSGSHQDAIKKGFSVQQKKRDQGDIQWRIPYLPLDPKDIGRDYEAVIRVNSQSGKGGAAWVVLRALGLDMPRTMQIEFSTSVQEHADSLGRELKAEEIVNLFKESYNYNNEIFQHISLVDYNVEKFGAERRILNGQVEINGEVVDIKGTGNGPISSLVDALSNLLNIKLGVSNYSEHSLGSGSSTQAASFINLTYRRDEDNEKAYQWGVGVSEDVGDASVKAIFATLNSVIQKGDISIPKSKKAASGSA

SEQ ID NO: 107626 - DNA, 1830 bp, Kluyveromyces lactis NRRL Y-1140
  CDS (1)..(1830)
atgatattcaggaacaccgttgtgcgtttagcacaggctgggaaaaaagctattcctccagtgaaactagcgtacaagaatatgctaaaagatccatcgacgaaatatagaccatacccacagatcaacttggaaaatagacaatggccttcgaagaccatcaccaaggctcctaggtggctttctaccgatctaagagacgggaatcaatctttaccagatcctatgtctgtcgagcagaagaaggaatatttccataagttgattgagattggtttcaaagaaattgaggtctcattcccatctgcgtcgcaaacagatttcgacttcacaagatacgctgttgaaaacgccccagaagatgtttccattcaatgtcttgttcaatcgagagaacatttgattagaagaacagttgaagctttgcatggtgctaagaaagccaccatccatacgtatttggccacctccgacatgttccgtgacattgtgttcaacatgtcccaagaagaagctattgctaaagctgtggaagccaccaagttagttaggaaattgaccaaggatgatccttcgcaaagtgctacacaatggacttaccagttctctccagaatgtttcagtgatacacctgtagaatttgctgttgagatctgtgaagccgtaaaggctgcttgggaaccaactgaggaaaacccaatcattttcaacctacctgctaccgtcgaagtcgctactccaaacatttacgctgatcaaattgaatacttttcaactcacatatctgaacgtgaaaaggtctgtatctccacacatgcgcacaacgaccgtggctgtggtgttgctgcttctgaactaggtattttggctggtgctgaccgtgtcgaaggttgtttattcggtaatggtgaacgtactggtaacgttgacttggttactgtcgcattgaacatgtacactcaaggtgtttctccagaattagacttatctgatattaactcagtcattgaagtagtggaaagatgtaacaagattgcagtttcaccaagagccccatatggtggtgacttggtcgtttgtgctttcagtggttctcatcaagatgctatcaaaaagggtttcaatcttcaagaaaagagacgtagtcaaggtgatactctatggaaaattccatacttgccattggatccaaaggatatcggtagagactacgaagctgtcatccgtgtcaactctcaatctggtaaggggggtgccgcttgggttgtcttgagatctttgggcctagatttgccaagaaacttgcaaattgaattttccactcaagtgcaagaaaaggctgatgctctaggtaaggaactaaaggcaaacgaaattgtcagcaccttcaagtcgttatacaacctcgatggaagcgcctccaacatttctttgttagaatacaatgtttctaaagtacagggtgatcagaagagttttgttggtcaagtccagatcgacaacgaagtcgtcggcattgaaggtctcggaaacggtccaatttcctctctaatcgatgcgttgtcaaatttgctcggtgttaaacttggtgttgccaactacaccgaacattccttaggatctggttcttcaacaaaggctgcttcttacgtgcatattgcttacagaagagaaattgacaacgaaaaggcctaccaatggggtattggtatgtctgaagatgttggagaggcttctgccaaagccatcctttctgctgttaataacttgatcaaaaagggcgaactaacaataccagctcatcgtgactcagcctcagcatctgcatag

SEQ ID NO: 107627 - protein, 609 aa, Kluyveromyces lactis NRRL Y-1140
MIFRNTVVRLAQAGKKAIPPVKLAYKNMLKDPSTKYRPYPQINLENRQWPSKTITKAPRWLSTDLRDGNQSLPDPMSVEQKKEYFHKLIEIGFKEIEVSFPSASQTDFDFTRYAVENAPEDVSIQCLVQSREHLIRRTVEALHGAKKATIHTYLATSDMFRDIVFNMSQEEAIAKAVEATKLVRKLTKDDPSQSATQWTYQFSPECFSDTPVEFAVEICEAVKAAWEPTEENPIIFNLPATVEVATPNIYADQIEYFSTHISEREKVCISTHAHNDRGCGVAASELGILAGADRVEGCLFGNGERTGNVDLVTVALNMYTQGVSPELDLSDINSVIEVVERCNKIAVSPRAPYGGDLVVCAFSGSHQDAIKKGFNLQEKRRSQGDTLWKIPYLPLDPKDIGRDYEAVIRVNSQSGKGGAAWVVLRSLGLDLPRNLQIEFSTQVQEKADALGKELKANEIVSTFKSLYNLDGSASNISLLEYNVSKVQGDQKSFVGQVQIDNEVVGIEGLGNGPISSLIDALSNLLGVKLGVANYTEHSLGSGSSTKAASYVHIAYRREIDNEKAYQWGIGMSEDVGEASAKAILSAVNNLIKKGELTIPAHRDSASASA

SEQ ID NO: 107628 - DNA, 1728 bp, Yarrowia lipolytica CLIB122
  CDS (1)..(1728)
atgccctacctggccgatccctccaccaaatacaagccgttccccccgatcaatctgcccaaccggcagtggccgtcgaaaacgctgcagaagcccccgcggtggctgtcgacggacctgcgggacggcaaccagtcgctgccggatcccatgaccatggcggagaagaaggagtacttccagaagattgtcgacattggctacaaggagatcgaggtggcgttcccgtccgcctcgcaggtggactttgacttcacccgctttgcctgcgacaccgcccccgaagacgtgtggatccaggtgctggctccgtgccgagaggatctcatcacccgaaccgtcgagtccgtcaagggcgccaacaaggccatcatccacatctacctcgccacctccaagtgcttccgggacattgtcttcaaccattcgcgagaagaggccctggccaaggccgtggcatgcgccaagcacgtgcgagccctgaccaaggactcggacgaccccgagtgcaaaaagaccacctggggttttgagttctcccccgagaccttctccgacaccgacgtggactacgccattgaggtctgtgaggccgtgaaggccgcctggggcccctccgaggagaaccccatcattttcaacctccccgccaccgtcgaaatggccacccccaacatctacgccgaccagattgagtactttgccaccaacatttccgagcgggagaagatttgcatttctctgcacccccacaacgaccgaggttgtgccgtggctgctgccgagctgggccagatggccggagccgaccgagtcgagggctgtctgtttggcaacggcgagcgaaccggaaacgtcgacctcgtcactctgggtctgaatttgtacacccagggcgtgcatcccaagattgacttctccgacatcacctcgatcatcgacattgtggagcgatgcaacaagatccccgtgcacccccgagctccctacggcggccagctggtggtgtgtgccttctccggctctcaccaggacgccatcaagaagggctttgctcgaatcgaagacgtcaaggatgaggtggccgagggcaagcgacagtggcagatcccctacctgcctcttgaccccaaggacattggccgaacctacgaggcagtcattcgagtcaattcgcagtccggcaagggaggagccgcctggatcattctgcgatctctggagctcgatctgccccgaggcctgcaggttgccttctccaaggtggtccagaaggaggccgaggtggttggacaggagctgtctgcccagcagttggtggatctctttgagcgagagtacggcgtgtttgaggagcagcagggcaagtaccagctggacgactttgaggtgaccaacaagtccaaggaggagcgagagctgaccggagctctgaccgtcgagggcaagcgagtcgagctcaagggtaccggtaacggtcccatttcgtccttcctggatgccatcaagaacgcctttggctacaacctcgaggttctcaactaccacgagcactccattggtaagggttccaagaccaaggctgctacttacattgagctggcctatgaggaggacggcaagacttccaagcgatggggtgttggtattgacgaggatgtttcccaggcttctattcatgctattctgtctgccatgaacgccattagcgagtcctacaagaaataa

SEQ ID NO: 107629 - protein, 575 aa, Yarrowia lipolytica CLIB122
MPYLADPSTKYKPFPPINLPNRQWPSKTLQKPPRWLSTDLRDGNQSLPDPMTMAEKKEYFQKIVDIGYKEIEVAFPSASQVDFDFTRFACDTAPEDVWIQVLAPCREDLITRTVESVKGANKAIIHIYLATSKCFRDIVFNHSREEALAKAVACAKHVRALTKDSDDPECKKTTWGFEFSPETFSDTDVDYAIEVCEAVKAAWGPSEENPIIFNLPATVEMATPNIYADQIEYFATNISEREKICISLHPHNDRGCAVAAAELGQMAGADRVEGCLFGNGERTGNVDLVTLGLNLYTQGVHPKIDFSDITSIIDIVERCNKIPVHPRAPYGGQLVVCAFSGSHQDAIKKGFARIEDVKDEVAEGKRQWQIPYLPLDPKDIGRTYEAVIRVNSQSGKGGAAWIILRSLELDLPRGLQVAFSKVVQKEAEVVGQELSAQQLVDLFEREYGVFEEQQGKYQLDDFEVTNKSKEERELTGALTVEGKRVELKGTGNGPISSFLDAIKNAFGYNLEVLNYHEHSIGKGSKTKAATYIELAYEEDGKTSKRWGVGIDEDVSQASIHAILSAMNAISESYKK

SEQ ID NO: 107630 - DNA, 2076 bp, Aspergillus nidulans FGSC A4
  CDS (1)..(2076)
atggctgaacattactactatggctcgcagagtatgtcctcctctcagcccatctcatcactccaggcctttcttctcccatccctctgtacagcctttcttctctgttcattccccgctgcggtatcccccaccgaccgggttcacaaccacgccatgcctatgccattcaagcctctgagcctgccggaccgccaatggcccaataaggttatcgacaaacctccgcggtggctggccactgatctgcgagatggtaaccaaagtctgcctgaccctatggatggcgaacaaaaactccgcttcttcaagatgcttgtcgagattggctacaaggaaatcgaagtgtcgttcccgtctgcctcccagatcgactttgacttcacccgcagcctcgttgagacacccggtctgactcccgacgacgtttggctccaagtgctctctccttgccgtgaggacctgatccgccgcacagtagactccctcaagggggcgaagaaggcgattctgcacatctacctggcgacgagtccgtgcttccgacggatcgtgttcaacatggacaagcagcagagtctggagatggctgtccgctgcacaaagtacgcccgctccatcacgaaagacgatccttccacagcaggcaccgaatggcagcttgagttctcccccgagaccttctcagataccgagcctgaattcgccgcggaggtctgcgaggccgtcaaggccgcgtgggagcccactgcagagcgccctatcattttcaaccttcccgccacagtcgagatgaccacgcctaatgttttcgccgatcagattgaatacttctgccgcaatgtctcggagcgggaaaagtacgtcgtatctgtccatccccacaatgaccgaggctgcgccattgccgccgccgaattggcccagatggctggtgcccagcgagttgaaggtaccctgtttggcaacggtgagcggacgggtaacgtcgatctcgtcactctcgccctgaacctttacacgcaaggtatctcgcccaaggtcgacttttcagacatcaatgccgttataaaggttgtggaagagagcaacaagatccccgtcaacgagcgatggccgtatggtggtcagctggtcgtctgcgcgtttagcggtagtcaccaagatgccatcaagaagggattcaagctccgcgaagacgccggcgcatccgacgacatcaggtgggaaattccctaccttcctctggatcctcaggatatcggacgaacctacgaggcggttatccgcgtcaactcacagagcggcaagggtggtgctgcctgggtcattctgcgcactctggagctggatctcccgcgcgcactccaggtcgagttcagcaagattgtgcaaaagcgtacggaagaagccaaccgcgagctgcggcccgccgagattgtcgccctcttcgaggacgcgtaccacctcaagaccaacccccgtttcaatctggtcgactacaacatcaccacagaccgctcgcagtctcccgctcctccagagcccggcaaggcgctcaacacaaagaacctcaagcgtcgcttcactggtatcattgagattgatggccttcaacacgcgatcaccggcgtcggaaacggtgccctttcctccctcgccaatgccctcgcaaccctgggtatcgatctcgatgtcatcgactacaaggagcactctatcggtcagggggccggtaagggtcgtgatgtcaaggctgcgacatacattcactgcagtgctgctggtagccagcagaaagtatggggtgtcggtatccaccaggatgttgtccaagccagtttgattgcccttctgagcgctgcaagctctttcctcacaagccgagctggttcccctgctcccttccgccctatccgatccaacacacttaccgacgaagatctccaagcgctggagcagctcgccagctctaatggcgccggggtgaccgtggccaacgtctccgagggccagtccgactccaaacccacagtcgacctggaagccttaacgaaaaaggcggccagtcagtaa

SEQ ID NO: 107631 - protein, 691 aa, Aspergillus nidulans FGSC A4
MAEHYYYGSQSMSSSQPISSLQAFLLPSLCTAFLLCSFPAAVSPTDRVHNHAMPMPFKPLSLPDRQWPNKVIDKPPRWLATDLRDGNQSLPDPMDGEQKLRFFKMLVEIGYKEIEVSFPSASQIDFDFTRSLVETPGLTPDDVWLQVLSPCREDLIRRTVDSLKGAKKAILHIYLATSPCFRRIVFNMDKQQSLEMAVRCTKYARSITKDDPSTAGTEWQLEFSPETFSDTEPEFAAEVCEAVKAAWEPTAERPIIFNLPATVEMTTPNVFADQIEYFCRNVSEREKYVVSVHPHNDRGCAIAAAELAQMAGAQRVEGTLFGNGERTGNVDLVTLALNLYTQGISPKVDFSDINAVIKVVEESNKIPVNERWPYGGQLVVCAFSGSHQDAIKKGFKLREDAGASDDIRWEIPYLPLDPQDIGRTYEAVIRVNSQSGKGGAAWVILRTLELDLPRALQVEFSKIVQKRTEEANRELRPAEIVALFEDAYHLKTNPRFNLVDYNITTDRSQSPAPPEPGKALNTKNLKRRFTGIIEIDGLQHAITGVGNGALSSLANALATLGIDLDVIDYKEHSIGQGAGKGRDVKAATYIHCSAAGSQQKVWGVGIHQDVVQASLIALLSAASSFLTSRAGSPAPFRPIRSNTLTDEDLQALEQLASSNGAGVTVANVSEGQSDSKPTVDLEALTKKAASQ

SEQ ID NO: 107632 - DNA, 1926 bp, Ustilago maydis 521
  CDS (1)..(1926)
atggcgccaatgatcccaggtgacaagtacaagccctacacacccatccaccttgccaatcgaacgtggcccacaaaggtgcaaaccaagtcgccaatctggacctcggtcgatctaagagatggcaaccaggctctcattaaccccatgtccggcgagcagaagctcaagttttaccagaagctcgtcgaagtgggtttcaaggagatcgaagtcgccttcccttctgcttccgataccgactttggctttgttcgccacattatcgagcaaaacatgatccccgatgatgtctacattcaagtgctcactcccgcgcgtgaggagttgattcgacgtacgttcgagtccatcaagggcgccaaaaacgtcatcctgcacatgtacaacgcttcgtcgcccctcttccgcaacgtcgtgttcaacaactcacaagaacagacgatcgagcttgccgtacgacacaccaagatcgttcgtcaactcgtcgaccactattcgaaacccgaaaacggtggcaccaacttcaagtacgagtactcgcccgagacgtttacgcagaccgagatggactttgccgtcaagatctgcgaagaggtgcgcacagcttggggaaaagccagccacgataagccgatcatcttcaaccttccggccacagtcgaggtaggccctccgaaccactacgccgaccagatcgagtacttttgcaacaacatcaccgaccgcaagtcagtcattgtctcgctgcatccgcacaacgatcgaggctgtgcggtcgcagctaccgagctcggcttgcttgccggtggtgatcgtgtcgaaggctgcctgtttggcaacggcgagcgcacgggcaatgtcgacattgtcacgctggcgctcaacttgttttcgcagggtatccagccgggcgagctggacctttcagatattcagtcggtcgtcgacgtcgtcagtggatgcaacgatatccctgttcatcctcgtcatccgtatgcgggagacctcgtgttcaccgccttctccggaagccatcaggacgccatcaagaaaggtttcgccgcgcaggctaaacgcatctcggagggcgacaatacttgggaaatcccgtatctgcctatcgaccctgtcgaccttggatgcacgtacgaggctgtgatccgtgtcaactcgcaatcgggcaaaggcggtgttgcataccttgtggcgcagagtctgggactcgatctgccacgaaggatgcaggtggcgttctaccaggtgatccagcaagtcgccgatcgtacgggcaaggagatgacgagcgaagatatcacgcgcatctttacgcagacctaccacgttggctcgatcgcgtcgctcgcgtcgctgcaagtgggcgcagccgtggcgagcaagagcgaggctcgattcgctctgcgtggctattcgctctcggacgacctttcgagcagcattacttcggaagacgcagattcgggagttgagaccccgcgtcatcgtcgatttaccggtaagatcctgtaccagggcacggtgcacgagcttaccggcacgggtaacggtgcgctctcggcgttgctcgacgcgatcgagtcaacgtttggcatcaaggccgagattcgcgagtacagcgaacatgcgattacaaagtcgtcgtccctgcagaccggcgcggcgggcgccgccggcgccaatggtagcaaagcgcaagctgcaagttatgtggaacttatcgacccgcttcagaaggcgcagatcggcgagaaaaaggcgcccggtttctggggcgtcggtatcgatgtcgatatcaccactgcttcgctcaaggcggttctttcggcgcttagcaacatttcaaagcgcgaagctgtgattgctgacgcggtcaatgtcgcagtcgcagccaatggtaaacactag

SEQ ID NO: 107633 - protein, 641 aa, Ustilago maydis 521
MAPMIPGDKYKPYTPIHLANRTWPTKVQTKSPIWTSVDLRDGNQALINPMSGEQKLKFYQKLVEVGFKEIEVAFPSASDTDFGFVRHIIEQNMIPDDVYIQVLTPAREELIRRTFESIKGAKNVILHMYNASSPLFRNVVFNNSQEQTIELAVRHTKIVRQLVDHYSKPENGGTNFKYEYSPETFTQTEMDFAVKICEEVRTAWGKASHDKPIIFNLPATVEVGPPNHYADQIEYFCNNITDRKSVIVSLHPHNDRGCAVAATELGLLAGGDRVEGCLFGNGERTGNVDIVTLALNLFSQGIQPGELDLSDIQSVVDVVSGCNDIPVHPRHPYAGDLVFTAFSGSHQDAIKKGFAAQAKRISEGDNTWEIPYLPIDPVDLGCTYEAVIRVNSQSGKGGVAYLVAQSLGLDLPRRMQVAFYQVIQQVADRTGKEMTSEDITRIFTQTYHVGSIASLASLQVGAAVASKSEARFALRGYSLSDDLSSSITSEDADSGVETPRHRRFTGKILYQGTVHELTGTGNGALSALLDAIESTFGIKAEIREYSEHAITKSSSLQTGAAGAAGANGSKAQAASYVELIDPLQKAQIGEKKAPGFWGVGIDVDITTASLKAVLSALSNISKREAVIADAVNVAVAANGKH

SEQ ID NO: 107634 - DNA, 1641 bp, Prochlorococcus marinus str. MIT 9515
  CDS (1)..(1641): transl_table=11
atgtccaaagatccaggcagaatattgatctttgatacaactcttagagatggagaacaatctcctggcgcaagtttaaatcttgaagagaaacttgcaattgcgcatcaacttgcaagattaggtgtagatgttattgaagcaggttttccttttgcaagtcctggagatttcaaagcagtaaataaaatttcagaagtagttggaggagaaaatggtccaataatttgtggtttagcaagggcttctacaagtgatataaaagcttgttacgaagccataattcccgctcctaaaaaaagaatacatactttcatagctactagcgatatccacctaaaacataaactcaggaaatcaagaaaagatgttctttcaattgttcctgaaatggtcagttatgctaaatcattagtcgatgatattgaattttcctgtgaagatgcatcaaggagtgatcccgaattcctttatgaagtaattcaactagcaataacatcaggtgctacaacaattaatattcctgacactgttggcttcacgactccgagtgaatttgggaagcttatttttgatattaataaaaatgttccaaacattgatgaggcagttatttccgttcatggtcataatgatttaggattggcagttgcaaatttcctagaagcagcaaaaaatggagcaaggcaacttgaatgcaccattaatggtataggtgagagagctggaaatgcatcactagaagaattagtaatggcattacacgtaagaaaaagcttttttaatagtttctttggaagaagttcagattcacccacgcctcttacagcaataagaacagaagaaataacaaaaacttcacggttagtatcaaacttaactggaatgaatgttcagcccaataaagctattgttggagcaaatgcttttgctcatgagtcaggaatccatcaggatggagtactaaaaaataggcttacgtatgaaattattgatgcaaaaactgttggtttgaatgataataaaatctctttagggaaacttagtggtagaagtgcagttagagcaagattagaagagatgggatacgatttaagtagggaagatttgaatgatgcatttgctcgtttcaaagatctagctgatagaaaacgagaaattactgatagagatttagaagctatcgttagtgaacaggttcaacttcctgaatctaggtttcaactaagtcacgttcaagttagttgtggcagtacatctaagcctacagctacagttactatattaaatacagagacacatactgaagatacttctgttgccataggtactggacctgtagatgcggtttgcgaagcaataaatgaacttgctaaagttccaaatgaattaattgagttttcagttaaatctgtgacggaaggtatagatgcattaggtgaagttaccataagaattaggaataagaataaaatatattcaggacattctgcagatacagacgtggttgttgcagctgcaaatgcttttttaaatgctttaaacaggcttatcttttcagaaaaaaaagaatgtattcatccccaatttgataatttagaaaattctgaaaaaaaagtattttcaaatcccaaaaattaa

SEQ ID NO: 107635 - protein, 546 aa, Prochlorococcus marinus str. MIT 9515
MSKDPGRILIFDTTLRDGEQSPGASLNLEEKLAIAHQLARLGVDVIEAGFPFASPGDFKAVNKISEVVGGENGPIICGLARASTSDIKACYEAIIPAPKKRIHTFIATSDIHLKHKLRKSRKDVLSIVPEMVSYAKSLVDDIEFSCEDASRSDPEFLYEVIQLAITSGATTINIPDTVGFTTPSEFGKLIFDINKNVPNIDEAVISVHGHNDLGLAVANFLEAAKNGARQLECTINGIGERAGNASLEELVMALHVRKSFFNSFFGRSSDSPTPLTAIRTEEITKTSRLVSNLTGMNVQPNKAIVGANAFAHESGIHQDGVLKNRLTYEIIDAKTVGLNDNKISLGKLSGRSAVRARLEEMGYDLSREDLNDAFARFKDLADRKREITDRDLEAIVSEQVQLPESRFQLSHVQVSCGSTSKPTATVTILNTETHTEDTSVAIGTGPVDAVCEAINELAKVPNELIEFSVKSVTEGIDALGEVTIRIRNKNKIYSGHSADTDVVVAAANAFLNALNRLIFSEKKECIHPQFDNLENSEKKVFSNPKN

SEQ ID NO: 107636 - DNA, 1620 bp, Prochlorococcus marinus str. NATL1A
  CDS (1)..(1620): transl_table=11
atggccaaagatccgggccgagttttaatttttgacactacattaagagatggagagcaatctcctggagctagtcttaatttagaagaaaagttagctattgctcaacaattagcaagattaggagttgatgttattgaggcaggattcccttttgctagccctggggatttcgctgcagttcagaaaatagctgagaatgtaggaggagaagaaggacctatcatttgcggactatcaagagcctcaaaacctgatatcaaagcttgtgccaatgcgattgctccagccccaaaaaaaaggattcataccttcattgcaacaagtgatatacatcttgaacataaattaaggaaatccagaaaagaagtacttgatatcgttccagatatggttggctatgctaaaagttttgttgatgacgttgaattttcctgtgaagatgcagcaagaagtgatttagattttctttatgaagtaatagaactagccatatcctcaggggctaatacaataaatattccagatacagttggttatataaccccttctgaatttggagatttgatattaaatatcaacgaaaatgttccaaatatcaatgaggcagttctgtcagttcatggtcacaacgatttaggacttgctgtcgcaaacttccttgaagctgtaaagaatggagctagacaacttgaatgcaccattaacggaataggtgagagagcaggtaatgctgctttagaagaattaatcatggcgcttcatgtaagaagatcatattttaatccattttttgggaggcctcctgaatcccctactcctttgacagcagttagaacagaggagataactaagtcttctcgcttggtttcaaatttgactgggatggtcgtacaaccgaacaaagcaattgttggggcaaacgcttttgcgcatgaatctggaatacaccaagatggagtattgaaaaataggcttacatatgaaattatcgatgcaaaaacagtagggttgtctgacaataagatttctttgggaaaattaagtggtaggagtgctgttcgagcaagattagaggaccttggatatgatttaaacagagaagatcttaatgacgctttcgctagatttaaagatttagccgatagaaaaagagagataacagatcgtgatctagaggccattgttagtgaacaagttcagctgccagaagcattgttccaattaaaattggtccaagtaagctgtggcacttctctaatgccaactgcaacagtaactgttgttggagaagatggagaggagaagaccgccgtctctcttggaacaggtcctgttgatgcagtagtacgagccttggattccctaactgaagaacctaatgaattgattgaattctcagtaaagtcagttacagaggggatagatgctctgggtgaagttactattagaataagaagagatggaaatctcttttctggccattctgcagatactgacgttgttgttgccgctgctcaagcatacataaatgctcttaatagattagtagctgctcatggaaggaaatccattcatccacaacatgatttggctaaggtagacaaaaaagggatttga

SEQ ID NO: 107637 - protein, 539 aa, Prochlorococcus marinus str. NATL1A
MAKDPGRVLIFDTTLRDGEQSPGASLNLEEKLAIAQQLARLGVDVIEAGFPFASPGDFAAVQKIAENVGGEEGPIICGLSRASKPDIKACANAIAPAPKKRIHTFIATSDIHLEHKLRKSRKEVLDIVPDMVGYAKSFVDDVEFSCEDAARSDLDFLYEVIELAISSGANTINIPDTVGYITPSEFGDLILNINENVPNINEAVLSVHGHNDLGLAVANFLEAVKNGARQLECTINGIGERAGNAALEELIMALHVRRSYFNPFFGRPPESPTPLTAVRTEEITKSSRLVSNLTGMVVQPNKAIVGANAFAHESGIHQDGVLKNRLTYEIIDAKTVGLSDNKISLGKLSGRSAVRARLEDLGYDLNREDLNDAFARFKDLADRKREITDRDLEAIVSEQVQLPEALFQLKLVQVSCGTSLMPTATVTVVGEDGEEKTAVSLGTGPVDAVVRALDSLTEEPNELIEFSVKSVTEGIDALGEVTIRIRRDGNLFSGHSADTDVVVAAAQAYINALNRLVAAHGRKSIHPQHDLAKVDKKGI

SEQ ID NO: 107638 - DNA, 1623 bp, Prochlorococcus marinus str. MIT 9303; identical to SEQ ID NO: 13036
  CDS (1)..(1623): transl_table=11

SEQ ID NO: 107639 - protein, 540 aa, Prochlorococcus marinus str. MIT 9303; identical to SEQ ID NO: 13037

SEQ ID NO: 107640 - DNA, 1536 bp, Clostridium thermocellum ATCC 27405
  CDS (1)..(1536): transl_table=11
atgaggagaataagaatttttgatacaactttaagagacggagaacaaacaccgggggtaaatcttaatatacaggaaaaagtggatattgcaaaacaattggcacgtcttggagtggatgttatcgaaccgggattcccgctgacatcaccgggagattttgaagctgtgcagagaattgccagagaggttgaggggccttatatatgcggcttttcaagagcaattataagagatattgatgagacctggaaagctataaaagatgctcagaagaaatgtttccatatttttatatccagctccgacatacaaataaagcaccagttggggaaaacggaaaaagacgttcttgaaattgtaaaaagcactgtatatcatgcaaagcagtataccgacgaggtagaatactcgccgatggatgcatcgagaacaaggctcgagttcctttatgaagttattgaagcggcaatagacaacggtgccacagtcataaacattccggacaccgttggatatgcaactcccattgagttcggagaactcatacaaaaaatcagaaagaatgtaagaaatattgacaaggctataataagtgtccattgtcacaacgacctgggcatggctgtggccaactccattgttgctgctatgaatggcgcccagcagatagagtgtactatcaacggcgtgggtgaaagggcaggaaatgcagctttggaggaagttgttacccacattgcggcaaggaaagattatctgggatttgaaacgggaatagatctttcacagttgtataaaaccagtaaaattgtcagcagatacatgggaatacccataccggtaaacaaacctatagttggtaaaaatgtgtttactcatgagtcgggaatacatcaggacggtgtcctgaaggaaagatcaacttatgaagtaatagatccaaggcttgtcggcagggatgacagtgttattctccttggaaagcactcgggaaggcatgctcttaaagtggaagctgaaaaactcggatatgacttggatgaggaacgtctcaacaagctgtttaatgattttaaaaagcttaccgacgttaaaaagaatgtgactacggcggacttggaatctcttataattgaatccgccgcaaaagccgtggaagaggcatatgtgcttgaaaagataagagttgtaagcggcaatattgagacgccttccgcaaaagttgtgattaaagattcaaagggcaatttgctcgaagccgagcagacaggaaacggaccggtggatgctgtttttaaagctataaattctgttattaaagagacggaaaatcttacgttatacaaatacagtgtgtccgccgtaacggaagaaatggagtcattgggtgaagtttctgtgactctcagggaaaaggaaaaattatatacgggcataggtacacataccgacataattacttcaagtgccatagcctatattgatgcaattaataaagctattgcagcaaatgcgagagcacaaaaaaattaa

SEQ ID NO: 107641 - protein, 511 aa, Clostridium thermocellum ATCC 27405
MRRIRIFDTTLRDGEQTPGVNLNIQEKVDIAKQLARLGVDVIEPGFPLTSPGDFEAVQRIAREVEGPYICGFSRAIIRDIDETWKAIKDAQKKCFHIFISSSDIQIKHQLGKTEKDVLEIVKSTVYHAKQYTDEVEYSPMDASRTRLEFLYEVIEAAIDNGATVINIPDTVGYATPIEFGELIQKIRKNVRNIDKAIISVHCHNDLGMAVANSIVAAMNGAQQIECTINGVGERAGNAALEEVVTHIAARKDYLGFETGIDLSQLYKTSKIVSRYMGIPIPVNKPIVGKNVFTHESGIHQDGVLKERSTYEVIDPRLVGRDDSVILLGKHSGRHALKVEAEKLGYDLDEERLNKLFNDFKKLTDVKKNVTTADLESLIIESAAKAVEEAYVLEKIRVVSGNIETPSAKVVIKDSKGNLLEAEQTGNGPVDAVFKAINSVIKETENLTLYKYSVSAVTEEMESLGEVSVTLREKEKLYTGIGTHTDIITSSAIAYIDAINKAIAANARAQKN

SEQ ID NO: 107642 - DNA, 1620 bp, Clostridium thermocellum ATCC 27405
  CDS (1)..(1620): transl_table=11
ttgggaattgtaaagcattttttcaggaaggatgaaaagatgaagaagattttgatatatgactctaccttaagggatggtgcccaggcacagggtatttcgttcagtgttgaagataaactgaaaattgtggagagacttgaccggctcggtataagctatattgaagcaggtaacccgggctccaacccaaaggatttggagttttttgacagaatagggcgggtcaagttaaggcatgcaaaaataatcgcctttggaagtaccagaagagtcaatgtaagtgttcaggaggatgccaatgtaaaatcgcttttaaaggcggacactccggctgtggccatattcggcaaaagctgggactttcatgttaccgatattttaaagacaacactggatgaaaatttgagaatgatttttgacaccatatccttctttaagaacaaaaataaagaagtggtttttgatgctgagcatttctttgacggatacaaggccaacccggattatgcaatgaaaaccctcaaaactgctgttgaggccggagcggactgtatttgcctttgcgataccaatggaggaacattcccgaatgaaatcaaggatattaccgccagggttgtgagcgagtttaacgtgaatgtcggtattcattgccacaatgacacgggcatggcggttgccaactccattatggcggtgctggccggtgccgtgcaggttcaggggacaatgaacgggtttggagagagaagcggtaatgccaatctctgcacaataatacccaatttgcagcttaaagcaggctatgattgcataccgcaggaaaacatggcggaccttacggctactgcaaggtccataagtgaaattgccaatgttatacatgatgaaagggctccgtatgtagggaaatatgcatttgcccacaaggcgggaatgcatgcggatgcggtaaccaaaaactccatagcttacgaacacatcaaccctgaagttgtcggaaacgaaaggctttttctcatgtcggaagttgcgggaagaagcgctgtgcttcatttaatcaaaaatattgacagcactattacaaaggattctcccgagacaaaattgatactggacaagctcaaggagctggaatttgaaggctatcagtacgaaggtgcggagagttcttttgaaattgtgattcggaaaatccttggaaaataccgtccttcctttgaacttggagagtttaaggttgtggttaacgaaccgtctattagcggtgcgaattcttccgccatgataaagattaatgtggacggacagtatgagataaccgcggatgagggacagggtccggtaaatgcgctggacaaggcgctaagaaaggctttggagaaattttatcctcagattgcggaaatgaagcttaccgactacaaagttagggttcttgattccaactcggctacggctgcaaaggtaagggttttaattgagtcaaccgacggtaaagaagtctggacaaccattggagtttcaacggacattattgaagccagctggaaggcgttggtggattctatagaatacaagcttatcaaggacaaggaagcaaaacaaaagtcttaa

SEQ ID NO: 107643 - protein, 539 aa, Clostridium thermocellum ATCC 27405
MGIVKHFFRKDEKMKKILIYDSTLRDGAQAQGISFSVEDKLKIVERLDRLGISYIEAGNPGSNPKDLEFFDRIGRVKLRHAKIIAFGSTRRVNVSVQEDANVKSLLKADTPAVAIFGKSWDFHVTDILKTTLDENLRMIFDTISFFKNKNKEVVFDAEHFFDGYKANPDYAMKTLKTAVEAGADCICLCDTNGGTFPNEIKDITARVVSEFNVNVGIHCHNDTGMAVANSIMAVLAGAVQVQGTMNGFGERSGNANLCTIIPNLQLKAGYDCIPQENMADLTATARSISEIANVIHDERAPYVGKYAFAHKAGMHADAVTKNSIAYEHINPEVVGNERLFLMSEVAGRSAVLHLIKNIDSTITKDSPETKLILDKLKELEFEGYQYEGAESSFEIVIRKILGKYRPSFELGEFKVVVNEPSISGANSSAMIKINVDGQYEITADEGQGPVNALDKALRKALEKFYPQIAEMKLTDYKVRVLDSNSATAAKVRVLIESTDGKEVWTTIGVSTDIIEASWKALVDSIEYKLIKDKEAKQKS

SEQ ID NO: 107644 - DNA, 1560 bp, Herminiimonas arsenicoxydans
  CDS (1)..(1560): transl_table=11
atgagcaccgatctgcgcgacggcaatcagtcgctgatcgagccgatgaaccacgacaagaaactgcgttttttcgacatgctggtgaagataggcttgaaggaaatcgaagtcgccttcccctccgcatcgcaaaccgattttgatttcgtccgacgcctgatagaagaaaagcgcattcctgacgacgtgacgatcgaagtgctgacgccggcacgcgaagacctgatccgccgcaccgtcgaatcggtagtcggtgctcgccgcgccatcattcatctgtataacgccactgcccctgcgttccgtcgcatcgtcttcaatatgtcgcgcgacgaggtgaaggccttggctgtggccggtgccaaactggtacgcgaactgaccgatgcgcatccggaaacggaatgggtattccagtattcgccggaagcattcagcatgaccgagctcgaattttccaaggaaatatgcgatgcggtttctgccacctggcaaccgacaccggaacgcaagatgatcttcaatctgcccggcacggtggaagccagcacacccaatgtgtatgccgatcaggtcgaatggatgcatcgcaatctcgcacgccgcgactccatcctgatcagcgtgcatccgcacaacgacaggggctgcgcggtagcggcggcggaactggctgtgatggcaggcgccgatcgtgtcgaaggctgcctgttcggcaatggcgaacgcaccggcaacgtcgatctggtcacactggccctgaatctttactcacaaggcatcagccccggacttgatttttcggatatcgatgcagtccgtcaatgcgtggaggaatgcaaccagattcctgtacatccgcgccatccgtatgtcggcgatctggtctacaccgcattctccggttcgcatcaggatgccatcaagaagggttttgcccagcagcagcctgacgcgatctgggaagtgccgtacatgcccgtcgatccggccgatctggggcgcagctacgatgcggtcattcgcgtcaacagccagtcgggcaaaggcggcatgacttatttgctggaacaggaatacggcctggtattgccgcgccgcctgcaaatcgaattcagccgtgccgtgcagcgcatcaccgacgagaccggcggcgaagtggcggccaacgatatccacacgattttcaacaatgagtatttgaatgccgtgacgccttatcaatatcgcagccaccatattgatgaatcacagggcaacgccgaagtacgcatccgggtcgaactggagaaggacggcaaaccggtcacattgcagggtgcaggcaacgggcctatcgacgccttcatcaatgcattgggcatggatatcaggctgatggactttcacgaacatgcaatcggtgccggcgccaatgccaatgccgccagctatgtcgaactgcgcgtgaataatggaagcacccgctttggcgtcggtatagacggcaacatcgtgaccgcttcgctgcgcgccgtattgagcgcagtcaatcgcgacattgccttagccgcctag

SEQ ID NO: 107645 - protein, 519 aa, Herminiimonas arsenicoxydans
MSTDLRDGNQSLIEPMNHDKKLRFFDMLVKIGLKEIEVAFPSASQTDFDFVRRLIEEKRIPDDVTIEVLTPAREDLIRRTVESVVGARRAIIHLYNATAPAFRRIVFNMSRDEVKALAVAGAKLVRELTDAHPETEWVFQYSPEAFSMTELEFSKEICDAVSATWQPTPERKMIFNLPGTVEASTPNVYADQVEWMHRNLARRDSILISVHPHNDRGCAVAAAELAVMAGADRVEGCLFGNGERTGNVDLVTLALNLYSQGISPGLDFSDIDAVRQCVEECNQIPVHPRHPYVGDLVYTAFSGSHQDAIKKGFAQQQPDAIWEVPYMPVDPADLGRSYDAVIRVNSQSGKGGMTYLLEQEYGLVLPRRLQIEFSRAVQRITDETGGEVAANDIHTIFNNEYLNAVTPYQYRSHHIDESQGNAEVRIRVELEKDGKPVTLQGAGNGPIDAFINALGMDIRLMDFHEHAIGAGANANAASYVELRVNNGSTRFGVGIDGNIVTASLRAVLSAVNRDIALAA

SEQ ID NO: 107646 - DNA, 1548 bp, Herminiimonas arsenicoxydans
  CDS (1)..(1548): transl_table=11
atggcagtcgattcaaataaactgattatttttgataccaccttgcgcgatggcgaacagtcgccgggtgcatcgatgaccagggatgaaaaaatccgcatcgccagacagctggagcgtctgaaggtcgatattatcgaagccggttttgctgccgcctcacaaggtgatttcgaatcaatccatgcaatctccggcatcatcaaggatgcaacggtttgttctttgtcgcgcgccaacgataaggatatcgcgcgtgcagcagaggcgctgaaaccggcggcaagaaagcggattcacacttttcttgcgacttcaccgttgcatatggaaaaaaagctgcgcatgacgccggatcaggtattcgagcaagccaagatcgcagtgcgttatgcacggcaatttaccgatgatgtcgagttcagtccggaagacggcagccgttcggatatggattttctgtgtcgcgtgattgaagctgtgatcaaggaaggtgcaacgaccatcaactttgccgacacggttggttacgccgtgcctgagttgtacggcaacatgctgcggaccttgcgtgagcgtattccgaattccgacaaggcggtctggtcagttcattgccacaacgatcttggcatgggggttgccaattcgctcgccggcgtcatgataggcggcgcgcgccaggttgagtgcacgatcaacggtttgggtgagcgcgcaggcaataccgcgctggaagaaatcgtgatggccgtgcgtacgcgcaaggactacttcaatctggaaattggcgtcgatgctacacagatcgtcccgacttccaaactggtttcgcagattaccggttttgccgtgcagccgaacaaatcggtggtgggtgcaaacgcatttgcacatgcatcggggatacaccaggacggcgtgctgaaggcgcgcgatacctatgaaatcatgcgtgccgaagacgtgggctggtctgccaataaaatcgtcctgggcaagctgtcaggtcgcaatgccttcaagcaacgtcttgaggaattggggatcaccatggaatcggctgcggatacggatgccgcattcatacgcttcaaggaactggccgatcgcaagtctgagatctttgatgaagacatcatggccctggtatccgacgagcagcattcgcatgaacacgaatactacaatttcgtttccctgacgcagcaatcgtccagtgcaagcaaacctgttgccagtgtcgtattttcgatgggcggcaaggaagaaatctgcaaaggtgagggcaatggtccggttgatgcaatcgtcaatgccattgaatcgaaagtggcaagcggggcggaattgctgctgttttcagtcaatgcgattactaccggtaccgaatcccagggcgaagtcacgatgcgtttgtcgaaggctggtcgtatcgtcaatggcgtcggtgcggatcttgatatcgtcgtggcctcggcaaaagcctacatctctgcgctgaataaattgcattcgaagatagaaaagctgaatcctcagctttaa

SEQ ID NO: 107647 - protein, 515 aa, Herminiimonas arsenicoxydans
MAVDSNKLIIFDTTLRDGEQSPGASMTRDEKIRIARQLERLKVDIIEAGFAAASQGDFESIHAISGIIKDATVCSLSRANDKDIARAAEALKPAARKRIHTFLATSPLHMEKKLRMTPDQVFEQAKIAVRYARQFTDDVEFSPEDGSRSDMDFLCRVIEAVIKEGATTINFADTVGYAVPELYGNMLRTLRERIPNSDKAVWSVHCHNDLGMGVANSLAGVMIGGARQVECTINGLGERAGNTALEEIVMAVRTRKDYFNLEIGVDATQIVPTSKLVSQITGFAVQPNKSVVGANAFAHASGIHQDGVLKARDTYEIMRAEDVGWSANKIVLGKLSGRNAFKQRLEELGITMESAADTDAAFIRFKELADRKSEIFDEDIMALVSDEQHSHEHEYYNFVSLTQQSSSASKPVASVVFSMGGKEEICKGEGNGPVDAIVNAIESKVASGAELLLFSVNAITTGTESQGEVTMRLSKAGRIVNGVGADLDIVVASAKAYISALNKLHSKIEKLNPQL

SEQ ID NO: 107648 - DNA, 1545 bp, Burkholderia vietnamiensis G4; identical to SEQ ID NO: 13042
  CDS (1)..(1545): transl_table=11

SEQ ID NO: 107649 - protein, 514 aa, Burkholderia vietnamiensis G4; identical to SEQ ID NO: 13043

SEQ ID NO: 107650 - DNA, 1599 bp, Bradyrhizobium sp. ORS278
  CDS (1)..(1599): transl_table=11
atgagcagagaacgcctctatctgttcgacaccaccctgcgcgacggcgcacagaccaacggtgtcgatttcacgctgaccgacaagcaggtgatcgcgcgtctgctcgacgatctcggcatcgactatgtcgaaggcggatatcccggcgccaacccgctcgacaccgagttcttcgccgacaagcccaagctcggccatgcccgcttcacggcgttcggcatgacccggcgtgcagggcgctcggtctccaacgatccgggcgtcgcggcgctgctggaggccaaggcggacgccatctgcttcgtggccaagtcctcggcctatcaggtgcgcgtcgcgctcgagaccacaaacgaggagaacctcgcctcgatcagagacagcgtcaccgcggccaaggcggccgggcgcgaggtgatgctcgactgcgagcacttcttcgacggctacaaggagaatgcggcgttcgcgctggcctgcgcccgcaccgcctatgaggcgggcgcacgctgggtcgtgctgtgcgacaccaatggcggcaccatgccgcacgagatcgaggctgttgttggcgaggtcgtgaagcacgtgccgggcgatcatctcggcattcatgcccataacgacaccgagcaggcggtggcgaactcgctggccgcggtccgcgccggcgtgcgccagatccagggaacgttgaatggcctcggcgagcgctgcggcaatgccaatctgtgctccctgatcccgaccttgaagctgaaggccgagttctcggagcgcttcgagatcggcgtctccgaccagcagctcgccgggctgatgaaggtgtcgcgcacgctcgacgacatgctcaaccgcgcgccgaaccggcacgcgccctatgtcggcgagagcgctttcgttaccaagaccggcattcatgcgtctgccgtgctgaaggatccgcacacctatgagcacgtgctgccagagagcgtcggcaatcaccggaaagtcctggtgtcggatcaggccggccgctccaacgtcatcgcggcgctcgagcgtggcggcattcccttcagcaagagcgatccgaagctgacgcggctcgtcgaggagctgaaggagcgcgaggcgctgggttacgcctatgagtccgccaacgcctcgttcgagctcctggcccggcgcacgctgggctcggtgccggagtatttccgggtcgagcagttcgatgtcaacgtcgagcagcgctacaacgcgctcggcgagcgcgtcacggtggcgctggcggtggtgaaggtcgatgtcgccggcgagcggctgatctcggcggccgaaggcaatggcccggtcaacgcgctcgacgttgccttgcgcaaggatctcggcaagtatcagggtttcatcgacggattgaagctgatcgactaccgcgtccgcatcctcaacggcggcaccgaggcggtgacgcgcgtgctgatcgagagcgaggacgagaccggcgagcgctggaccacggtcggcgtctcgcccaacatcatcgacgcctcattccaggcgctgatggattcggtgttctacaagctggtgaagtcgggcgcggcggggtga

SEQ ID NO: 107651 - protein, 532 aa, Bradyrhizobium sp. ORS278
MSRERLYLFDTTLRDGAQTNGVDFTLTDKQVIARLLDDLGIDYVEGGYPGANPLDTEFFADKPKLGHARFTAFGMTRRAGRSVSNDPGVAALLEAKADAICFVAKSSAYQVRVALETTNEENLASIRDSVTAAKAAGREVMLDCEHFFDGYKENAAFALACARTAYEAGARWVVLCDTNGGTMPHEIEAVVGEVVKHVPGDHLGIHAHNDTEQAVANSLAAVRAGVRQIQGTLNGLGERCGNANLCSLIPTLKLKAEFSERFEIGVSDQQLAGLMKVSRTLDDMLNRAPNRHAPYVGESAFVTKTGIHASAVLKDPHTYEHVLPESVGNHRKVLVSDQAGRSNVIAALERGGIPFSKSDPKLTRLVEELKEREALGYAYESANASFELLARRTLGSVPEYFRVEQFDVNVEQRYNALGERVTVALAVVKVDVAGERLISAAEGNGPVNALDVALRKDLGKYQGFIDGLKLIDYRVRILNGGTEAVTRVLIESEDETGERWTTVGVSPNIIDASFQALMDSVFYKLVKSGAAG

SEQ ID NO: 107652 - DNA, 1578 bp, Bradyrhizobium sp. ORS278
  CDS (1)..(1578): transl_table=11
atgtccaatcccgttcagtccgacaaggaccgcgtcgtcattttcgacaccaccctgcgcgacggcgagcagtgccccggcgccaccatgacgttcgaggagaagctcaacatcgccgccatgctggacgacatgggcgtcgacatcatcgaggccggcttcccgattgcctctgacggcgacttcgaggccgtcaacgagatcgccaagcggtcgaagaacgcggtgatctgcggcctgtcgcgcgccggcgccaaggacatcgatcgctgcgccgaggcgatccgcccggccaagcgcggccgcatccacaccttcctgtccacctcgccggtgcatatgaagtacaagctgcagatggatccgcagcaggtgttcgaactggtgatctcctcggtgacccgcgcgcgcaaccacaccgacgacgtcgagtggtcgtcggaggacggcacccgcaccgagttcgacttcctgtgccgctgcgtcgaggccgcgatcaaggccggcgccagcaccatcaacatcccggacaccgtcggctacgccgtgccggaggagtattacgacctgttcaagcgggtgcgcgagacggtgccgaactccgacaaggccgtgttctccgtccactgccacaacgatctcggcatggcggtcgccaactcgatggccggcgtgcgcgccggcgcccgccagatcgaatgcacaatcaacggcatcggcgagcgcgccggcaacgcggcgctcgaagaggtcgtgatggcgatgcgcgtgcgcaacgacaagctgccgttctggaacaagatcgacaccacgcagctgactcatgcctcgaaggtggtgtcggcggcgacctcgttcccggtgcagtacaacaaggccatcgtcggccgcaacgccttcgcgcatgagagcggcatccatcaggacggcatgctgaagaacgcgcagacctacgagatcatgctgccagagacggtcggcgtgaagcagacctcgctggtgatgggcaagcattccggccgtcacgccttcatccacaagctggaggagatgggccacaagctgtcgagcaaccaggtcgaggatgccttcgtccgcttcaaggcgctggccgatcgcaagaagcagatctacgacgaggacatcgaggccctgatcgacgagggcatggtgagcgcccatgaccgcatcaagctgctgtctttgagcgtgatcgccggcacccgcggcccgcagcgcgcgaccatgaagctcgacatcgacggcgtgaccaggatcgaggagagcgagggcaacggtccggtcgatgcggtgttcaactgcatcaagtcgctggtgccgcacgaggccaagctggagctgtaccaggtccatgccgtcaccgagggcaccgacgcgcaggccgaagtctcggtgcggctgtcgcaggacggccgctcgatgaccgcgcgcgccgcagatccggacacgctggtcgcctcggccaaggcctatctcggagcgctgaacaagctggtcatgaagcgccagcgcgatgtcgcgccagggcatggcgcctcggcggccgcggcgagctga

SEQ ID NO: 107653 - protein, 525 aa, Bradyrhizobium sp. ORS278
MSNPVQSDKDRVVIFDTTLRDGEQCPGATMTFEEKLNIAAMLDDMGVDIIEAGFPIASDGDFEAVNEIAKRSKNAVICGLSRAGAKDIDRCAEAIRPAKRGRIHTFLSTSPVHMKYKLQMDPQQVFELVISSVTRARNHTDDVEWSSEDGTRTEFDFLCRCVEAAIKAGASTINIPDTVGYAVPEEYYDLFKRVRETVPNSDKAVFSVHCHNDLGMAVANSMAGVRAGARQIECTINGIGERAGNAALEEVVMAMRVRNDKLPFWNKIDTTQLTHASKVVSAATSFPVQYNKAIVGRNAFAHESGIHQDGMLKNAQTYEIMLPETVGVKQTSLVMGKHSGRHAFIHKLEEMGHKLSSNQVEDAFVRFKALADRKKQIYDEDIEALIDEGMVSAHDRIKLLSLSVIAGTRGPQRATMKLDIDGVTRIEESEGNGPVDAVFNCIKSLVPHEAKLELYQVHAVTEGTDAQAEVSVRLSQDGRSMTARAADPDTLVASAKAYLGALNKLVMKRQRDVAPGHGASAAAAS

SEQ ID NO: 107654 - DNA, 1623 bp, Synechococcus sp. WH 7803; identical to SEQ ID NO: 13046
  CDS (1)..(1623): transl_table=11

SEQ ID NO: 107655 - protein, 540 aa, Synechococcus sp. WH 7803; identical to SEQ ID NO: 13047

SEQ ID NO: 107656 - DNA, 1587 bp, Leptospira interrogans serovar Copenhageni str. Fiocruz L1-130
  CDS (1)..(1587): transl_table=11
atgagtgttcgtttaattgattgtctaaagaataaaacccaaaaaactggaagtagaattttttgcgagaaagatatggcaatggatctaaaagactacgttcgtatatttgatacaactctcagagacggagaacaatgtcccggggctgcgatgaccgaaaacgaaaagttggaaattgcttctcaactcgcaacgatgaaggtagatattattgaagccggatttccagtttcttcccccgttcaatttcaagcagtggaaagaatcgcaagagaaaccgaagggcccatgatcgcggcactcgctagggcaatgaaggcggatattgaagccgcatctaaagcgcttcagcctgcgaaaaaaagaaggattcatactttcattgcatcttctccgattcacatgaaatataaactcggaaaagaaccgaaagaagttttaaagatggctgtagaagcggtgacactttgcaggcaatttgtggacgacgtggaattttcacccgaagacgcaactaggagcgaacctgaatttttaagagaactttgtgaagcggtaattgcagcaggagctactacgatcaacattcctgacactgtaggttataccactcctgcagaatacggtggtctttttaaatttctgctcagcaacgtaagaggagccgaaaaaattatcttttctgctcattgtcataacgatttaggacttgctaccgcaaattccttggctgcggttcaaaacggagctagacaaattgaatgtacgattaacggtatcggagaaagagccggtaatacagcaatggaagaagtagttatggcaatgcgtactagaaaagatacgttcggaattcaaactcaaattaaaaccgaagaaattgcccgcgcctcttatcttgtaaaaacgattaccggaatgctcgttcaaccgaacaaagcaatcgtaggagcaaacgcatttgcacatgaatctggaattcatcaagacggagttatcaaacatagagaaacctacgagattatgaaaccggaaaccgtcggtctttcttccaatagaatggttttgggaagacatagtggtcgcgccggttttaaagatagaattgttaaactgggtttttctcctcaagtagaagaattggaagccgcttatcaaaggtttttagaaattgcggacagaaaaaaagaaatctatgatgaagacattcgagcgcttttctccgaagaagctagaaaatcaaccggagatcgttttcaattagaaggttttacggtttccaccggaaccaaaagtactcccactgcgggtgttagaattttaattgatggtcatgtaagagaagagtctgcaaccggagacggcccggtagacgcaatctacaaagcgattcaaaaaacaaccggaatggatccggaagtctccagacttgtaatttctccggttaccgaaggacaagatgcaatggctgaagcctccgtgactttagaatataaaggagaccgtgtcgtgggaaaaggaagttctacagatattatcgaagcctgttcaagggcttatatttccgcactcaatcgactttga

SEQ ID NO: 107657 - protein, 528 aa, Leptospira interrogans serovar Copenhageni str. Fiocruz L1-130
MSVRLIDCLKNKTQKTGSRIFCEKDMAMDLKDYVRIFDTTLRDGEQCPGAAMTENEKLEIASQLATMKVDIIEAGFPVSSPVQFQAVERIARETEGPMIAALARAMKADIEAASKALQPAKKRRIHTFIASSPIHMKYKLGKEPKEVLKMAVEAVTLCRQFVDDVEFSPEDATRSEPEFLRELCEAVIAAGATTINIPDTVGYTTPAEYGGLFKFLLSNVRGAEKIIFSAHCHNDLGLATANSLAAVQNGARQIECTINGIGERAGNTAMEEVVMAMRTRKDTFGIQTQIKTEEIARASYLVKTITGMLVQPNKAIVGANAFAHESGIHQDGVIKHRETYEIMKPETVGLSSNRMVLGRHSGRAGFKDRIVKLGFSPQVEELEAAYQRFLEIADRKKEIYDEDIRALFSEEARKSTGDRFQLEGFTVSTGTKSTPTAGVRILIDGHVREESATGDGPVDAIYKAIQKTTGMDPEVSRLVISPVTEGQDAMAEASVTLEYKGDRVVGKGSSTDIIEACSRAYISALNRL

SEQ ID NO: 107658 - DNA, 1575 bp, Thermus thermophilus HB27; identical to SEQ ID NO: 13048
  CDS (1)..(1575): transl_table=11

SEQ ID NO: 107659 - protein, 524 aa, Thermus thermophilus HB27; identical to SEQ ID NO: 13049

SEQ ID NO: 107660 - DNA, 1530 bp, Desulfovibrio vulgaris subsp. vulgaris str. Hildenborough
  CDS (1)..(1530): transl_table=11
atggcggaacgtatccgtatcttcgacactaccctgcgtgacggcgagcagtctcccggcgcgaccatgaacatcaaggaaaagctgcgcctcgcccaccagttgcagacactgggcgtggacatcatcgaggcaggttttcccgccgccagccccggcgacttcgagtcggtccgtgccatcgccaagaccgtgaagggcatgaccgtggcaggcctctgccgcgccctccccgccgacatcgacagggcgtgggacgccgtgtgcgtcgccgaatcgccgcgcctgcacaccttcctcgccacgtcgccggtgcacatgcagtacaagctgcgcaagacccccgacgaagtggtgcgcatggtcgacgccgccgtgcgccatgccgcagggcacacctccaacgtggaattctccgccgaagacgcctcgcgttcggacagggacttcctcgtgcgggtgttcaccacggccatcgaagcaggtgccaccaccatcaacatccccgacaccgtgggctatgcccagcccgaggagttcggcgcactggttcgctatgtcatcgagaacacgcccaatgcgcacaaggccgtgttcagcgtgcattgccacaacgacctcggcctcggggttgccaacacccttgcggccctgcgcgcaggcgcacggcaggcagaggtgaccatatccggcatcggcgaacgtgcgggcaacgcggccctcgaagaactggtcatggccctgcgcacccggcacgactacttcggcctcgacacgggcatcgtcaccgaacaactctacccgacctgccgcctgctctccatgatcatcggtcagcccattccggccaacaaggccatcgtgggcgccaacgccttcgcgcacgagtccggcatccatcaggacggcatgctcaagcaccgcgagacctacgagatcatgacccccgaatccatcgggcgcacccgcaccgaactggtgctcggcaagcactccgggcgcaacgcggtgaagaacaagctcgaggaactgggctaccgccttgaagaggaccagctcaacaccgtgttcgacgccgtcaagcaactggccgacaagaagaagcagattcacgacgaggacgtcgaggcactggtgcttgaagaggtgtaccgcatccccgaccgctaccggctggtgaacctcagcgtacaatgttcggacaccggcatgccgcccacggctgccgtcgtcatggaagtggacggcgagaccatgcgccacgccggtttcggggcaggccccatcgacgccgtgttcaacgccatcgcccatatcgtgggccgtacaccgcagcttgaacgctactcggtgacggcgattaccggaggtaccgacgcacagggcgaagtgaccgtgcgggtgcgcgagaacggcggcacggccgtcggacgcggcagccacccggacatcatcatcgccagtgcgcgcgcctacctcaacgcactcaacagactggtcaagaaggaagaagagaaggagggcatctag

SEQ ID NO: 107661 - protein, 509 aa, Desulfovibrio vulgaris subsp. vulgaris str. Hildenborough
MAERIRIFDTTLRDGEQSPGATMNIKEKLRLAHQLQTLGVDIIEAGFPAASPGDFESVRAIAKTVKGMTVAGLCRALPADIDRAWDAVCVAESPRLHTFLATSPVHMQYKLRKTPDEVVRMVDAAVRHAAGHTSNVEFSAEDASRSDRDFLVRVFTTAIEAGATTINIPDTVGYAQPEEFGALVRYVIENTPNAHKAVFSVHCHNDLGLGVANTLAALRAGARQAEVTISGIGERAGNAALEELVMALRTRHDYFGLDTGIVTEQLYPTCRLLSMIIGQPIPANKAIVGANAFAHESGIHQDGMLKHRETYEIMTPESIGRTRTELVLGKHSGRNAVKNKLEELGYRLEEDQLNTVFDAVKQLADKKKQIHDEDVEALVLEEVYRIPDRYRLVNLSVQCSDTGMPPTAAVVMEVDGETMRHAGFGAGPIDAVFNAIAHIVGRTPQLERYSVTAITGGTDAQGEVTVRVRENGGTAVGRGSHPDIIIASARAYLNALNRLVKKEEEKEGI

SEQ ID NO: 107662 - DNA, 1521 bp, Bacillus thuringiensis serovar konkukian str. 97-27
  CDS (1)..(1521): transl_table=11
atgaagcaaattttgttcatggatacgacgctacgtgatggcgaacaatcaccaggagtaaatttaaatgaacaagagaaattgcaaattgcaaggcaattagagagactagggattcatgtcatggaagctggctttgcagcagcttccgaaggggattttcaatcggtaaagcgcatcgcaaatacgattcaaaatgctacagttatgagtttagcaagagcgaaagaaagtgatattcgaagagcatatgaagctgtgaaaggtgcggtatctcctcgtttacacgtatttttagctacgagtgatattcatatgaagtataaactttgtatgtcaaaagaagatgtattagatagtattcatcgttccgttacacttggaaaatcattatttccgacagtacaattttctgcagaagatgcgacaagaacagcaagagattttttagctgaagcgatagaagttgcgattcgtgcaggagcgaatgtaattaatattccagatacagttgggtatacgaatccagaagaatattattctctttttaaatatttacaagaatccgttccttcatatgaaaaagcaattttctcttgtcattgtcatgatgatcttgggatggcggtagcaaattcattagctgcagttgaaggcggagcgttgcaagtagaaggaacaattaatgggattggagaaagagcagggaatgcggcgttagaagaggttgcagttgctcttcatattagaaaagatttctataaagcagagccttctataacgctaaaagaaattaaagcgacaagtacattagtaagcagattaacaggtatggttgtaccgaaaaataaagcgattgttggagcaaatgcattcgctcatgaatcaggcattcatcaagatggtgtattaaaagaagtgacaacatatgaaattattgaaccagcgctagtaggcgaatctcaaaatctatttgtacttggaaaacattctgggcgtcacgcgtttacagaaaaaatgaaagaacttggctatgaatttacaaacgacgagcgggatgcggtatttgaagcatttaaaaaattagctgatcgtaagaaggaaattactgaggaagatttacgagcacttatgcttggtgaagcagcatttgcggctcagcaatataatattacgcaattgcaagtacatttcgtatcaaatagtacacaatgtgcgacagttgtactaaaagatgaggaaggaaatgtattcgaagatgcagctactggctctggtagtattgaagcgatttataatgcaatccaaagaattttaggattggaatgtgaattggcggattatcgcatacaatctattacacaaggtcaagatgcactggctcatgttcatgttgaattaaaagaaggagcacatcaagtatcaggttttggtgttgcacaagacgtattggaagcgtcggcaagagcatatgtccacgcagcggggaaattgaaatcttttatccagcttgtgaaataa

SEQ ID NO: 107663 - protein, 506 aa, Bacillus thuringiensis serovar konkukian str. 97-27
MKQILFMDTTLRDGEQSPGVNLNEQEKLQIARQLERLGIHVMEAGFAAASEGDFQSVKRIANTIQNATVMSLARAKESDIRRAYEAVKGAVSPRLHVFLATSDIHMKYKLCMSKEDVLDSIHRSVTLGKSLFPTVQFSAEDATRTARDFLAEAIEVAIRAGANVINIPDTVGYTNPEEYYSLFKYLQESVPSYEKAIFSCHCHDDLGMAVANSLAAVEGGALQVEGTINGIGERAGNAALEEVAVALHIRKDFYKAEPSITLKEIKATSTLVSRLTGMVVPKNKAIVGANAFAHESGIHQDGVLKEVTTYEIIEPALVGESQNLFVLGKHSGRHAFTEKMKELGYEFTNDERDAVFEAFKKLADRKKEITEEDLRALMLGEAAFAAQQYNITQLQVHFVSNSTQCATVVLKDEEGNVFEDAATGSGSIEAIYNAIQRILGLECELADYRIQSITQGQDALAHVHVELKEGAHQVSGFGVAQDVLEASARAYVHAAGKLKSFIQLVK

SEQ ID NO: 107664 - DNA, 1599 bp, Erwinia carotovora subsp. atroseptica SCRI1043; identical to SEQ ID NO: 13056
  CDS (1)..(1599): transl_table=11

SEQ ID NO: 107665 - protein, 532 aa, Erwinia carotovora subsp. atroseptica SCRI1043; identical to SEQ ID NO: 13057

SEQ ID NO: 107666 - DNA, 1599 bp, Desulfotalea psychrophila LSv54; identical to SEQ ID NO: 13058
  CDS (1)..(1599): transl_table=11

SEQ ID NO: 107667 - protein, 532 aa, Desulfotalea psychrophila LSv54; identical to SEQ ID NO: 13059

SEQ ID NO: 107668 - DNA, 1572 bp, Symbiobacterium thermophilum IAM 14863
  CDS (1)..(1572): transl_table=11
gtgacgcggcggattcggatcttcgacaccaccctgcgggatggtgagcaggctcctgggttcggcatgacggcggaggccaagctggaggtggcccgccagcttagcaagctgggcgtcgacgtcattgaggccggttttcccgccgcctcgcccggcgacttcgaggccgtgcggacgatcgccgagaccatcaccgggcccaccatcgccggtctggcccgggccaacgaggacgacatccggcgctgttacgaggcggtgaagggcgcgcagaagccccgcatccacaccttcatcgccacctcgcccattcacatggagtacaagctgcgcaagaagccggaagaggtggtgcgggcggcccgggaagccgtcgccctggcccggtcgctggggcccgaggtcgagttctccgctgaagacgcgacccggtccgactggaacttcctggtccagatcttcaccgtggctgcccgggcgggcgcgacgatcctcaacgtgcccgacaccgtggggtacaccacgccgaaggagtactacgacctgatccggtacctcatcgagcacgtggacgcccccgagggggtccagttctccgtccactgccacaacgacctgggcctggcggtggccaacaccctggccgccatcgaggccggcgccacgcaggtggagtgcaccatcaacggcatcggcgagcgggcgggcaacgcggccctggaggagatcgtgatggccctgcgggtccggcgggaccagtggggcgccacgaccgccatcaacacccgcgagatctaccgcacctcccggctgctgcagagcgtcacgggcatccaggtgcagcccaacaaggccatcgtcggcgccaacgccttcgcccacgagtccggcatccaccaggacggcatgctgaagcaccgggacacctacgagatcatgaagcccgaagacgtgggcgtccccgagtcgtccctggtgctgggcaagcactccgggcgggcggccttccgggcccggctggagcacctgggttaccagctcaccgacgccgagatcgactccgccttccggcggttcaaggagctggccgaccgcaagcggacgatcacggaccacgacctgatggcgatcgtcggcgacgagcaggcgcaccggacggtgaccgaggtctgccggctcgagtccttccaggtggtcgcgggcaacgagcgcattgcgaccgcgtcggtccggctggtgcgggaaggcgaggtggtccaggaggcggcctcgggcgacgggcccatcagcgccctctaccacgccattgaccgggcggcccgcttcgaggggcagctgctggattaccggctgaacgccgtgacggaaggcgaggatgcgctgggcgaggtgacggtgcgggtgcgcgcgggcgaccgggtcgcctcggggcggggcacctccacggacgtcatcgaggcgtctgccagggcctacatgaacgcgatgaacaagatcctctccggggccgcgctggccgtgtcggacgatccggcgccgggctggcagatgcgggcctacggggactga

SEQ ID NO: 107669 - protein, 523 aa, Symbiobacterium thermophilum IAM 14863
MTRRIRIFDTTLRDGEQAPGFGMTAEAKLEVARQLSKLGVDVIEAGFPAASPGDFEAVRTIAETITGPTIAGLARANEDDIRRCYEAVKGAQKPRIHTFIATSPIHMEYKLRKKPEEVVRAAREAVALARSLGPEVEFSAEDATRSDWNFLVQIFTVAARAGATILNVPDTVGYTTPKEYYDLIRYLIEHVDAPEGVQFSVHCHNDLGLAVANTLAAIEAGATQVECTINGIGERAGNAALEEIVMALRVRRDQWGATTAINTREIYRTSRLLQSVTGIQVQPNKAIVGANAFAHESGIHQDGMLKHRDTYEIMKPEDVGVPESSLVLGKHSGRAAFRARLEHLGYQLTDAEIDSAFRRFKELADRKRTITDHDLMAIVGDEQAHRTVTEVCRLESFQVVAGNERIATASVRLVREGEVVQEAASGDGPISALYHAIDRAARFEGQLLDYRLNAVTEGEDALGEVTVRVRAGDRVASGRGTSTDVIEASARAYMNAMNKILSGAALAVSDDPAPGWQMRAYGD

SEQ ID NO: 107670 - DNA, 1521 bp, Bacillus cereus E33L
  CDS (1)..(1521): transl_table=11
atgaagaaaattttgttcatggatacgacgctacgtgatggcgaacaatcaccaggagtaaatttaaatgaacaagagaaattgcaaattgcaaggcaattagagagactagggattcatgtcatggaagctggctttgcagcagcttccgaaggggattttcaatcggtaaagcgcatcgcaaatacaattcaaaatgctacagttatgagtttagcaagagcgaaagaaagtgatattcgaagagcatatgaagctgtgaaaggtgcggtatctccgcgtttacacgtatttttagctacgagtgatattcatatgaagtataaactttgtatgtcaaaagaagatgtattagatagtatttatcgatcggttacacttgggaaatcgttatttccgacagtacaattttcagcagaagatgcaacaagaacagcaagagattttttagctgaagcggtagaagttgcgattcgtgcaggagcgaatgtaattaatattccagatacagttgggtatacgaatccagaagaatattattctctttttaaatatttacaagaatccgttccttcatatgaaaaagcaattttctcttgtcattgtcatgatgatcttgggatggcggtagcaaattcattagctgcagttgaaggcggggcgttgcaagtagaaggaacaattaatggaattggagaaagagcagggaatgcggcgttagaagaggttgcagttgctcttcatattagaaaagatttctataaagcagagccttctatgacgctaaaagaaattaaagcgacaagtacattagtaagcagattaacaggtatggttgtaccgaaaaataaagcgattgttggagcaaatgcattcgctcatgaatcaggcattcatcaagatggtgtattaaaagaagtgacaacatatgaaattattgaaccagcgctagtaggcgaatctcaaaatctatttgtacttggaaaacattctgggcgtcacgcgtttacagaaaaaatgaaagaacttggctatgaatttacaaacgacgagcgggatgcagtatttgaagcatttaaaaaattagctgatcgtaagaaggaaattacggaggaagatttacgagcacttatgcttggtgaagcagcatttgcggctcagcaatataacattacgcaattgcaagtacatttcgtatcaaatagtacacaatgtgcgacagttgtactaaaagatgaggaaggaaatgtattcgaagatgcagctactggctctggtagtattgaagcgatttataatgcaatccaaagaattttaggattggaatgtgaattggcggattatcgcatacaatctattacacaaggtcaagatgcactggctcatgttcatgttgaattaaaagaaggagcacatcaagtatcaggttttggtgttgcacaagacgtattggaagcgtcggcaagagcatatgtccacgcagcagggaaattgaaatcttttatccagcttgtgaaataa

SEQ ID NO: 107671 - protein, 506 aa, Bacillus cereus E33L
MKKILFMDTTLRDGEQSPGVNLNEQEKLQIARQLERLGIHVMEAGFAAASEGDFQSVKRIANTIQNATVMSLARAKESDIRRAYEAVKGAVSPRLHVFLATSDIHMKYKLCMSKEDVLDSIYRSVTLGKSLFPTVQFSAEDATRTARDFLAEAVEVAIRAGANVINIPDTVGYTNPEEYYSLFKYLQESVPSYEKAIFSCHCHDDLGMAVANSLAAVEGGALQVEGTINGIGERAGNAALEEVAVALHIRKDFYKAEPSMTLKEIKATSTLVSRLTGMVVPKNKAIVGANAFAHESGIHQDGVLKEVTTYEIIEPALVGESQNLFVLGKHSGRHAFTEKMKELGYEFTNDERDAVFEAFKKLADRKKEITEEDLRALMLGEAAFAAQQYNITQLQVHFVSNSTQCATVVLKDEEGNVFEDAATGSGSIEAIYNAIQRILGLECELADYRIQSITQGQDALAHVHVELKEGAHQVSGFGVAQDVLEASARAYVHAAGKLKSFIQLVK

SEQ ID NO: 107672 - DNA, 1593 bp, Mannheimia succiniciproducens MBEL55E
  CDS (1)..(1593): transl_table=11
ttgaatgtgcataacaaaaggataagaacaatggcaaacaatcgcgttattattttcgacaccaccttgcgtgatggcgaacaggcattaaaagcaagtttaaccgtaaaagaaaaattacagattgcgctggctttagagcgtttaggcgtagatgtgatggaagtgggctttcccgtttcttccgccggcgatttcgaatcggtgcaaaccattgccgtccatgtaaaaaacagtgtggtttgcgggctttcgcgagcggtaaataaagatattgatgcggcggcggaagccttgaaagtggcggaacgttttcgtattcacacctttatcgcgacttctgctttgcatgtggaagccaaattaaaacgctcttttgatgacgtggtggaaatggccgtcgccgcggtaaaacgcgcccgccgatataccgatgatgtggagttttcttgtgaggatgcgggtcgtaccggtatcgataatatctgccgggtggtggaagcggcaattaatgccggtgcaactacggtgaatattccggataccgtgggtttctgtctgccgacggaatacggcaatattattcatcaggttatgaatcgcgtaccgaatatcgacaaagccgttgtttccgttcattgccataacgacttggggatggcaaccgccaactcattgaccgcagtattaaacggcgcgcgccaaattgaatgtaccattaacggcattggtgagcgggcgggcaataccgctcttgaggaagtggtgatgagcattaaaacccgtcaggatttatttggcgtggatacccggattaatactcaggaaatccaccgtgtcagccaaatggtgagccagatttgcaatatgccgattcagccgaacaaagctattgtcggggaaaacgctttctcacattcgtcaggtattcaccaggacggtatgttgaaaaacaaaaacacctacgaaattatgtcgccggaaaccatcggcttgaagaaagagaaattaaacttaaccgcccgttcaggccgtgcggcggtgaaaggccatatggcggacatgggctacaccgagcaggattacgatttggataaattgtacgaagccttcttgaaacttgccgataaaaaaggccaggtattcgattacgatttggaagcgcttgcttttatcgatatgcagcagggtgatgaagatcgtttgaaattggatgtcattacttcgcaaaccatcagtaccttgccggcctccgcatttgttcaggtggaactggacggcaaacgcattaataaaacctccaacggcggtaacggcccggtggatgcggtatataacgccattatgcaaattgtgggcatggatttgaaaatgtctcattataatttaaccgctaaaggcgaaggcgccgaagcgcttggtcaagtggatattgtggtagaatatcagggacgtaaattccacggtgtgggtttggcgacggatatcgtggaatcttccgcactggcgttggttcacgccatcaatgctatttaccgttcgcagaaagtggcggatttgaaaaaagatcttaaacatattcataccgtttaa

SEQ ID NO: 107673 - protein, 530 aa, Mannheimia succiniciproducens MBEL55E
MNVHNKRIRTMANNRVIIFDTTLRDGEQALKASLTVKEKLQIALALERLGVDVMEVGFPVSSAGDFESVQTIAVHVKNSVVCGLSRAVNKDIDAAAEALKVAERFRIHTFIATSALHVEAKLKRSFDDVVEMAVAAVKRARRYTDDVEFSCEDAGRTGIDNICRVVEAAINAGATTVNIPDTVGFCLPTEYGNIIHQVMNRVPNIDKAVVSVHCHNDLGMATANSLTAVLNGARQIECTINGIGERAGNTALEEVVMSIKTRQDLFGVDTRINTQEIHRVSQMVSQICNMPIQPNKAIVGENAFSHSSGIHQDGMLKNKNTYEIMSPETIGLKKEKLNLTARSGRAAVKGHMADMGYTEQDYDLDKLYEAFLKLADKKGQVFDYDLEALAFIDMQQGDEDRLKLDVITSQTISTLPASAFVQVELDGKRINKTSNGGNGPVDAVYNAIMQIVGMDLKMSHYNLTAKGEGAEALGQVDIVVEYQGRKFHGVGLATDIVESSALALVHAINAIYRSQKVADLKKDLKHIHTV

SEQ ID NO: 107674 - DNA, 1557 bp, Bacillus licheniformis ATCC 14580
  CDS (1)..(1557): transl_table=11
gtgcgaaaaattaacttttttgatacgacactccgtgacggtgaacagtcgccgggcgttaatttaaacacgcaggagaagctggcgatcgcccagcagcttgaaaaactcggggtcaacattatggaagcgggctttcccgcttcatcccccggggatttcaatgcagtaaaagaaatcgcaaggacgattaaaaactgttcggtaacagggcttgcccgctctgtcaaaggagatatcgactcggcgtgggaagcgctcaaagacggagctgaaccaaggcttcacatttttatcgccacttctgacatccacttaaaatataagctgaaaaaaacgcgcgaacaggttctggaacaggcggtcgcaatggtgaaatacgccaaagaacgcttcccgatcgtccagtggtctgccgaagatgcgtgccggactgatcttccgtttttagccgagattgtaagcgaagtgatcgccgcgggagcggatgtcgtcaatctgccggatacggtcggttatttagcgcctgccgagtacggaaatatcttccgctatattaaagaaaatgcccgcaatgccgacaaagtccagctttcagcccattgccacgatgacttgggcatggctgtcgccaactctttggctgcgattgaaaacggagcggatcaagtcgaatcggtcatcaacggcataggcgaaagagcggggaacgcctcgcttgaagaaatcgccgtcgccctccatatccgaaaagatttctaccaggcggaatcaacgattcagctgaatgagattaaacggacaagtgatttagtgagcaagctgaccggcatggccgtgccgcggaacaaagcggttgtcggcgataatgcctttgcccacgaatcaggcattcaccaggacggcttcttaaaagaaaaaacaacatatgaaattatttctccggaacttgtcggcgtgaaaacggatgcgcttgtgctcggaaagcattcagggcgccacgcatttaaagataagctgcaaaacctcggattccagcttggagaagaagaaatcaataaattcttcaacatttttaaagagcttaccggaaagaaaaaggaatttacggatgaagatctcatctcgctgatactcgaagagaaaacggcagaccgcaaaatcggctatgattttatttcactgcaggttcattacggcacctcccaggttccgacagcaacagtctcccttaaagatcaggaaacggatcaggtcatccaggaagcggcgaccggagcgggaagcgttgaagcggtgtacaacacgctgaagcgctgtatggataaagaagtccagctccttgattaccggattcaatccaaccgcaagggacaggatgcattcgcgcaagtatacgtcagggtgatgatcgatggaaaagaatcgggaggacgcggggttgcccaggatgttctcgaagcatctgccaaagcctacttgaatgctgtgaaccgctatctcgtattgaagacgaatacggaaggattgtcaaaacaggcggctgtaggatcataa

SEQ ID NO: 107675 - protein, 518 aa, Bacillus licheniformis ATCC 14580
MRKINFFDTTLRDGEQSPGVNLNTQEKLAIAQQLEKLGVNIMEAGFPASSPGDFNAVKEIARTIKNCSVTGLARSVKGDIDSAWEALKDGAEPRLHIFIATSDIHLKYKLKKTREQVLEQAVAMVKYAKERFPIVQWSAEDACRTDLPFLAEIVSEVIAAGADVVNLPDTVGYLAPAEYGNIFRYIKENARNADKVQLSAHCHDDLGMAVANSLAAIENGADQVESVINGIGERAGNASLEEIAVALHIRKDFYQAESTIQLNEIKRTSDLVSKLTGMAVPRNKAVVGDNAFAHESGIHQDGFLKEKTTYEIISPELVGVKTDALVLGKHSGRHAFKDKLQNLGFQLGEEEINKFFNIFKELTGKKKEFTDEDLISLILEEKTADRKIGYDFISLQVHYGTSQVPTATVSLKDQETDQVIQEAATGAGSVEAVYNTLKRCMDKEVQLLDYRIQSNRKGQDAFAQVYVRVMIDGKESGGRGVAQDVLEASAKAYLNAVNRYLVLKTNTEGLSKQAAVGS

SEQ ID NO: 107676 - DNA, 1545 bp, Methylococcus capsulatus str. Bath; identical to SEQ ID NO: 13062
  CDS (1)..(1545): transl_table=11

SEQ ID NO: 107677 - protein, 514 aa, Methylococcus capsulatus str. Bath; identical to SEQ ID NO: 13063

SEQ ID NO: 107678 - DNA, 1536 bp, Azoarcus sp. EbN1
  CDS (1)..(1536): transl_table=11
atgaaagaccacttgatcgtattcgataccaccttgcgtgacggcgaacaaagccccggcgcatcgatgactcgcgatgagaagctgcgcatcgcccggcaactggagcggatgcgcgtcgacgtcatcgaagccggttttcctgccgcctcgaatggcgacttcgagtcggtgcgcgcgattgccgaagcgatcagggaatcgacagtctgtggcctcgcccgcgcgaacgaagccgacatccgccgcgccggtgaggcgatcgctcccgccgcgcgcggacgcatccacactttcatcgcaaccagcccgatccacatggaaatgaagctgcgcatgtcgcccgaccaggtcgtcgagcaggcggtgcgtgcgatcggctgggcgaaggaatacaccgacgacatcgaattctcggccgaggatgccggccgctcggagatcgatttcctctgtcgtattttcgaagccgtcatcaaggccggcgcgaagacgatcaacgtacccgacaccgtgggttacaacgtccccgagcagtatgcgcacaccatccgcacgctgatcgagcgcgtgccgggtgccgacaaggtcgtctggtcggtgcattgtcacaacgacctcggtcttgccgtcgcgaactcgctcgccgcagtcatggccggcgcgcgccaggtcgaatgcacgctcaacggactcggcgaacgggccggcaacgcggccctcgaagaactggtgatggcagtgcgcacgcgccaggacgtgtttccgtgcgacacgcgcatcgacgcgacgcagatcgtgccggcgtcgaagctggtgtcgggcgtcaccggctttccggtccagccgaacaaggcgatcgtcggcgcgaacgccttcgcccatgaatccggcattcaccaggacggcgtgctcaagcaccgcgagacgtacgagatcatgcgcgccgaggacgtcggctggggcgcgaacaagctcgtgctcggcaagcattccggacgcaacgcgtttcgcagtcgcctgcaggaaatcggcatcgtcgtggcgtccgaggaacacctgaaccatgcgttcgcgcgcttcaaggaactcgccgacaagaagcacgagatcttcgacgaggatatccaggcgctgatgagcgacgaggtcgtcactcccgaccaggagcactaccgcctcgtcgcctcgcgcttccattcggaaaccggcgagacgccgcgggccgacctcacgctgtccgtcgatgggcaggagacgcggacttcagccgaaggatccggccctgtcgatgccgcgttcaaggcgatcgaggcgatcgccggcagcggcaccgagttgctgctgtattcggtcaatgcgatcaccaccggcactgacgcgcagggcgaagtcaccgttcgcctggccagggaagacaaggtcgtcaacggacagggggccgatacggacatcatcgtcgcgtcggcgaaagcctatctcaatgcgctgaacaagctgcacagcaagctcgagcggctgaacccgcagttgtaa

SEQ ID NO: 107679 - protein, 511 aa, Azoarcus sp. EbN1
MKDHLIVFDTTLRDGEQSPGASMTRDEKLRIARQLERMRVDVIEAGFPAASNGDFESVRAIAEAIRESTVCGLARANEADIRRAGEAIAPAARGRIHTFIATSPIHMEMKLRMSPDQVVEQAVRAIGWAKEYTDDIEFSAEDAGRSEIDFLCRIFEAVIKAGAKTINVPDTVGYNVPEQYAHTIRTLIERVPGADKVVWSVHCHNDLGLAVANSLAAVMAGARQVECTLNGLGERAGNAALEELVMAVRTRQDVFPCDTRIDATQIVPASKLVSGVTGFPVQPNKAIVGANAFAHESGIHQDGVLKHRETYEIMRAEDVGWGANKLVLGKHSGRNAFRSRLQEIGIVVASEEHLNHAFARFKELADKKHEIFDEDIQALMSDEVVTPDQEHYRLVASRFHSETGETPRADLTLSVDGQETRTSAEGSGPVDAAFKAIEAIAGSGTELLLYSVNAITTGTDAQGEVTVRLAREDKVVNGQGADTDIIVASAKAYLNALNKLHSKLERLNPQL

SEQ ID NO: 107680 - DNA, 1575 bp, Silicibacter pomeroyi DSS-3
  CDS (1)..(1575): transl_table=11
atgacccatgtgaccgaccaagaccgcgtcttgatctttgacaccaccttgcgcgacggtgagcagagccccggcgccaccatgacccataccgaaaagctcgagattgccgagatgctcgacgagatgggcgtggacatcatagaggccggcttccccatcgcctccgaaggggatttcaaggcggtaagcgagatcgccaaacgcgcgcagaacagccgcatctgcgggctggcacgcgccaatttcgccgatatcgaccgctgctgggaggcggtgaaacacgccgaaaagaaccgcattcacaccttcatcggtacctcgccgctgcaccgcgccattccgaacctgacccaggacgagatggccgagaagatccacgaaaccgtcagccacgcccgcaacctgtgcgacaacgtgcaatggtcgccgatggatgcaacccggaccgagtgggattacctctgccgggtgatcgagatcgcgatcaaggccggcgccaccaccatcaacatccccgataccgtgggctatacagcccccgccgaaagcgccgatctgatccggcggctgatcgaaacggtgccgggtgccgacgatgtgatctttgccacccattgccacaacgacctgggcatggcgacggccaacagcctcgccgccgtcgccggtggcgcgcgtcagatcgaatgcaccatcaacggtctgggcgaacgcgccggcaacaccgcgctggaagaggtggtgatggcgatgaagacccgccacgacatcatgccctggcgcaccgggatcgacaccaccaagatcatggcgatctcgcgccgggtggcgaccgtgtccgggttcaacgtgcagttcaacaaggccatcgtgggcaagaacgcattcgcccatgaaagcggcatccaccaggacgggatgctgaagaatcgcgagaatttcgagatcatgcggcccgaggatatcggcctttccggcacctcgctgccgctgggcaagcattcgggccgggcggcgctgcgcgacaagctcgaacaccttggctacgaggtgggcgacaaccagctcaaggacatcttcgttcggttcaaggaactggccgaccgcaagaaagaggtgttcgacgacgatgtgatcgcgctgatgcgctcgggcgagaatgccgagcaggaccatttgcaactggtgtcgatgaaagtgatctgcggcaccggtggcccggccgaggcgacggtcgagatggaaatcgacggcaaggatgtcagcgccaccgcgcatggcgacgggccggtggatgccagtttcaaggcgatccgcgcgttgcatcccaacgaggcgcatctgcagctttatcaggtgcacgcggtgaccgaaggcaccgacgcccaggcgactgtcagcgtgcggctggaagaggatggcatgatcgccaccggcgagtcggccaataccgacacggtggtggcaagcgccaaggcctatatcaacgcgctcaaccgtctgatcgtgcggcgcgagaaggccggtcccggcgccgatgcccgcgagatcagctacaaggacctgacctga

SEQ ID NO: 107681 - protein, 524 aa, Silicibacter pomeroyi DSS-3
MTHVTDQDRVLIFDTTLRDGEQSPGATMTHTEKLEIAEMLDEMGVDIIEAGFPIASEGDFKAVSEIAKRAQNSRICGLARANFADIDRCWEAVKHAEKNRIHTFIGTSPLHRAIPNLTQDEMAEKIHETVSHARNLCDNVQWSPMDATRTEWDYLCRVIEIAIKAGATTINIPDTVGYTAPAESADLIRRLIETVPGADDVIFATHCHNDLGMATANSLAAVAGGARQIECTINGLGERAGNTALEEVVMAMKTRHDIMPWRTGIDTTKIMAISRRVATVSGFNVQFNKAIVGKNAFAHESGIHQDGMLKNRENFEIMRPEDIGLSGTSLPLGKHSGRAALRDKLEHLGYEVGDNQLKDIFVRFKELADRKKEVFDDDVIALMRSGENAEQDHLQLVSMKVICGTGGPAEATVEMEIDGKDVSATAHGDGPVDASFKAIRALHPNEAHLQLYQVHAVTEGTDAQATVSVRLEEDGMIATGESANTDTVVASAKAYINALNRLIVRREKAGPGADAREISYKDLT

SEQ ID NO: 107682 - DNA, 1635 bp, Silicibacter pomeroyi DSS-3; identical to SEQ ID NO: 13064
  CDS (1)..(1635): transl_table=11

SEQ ID NO: 107683 - protein, 544 aa, Silicibacter pomeroyi DSS-3; identical to SEQ ID NO: 13065

SEQ ID NO: 107684 - DNA, 1623 bp, Synechococcus elongatus PCC 6301; identical to SEQ ID NO: 13066
  CDS (1)..(1623): transl_table=11

SEQ ID NO: 107685 - protein, 540 aa, Synechococcus elongatus PCC 6301; identical to SEQ ID NO: 13067

SEQ ID NO: 107686 - DNA, 1545 bp, Bacillus clausii KSM-K16; identical to SEQ ID NO: 13068
  CDS (1)..(1545): transl_table=11

SEQ ID NO: 107687 - protein, 514 aa, Bacillus clausii KSM-K16; identical to SEQ ID NO: 13069

SEQ ID NO: 107688 - DNA, 1536 bp, Campylobacter jejuni RM1221
  CDS (1)..(1536): transl_table=11
atgaaagataataaaatcataatctttgataccactttacgagatggagaacaagctttaggtagttctttaggtatcaatcaaaaattacaaattgcattagcgcttgaaaatttaggcgtagacgttatagaagcaggttttccggtatcttcacaaggggattttaaagcggtgcaaaagatcgcttctaaggtgaaaaactcaactatttgtgcactttctagagcattggataaagatatagatatggcttatgaagctttaaaagtggcaaagcattttagaattcatacttttatagccacttcgactttgcatatgcaagataaattaaaaaaagattttgatgaaattttgtctatggcaaaaagagcgattataagagcaagatcttatactgatgatgtagaattctcatgcgaagatgcaggaagaactccgatagataatctttgttttatggtggaaaatgcgataaaagcaggcgctaaaactataaatatcccagataccgtaggctataccttgccaagtgaatttgctaatatcatcaaaattttatttaacaaagtgccaaatatagacaaagctatcatttctgtgcattgtcacaatgacttaggtatggcaacgggcaatagcttaagtgctattttacaaggtgcaagacagatagagtgcactataaatggacttggcgaaagggcgggcaattgtgctttagaagaagtggttatggcgataaaaactaggaaagattatttaaaaggtttttatactgatattaaatgtgaaaatatctttaaaacttcaaaattagtttcagctatcactaatgaaagcataccttcgcataaagctatagtgggtagcaatgcgttttctcatagttcaggcattcatcaagatggagtgcttaaaaataggcaaacttacgagatcataagccctagtgccataggaattcatgacaatcgtatgttaatgacggcaagaagtggaagggctatgataaaaacttgccttgaaaatttaggctatgatgaaaatacttataatttagatgatgtttatgagcgttttttacgccttgcggataaaaagggtcaagtatatgattatgatttggaagctttgatgtttttaagctatgaaaatgaagaagaaaatgaatttgtgattgaaaaattaagcgtgattagtggcaatatcccaaccgcttgtgtttgtatgcgtatcaaagaagagctaaaaactgaagcttgcacaggaaatggtcctgttgaagcagtttttaactgcattgctaggataacaaatttaaagcctgtgttaaaagcttatagtatcaatgcaaaaagttcaggagtagatgctcaagggcaagtggatgtggatttggaatttaaagggagaaaattccatggaaaaggactttcaacagatgttatagaagcttcagcacaagcttttgcgagtgcttacaatgcgatttatcgctctttaaaagtagaagaaaggaaaatggcatga

SEQ ID NO: 107689 - protein, 511 aa, Campylobacter jejuni RM1221
MKDNKIIIFDTTLRDGEQALGSSLGINQKLQIALALENLGVDVIEAGFPVSSQGDFKAVQKIASKVKNSTICALSRALDKDIDMAYEALKVAKHFRIHTFIATSTLHMQDKLKKDFDEILSMAKRAIIRARSYTDDVEFSCEDAGRTPIDNLCFMVENAIKAGAKTINIPDTVGYTLPSEFANIIKILFNKVPNIDKAIISVHCHNDLGMATGNSLSAILQGARQIECTINGLGERAGNCALEEVVMAIKTRKDYLKGFYTDIKCENIFKTSKLVSAITNESIPSHKAIVGSNAFSHSSGIHQDGVLKNRQTYEIISPSAIGIHDNRMLMTARSGRAMIKTCLENLGYDENTYNLDDVYERFLRLADKKGQVYDYDLEALMFLSYENEEENEFVIEKLSVISGNIPTACVCMRIKEELKTEACTGNGPVEAVFNCIARITNLKPVLKAYSINAKSSGVDAQGQVDVDLEFKGRKFHGKGLSTDVIEASAQAFASAYNAIYRSLKVEERKMA

SEQ ID NO: 107690 - DNA, 1518 bp, Dehalococcoides ethenogenes 195
  CDS (1)..(1518): transl_table=11
atggacaaaataaagatttttgataccaccctcagagatggagaacaggctgccggtgcgtctttgaatgcacaggaaaaactggagatagcccggcagctggaaaaactgggggtggatatcattgaagcaggttttcccatcacctctcccggtgattttgaagcggtaaagctgatagcccaggaagtgcgcacccctgtcatctgcggtctggccagagctataccggctgacattgaccgtgcctgggaggctttgaaagaagctgcccacccccgaattcatgtgtttatttcttcatctgaaatacacatggttcaccagataaaaaagagccgtgaagaagtaatggagctggcacgcactatggttgccagagccaaaagctatactgatgatatagagttttccccgatggatgccagccgctctgacccggagtttctgtataaactgctggaagcagttatagatgccggggctaccaccctgaatatacctgatacggtgggttacgctattcccagtgaattcggcgaactcataaagggtatccgccagaatgtgcctaatataaacaaagcggtaataagcgtacactgccacgatgatttgggcatgggcacagccaattcgctggctgcggttaaaaacggtgccagacaggtggaatgcaccctgaacggcataggcgagcgtgccggtaatgcagcactggaagaagtagtgatggcactgcgcacccggagtgactttttcaattttgaaacaggtataaacacccaggaaatataccgcagcagccgcctggtcagcgctctgaccggttttgctatccagcccaacaaggctgtggtgggtgaaaacgctttccgccatcagtccggtatccatcaggacggcgttattaaaatggctaaaacttttgagattatggaccccaaagaagtgggtattcaggcttccagtctggtgctgggcaaactttccggccgccatgccttcaaacagcacctgacagagctgggctttgacctgaacgaagaggattttgaccgcgcattcaaggcctttaaagatttggccgataaaaagaaggacgtgactgaccgggatatagaagcgctggttgccgaggaactgcggactacagttgagctttatcatctggaccggatacaggttacctccggagaccggggcatacccactgctgccgtcagactaaccaccccgaacggcggagcagcagaagatgccgctttgggcagcgggccggtagatgctgtttacaaggccataaaccggatagtaaatgtacctaacaaactgactgaattttcggtcaagtctgttacggccggcattgacgcactgggtgaagtgctgatccggattgagagtgacggggtaacatataccggacgcggctctgataccgatataatagtagccagcgccaaggcttatatgaacgccttaaaccgtttgctcagggtcaagaacgcatcttaa

SEQ ID NO: 107691 - protein, 505 aa, Dehalococcoides ethenogenes 195
MDKIKIFDTTLRDGEQAAGASLNAQEKLEIARQLEKLGVDIIEAGFPITSPGDFEAVKLIAQEVRTPVICGLARAIPADIDRAWEALKEAAHPRIHVFISSSEIHMVHQIKKSREEVMELARTMVARAKSYTDDIEFSPMDASRSDPEFLYKLLEAVIDAGATTLNIPDTVGYAIPSEFGELIKGIRQNVPNINKAVISVHCHDDLGMGTANSLAAVKNGARQVECTLNGIGERAGNAALEEVVMALRTRSDFFNFETGINTQEIYRSSRLVSALTGFAIQPNKAVVGENAFRHQSGIHQDGVIKMAKTFEIMDPKEVGIQASSLVLGKLSGRHAFKQHLTELGFDLNEEDFDRAFKAFKDLADKKKDVTDRDIEALVAEELRTTVELYHLDRIQVTSGDRGIPTAAVRLTTPNGGAAEDAALGSGPVDAVYKAINRIVNVPNKLTEFSVKSVTAGIDALGEVLIRIESDGVTYTGRGSDTDIIVASAKAYMNALNRLLRVKNAS

SEQ ID NO: 107692 - DNA, 1554 bp, Neisseria gonorrhoeae FA 1090
  CDS (1)..(1554): transl_table=11
atgacacaggccaaccgcgttattattttcgacaccaccctgcgcgacggcgaacaatcgcccggcgccgctatgaccaaagaggaaaaaatccgcgtcgcccgccagttggaaaaattgggcgcggacatcatcgaagcgggttttgccgccgccagcccgggcgatttcgaggcggtcaatgcgattgcgaaaaccattaccaaatcaacggtctgttcattgtcccgcgccatcgagcgggacatccgtcaggcgggtaaggccgttgcgcccgcgccgaaaaaacgcatccacaccttcatcgccaccagccccatccatatggagtacaagctgaagatgaagccgaagcaggtgattgaggcggcggtcaaagcggtaaaaatcgctcgtgaatacaccgacgatgtggaattttcctgcgaagacgcgttgcgttcgcaaatcgatttccttgccgaaatctgcggcgcggtgattgaagcgggcgcgaccaccatcaatattcccgataccgtcggctattccatcccgtacaaaaccgaagaatttttccgcgaactgattgccaaaacgcccaacggcggcaaagtcgtctggtcggcacactgccacaacgatttgggcttggcggttgccaattcgcttgccgcattaaaaggcggcgcgcgtcaggtggaatgtaccgttaacggtttgggcgaacgcgcggggaatgcttcggttgaagaaatcgtgatggcgttgaaggtgcgccacgacttgttcggcttggaaaccggcatcgataccacgcaaatcgtgccttcgtccaaactggtgtccaccattacgggctatcccgtgcagcccaataaagccattgtcggcgcgaatgccttttcgcacgaatcgggcatccatcaggacggggtgctgaaacaccgcgaaacttacgagattatgtctgccgaatcggtcggttggtcggcaaaccgattgagcttgggcaaattgtccggccgcaacgccttcaaaaccaagctggcggatttgggcatcgagttggaaagcgaagaggcactgaacgcggcatttgcacgcttcaaagaactcgccgacaaaaaacgcgaaatcttcgatgaagacctgcacgcgctggtgtcggacgaaatgggcaatatgaatgccgaaagctataaattcatttctcaaaaaatcagcaccgaaaccggcgaagagccgcgcgccgacatcgtgttcggcatcaaaggcgaagaaaaacgcgcttccgcaaccggctccggccctgttgatgcaattttcaaagcgattgagagcgtggcgcaaagcggcgcgactttgcagatttattccgtcaacgccgtcacgcaaggtacggaaagccaaggcgaaaccagcgtccgtttggcgcgcggcaaccgcgtcgtcaacggtcagggcgcggataccgacattttggcggcgaccgccaaagcttacctttccgctttgagcaagctggaatttagtgccgccaaaccgaaggcgcagggcagcggtacgatttga

SEQ ID NO: 107693 - protein, 517 aa, Neisseria gonorrhoeae FA 1090
MTQANRVIIFDTTLRDGEQSPGAAMTKEEKIRVARQLEKLGADIIEAGFAAASPGDFEAVNAIAKTITKSTVCSLSRAIERDIRQAGKAVAPAPKKRIHTFIATSPIHMEYKLKMKPKQVIEAAVKAVKIAREYTDDVEFSCEDALRSQIDFLAEICGAVIEAGATTINIPDTVGYSIPYKTEEFFRELIAKTPNGGKVVWSAHCHNDLGLAVANSLAALKGGARQVECTVNGLGERAGNASVEEIVMALKVRHDLFGLETGIDTTQIVPSSKLVSTITGYPVQPNKAIVGANAFSHESGIHQDGVLKHRETYEIMSAESVGWSANRLSLGKLSGRNAFKTKLADLGIELESEEALNAAFARFKELADKKREIFDEDLHALVSDEMGNMNAESYKFISQKISTETGEEPRADIVFGIKGEEKRASATGSGPVDAIFKAIESVAQSGATLQIYSVNAVTQGTESQGETSVRLARGNRVVNGQGADTDILAATAKAYLSALSKLEFSAAKPKAQGSGTI

SEQ ID NO: 107694 - DNA, 1671 bp, Pseudomonas syringae pv. syringae B728a
  CDS (1)..(1671): transl_table=11
atgaccatgctcaaagacccgtcgaagaagtaccgcgcgttcccgaccattgatctgcctgaccgtacctggccttcgaagaccatcgacgcagtgccgatctggtgcagctccgatctgcgcgacggcaaccagtcgctgatcgaaccgatggacgcagccaagaagctgcgcttctggaaaaccctggtcagcgtcggcgtcaaggaaatcgaggcatcctttccatcggcttcgcagactgacttcgacttcgtgcgtaccctgatcgaagacggtcacatcccggatgacaccaccatccaggtactgacccaggctcgcgaagacctgatcgcccgcaccttcgaatcactgcgcggcgccaagaaagccatcgttcacctgtataacgcgacctgcccgtcgttccgccgcattgtcttcaatcaggacaaggccggggtgaaggagatcgcggtcaacgccgccaagctgttcgtcaaatacgcagcgcagcagccggaaacccagtggaccttccagtactcgccggagaccttcagtgcgaccgaactggaattcgccaaggaagtctgtgatgcggtgatcgaggtgtggaatcccacgccagagaacaaggtgatcctcaacctcccggccaccgtggaagtggcgacacccaacatttacgccgaccagatcgaatggtttggccgcaacattacccgccgcgacagcgtgctgatcagcctgcacacccacaacgaccgtggtacgggcgttgccgcgaccgagctgggcctgatggccggcgcggatcgcgtcgagggctgcctgttcggtaacggcgagcggaccggtaacgtcgatctggtcaccgtggcgctgaacctctatacccagggcatcaatcccgggctggacttctcggacatcgacggcgtgcgcaaggtcgtcgaagagtgcaaccagatcccggtgcacccacgtcatccgtacgttggcgacctggttcacaccgcgttctccggctcgcaccaggatgcgatccgcaagggtttcacccagcagaaggaaggcgagttgtgggaagtgccttacctgccgatcgacccggccgacatcggtcgcagctacgaggcggtgattcgcgtcaacagccagtcaggcaaaggtggcatcgcttacctgctggaacaggaatatggcatttccctgccacgccgcatgcagatcgagttcagccaagtggttcagggtgagaccgatcgcctgggcctggagatgacggccgagcagattcactcgctgttgcgtcgtgaatacctgcaagccaacgttccttatgcgctgatcagccataagttgcaggaagagaacggcaacagctcggtagatgccgaggtgcacgtcgacggcgaaacccagcactggcgtggcaagggcaagggcgccctggaagcactggtcgccggtctgccagtggccgtggaaatcatggactacaacgagcatgcgatcggttcgggtacgaccgccaaggcggccgcctacattgagctgcgcgtgaatggcgaacgcgccgtgcatggtgtgggcatcgatgaaaacatcaccacggcgagcttccgcgccctgttcagcgcgcttaatcgctcactcagccagactcaggccaaagctgcctga

SEQ ID NO: 107695 - protein, 556 aa, Pseudomonas syringae pv. syringae B728a
MTMLKDPSKKYRAFPTIDLPDRTWPSKTIDAVPIWCSSDLRDGNQSLIEPMDAAKKLRFWKTLVSVGVKEIEASFPSASQTDFDFVRTLIEDGHIPDDTTIQVLTQAREDLIARTFESLRGAKKAIVHLYNATCPSFRRIVFNQDKAGVKEIAVNAAKLFVKYAAQQPETQWTFQYSPETFSATELEFAKEVCDAVIEVWNPTPENKVILNLPATVEVATPNIYADQIEWFGRNITRRDSVLISLHTHNDRGTGVAATELGLMAGADRVEGCLFGNGERTGNVDLVTVALNLYTQGINPGLDFSDIDGVRKVVEECNQIPVHPRHPYVGDLVHTAFSGSHQDAIRKGFTQQKEGELWEVPYLPIDPADIGRSYEAVIRVNSQSGKGGIAYLLEQEYGISLPRRMQIEFSQVVQGETDRLGLEMTAEQIHSLLRREYLQANVPYALISHKLQEENGNSSVDAEVHVDGETQHWRGKGKGALEALVAGLPVAVEIMDYNEHAIGSGTTAKAAAYIELRVNGERAVHGVGIDENITTASFRALFSALNRSLSQTQAKAA

SEQ ID NO: 107696 - DNA, 1548 bp, Haemophilus influenzae 86-028NP
  CDS (1)..(1548): transl_table=11
atgacagatcgcgttattatttttgataccaccttgcgtgatggggaacaggcgttaaaagcaagtttgacggtaaaagaaaaattacagatcgctttagcacttgaacgcttaggtgtggatgtaatggaagtggggtttcccgtttcttctcaaggggattttgaatcggtacaaaccattgcgcgccatatcaaaaacgctcgtgttgccgcgttatctcgagccgtagataaagacattgatgccgcataccaagcattgaaagtggcagaagcattccgtattcatacttttattgcaagctcggcattacacgttgaagcgaaattaaaacgttcttttgatgatgtggtaggaatggcagttgcagcagtgaaacgcgcacgtaattatacggatgatgttgagttctcttgcgaagatgcggggcgtacgggcattgacaatatctgtcgtattgtagaggcggcaattaatgcaggtgcaactacagtaaacattccagataccgttggtttctgcttaccaaatgaatacggcaatattattgctcaagtgcgtaatcgcgtgccgaatatcgacaaagccgtgatttccgtgcattgccacaatgacttaggtatggcaaccgctaattctttaaccgctgtacaaaatggtgcacgccaaattgaatgtactattaatggaattggggaacgtgcgggcaatacttcccttgaagaagtggtaatggcaatgaaagtgcgtcaagatttcatgggcgtggatactcgtattaatacccaagaaattcatcgcgtgagtcaaatggttagccagctttgcaatatgccaattcagccgaataaagccattgtaggctcaaatgcttttgcccattcttctggtattcatcaagatggtatgttgaaaaacaaaaatacctacgaaattatgtctccagaaaccattggtttgaaaaaagaaaaattgaatttaactgcacgttctggtcgtgcggctgtgaaaggtcatatggcggatatgggctacaacgaacaagattatgatttggataaattgtatgacgcgttcttaaaattggcggataaaaaaggtcaagtgtttgattatgatttggaagccttggcatttatcgatatgcaacaaggggatgaagatcgtttggtattagataaactttctgcgcattcaaccaaagaatatccagcaacagcctttgttcaattgaaattagatggcgaaaaattaagcacttcgtcaattggtggtaacggcccagtagatgcggtttataacgccatcttaaatttaacaggcttagaaatcaaaatgtctcactataacttaaccgctaaaggcgagggcgcagaagcattagggcaagtggatattgtggtggaacacaaagggcgtaaattccacggtgttggtttagcaacagacatcgttgaatcttccgcacttgctttagtccacgctatcaatgccatttatcgcgcacataaagtggcagacattaaaagccataaacatcactaa

SEQ ID NO: 107697 - protein, 515 aa, Haemophilus influenzae 86-028NP
MTDRVIIFDTTLRDGEQALKASLTVKEKLQIALALERLGVDVMEVGFPVSSQGDFESVQTIARHIKNARVAALSRAVDKDIDAAYQALKVAEAFRIHTFIASSALHVEAKLKRSFDDVVGMAVAAVKRARNYTDDVEFSCEDAGRTGIDNICRIVEAAINAGATTVNIPDTVGFCLPNEYGNIIAQVRNRVPNIDKAVISVHCHNDLGMATANSLTAVQNGARQIECTINGIGERAGNTSLEEVVMAMKVRQDFMGVDTRINTQEIHRVSQMVSQLCNMPIQPNKAIVGSNAFAHSSGIHQDGMLKNKNTYEIMSPETIGLKKEKLNLTARSGRAAVKGHMADMGYNEQDYDLDKLYDAFLKLADKKGQVFDYDLEALAFIDMQQGDEDRLVLDKLSAHSTKEYPATAFVQLKLDGEKLSTSSIGGNGPVDAVYNAILNLTGLEIKMSHYNLTAKGEGAEALGQVDIVVEHKGRKFHGVGLATDIVESSALALVHAINAIYRAHKVADIKSHKHH

SEQ ID NO: 107698 - DNA, 1581 bp, Colwellia psychrerythraea 34H; identical to SEQ ID NO: 13072
  CDS (1)..(1581): transl_table=11

SEQ ID NO: 107699 - protein, 526 aa, Colwellia psychrerythraea 34H; identical to SEQ ID NO: 13073

SEQ ID NO: 107700 - DNA, 1542 bp, Dechloromonas aromatica RCB; identical to SEQ ID NO: 13076
  CDS (1)..(1542): transl_table=11

SEQ ID NO: 107701 - protein, 513 aa, Dechloromonas aromatica RCB; identical to SEQ ID NO: 13077

SEQ ID NO: 107702 - DNA, 1584 bp, Thermobifida fusca YX
  CDS (1)..(1584): transl_table=11
atgctggacgacagtttccacgtattcgacacgaccctgcgtgacggcgctcagcgcgaaggcatcaacttcaccgtcgccgacaaacttgcggtcgcgaagctgctcgacgagttcggtgtgggtttcatcgagggcggctggcccggcgcgaatccgaaggacacagaattcttccgacgggcccaaacagaactgtccctcaaacatgcgcagctcaccgcgttcggctcgacccggcgggcgggaaccacggctgcgaaggacccccaggtgctcgcgttgcgcgactccggggcgcccgtcgtcaccctcgtggcgaagagcgacgaccggcacgtcgaactggcgctgcgcaccacgctcgaggagaacctcgagatgatcgcggacacggtctccttcctgctgggccagggacagcgcgtcttcgttgactgcgagcacttctttgacgggtaccggcacaaccccgaatacgcactccgtgtggtgcgcaccgcggccgaggcgggggcctccgtggtggtgctgtgcgacaccaacggcggcatgctgccgtccgacgtcttccagatcgtcagcgaagtccgcgaagccaccggggcccggctgggcatccacgcccaggacgactcggggtgcgccgtggccaacacgctggccgcggtcgacgcgggcgccacccacgtccagtgcaccgccaacgggtacggggagcgggtcggcaacgccaacctgttctcggtcgtccccgccttggtgctcaaacgcggccgcaatgtgctgcccgaaggctgcctgcgcgagatgacccgggtgtcccaggctatcgccgagatcgcgaacatcgctccagccacccaccagccctacgtcggcatctccgccttcgcccacaaggccgggctgcacgcttctgcgatcaaggtggacccggacctctaccagcacatcgacccggcgctggtcggcaacgacatgcgcatgctggtctccgacatggccgggcgggcctcggtggagctgaaggcgaaagagctcggcgtggacttgtccggcgaccgcgagaccctgggccggatcgtggagcgggtcaaggacatggagatggccgggtacagcttcgaagcggccgacgcctccttggagctgctgctgcgcgaagagatcggccagccggtgcggtacttcgaagtggagtcgtggcgcactatctccgagcggcgccccgacgggtccagcgccagcgaggccacggtgaagctctacgtcaagggtgagcgggtggtggcaaccggggaaggcaacggtccggtcaacgccctggaccgggcactgcgctcggcgctggagagcgtctaccccgacctggccacgatggaactagtcgactacaaggtccgcatcctggagggcacgtccggaacggacgcggtcacccgggtgctcatcgactgcagtgacgggcagggcgagtggacgacggtcggagtgggtgagaacgtcatcgaggcgtcgtggacggcgctggagcaggccctcacctacgggctgctgcgccgcggctacacccagcagtga

SEQ ID NO: 107703 - protein, 527 aa, Thermobifida fusca YX
MLDDSFHVFDTTLRDGAQREGINFTVADKLAVAKLLDEFGVGFIEGGWPGANPKDTEFFRRAQTELSLKHAQLTAFGSTRRAGTTAAKDPQVLALRDSGAPVVTLVAKSDDRHVELALRTTLEENLEMIADTVSFLLGQGQRVFVDCEHFFDGYRHNPEYALRVVRTAAEAGASVVVLCDTNGGMLPSDVFQIVSEVREATGARLGIHAQDDSGCAVANTLAAVDAGATHVQCTANGYGERVGNANLFSVVPALVLKRGRNVLPEGCLREMTRVSQAIAEIANIAPATHQPYVGISAFAHKAGLHASAIKVDPDLYQHIDPALVGNDMRMLVSDMAGRASVELKAKELGVDLSGDRETLGRIVERVKDMEMAGYSFEAADASLELLLREEIGQPVRYFEVESWRTISERRPDGSSASEATVKLYVKGERVVATGEGNGPVNALDRALRSALESVYPDLATMELVDYKVRILEGTSGTDAVTRVLIDCSDGQGEWTTVGVGENVIEASWTALEQALTYGLLRRGYTQQ

SEQ ID NO: 107704 - DNA, 1620 bp, Prochlorococcus marinus str. NATL2A
  CDS (1)..(1620): transl_table=11
atggccaaagatccgggccgagttttaatttttgacaccaccttaagagatggagagcaatctcctggagctagtcttaatttagaagaaaagttagctattgctcaacaattagcaagattaggagttgatgtaattgaggcaggattccctttcgctagtcctggggatttcgctgcagttcagaaaatagctgagaatgtaggaggcgaagaaggacctatcatttgcggactttcaagagcctcaaaacctgatatcaaagcttgtgccaatgcgattgctccagccccaaaaaaaaggattcataccttcattgcaaccagtgatattcatcttgaacataaattaaggaaatccagaaaagaagtacttgatatcgttccagatatggttggctatgctaaaagttttgtagatgacgttgaattttcctgtgaagatgccgcaagaagtgatttagattttctgtatgaagtaatagaactagccatatcctcaggggctaatacaataaatattccagatacagttggttatataaccccttctgaatttggagatttgatattaaatatcaacaaaaatgttccaaatatcaatgaggcagttctttcagttcatggtcacaacgacttaggacttgctgttgcaaacttccttgaagctgtaaagaatggagcgagacaacttgaatgcaccattaatggaataggagagagagcaggtaatgctgctttagaagaattaattatggcgcttcatgtaagaagatcatattttaatccgttttttggtaggcctcctgaatcccctactcctttgacagcagttagaacagaggagataactaagtcttctcgcttggtttcaaatttgactgggatggtcgtacaaccgaacaaagcaattgttggggcaaacgcttttgcgcatgaatctggaatacaccaagatggagtattgaaaaataggcttacatatgaaattatcgatgcaaaaacagtagggttgtctgacaataagatttctttggggaaattaagtggtaggagtgctgttcgagcaagactagaggaccttggatatgatttaaacagagaagatcttaatgacgctttcgctagatttaaagatttagccgatagaaaaagagagataacagatcgtgatctagaggccattgttagtgaacaagttcagcttccagaagcattgttccaattgaaattggtccaagtaagctgtggaacttctctaatgccaactgcaacagtaactgttgttggagaagatggagaggagaagaccgccgtctctcttggaacaggtcctgttgatgcagtagtccgagcattggattccctaactgaagaacctaatgaattgattgaattctcagtaaagtcagttacagaggggatagatgctctgggtgaagttactattagaataagaagagatggaaatctcttttctggccattctgcagatactgacgttgttgttgccgctgctcaagcatacataaatgcccttaatagattagtagctgctcatggaaggaaatccattcatccacaacatgatttggctaaggtagaaaaaaaagggatttga

SEQ ID NO: 107705 - protein, 539 aa, Prochlorococcus marinus str. NATL2A
MAKDPGRVLIFDTTLRDGEQSPGASLNLEEKLAIAQQLARLGVDVIEAGFPFASPGDFAAVQKIAENVGGEEGPIICGLSRASKPDIKACANAIAPAPKKRIHTFIATSDIHLEHKLRKSRKEVLDIVPDMVGYAKSFVDDVEFSCEDAARSDLDFLYEVIELAISSGANTINIPDTVGYITPSEFGDLILNINKNVPNINEAVLSVHGHNDLGLAVANFLEAVKNGARQLECTINGIGERAGNAALEELIMALHVRRSYFNPFFGRPPESPTPLTAVRTEEITKSSRLVSNLTGMVVQPNKAIVGANAFAHESGIHQDGVLKNRLTYEIIDAKTVGLSDNKISLGKLSGRSAVRARLEDLGYDLNREDLNDAFARFKDLADRKREITDRDLEAIVSEQVQLPEALFQLKLVQVSCGTSLMPTATVTVVGEDGEEKTAVSLGTGPVDAVVRALDSLTEEPNELIEFSVKSVTEGIDALGEVTIRIRRDGNLFSGHSADTDVVVAAAQAYINALNRLVAAHGRKSIHPQHDLAKVEKKGI

SEQ ID NO: 107706 - DNA, 1602 bp, Dehalococcoides sp. CBDB1
  CDS (1)..(1602): transl_table=11
gtgcaggtaaaactatacgatactactttaagagacggctcccagcgggagggcatttccttcacggtggcggacaagcttaagattgcccaaaaactggatgatctgggcatacattatattgaaggcggctggccgggttcaaacccaaaggacagtgaatttttcactcaggcaaaatcactcaaattgaaaaatgccaaaatggtggctttcggatctacccgccgcccaaaagtaaaggcagatgcagataccaccctgaaacaactgattgattcaggtacggaatatgtgactttagtaggtaaaagttcggccagacaggtaacacaggtactggaaaccactctggaagaaaatctggccatgattaccgaatctattgagtacctgcgttccaaatgcataaaggtctttctggatgccgagcatttctttgacggctataaggataaccccgagtattcaatacaagttttacaggcggcagaaaaggccggtgccgaaggtgtggtactgtgcgataccaatggaggtactctgccagaagaaataacccaagccgtcaaaaccgtaaaagaagccctaaatatttgcgtgggtattcacgcccacaatgacaccgaaatggccgtagctaacagcatagccgctctcaaggctggtgccagtcaggttcagggcaccataaacggatttggtgaaagatgcgggaatgccaatttgtgttccataatacccattttgaaactgaagatggatatagactgtatatctgataaccagctgaaattgcttactgaaacttcccattatataagtgaactggccaatctggtttccgagccgttcttgccgtatgtaggttcaagtgctttttcacataaagccggcctgcatgtcagcggtctcagcaaatggtcaggcagttaccagcatatagaaccggaactggtgggtaaccatcaacgcctgctggtatctgaactggcaggtagatcaaacattgtacaaagggcaaaagctatcggcataaatctggctccagattccaaagaagtaaaagacttgcttcagcaggttaaaaaaatggagagcttgggttttcagtacgaaaacgcagaagcttcttttgatttactggtaaaccgcacccaaacgggatatattgccccgtttgagcttatagacttcatggtggtagtggaaaagcagcgacgcccttcagctatgcgcaatcaggacgaaatgatggccgaaggtattgtgaaagtaagagtagacggcgatattatgcacacggtagccgaaggcaacggccccataaatgcacttgatgccgctttgcgtaaaggtctttgccagttttaccctgaactctcggcagtccatctatcagattacaaggtgcgcatactggagcagaccagcggtacagatgcgctggtaagggtgcttattgaatccagtgacggtgaaaatacctggcacacagtaggtgccagccccaacattattgaagccagctggctggctctttcagatagttttgagtactggctgataaccaaaaagtgtaaaaactgtaaaaaacaataa

SEQ ID NO: 107707 - protein, 533 aa, Dehalococcoides sp. CBDB1
MQVKLYDTTLRDGSQREGISFTVADKLKIAQKLDDLGIHYIEGGWPGSNPKDSEFFTQAKSLKLKNAKMVAFGSTRRPKVKADADTTLKQLIDSGTEYVTLVGKSSARQVTQVLETTLEENLAMITESIEYLRSKCIKVFLDAEHFFDGYKDNPEYSIQVLQAAEKAGAEGVVLCDTNGGTLPEEITQAVKTVKEALNICVGIHAHNDTEMAVANSIAALKAGASQVQGTINGFGERCGNANLCSIIPILKLKMDIDCISDNQLKLLTETSHYISELANLVSEPFLPYVGSSAFSHKAGLHVSGLSKWSGSYQHIEPELVGNHQRLLVSELAGRSNIVQRAKAIGINLAPDSKEVKDLLQQVKKMESLGFQYENAEASFDLLVNRTQTGYIAPFELIDFMVVVEKQRRPSAMRNQDEMMAEGIVKVRVDGDIMHTVAEGNGPINALDAALRKGLCQFYPELSAVHLSDYKVRILEQTSGTDALVRVLIESSDGENTWHTVGASPNIIEASWLALSDSFEYWLITKKCKNCKKQ

SEQ ID NO: 107708 - DNA, 1518 bp, Dehalococcoides sp. CBDB1
  CDS (1)..(1518): transl_table=11
atggacagaataaagatttttgataccaccctcagagacggagagcaagcagccggtgcttctttaaatgcacaggaaaagctggagatagcccggcagcttgaaaaactgggggtggatatcattgaagcaggctttcccatcacctcgccgggtgattttgaagccgtaaagctaatagcccaagaagtacgcacccctgttatctgtggtttggctagagccataccggcagatattgaccgtgcctgggaagctttgaaagaggctgcccatccccggatccatgtgtttatttcttcatctgaaatacacatggttcaccagataaaaaagagccgtgacgaagtgctggagctggcgcgcactatggtagccaaagccaaaggctacactgatgatatagagttttcgcccatggacgccagccgctctgacccggagtttctgtataaactgcttgaagcagttatagatgccggggctaccaccctgaatatacctgataccgttggttatgctattcccagtgaattcggtgaacttataaaaggtatccgccagaacgtgcccaatataggcaaagcggttataagcgtgcattgccatgatgatttgggtatgggcacagccaattcgctggcggcagttaaaaacggtgcccgtcaggtggaatgcaccttgaatggcataggtgaacgggccggcaatgccgcacttgaagaagtagtgatggcactgcgtacccgaagcgactttttcaattttgaaacaggtataaacacacaggaaatataccgcaccagccgtctggtcagtgctcttaccggtttcgccattcaacccaacaaggcagttgtgggtgaaaatgctttccgccaccagtccggtattcaccaagacggcgttattaaaatggctaaaacgtttgaaattatggatcccaaggaagtgggtattcaggcatccagtttggtattgggcaagctttcaggccgccatgctttcaaacagcatctgactgaactgggctttgacctgaacgaagaagattttgatcgtgctttcaaagcatttaaagatttggcagacaaaaagaaggacgtaactgaccgggatatagaagctctggttgccgaagaactgcggactacagttgaactttatcatcttgaccgcatacaggttacctccggagacagaggcatacccaccgccgcagtgcgtctgactaccccgaatgggggagctgttgaagatgcctctttgggcagcggaccggtagatgccgtttacaaggccataaaccggatagtaaacgtacctaacaaactgactgagttttcggttaagtctgttacggccggtattgatgcactgggtgaagtgcttatccgtattgaaagtgacggtgtgacctatacaggacgcgggtccgatacagatataatagtagccagtgccaaggcctatatgaatgccttgaaccgcttgcttagggttaagaacgcatcttaa

SEQ ID NO: 107709 - protein, 505 aa, Dehalococcoides sp. CBDB1
MDRIKIFDTTLRDGEQAAGASLNAQEKLEIARQLEKLGVDIIEAGFPITSPGDFEAVKLIAQEVRTPVICGLARAIPADIDRAWEALKEAAHPRIHVFISSSEIHMVHQIKKSRDEVLELARTMVAKAKGYTDDIEFSPMDASRSDPEFLYKLLEAVIDAGATTLNIPDTVGYAIPSEFGELIKGIRQNVPNIGKAVISVHCHDDLGMGTANSLAAVKNGARQVECTLNGIGERAGNAALEEVVMALRTRSDFFNFETGINTQEIYRTSRLVSALTGFAIQPNKAVVGENAFRHQSGIHQDGVIKMAKTFEIMDPKEVGIQASSLVLGKLSGRHAFKQHLTELGFDLNEEDFDRAFKAFKDLADKKKDVTDRDIEALVAEELRTTVELYHLDRIQVTSGDRGIPTAAVRLTTPNGGAVEDASLGSGPVDAVYKAINRIVNVPNKLTEFSVKSVTAGIDALGEVLIRIESDGVTYTGRGSDTDIIVASAKAYMNALNRLLRVKNAS

SEQ ID NO: 107710 - DNA, 1536 bp, Thiobacillus denitrificans ATCC 25259
  CDS (1)..(1536): transl_table=11
atgaacgaccgcttgtttattttcgacacgaccttgcgcgacggggagcagagcccgggcgcctccatgaccaaggacgagaagctgcgcatcgcgcgtcagctcgagaagctcggcgtcgacgtcatcgaggcgggtttcgcggctgcgagtcccggcgacgccgacgcaatccgtgcgatcgccgagacggtccgcaattccacggtctgttcgctcgcgcgcgccaacgagcgcgacatccatgccgctggcggcgcgatcaagccggcaaagtccgggcgcatccataccttcatcgcgaccagcccgatccacatggaaaagaagctgcgcatgcagcccgaccaggtcgtcgaggcggcggtcaaagcggtcaagctcgcgcgcgaatacaccgacgacgtcgaattctcggccgaagacgcggtgcgctccgacatggatttcctcgtgcggatcttcgatgaagtgatcaaggcgggcgcgaagacgatcaacgtgcccgacacggtcggctactcgattcccgcgctgtggggcgagcgcatgaaagcgctcatcgagcgcgtgccggggtccgacaaggtgatctggtcgacgcactgccacaacgacctcggcatggcggtcgccaactcgctcgccgccgtcatgaacggcgcgcgccaggtcgagtgcacgatcaacggccttggcgagcgcgccggcaacgcgtcgctggaagagatcgtgatggcggtgcgcacgcgtcgcgacgtgttcggctgcgacacccgcatcgacgccacgcagatcgtcccgtcgtcgaaactcgtctcgaccatcaccggctatccggtgcagccgaacaaggccatcgtcggcgccaacgcgttcgcccacgagtcgggcattcaccaggacggcgttttgaagcaccgcgaaacctacgagatcatgcgcgccgaggacgtcggctggaacgcgaaccgcctcacgctcggcaagctctccggccgcaacgccttcaagaccaagctcgccgagctcggcatcgtgctagacagcgaggaggcactcaacgccgcgttcgcgcgcttcaaggacctcgccgacaagaagcgcgaaatcttcgacgaggatctgcaggcgctcgtctccgacgaaggctacgcgaccgaggacgagcgcttcaagctcctgtcgatgaaggtgtgttcggagaccggcgaagtgccgcgcgctcagctcgtgttcaccgacgacggcgccgaaaagcaggccagcggcgagggctcgggcccggtcgacgcgaccttcaaggcgctcgaatcggtcgtgcacagcggcgccgatctcttgctctattcggtcaacaacatcaccagcggcaccgatgcgcagggcgaggtgaccgtccggctcgcgcaggatggccgcgtggtcaacggacagggtgccgacaccgacatcgtcgtcgcctcggcgaaggcctatctgcatgcgctcaacaagctgcacagcaaacgcgagcgcgcgcatccccaggtgtga

SEQ ID NO: 107711 - protein, 511 aa, Thiobacillus denitrificans ATCC 25259
MNDRLFIFDTTLRDGEQSPGASMTKDEKLRIARQLEKLGVDVIEAGFAAASPGDADAIRAIAETVRNSTVCSLARANERDIHAAGGAIKPAKSGRIHTFIATSPIHMEKKLRMQPDQVVEAAVKAVKLAREYTDDVEFSAEDAVRSDMDFLVRIFDEVIKAGAKTINVPDTVGYSIPALWGERMKALIERVPGSDKVIWSTHCHNDLGMAVANSLAAVMNGARQVECTINGLGERAGNASLEEIVMAVRTRRDVFGCDTRIDATQIVPSSKLVSTITGYPVQPNKAIVGANAFAHESGIHQDGVLKHRETYEIMRAEDVGWNANRLTLGKLSGRNAFKTKLAELGIVLDSEEALNAAFARFKDLADKKREIFDEDLQALVSDEGYATEDERFKLLSMKVCSETGEVPRAQLVFTDDGAEKQASGEGSGPVDATFKALESVVHSGADLLLYSVNNITSGTDAQGEVTVRLAQDGRVVNGQGADTDIVVASAKAYLHALNKLHSKRERAHPQV

SEQ ID NO: 107712 - DNA, 1596 bp, Anabaena variabilis ATCC 29413; identical to SEQ ID NO: 13080
  CDS (1)..(1596): transl_table=11

SEQ ID NO: 107713 - protein, 531 aa, Anabaena variabilis ATCC 29413; identical to SEQ ID NO: 13081

SEQ ID NO: 107714 - DNA, 1734 bp, Anabaena variabilis ATCC 29413
  CDS (1)..(1734): transl_table=11
atgaccaaaaatccctctccccacatttggctttatgacaccacactacgggatggcactcagcgcgaggggctatcaatatctacagaagacaagctacgcattgcccacagactcgatcaactagggattcccttcattgaaggtggatggccaggagccaaccctaaggatgttcaatttttctggcaacttcaagaagatccgcttaaactttcacaaattgttgcattttgttcaactcgccgccctcatactcatgccgcagatgaaccaatgctgcaagatatcctggctgcgggttctagctgggtgacaatttttggcaaatcctgggatttacacgtcacaacaggtctaaaaactactttagaagaaaacttagcgatgatccgcgatactatcgagttttttcgctctcaagggcgacgcgtgatctatgatgctgaacactggtttgatggctataagcacaaccgagattatgctttacagaccctcaaagcagcaatggcagccggcgcagaatggttagtcctctgtgatacgaatggcggtactttacctcacgaagttagtcagattgtgcaagatgttgtcaaggtgactagggactggggacgaatcaactcaaaattagatcagtctgggcaagtagtcagtgaggaagtggaaaagagtactaattctctacccaatacccagtacccaatccccaatctcccattccccattccccaaatcggtattcatactcataatgattcagatatggctgttgccaatgctttagcagcagtgatggcaggggcaacgatggtacaaggtactatcaacggttatggcgaacgttgtgggaatgctaatttatgttcattaattcctaatttacaactgaaattagggtatagctgtatcacagaacaccagctagggcaactagcagaagccagtcgatttgtgagtgaagtggtaaatcttgcccctgatgaacacgctccttttgtgggacgttcggcttttgctcacaaaggaggtattcatgtctccgccgtggaacgtaatcccctcacatacgaacacattcagccggaacaagtagggaaccgtcgccggattgtgatttctgaacaatcggggattagtaatgtgttagctaaagcccggacttttgggattgaactagacaaacagacaccagaagccaagcaaattcttcagcgcctcaaggagttagaaagtgaaggatatcaatttgaagcagccgaggcgagttttgctttactgatgtatgaagctttgggcggaagacagcagttttttgaagtgaaaggctttcaagtccactgtgatttagtggaaggcaaagaaatgaccaatgctttagcgacggtgaaagtcgcggtgaatggtaagaacattttagaagctgccgaaggtaacggcccagtagcagccttagatgcggcattacgcaaagctttggtcaacttctatccccaacttgccacctttgagttaacagactacaaagtgcggattctggacggtcacacaggcacttctgccaaaacccgtgccttagtggaatcaggtaatggttatcaacgctggacaactgttggcgtttcacccaacatcttggcagcttcctatcaagcggttgtcgaaggtttggaatatggtctgttattacacgcccaagcagaggcggcagtaaaagcgtctggttag

SEQ ID NO: 107715 - protein, 577 aa, Anabaena variabilis ATCC 29413
MTKNPSPHIWLYDTTLRDGTQREGLSISTEDKLRIAHRLDQLGIPFIEGGWPGANPKDVQFFWQLQEDPLKLSQIVAFCSTRRPHTHAADEPMLQDILAAGSSWVTIFGKSWDLHVTTGLKTTLEENLAMIRDTIEFFRSQGRRVIYDAEHWFDGYKHNRDYALQTLKAAMAAGAEWLVLCDTNGGTLPHEVSQIVQDVVKVTRDWGRINSKLDQSGQVVSEEVEKSTNSLPNTQYPIPNLPFPIPQIGIHTHNDSDMAVANALAAVMAGATMVQGTINGYGERCGNANLCSLIPNLQLKLGYSCITEHQLGQLAEASRFVSEVVNLAPDEHAPFVGRSAFAHKGGIHVSAVERNPLTYEHIQPEQVGNRRRIVISEQSGISNVLAKARTFGIELDKQTPEAKQILQRLKELESEGYQFEAAEASFALLMYEALGGRQQFFEVKGFQVHCDLVEGKEMTNALATVKVAVNGKNILEAAEGNGPVAALDAALRKALVNFYPQLATFELTDYKVRILDGHTGTSAKTRALVESGNGYQRWTTVGVSPNILAASYQAVVEGLEYGLLLHAQAEAAVKASG

SEQ ID NO: 107716 - DNA, 1680 bp, Pseudomonas fluorescens PfO-1
  CDS (1)..(1680): transl_table=11
atgagcatgctcaaagacccgtcttcgaaataccgtgcgtttccagtgatcaacctgccggatcgcacctggccgtcgaaaaccatcgatgccgcgccaatctggtgcagctccgacctgcgtgacggcaaccagtcgttgatcgagccaatggacgcggtgaaaaagctgcgcttctggaaaaccctggtgcaagtgggcgtgaaggaaatcgaagcgtcgttcccggccgcttcgcaaaccgacttcgacttcgtgcgtaccctgatcgaggacggccacatcccggacgacaccaccattcaggtgctgacccagggccgtgaagacctgatcgagcgcaccttcgaatccctgcgcggggcgaagaaagccatcgttcatctgtacaacgccacctccccttctttccgtcgcatcgttttcaaccaggacaaggacgggatcaaggccatcgccgtgaacgccgccaagctgttcgtcaaatacgcggccatgcagccggacaccgagtggaccttcgagtactcgccggaaaccttcagcgccaccgaactggaattcgccaaggaagtctgtgacgcggtgatcgaggtctggaacccgacgcctgagcacaagatcatcctcaacctgccggccaccgttgaatgtgcgaccccgaacgtctacgccgaccagatcgagtggttccaccgcaacatcaaccgccgtgacagcgtgatcatcagcctgcacacccacaacgaccgcggcactggcgtggccgccaccgagctgggcctgatggccggcgccgatcgcgtcgaaggctgcctgttcggcaacggcgagcgtaccggtaacgtcgacctcgtgactgtggcactgaacatgtacacccagggcatcaatcctgacctggacttttccgacatcgacggcgtgcgcaaagtcgtcgaagagtgcaaccagatccaggttcacccgcgtcacccgtacgtcggcgacctggtgcacacagcgttctccggctcccaccaggacgcgatccgcaagggcttcgcccagcagaaaccggacaccctgtgggaagtgccgtacctgccgatcgacccggccgacatcggccgcagctacgaggcggtgatccgcgtcaacagccagtcgggcaagggcggcatcgcctacctgctggagcaggaatacggcatcagcctgccacgtcgcatgcagatcgaattcagccaggtcgtgcagcgtgaaaccgatcgcctgggcctggagatgaccgcgcagcaaatccacgcgctgctgcacagcgaatatctgcaagccaacaccccgtacgcgctggtcagccatcgcctgcaggaagaaaacggtaacagcgccgtcgaagtggaagtggcgagcaaaggtcagggcgaaaccaatctgcactggcgcggcaagggcaacggcgcgctggaagccctggtggccggtctgccgattccggtggaaatcatggactacaacgaacacgccatcggcgcgggcactaacgccaaggcggcagcctacatcgagctgcgtgtgaacggcgaacgtgcggtgcacggcgtgggcatcgatgaaaacatcaccaccgccagcttcaaggcactgttcagcgcgctgaaccgctcgctgagccagccggaagcgaaagcggcgtaa

SEQ ID NO: 107717 - protein, 559 aa, Pseudomonas fluorescens PfO-1
MSMLKDPSSKYRAFPVINLPDRTWPSKTIDAAPIWCSSDLRDGNQSLIEPMDAVKKLRFWKTLVQVGVKEIEASFPAASQTDFDFVRTLIEDGHIPDDTTIQVLTQGREDLIERTFESLRGAKKAIVHLYNATSPSFRRIVFNQDKDGIKAIAVNAAKLFVKYAAMQPDTEWTFEYSPETFSATELEFAKEVCDAVIEVWNPTPEHKIILNLPATVECATPNVYADQIEWFHRNINRRDSVIISLHTHNDRGTGVAATELGLMAGADRVEGCLFGNGERTGNVDLVTVALNMYTQGINPDLDFSDIDGVRKVVEECNQIQVHPRHPYVGDLVHTAFSGSHQDAIRKGFAQQKPDTLWEVPYLPIDPADIGRSYEAVIRVNSQSGKGGIAYLLEQEYGISLPRRMQIEFSQVVQRETDRLGLEMTAQQIHALLHSEYLQANTPYALVSHRLQEENGNSAVEVEVASKGQGETNLHWRGKGNGALEALVAGLPIPVEIMDYNEHAIGAGTNAKAAAYIELRVNGERAVHGVGIDENITTASFKALFSALNRSLSQPEAKAA

SEQ ID NO: 107718 - DNA, 1590 bp, Rhodobacter sphaeroides 2.4.1; identical to SEQ ID NO: 13086
  CDS (1)..(1590): transl_table=11

SEQ ID NO: 107719 - protein, 529 aa, Rhodobacter sphaeroides 2.4.1; identical to SEQ ID NO: 13087

SEQ ID NO: 107720 - DNA, 1653 bp, Rhodobacter sphaeroides 2.4.1; identical to SEQ ID NO: 13088
  CDS (1)..(1653): transl_table=11

SEQ ID NO: 107721 - protein, 550 aa, Rhodobacter sphaeroides 2.4.1; identical to SEQ ID NO: 13089

SEQ ID NO: 107722 - DNA, 1530 bp, Carboxydothermus hydrogenoformans Z-2901; identical to SEQ ID NO: 13090
  CDS (1)..(1530): transl_table=11

SEQ ID NO: 107723 - protein, 509 aa, Carboxydothermus hydrogenoformans Z-2901; identical to SEQ ID NO: 13091

SEQ ID NO: 107724 - DNA, 1545 bp, Burkholderia sp. 383
  CDS (1)..(1545): transl_table=11
atgacagacaagctgatcattttcgatacgacgttgcgtgacggcgaacaatcgcccggtgcgtcgatgacgaaggaagagaaaatccgcatcgcgaagcacctcgagcggatgaaggtcgatgtgatcgaggccggcttcgcggccagctcgaacggcgatttcgacgcgatccacacgatcgccggtctcatcaaggacagcacgatctgctcgctggcgcgcgccaacgacaaggacatccagcgcgcagccgacgcgctgaagccggccgagagcttccggatccacacgttcatcgcgacgtcgccgctgcacatggagaagaagctgcggatgacgcccgaccaggtgttcgagcaggcgcgcctcgcggtgcgtttcgcgcgcaagttcaccgacaacgtcgagttctcgccggaagacggcagccgctccgacatggatttcctgtgccgcgtgctggaagccgtgattgccgagggggcgacgacgatcaacatcgccgacacggtcggctatggcgtgccggagctgtacggcaacttggtgaagacgctgcgcgaacgcattccgaattcggacaaggcgatcttctcggtgcattgccataacgacctcgggatggcggtcgcaaactcgctcgccggcgtgaagatcggcggcgcgcgtcagatcgagtgcacgatcaacggtctcggcgagcgcgcgggcaacacgtcgctcgaagaaatcgtgatggccgtgaagacgcgcaaggactacttcggtctcgacgtcggcatcgacacgtcgcagatcgtgccgacgtcgaagctcgtgtcgcagatcaccggtttcgtcgtgcagccgaacaaggcggtggtcggtgcgaacgcattcgcgcatgcgtcgggcatccaccaggacggcgtgctgaaggcgcgcgacacctacgagatcatgcgcgcggaagacgtgggctggaccgcgaacaagatcgtgctcggcaagctgtcgggccgtaacgcattcaagcagcgcctgcaggagctcggcgtgtcgctcgacagcgagagcgaactgaacgccgcgttcatgcgcttcaaggatctggccgaccgcaaggccgagatcttcgacgaagacatcatcgcgatcgtgtccgaggaatcggcacttgcgcacgagcaggagcacttcaagttcgtgtcgctgtcgcagcactcggaaacgggcgagcagccgcatgcgaaggtcgtgttcggggtcgaaggcaaggaagtgaccggcgaggcacgcggcaacggtccggtcgatgcgacgttcaacgcgatcgagagcgaagtcggcagcggttccgagttgctgctgtactcggtgaacgcgatcacgaccggcacgcaggcacagggcgaagtgacggtccggttgtcgaagagcgggcggatcgtcaatggcgtcggcaccgatccggacatcgtcgccgcatccgcgaaggcctacatctccgcactgaacaagctgcattcgaaggacgacaaggtcaatccgcagcgctcgtaa

SEQ ID NO: 107725 - protein, 514 aa, Burkholderia sp. 383
MTDKLIIFDTTLRDGEQSPGASMTKEEKIRIAKHLERMKVDVIEAGFAASSNGDFDAIHTIAGLIKDSTICSLARANDKDIQRAADALKPAESFRIHTFIATSPLHMEKKLRMTPDQVFEQARLAVRFARKFTDNVEFSPEDGSRSDMDFLCRVLEAVIAEGATTINIADTVGYGVPELYGNLVKTLRERIPNSDKAIFSVHCHNDLGMAVANSLAGVKIGGARQIECTINGLGERAGNTSLEEIVMAVKTRKDYFGLDVGIDTSQIVPTSKLVSQITGFVVQPNKAVVGANAFAHASGIHQDGVLKARDTYEIMRAEDVGWTANKIVLGKLSGRNAFKQRLQELGVSLDSESELNAAFMRFKDLADRKAEIFDEDIIAIVSEESALAHEQEHFKFVSLSQHSETGEQPHAKVVFGVEGKEVTGEARGNGPVDATFNAIESEVGSGSELLLYSVNAITTGTQAQGEVTVRLSKSGRIVNGVGTDPDIVAASAKAYISALNKLHSKDDKVNPQRS

SEQ ID NO: 107726 - DNA, 1623 bp, Synechococcus sp. CC9605; identical to SEQ ID NO: 13096
  CDS (1)..(1623): transl_table=11

SEQ ID NO: 107727 - protein, 540 aa, Synechococcus sp. CC9605; identical to SEQ ID NO: 13097

SEQ ID NO: 107728 - DNA, 1539 bp, Geobacter metallireducens GS-15
  CDS (1)..(1539): transl_table=11
atggcggaactgaagaccatcaagattttcgatacaacgcttcgcgacggtgagcagtcgccgggcaacagcatgaacatcgatgagaaactgcgcgttgccaagcagcttctgaagctgaacgtcgatgtcatcgaagcgggatttcccatcgcttccgagggggatttcgaggcggtcaaacgggttgcccagaccatcaagggaccggagatcgctggcctttgccgttccagcgacaaggatatcgaccgggcctgggaggcacttaagtacgcaggtgagaaggggcgtatccatacttttatcgccacctctgatatccacatgaagtacaagctgaagatgactcgtgagcaggtgcttgagaatgcggtcaaagcggtgaagcgagcgaaatcctacacgccaaatgtggaattttcctgcgaggatgccgtccgtaccgacctggccttcttggtgcaaatggtggaggcggtaatcgacgccggagtcacgacggtgaatattcccgatactgtcggctacacgatccccttcgagtacttcaacatcatccgtcacctcaaggaaaacgtttccaatattgaaaaggcggtcatttcggtccattgccacaatgacctggggctttccgtggcgaactccattgcagcggttcaggctggggcaggtcaggtggagtgtaccatcaacggtattggtgagcgggcgggaaactgctcccttgaagagttcgtcatggctatcaagacccgccacgacatccttcccttcaggacgaacgttgaccacgaacagatcgtccctgccagtcggcttctctccactattaccggcatcggagttcagcccaacaaggcgattgtaggggccaacgcctttgcccatgagtcgggcatacatcagcatggcgtgctcatggagaaatcgacctacgaaatcatgactccggaatcaatcgggctcaagacgaacgttttggtgctcggcaagcattcgggacgtcacgcattcaagaagcggcttgcggaacttgggtacgagctttccgatgaagacctgaaccgcgcctttgagcgtttcaaggccttggctgatctgaagaaagaggttttcgacgaggatcttgacgcattggttgcagacgaagtgatgcgtccggcggagaagttccggctctctcatatcacggtcacgtgcggttcctttgcggtcgccacttcgacggtgcaaatggagattgacggtacggcggtgcgaactgccgaactgggggatggcccggttgatgcgactctcaaggcaatcaagaagctgaccaagaccaaggcgaagcttcagcagtataatgtcggatccattaccggcgggaccgatgcccaaggcgaagtgaccgtgcgggtgacagacggcaacgaaacggttgtggggcgaggttcttccacagacataattgaggcgtcggcaaaggcttatatcaacgcgctcaatcgactcaatgcaaagatagagcgaatccacgaaagtctgtga

SEQ ID NO: 107729 - protein, 512 aa, Geobacter metallireducens GS-15
MAELKTIKIFDTTLRDGEQSPGNSMNIDEKLRVAKQLLKLNVDVIEAGFPIASEGDFEAVKRVAQTIKGPEIAGLCRSSDKDIDRAWEALKYAGEKGRIHTFIATSDIHMKYKLKMTREQVLENAVKAVKRAKSYTPNVEFSCEDAVRTDLAFLVQMVEAVIDAGVTTVNIPDTVGYTIPFEYFNIIRHLKENVSNIEKAVISVHCHNDLGLSVANSIAAVQAGAGQVECTINGIGERAGNCSLEEFVMAIKTRHDILPFRTNVDHEQIVPASRLLSTITGIGVQPNKAIVGANAFAHESGIHQHGVLMEKSTYEIMTPESIGLKTNVLVLGKHSGRHAFKKRLAELGYELSDEDLNRAFERFKALADLKKEVFDEDLDALVADEVMRPAEKFRLSHITVTCGSFAVATSTVQMEIDGTAVRTAELGDGPVDATLKAIKKLTKTKAKLQQYNVGSITGGTDAQGEVTVRVTDGNETVVGRGSSTDIIEASAKAYINALNRLNAKIERIHESL

SEQ ID NO: 107730 - DNA, 1587 bp, Geobacter metallireducens GS-15
  CDS (1)..(1587): transl_table=11
atgagtctcgttaaactgtacgataccacccttcgtgacggcacccaggcagaggacatatcgttcctcgttgaagacaagatccgtatcgccaataggcttgacgagatcggaatccattacattgaaggggggtggcccggcagcaaccccaaggatgtcgccttcttcaaagacatcaagaaggagaagctctcccaggcgaagatcgccgcttttggttcgacccgccgcgccaagataacccctgacaaagaccacaacctgaagaccctcgtgcaggccgagcccgatgtctgcaccattttcggcaaaacctgggattttcatgttcgggaagcattgcgcatttccaacgaggagaatctcgagctgatcttcgattctcttgaatatctgaagacccgggttcccgaggttttctacgacgcagagcacttctttgacggctacaaggccaatcccgactatgccatcaaaaccctcaaggctgctcaggatgccaaggccgactgcattgtgctttgtgacaccaacggcggtactatgccgttcgagcttgccgagattatccgcgaggttcgcaagcacatctcagctcccttgggcattcacacacacaatgactccgagtgtgcggtcgctaactctcttcatgcggtcaatgaggggattgtgcaggttcagggcaccatcaacggttttggtgagcggtgcggtaatgccaatctctgctccatcatgcctgccctcaggctcaagatgaaggcggagtgcgtgagtgatgagcaattgaagaaacttcgggatctctcccgttttgtgtacgaactggcgaacctttcccctgacaagcatcagccttatgtgggtaattcagcctttgcccacaagggcggggtccacgtgagcgccattcagcgccatcccgagacctatgagcacatgaggcctgaactggtcggcaacatgacccgggtgctcatttccgacctctccggccgctccaatatccttgccaaggccgaggaattcaatatcaacatggacagcaaggatccggttacccttgaaatcctcgataatatcaaagagatggagaatcgggggtaccagtttgagggggccgaggcttcatttgaattgctgatgaagcgtgctctcggtactcatcggaagtttttctcggttatcggtttccgggttattgatgagaaacgccacgaagaccagaagcctttttccgaggcgactatcatggtcaaggttggcggcaaggtggagcacactgcggctgaaggcaacggtccagtcaacgctctcgacaatgcccttcgcaaggccctggagaagttctatccgaaactgaaggaagtgaagcttcttgactacaaggttcgcgtcctgccggcagggcagggtacagcctcatccattcgcgttctcatcgagtcgggcgacaaggaagcgcggtgggggacggttggtgtctcggaaaacatcatcgatgcctcctatcaggctctgatcgacagtattgagtacaaactccacaggacagaggatgcggagggcgtcaataaatga

SEQ ID NO: 107731 - protein, 528 aa, Geobacter metallireducens GS-15
MSLVKLYDTTLRDGTQAEDISFLVEDKIRIANRLDEIGIHYIEGGWPGSNPKDVAFFKDIKKEKLSQAKIAAFGSTRRAKITPDKDHNLKTLVQAEPDVCTIFGKTWDFHVREALRISNEENLELIFDSLEYLKTRVPEVFYDAEHFFDGYKANPDYAIKTLKAAQDAKADCIVLCDTNGGTMPFELAEIIREVRKHISAPLGIHTHNDSECAVANSLHAVNEGIVQVQGTINGFGERCGNANLCSIMPALRLKMKAECVSDEQLKKLRDLSRFVYELANLSPDKHQPYVGNSAFAHKGGVHVSAIQRHPETYEHMRPELVGNMTRVLISDLSGRSNILAKAEEFNINMDSKDPVTLEILDNIKEMENRGYQFEGAEASFELLMKRALGTHRKFFSVIGFRVIDEKRHEDQKPFSEATIMVKVGGKVEHTAAEGNGPVNALDNALRKALEKFYPKLKEVKLLDYKVRVLPAGQGTASSIRVLIESGDKEARWGTVGVSENIIDASYQALIDSIEYKLHRTEDAEGVNK

SEQ ID NO: 107732 - DNA, 1524 bp, Desulfovibrio desulfuricans G20; identical to SEQ ID NO: 13098
  CDS (1)..(1524): transl_table=11

SEQ ID NO: 107733 - protein, 507 aa, Desulfovibrio desulfuricans G20; identical to SEQ ID NO: 13099

SEQ ID NO: 107734 - DNA, 1629 bp, Synechococcus elongatus PCC 7942
  CDS (1)..(1629): transl_table=11
atgaccaggccagcctctgccgcgatcgcggtctacgacacgaccctgcgcgatggcgcccagcgagaaggcttgtcgctgtcgctagaggacaagctgcgaattgcccactgcctcgatcgcctcggggtgaagttcattgagggcggctggcccggcgccaatcctaaggacgtgcaattcttctgggaattacagcagcggccgcttcagcaagccgaagtcgtagcgttctgctccacccgtcgtcccggtcaaatcgctggcgaggatgaactgcttaaagccctccttgctgcgggcacgacttgggtcacgatcttcggtaagtcgtgggatctgcatgttgtcgaagggctgaaaaccagtctggatgagaatctggtgatgatcagcgacagcatcgcctacctccgcacctgcgatcgccgcgtcatctacgatgctgagcattggtttgatggctacttggcgaatccagattacgccttgcagaccttggcggccgcaattgaagcgggagccgagtggatcgttctttgcgacaccaatggcggctgtttgccccatcaaatcagcgagattgtggcggcggtgctggatcgcttcccgagccttgcgccggatcaaaccgggcctcaactgggcatccacacccacaatgattctgagactgctgtagccaatgcgatcgcggcagtgcaggccggtgcccgcatggtgcacggcacaatcaatggttacggcgagcgctgtggcaatgccaatctctgctctgtcatccctaacctgcagctcaagcttggctatgactgcgttgaaaccgaacaactgatgcagttgacggcgacgagtcggttggttagcgaaatcgtcaatctcgcgccagatgatcacgctgcctacgttggtcagtcagccttcgcccacaagggcggcatccacgtcagtgccgtggagcgcaacccgctgacctatgagcacattcgccccgagcaagtcggcaacctgcgccgtatcgtcatttccgagcaatctggcctcagtaatgtccttgccaaagcccgcagttttgggctggacttacagcgaaacgatcccgcttgtcgcgatctcttggcgcgcctcaaggagctcgaaagtcagggctaccaatttgaagcggcagaggccagctttgatctactgatgcgggaagccaccggcgatcgccctcacttttttgacctcaaggatttccatgtccattgcagcaagcaacggcaggagctaaatgctttagccaccgttaaagttgcagttaccggtcgcgatattttggagtcggcggaaggcaacggtccagtctcagcgctcgatgcagccctgcgcaaagcgatcggcagcttttaccctgccgttatgcaattccacctctcggactacaaggtgcggattttggatggggcagccggaacttccgctaaaacgcgcgtcttggtggagtcgagcaacggatcgcagcgctggtccactgtcggcgtctcgggcaacatcattgaggcgtcctatcaagccgtcgtggaagggattgagtatggcctgctcttgcagcagcaagcgcccctgcaagctgccgaaaagccctag

SEQ ID NO: 107735 - protein, 542 aa, Synechococcus elongatus PCC 7942
MTRPASAAIAVYDTTLRDGAQREGLSLSLEDKLRIAHCLDRLGVKFIEGGWPGANPKDVQFFWELQQRPLQQAEVVAFCSTRRPGQIAGEDELLKALLAAGTTWVTIFGKSWDLHVVEGLKTSLDENLVMISDSIAYLRTCDRRVIYDAEHWFDGYLANPDYALQTLAAAIEAGAEWIVLCDTNGGCLPHQISEIVAAVLDRFPSLAPDQTGPQLGIHTHNDSETAVANAIAAVQAGARMVHGTINGYGERCGNANLCSVIPNLQLKLGYDCVETEQLMQLTATSRLVSEIVNLAPDDHAAYVGQSAFAHKGGIHVSAVERNPLTYEHIRPEQVGNLRRIVISEQSGLSNVLAKARSFGLDLQRNDPACRDLLARLKELESQGYQFEAAEASFDLLMREATGDRPHFFDLKDFHVHCSKQRQELNALATVKVAVTGRDILESAEGNGPVSALDAALRKAIGSFYPAVMQFHLSDYKVRILDGAAGTSAKTRVLVESSNGSQRWSTVGVSGNIIEASYQAVVEGIEYGLLLQQQAPLQAAEKP

SEQ ID NO: 107736 - DNA, 1623 bp, Synechococcus elongatus PCC 7942; identical to SEQ ID NO: 13100
  CDS (1)..(1623): transl_table=11

SEQ ID NO: 107737 - protein, 540 aa, Synechococcus elongatus PCC 7942; identical to SEQ ID NO: 13101

SEQ ID NO: 107738 - DNA, 1602 bp, Rhodospirillum rubrum ATCC 11170; identical to SEQ ID NO: 13102
  CDS (1)..(1602): transl_table=11

SEQ ID NO: 107739 - protein, 533 aa, Rhodospirillum rubrum ATCC 11170; identical to SEQ ID NO: 13103

SEQ ID NO: 107740 - DNA, 1602 bp, Moorella thermoacetica ATCC 39073
  CDS (1)..(1602): transl_table=11
atggccgagaagatccttatctacgataccaccctccgggacggcagccagggcgagggtatcagcctgtcggtagaggataaactaaagattgcctcccgcctggaccggctgggcgtagattatatcgagggtggctggccctgggccaatcccaaggatatggagtttttcctccgggcacgggaggtcatctggcgccaggccaggctggtggccttcggccgtacccgcaagcccggccaggccgccgccgaggacgccaacctgctggccatcaagcgggccggagtaaaggtggccactatttttggcaaatcatgggatcttcatgtcacggcggccctggggaccaccctggccgaaaacctggccatgatcggcgacagcgtggccttcctggtggaccagggcctggaagtaatctatgacgccgaacacttttttgacggcttcaaggccaacccggattatgccctggaaaccctgaaggcggcggcaaaggccggggccagctggattgtcttgtgtgacaccaatggcggttgcctgccatgggagattgaggaggcggtagccagggtacgccaggagatccaggtgccggtgggtattcacgcccataacgacggcgacctggccgtggccaacaccctggcggcggtgaccgccgggtgccgccaggtccaggggaccatcaacggctttggcgagcgctgcggcaacgccgacctgtgctcggtaatgcccaacctggaactcaagatgggctaccagtgcctgccgccgggacaactggcctttctcacggaagtctcccgttatgtcagcgagattgccaacgtcgtccctgccggcaaccagccctttgtcggctatagcgcctttgcccataaaggcggcatccacgtcagcgccgttttgaaggcaccggatacctacgagcatatccggccccagcaggtaggcaacgagcggcgggtgttaatgtcggaccaggccggggccagcaacctgcggtgcaaagcggaggagatggggctggagttgaacccggagcgggaacgaggcatcatagagggaatcaaggaactggaacgccagggctaccagttcgagggagccgatgcctccctggagcttttcctgcggaagacgacgggcgaataccggcagcagtttgaagtcgagtatgtcaaagccctggtagaaaagagggccgggcaggaggccatatcggaagccatagtcaagctgcgggtgggcgaccaggtggtccatacggccgccgaaggcaacggccctgtaaacgccatggataacgccctgcggaaagccctggaagaagtcttcccggctattcggcacatgcgcctgactgactacaaagtacgcgtccttgatgaaaaggatgccaccagcgcccgcgtcagggtactcattgaatcccgggacggcagcaattcctggaatactgtcggcgtctccaccaatattatcgaagccagctgggaggcccttctggacagtatggagtacgccctccttaaacaacagcaggagttaaataagcgggcggcagccccctgtgaaccttattag

SEQ ID NO: 107741 - protein, 533 aa, Moorella thermoacetica ATCC 39073
MAEKILIYDTTLRDGSQGEGISLSVEDKLKIASRLDRLGVDYIEGGWPWANPKDMEFFLRAREVIWRQARLVAFGRTRKPGQAAAEDANLLAIKRAGVKVATIFGKSWDLHVTAALGTTLAENLAMIGDSVAFLVDQGLEVIYDAEHFFDGFKANPDYALETLKAAAKAGASWIVLCDTNGGCLPWEIEEAVARVRQEIQVPVGIHAHNDGDLAVANTLAAVTAGCRQVQGTINGFGERCGNADLCSVMPNLELKMGYQCLPPGQLAFLTEVSRYVSEIANVVPAGNQPFVGYSAFAHKGGIHVSAVLKAPDTYEHIRPQQVGNERRVLMSDQAGASNLRCKAEEMGLELNPERERGIIEGIKELERQGYQFEGADASLELFLRKTTGEYRQQFEVEYVKALVEKRAGQEAISEAIVKLRVGDQVVHTAAEGNGPVNAMDNALRKALEEVFPAIRHMRLTDYKVRVLDEKDATSARVRVLIESRDGSNSWNTVGVSTNIIEASWEALLDSMEYALLKQQQELNKRAAAPCEPY

SEQ ID NO: 107742 - DNA, 1554 bp, Moorella thermoacetica ATCC 39073; identical to SEQ ID NO: 13106
  CDS (1)..(1554): transl_table=11

SEQ ID NO: 107743 - protein, 517 aa, Moorella thermoacetica ATCC 39073; identical to SEQ ID NO: 13107

SEQ ID NO: 107744 - DNA, 1599 bp, Syntrophus aciditrophicus SB; identical to SEQ ID NO: 13108
  CDS (1)..(1599): transl_table=11

SEQ ID NO: 107745 - protein, 532 aa, Syntrophus aciditrophicus SB; identical to SEQ ID NO: 13109

SEQ ID NO: 107746 - DNA, 1551 bp, Syntrophus aciditrophicus SB
  CDS (1)..(1551): transl_table=11
atggattcaccagagaaaagaatttatatttttgatacgacgctccgggatggggaacaatcacccggttcgagcatgaaccccgcggaaaaactccggatcgcccgccagctcgaaaagatgggggtcgatatcatcgaagccggcttccccatcgcttccgaaggcgatttcctttcggtccagcagatcgcccaggagatccgcggcgcccagattgccggtctggccagggccaacaacgccgatatcgaccgggcttgggaagcgattcgggacgcggccaatccgcgcattcacaccttcatctcctcctcggacatccatctgaaatatcagctccggaaatcccgggagcaggtcctgaaggaggccgtcgccgccgtcgaaagggcgcggagctatacgcccaacgtggaattttcccccatggacgccacccgcacggatcggggttatctctgcgaaatggtggaggcggtcattgccgccggggcatcgacggtcaacatccccgatacggtgggatacgccattccgcaggaattcggcgaactgatcgcctatcttcgtgccaacgttcccaatatttcccaggcgatcatctccgtgcactgccacaacgatctcggactggcagtggccaattccctgtccgccatcctcaacggcgcccggcaggtcgaatgcacgatcaatggcatcggggagcgggcgggcaacacggccatggaggaagtggtcatggccctccggacgcgcaaagatctcttcggcttttatacgggcatcaagacggagagcatttatcagtcctcccgtctgctgacccagatcacgggcgtcgcggtacagccgaacaaggctatcgtcggggcgaacgccttcgcccacgaatccggcattcatcaggacggcctgatcaaggaaaaaatcacctatgagatcatgacgcctcagtccgtcggcatttccgactcccacatcgttctgggcaagcattccggtcgtcacgccgtttcggagcacctgaaaaaactggggttcaacctgtccgacacggagctgaacaagatttttgtccgcttcaaggaactggccgacgccaaaaagaacgtcttcgacgaagacctggaagccattgtctatgaagagctttaccgggtagaggacaaatacaagctgatctacctcaatgtggtcagcggaaacgtcgccatccccacggccacgatgcagatggaagtggacagggaaatcgtccaggatgccggcttcggtgtcggtccggtggatgccacctttgacgcgatccggaaaatcacgggcacaaactacgatctgctccgctacgtcgtcaatgccatctccggcgggacggacgctcagggcgaagtgaccgtgcagctcaagttcaacggccgctccgtcgtggggcacggcgccgacctcgatgtcatcgtggcttcggcccgggcctacatcaacgccctgaaccgcctggagttcctcaagcgggatgccggcaagatcaaatcggaatacgaatag

SEQ ID NO: 107747 - protein, 516 aa, Syntrophus aciditrophicus SB
MDSPEKRIYIFDTTLRDGEQSPGSSMNPAEKLRIARQLEKMGVDIIEAGFPIASEGDFLSVQQIAQEIRGAQIAGLARANNADIDRAWEAIRDAANPRIHTFISSSDIHLKYQLRKSREQVLKEAVAAVERARSYTPNVEFSPMDATRTDRGYLCEMVEAVIAAGASTVNIPDTVGYAIPQEFGELIAYLRANVPNISQAIISVHCHNDLGLAVANSLSAILNGARQVECTINGIGERAGNTAMEEVVMALRTRKDLFGFYTGIKTESIYQSSRLLTQITGVAVQPNKAIVGANAFAHESGIHQDGLIKEKITYEIMTPQSVGISDSHIVLGKHSGRHAVSEHLKKLGFNLSDTELNKIFVRFKELADAKKNVFDEDLEAIVYEELYRVEDKYKLIYLNVVSGNVAIPTATMQMEVDREIVQDAGFGVGPVDATFDAIRKITGTNYDLLRYVVNAISGGTDAQGEVTVQLKFNGRSVVGHGADLDVIVASARAYINALNRLEFLKRDAGKIKSEYE

SEQ ID NO: 107748 - DNA, 1671 bp, Novosphingobium aromaticivorans DSM 12444
  CDS (1)..(1671): transl_table=11
atgaccatgctgaagaacccctcggccaagtaccgtcccttcccgcagatcgacctgcccgatcgccagtggcccagccgcacgatcaccaaggccccgcgctggctctcgaccgacatgcgcgacggcaaccagtcgctgatcgatccgatggatgccgaaaagaagagccgtttcttcgatctgctgctcaaggtgggcatcaaggaaatcgaggtcggcttcccctctgccggcgcgaccgagtacgatttcatccgcgggctggtcgattccggccgcattcccgatgacgtcttcgtccaggtcctcacgcagtcccgcgaggacctgatcaagacgtcgttcgaaagcctcgccggcgcgaagcaggccatcgtccacgtctacaacgcggtttcgccgctgtggcgccaggtcgtgttcggcatggaaaagtcggacgtgaaggacatcgccatcgccggtgccaagcacctgcgcgatcaggccgctcgcttcccgcagaccgactggcacttcgaatacagcccggagacgttctccactgccgaactcgatttcagcattgaatgctgcgaggcggtcatggaaattctccagccgacggtcgaaaagccgatcatcctcaacctgcccgcaacggtcgaggcggcgacggccaacatctatgcggaccagatcgaatacttctgccgcaatctgccgggccgcgaccgcgcggtgatctcgctgcacacccacaacgaccgcggcaccggcgtcgccgccgccgagctcggcctgatggcgggcgcggaccgcgtcgagggttgcctgttcggcaatggcgaacgcacgggcaattgctgcctcgttaccgtcggcctcaacatgtacacgcaaggggtcgatccggagcttgacttctcggacatcgacgaagtgatccagacggttgaatactgcaaccagctccccgtccatccgcgccatccctatggcggcgaactggtcttcaccgcgttttccggcagccaccaggacgccatcaagaagggcttcgccgcgcaggaaaagcgcaatgacgaactctggtcggtgccctacctgccgatcgacccggccgatctcggccgcagctacgaagctgtgatccgcgtcaattcgcaatccggcaagggcggctttgcctgggtcctggaacaggaccagggcctcaagctgcccaagaagatgcaggcgcacttctcgcgccacgtgcaggaactggccgacgaactgggccgcgaactgcaggcggcagatatctggggcgtcttccgcaaggcctatcgcctcgacgcgccgcagcatctgcaactgatcgactacgaagaaacgcgcggtgccgacgggacgcgcatcttcgctggcaagatcgaggtcgatggcaaggtccagtccgtgtccggtcgtggcaatggcctgatttcctcggtcgtggccacgctgcgcgacggcttcggcgtcgagatcgacataaccgactattccgaacatgcgatgggcgccggcagcaacgctcgcgcggccgcctacgtcgaatgcaggaccgcagatggccgcaccatctggggcgtggggatcgatgaagacgtcgccacggccagcgtccgcgccgtgctcagcgcggccaacgcggtcgggtga

SEQ ID NO: 107749 - protein, 556 aa, Novosphingobium aromaticivorans DSM 12444
MTMLKNPSAKYRPFPQIDLPDRQWPSRTITKAPRWLSTDMRDGNQSLIDPMDAEKKSRFFDLLLKVGIKEIEVGFPSAGATEYDFIRGLVDSGRIPDDVFVQVLTQSREDLIKTSFESLAGAKQAIVHVYNAVSPLWRQVVFGMEKSDVKDIAIAGAKHLRDQAARFPQTDWHFEYSPETFSTAELDFSIECCEAVMEILQPTVEKPIILNLPATVEAATANIYADQIEYFCRNLPGRDRAVISLHTHNDRGTGVAAAELGLMAGADRVEGCLFGNGERTGNCCLVTVGLNMYTQGVDPELDFSDIDEVIQTVEYCNQLPVHPRHPYGGELVFTAFSGSHQDAIKKGFAAQEKRNDELWSVPYLPIDPADLGRSYEAVIRVNSQSGKGGFAWVLEQDQGLKLPKKMQAHFSRHVQELADELGRELQAADIWGVFRKAYRLDAPQHLQLIDYEETRGADGTRIFAGKIEVDGKVQSVSGRGNGLISSVVATLRDGFGVEIDITDYSEHAMGAGSNARAAAYVECRTADGRTIWGVGIDEDVATASVRAVLSAANAVG

SEQ ID NO: 107750 - DNA, 1548 bp, Saccharophagus degradans 2-40; identical to SEQ ID NO: 13114
  CDS (1)..(1548): transl_table=11

SEQ ID NO: 107751 - protein, 515 aa, Saccharophagus degradans 2-40; identical to SEQ ID NO: 13115

SEQ ID NO: 107752 - DNA, 1548 bp, Methylobacillus flagellatus KT
  CDS (1)..(1548): transl_table=11
atggaatttcaggctatgacccagaatcagctcattattttcgataccaccctgcgcgacggcgaacaaagccctggtgcggccatgactaaggaagagaagctgcgcattgcccgtcaactggaaaagctgggagtgaatgtgatcgaggccgggtttgctgcggcaagcccaggggatttcggtgccattcgtgccattgccgaggcgatcaccgaaaccaccgtctgttctctcgcgcgtgccaacgagaatgatattcgccgcgcaggagaagccatccagccggcaaagaagcgacgtattcatactttcatcgcgacgagcccaatccatatgcagaacaagctgcgcatgacgcccgaacaggtgctggatcgtgccgtgcaggcagtgcagtgggcgttggaatatactgacgatgttgaattttctgccgaagatgcagtgcgctccgacattgattttctggtgcaggtattcgatgccgtaatcgcggcaggtgccaagaccatcaatgtgcccgataccgtagggtattcggtgccaggacaatggggtgagcgcatggctcagctgattgcacgggtaaggaactcggacaaggtgatatggtcgacccattgccataacgatcttggcatggcggtggcgaactccttgtctgctgtgctggctggtgcgcgacaagtggaatgcacgatcaacgggttgggtgagcgtgcaggcaatgccagcttggaagagatagtgatggcggtcaagacgcgtcgtgacgtgttccagctcgaaaccaccatcgacaccacgcagatcgtggcgacatccaagctggtatcgacgatcaccggctatccagtacagcccaataaagccattgtgggcgcgaatgcatttgcccatgagtccggtatccaccaggacggcgtgctcaagcaccgtgagacctatgagatcatgcgcgcggaagacgtaggctggggcgccaataagttgacgctgggaaagctgtctggacgtaatgcttttcgtacccgtcttactgagcttggcattactctggagagtgaggacgcgcttaatgccgcattcgctcgcttcaaggagctggcagacaagaaatcagaaatattcgacgaggatatacaggcattagtcagcgataacgtggtcaatgaagagaacttcaagctgggatatttgcatgtagcatcgcagactggggaaactccccatgcggaagtggtcgtactggagaatggcgtcgagcaccgggcagatgctactggcggcggccctgtcgatgcggcgttcaaagcgattgaaaagattgtacgtagtggcgccgagctgttgctgtattccgtcaacaatatcaccagcggtaccgatgcgcagggcgaggtaacggtgcgcctgtccaagggggggcgtgtggtgaatgggcagggggccgatacggatatcgttattgcctcggccaaggcgtacctgaacggcctcaataagttgcatgcctatgcagagcgggcacatccgcaagtttag

SEQ ID NO: 107753 - protein, 515 aa, Methylobacillus flagellatus KT
MEFQAMTQNQLIIFDTTLRDGEQSPGAAMTKEEKLRIARQLEKLGVNVIEAGFAAASPGDFGAIRAIAEAITETTVCSLARANENDIRRAGEAIQPAKKRRIHTFIATSPIHMQNKLRMTPEQVLDRAVQAVQWALEYTDDVEFSAEDAVRSDIDFLVQVFDAVIAAGAKTINVPDTVGYSVPGQWGERMAQLIARVRNSDKVIWSTHCHNDLGMAVANSLSAVLAGARQVECTINGLGERAGNASLEEIVMAVKTRRDVFQLETTIDTTQIVATSKLVSTITGYPVQPNKAIVGANAFAHESGIHQDGVLKHRETYEIMRAEDVGWGANKLTLGKLSGRNAFRTRLTELGITLESEDALNAAFARFKELADKKSEIFDEDIQALVSDNVVNEENFKLGYLHVASQTGETPHAEVVVLENGVEHRADATGGGPVDAAFKAIEKIVRSGAELLLYSVNNITSGTDAQGEVTVRLSKGGRVVNGQGADTDIVIASAKAYLNGLNKLHAYAERAHPQV

SEQ ID NO: 107754 - DNA, 1542 bp, Ralstonia metallidurans CH34
  CDS (1)..(1542): transl_table=11
atgtctgacaaactcatcattttcgacaccaccttgcgtgacggcgagcagtcgcccggcgcgtccatgacccgcgaagagaagattcgcattgcgcgtcagcttgaacgcctgaaggtcgacgtgatcgaggccggttttgcggcaagctccaatggtgacttcgaggccatccgctcgatcgcccaggtggtcaaggattcgacgatatgctcgttggcccgtgccaatgacaaggacatcgctcgtgccgccgaggcgctcaagccggcaaactcgttccgtatccacacgttcatcgccacctcggcgctgcacatggaaaagaagctgcgcatgacgccggaccaggtttatgagcaggcacgtctggccgtgcgcttcgcgcgccagttcacggacgacatcgagttctcgccggaggatggcagtcgctcggacatggacttcctgtgccgcgtgctcgaaggcgtgatcgccgagggcgccaccacgatcaacctgcccgacaccgtgggctatgccgtgccagaaggctatgccgagttgatccgctcggtgcgcgagcgcattccgaactcggacaaggccgtatggtcggtgcattgccacaatgacctcggcatggccgtggcaaactccctggctgctgtgaagctcggcggcgcgcgccagatcgagtgcacgatcaacggccttggcgaacgcgcgggtaacaccagcctggaagaagtagtgatggccgtgaagacgcgccgtgactatttcaacatggatgtgggcatcgacacgacccagatcgtgccggcctcaaagcttgtgtcgcagattaccggcttcgtcgtgcagccgaacaaggccgtggtgggcgctaacgcgtttgcccatgcatccggcattcaccaggatggcgtgctcaaggcgcgcgatacctacgagatcatgcgcgccgaggatgtgggctggacggccaacaagatcgtgcttggcaagctctcgggccgcaatgcgttcaagcagcgtctgcaggagcttggcgtccaactcgaaagcgaagcggagatcaatgcggcatttgctcgcttcaaggagctcgccgaccagaaggccgagatcttcgacgaagacatcatggcgatcgtctccgatgaagagcaagagcacgccaatgagcactatcgcttcatctcgctgtcgcagcgctcggaaacgggtgagcgcccccatgctcgcgtggtgttcaacattgatggcagcgagcagaccggcgaagccgaaggcaatggtccggtggacgccacgctgcacgcgatcgaaggcaaggtcaacagcggtgccgaactggtgctgtactcggtgaacgcgatcaccgccggcacgcaggcccagggtgaagtcacggtacgtctgtcgaaggcgggccgtatcgtcaatggcgtgggtaccgacccggatatcgtcgccgcatcggccaaggcctacctggccgcgctgaacaagctgcacgacaaggctgtgcagaagatcaacccgcagatctga

SEQ ID NO: 107755 - protein, 513 aa, Ralstonia metallidurans CH34
MSDKLIIFDTTLRDGEQSPGASMTREEKIRIARQLERLKVDVIEAGFAASSNGDFEAIRSIAQVVKDSTICSLARANDKDIARAAEALKPANSFRIHTFIATSALHMEKKLRMTPDQVYEQARLAVRFARQFTDDIEFSPEDGSRSDMDFLCRVLEGVIAEGATTINLPDTVGYAVPEGYAELIRSVRERIPNSDKAVWSVHCHNDLGMAVANSLAAVKLGGARQIECTINGLGERAGNTSLEEVVMAVKTRRDYFNMDVGIDTTQIVPASKLVSQITGFVVQPNKAVVGANAFAHASGIHQDGVLKARDTYEIMRAEDVGWTANKIVLGKLSGRNAFKQRLQELGVQLESEAEINAAFARFKELADQKAEIFDEDIMAIVSDEEQEHANEHYRFISLSQRSETGERPHARVVFNIDGSEQTGEAEGNGPVDATLHAIEGKVNSGAELVLYSVNAITAGTQAQGEVTVRLSKAGRIVNGVGTDPDIVAASAKAYLAALNKLHDKAVQKINPQI

SEQ ID NO: 107756 - DNA, 1629 bp, Silicibacter sp. TM1040
  CDS (1)..(1629): transl_table=11
gtgacggaacggctctatctttatgacaccaccctgcgcgacggtcagcagacccaaggggtgcaattctccacgcttgaaaaaaagcagatcgcccaggcccttgacgacctaggtgtggactatatcgaaggcggctggccgggggccaaccccaccgacagcgcctttttcgatgaggcgcccaagacccgcgcgacgctcaccgcctttggcatgaccaagcgggcaggacgttcggcggcaaatgacgatgtgctggcggctgtgatgaacgcaggcacccggtcggtctgtcttgtgggcaagtcgcatgattatcacgtaacgaccgcgcttgggatcagccttgacgagaacctcgacaacatcgcgcagtcggtggcgcatatcgtggccgaggggcgcgaggcgctgtttgatgcagagcatttctttgatggctacaaggcgaacccggagtatgcgctggcggcctgccgtgccgcgctcgatgcgggcgcgcgctgggttgttctgtgtgatacaaatggtggcacgctgccgcatgaggtgtctcggatcgtcactgaggtgattgctgcggggctgccgggcgagaagctcggcattcacacccacaatgacaccgaaaacgcggtggcctgttcgctggcagcggtggacgccggggtgcgccagatccaggggacgctgaatgggctgggggagcgctgcggcaacgccaatctcaccacgctgatcccgacgctgctgctgaaggagccctacgcgagcggctatgagacaggcgtgccaaaaggcgcgctggcccggctcaccaaggtcagccggatgcttgatgagatcctcaaccgggtgccgcagaagcaggccgcctatgtgggggcctcggcctttgcccataaggcgggcctgcacgccagcgcgatcctcaaggacccgtcaacctatgagcatatcgacccggctgtggtcggcaacggccgcatcattccgatgtccaatcaggccgggcagtcgaacctgcgccgtcgtctggccgaggcgggcctcacggttgaaaaaggcgaccctgcgttgggccgtattctggagcgggtgaaggaacgcgagaccgagggttactcctatgacaccgcgcaggcctcgttcgagctgctcgcgcgcgaagaactgggccagatgccagagtttttcgaagtgaagcgctacaaggtcaccgtggagcggcgcaagaacaagtacaacaagatggtgagcctctccgaggcggtggtcgtggtcaaggtcgacggtgaaaagctgctctcggtgagtgaatcgctggatccctcgggcagcgaccgtggaccggtgaacgcgctcgcaaaggcgttgcgcaaggatttggggcgctattccaaggtgttggatgatatgcgtctggtcgacttcaaggtgcggatcacccaggggggcaccgaggccgtgacccgcgtgatcatcgacagcgaggacggcaaggggcggcgctggtccacggttggggtcagtgccaacatattggatgcctcgttcgacgcgctgcttgatgcgatgaactggaagcttctgcgggatgcatctgaggcagcggatgcagtttga

SEQ ID NO: 107757 - protein, 542 aa, Silicibacter sp. TM1040
MTERLYLYDTTLRDGQQTQGVQFSTLEKKQIAQALDDLGVDYIEGGWPGANPTDSAFFDEAPKTRATLTAFGMTKRAGRSAANDDVLAAVMNAGTRSVCLVGKSHDYHVTTALGISLDENLDNIAQSVAHIVAEGREALFDAEHFFDGYKANPEYALAACRAALDAGARWVVLCDTNGGTLPHEVSRIVTEVIAAGLPGEKLGIHTHNDTENAVACSLAAVDAGVRQIQGTLNGLGERCGNANLTTLIPTLLLKEPYASGYETGVPKGALARLTKVSRMLDEILNRVPQKQAAYVGASAFAHKAGLHASAILKDPSTYEHIDPAVVGNGRIIPMSNQAGQSNLRRRLAEAGLTVEKGDPALGRILERVKERETEGYSYDTAQASFELLAREELGQMPEFFEVKRYKVTVERRKNKYNKMVSLSEAVVVVKVDGEKLLSVSESLDPSGSDRGPVNALAKALRKDLGRYSKVLDDMRLVDFKVRITQGGTEAVTRVIIDSEDGKGRRWSTVGVSANILDASFDALLDAMNWKLLRDASEAADAV

SEQ ID NO: 107758 - DNA, 1584 bp, Silicibacter sp. TM1040
  CDS (1)..(1584): transl_table=11
atgaccagcaagaccgacaccgtgaaccagcaggatcgcgttctcatttttgacaccacgttgcgcgatggcgagcagagccccggcgcgaccatgacccatgatgaaaagctcgagattgccgagcttctggacgatatgggtgtcgacatcatcgaggccggtttcccgattgcctcggagggcgatttcaaggccgtgagcgagatcgcggaacgctccaagaactctgtgatctgtggcctggcgcgtgcgaatttcaaggacatcgaccgctgcgccgaagccgtgcgcaaggctgcgaagccccgcatccacacgtttatcggcacgtcgccgctgcaccgcgccattcccaaccttaccatggatgagatggccgagcgcatccacgacaccgtgacccatgcgcgcaacctcgtggacaatgtgcaatggtcgccgatggatgccacgcgcaccgaatgggattacctctgccgggtcatcgagatcgcgatcaaggcgggggcgactaccatcaacatccctgacacggttggctataccgcgccgcgcgagagcgccgacctgatccggcgcctgattgaaaccgtgcccggcgctgacgagatcatctttgcgacccattgccataacgaccttggcatggcgaccgcgaactctttggccgcagtcgaggcgggcgcgcgccagatcgaatgcacgatcaacggccttggcgagcgtgcgggcaataccgcgctcgaagaggtggtgatggcaatgcgcgtgcgcaacgacatcatgccgttccagaccgggatcgacaccaagaagatcatgcatatctcgcgccgcgtcgccacggtttcgggctttaacgtgcagttcaacaaggcgatcgtcggcaagaatgcctttgcccacgaaagcggcatccaccaggatggcatgctcaagaacaaggaaaccttcgagatcatgcgccccgaagacgtgggccttgctggaacgtcgctccccttgggcaaacactccggccgcgccgcgctgcgcgacaagctctcgagcctcgggtttgaaatcggagacaaccagctcaaggatgtattcgtgcgcttcaaggagctcgcggaccgcaagaaagaggtgttcgacgacgacatcatcgcgctcatgcgcaccagcggcgacgaggacgatcacctgaagctggtgtcgatgaaagtggtctgcggcaccggtggtccggcggaatccaccgtcgagatggaagttgacggcaaggacgtgacggaaaccgccgagggcgacggaccggtggatgccacattcaaggcgatccgcaagatccaccccaacgccgcgcatctgcagctttatcaggtgcacgccgtgaccgagggcacggacgcgcaggcaaccgtctctgtgcgccttgaagaagacggcgtgatcgccaccggcgacagcgccaacaccgatacggttgtggcctctgcgatggcatacattgacgcgctcaaccgcctgatcgtgcgccgcgacaagatgggcgaaggcgcggattcgcgcgagatttcctataaagacgtggactga

SEQ ID NO: 107759 - protein, 527 aa, Silicibacter sp. TM1040
MTSKTDTVNQQDRVLIFDTTLRDGEQSPGATMTHDEKLEIAELLDDMGVDIIEAGFPIASEGDFKAVSEIAERSKNSVICGLARANFKDIDRCAEAVRKAAKPRIHTFIGTSPLHRAIPNLTMDEMAERIHDTVTHARNLVDNVQWSPMDATRTEWDYLCRVIEIAIKAGATTINIPDTVGYTAPRESADLIRRLIETVPGADEIIFATHCHNDLGMATANSLAAVEAGARQIECTINGLGERAGNTALEEVVMAMRVRNDIMPFQTGIDTKKIMHISRRVATVSGFNVQFNKAIVGKNAFAHESGIHQDGMLKNKETFEIMRPEDVGLAGTSLPLGKHSGRAALRDKLSSLGFEIGDNQLKDVFVRFKELADRKKEVFDDDIIALMRTSGDEDDHLKLVSMKVVCGTGGPAESTVEMEVDGKDVTETAEGDGPVDATFKAIRKIHPNAAHLQLYQVHAVTEGTDAQATVSVRLEEDGVIATGDSANTDTVVASAMAYIDALNRLIVRRDKMGEGADSREISYKDVD

SEQ ID NO: 107760 - DNA, 1533 bp, Rubrobacter xylanophilus DSM 9941
  CDS (1)..(1533): transl_table=11
atgcgccggatccagatcttcgacaccacccttcgcgacggggagcagtcccccgggatctccctctccgtggaggagaaggtagagatagcccaccagctggcccggctgaaggtagacgtgatcgaggccggcttccccatcacctccgagggggacttcgaggcggtgagccgcatcgcctccgaggtggagggcccggtcatcgcggggctggcccgcatccaccaggaggacatcgagcgggcctgggaggcggtgcgctggtcgcggcggccccgcatccacaccttcgtgggcacctccgacctgcacatcgagcaccagatgcgctcgacgcgcgaggagatactgagcggcgccgccgaggcggtgcgcctggcgaagagcctgtgcgagaacgtggagttctcccccatggacgccaccaggacggacatcgggtacctggccgaggtcgtcgccgcggcggtggaggcgggcgccgacgtgatcaacatcgccgacacggtcggctacaccaccccggcggagttcgccgccttcctcagggagctcaaggagcgggtgcccgggctcgccgagcgcgtgctctccgtccactgccacgacgacctggggatggcggtggccaactcgctcgccggggtcgaggccggggccacccaggtggaggtggcggtgaacggcatcggggagcgggccgggaacgcctccctggaggaggtggtgatggcgctggtgacccggaaggactactacggggtcgaggtgggggtggagacccgccagctcgccaacaccagccgcatggtctccaacatgaccggctacgacgtgccgccgaacaaggccgtcgtgggccgcaacgcctttctgcacgagtcgggcatccaccaggacggggtgctcaaggaccggcgcaccttcgagatcatgaagcccgcggacatcgggctggaggggaccaacatcttcctgggcaagcactcgggccggcacgccctcaaggaggccctggcggacctgggctacaccctggagggcgagaccctcaagcgggccttcaagcgcttcaaggagctcgccgaccacaagaagacggtgacggcggcggacctggaggccatcgccgccgacgaggtgggctccttcgaggggaagttcgtgctggagtccttccgggtggtcgccgccacggggcgccagagccgggcggcggtcaggatcgcgcacgccgaccgcgggaccttcgaggccgaggcggagggcgaggggccggtggacgcggtcttccgcgccatcgactcggccaccggcatcaagggccgcctgacggacttccgcatcgacgcggtgacgggcggcaaggacgccctgggcgaggtgcgggtgacggtggagttcgagggcaccgagtgcgccgggcgcggcctctcccaggacgtggtggaggcggcggcccgcgcctacgtccgggcggtgaacgtctacaccgccggggcggtgaaggtgccccaggcaaccccttag

SEQ ID NO: 107761 - protein, 510 aa, Rubrobacter xylanophilus DSM 9941
MRRIQIFDTTLRDGEQSPGISLSVEEKVEIAHQLARLKVDVIEAGFPITSEGDFEAVSRIASEVEGPVIAGLARIHQEDIERAWEAVRWSRRPRIHTFVGTSDLHIEHQMRSTREEILSGAAEAVRLAKSLCENVEFSPMDATRTDIGYLAEVVAAAVEAGADVINIADTVGYTTPAEFAAFLRELKERVPGLAERVLSVHCHDDLGMAVANSLAGVEAGATQVEVAVNGIGERAGNASLEEVVMALVTRKDYYGVEVGVETRQLANTSRMVSNMTGYDVPPNKAVVGRNAFLHESGIHQDGVLKDRRTFEIMKPADIGLEGTNIFLGKHSGRHALKEALADLGYTLEGETLKRAFKRFKELADHKKTVTAADLEAIAADEVGSFEGKFVLESFRVVAATGRQSRAAVRIAHADRGTFEAEAEGEGPVDAVFRAIDSATGIKGRLTDFRIDAVTGGKDALGEVRVTVEFEGTECAGRGLSQDVVEAAARAYVRAVNVYTAGAVKVPQATP

SEQ ID NO: 107762 - DNA, 1611 bp, Mesorhizobium sp. BNC1
  CDS (1)..(1611): transl_table=11
atgaaagaacgcatctatctcttcgataccaccttgcgcgacggacagcagactccgggcgtggacttttccgttgaggacaagatcgccatcgcgcagctgctcgatgagctcggcgttgattatgtcgagggcggatatcccggcgccaacccgaccgacacggagtttttctccaaaaagcgcacgcgacgcgccgccttcgtggcgttcggaatgacaaagcggccggggatctctgccgccaacgatccgggccttgcggcgcttacgcaagctgagagcgatgcggtctgctttgtcgccaaaagctgggattatcacgtgcgggtcgccctcggcgcgaccaatgaagagaatttggagtcaatccgctcttccgtggctgctgcgcgcgcggccggaagggaagccatagtcgactgcgagcacttcttcgacggctacaaggccaatccggactacgcgctcgcctgtgcgctagccgcctatgaggcggcgtgccgctgggtggtgctatgcgacaccaacggcggaacgcagccgagggaagtgcgcgagatcgtgtcggcggtcatcgcagccggcattcccggctcgcatcttggcatccatgcccatgacgataccggccaggcggtcgcgaattccctggccgcggtcgaggcgggcgtaaggcagatccagggcacccttaacggcatcggcgagcggtgcgggaacgccaatctcgtcacgatcattcccacgctgatgctcaagccggtctatgccgaacgcttcgaggtgggcatagccgaggacgagctgaaacgcatctcgcgcatttcgcatgctttcgacgagctcctgaaccgggcgcccgatacgcaggcgccctttgtgggcacgtccgccttcgcgaccaaggcgggaatccacgcctcggcgatcctgaaagacccgcagacctacgagcatgtgctgcctgagcgggtaggcaacacgcgacgggtgatggtctctgaccagggaggaaagtccaacttcatcgccgagcttacacggcgcgggattcaggtggagaaggcagatccccggctcgacacgctgattgcgctggtgaaggagcgcgaggcgcaaggctatgcctatgagggcgcggatgcgagcttcgagcttctggcgcgccgcatacttggaaaggtgcccgaattcttcaaggtggatggcttccgctgcatggtggagcgccggttcgacgccaatggcaacctgaagaccgtctccgaggctgtagtgcgcgtgacgatcgacggggagacgcggctctcggtcgcggaagggcacggccccgtgaacgcgcttgacgtcgcgcttcggaaggacctcggcaaatttcagtcggaaatcgaggatatgacccttacggactataaggtgcggatcctcaatggcggcaccgaggccgtcacgcgcgttttaatcgaatcccatgacgctgcgggggaccgctggtggaccgtgggcgtttccgacaacatcatcgatgcgtcctttcaagcgctgatggattccattgtctataagctggtgaagaaccgggaaaggaccggcctcgcggccgaatga

SEQ ID NO: 107763 - protein, 536 aa, Mesorhizobium sp. BNC1
MKERIYLFDTTLRDGQQTPGVDFSVEDKIAIAQLLDELGVDYVEGGYPGANPTDTEFFSKKRTRRAAFVAFGMTKRPGISAANDPGLAALTQAESDAVCFVAKSWDYHVRVALGATNEENLESIRSSVAAARAAGREAIVDCEHFFDGYKANPDYALACALAAYEAACRWVVLCDTNGGTQPREVREIVSAVIAAGIPGSHLGIHAHDDTGQAVANSLAAVEAGVRQIQGTLNGIGERCGNANLVTIIPTLMLKPVYAERFEVGIAEDELKRISRISHAFDELLNRAPDTQAPFVGTSAFATKAGIHASAILKDPQTYEHVLPERVGNTRRVMVSDQGGKSNFIAELTRRGIQVEKADPRLDTLIALVKEREAQGYAYEGADASFELLARRILGKVPEFFKVDGFRCMVERRFDANGNLKTVSEAVVRVTIDGETRLSVAEGHGPVNALDVALRKDLGKFQSEIEDMTLTDYKVRILNGGTEAVTRVLIESHDAAGDRWWTVGVSDNIIDASFQALMDSIVYKLVKNRERTGLAAE

SEQ ID NO: 107764 - DNA, 1554 bp, Haemophilus somnus 129PT
  CDS (1)..(1554): transl_table=11
atgcaaaacaacattattatttttgatacaacattgcgtgatggtgaacaggcattaaaagccagtttaacagtaaaagaaaaattacaaattgcattggcgttggaacgtttaggtgttgatgtaatggaagtggggtttccagtatcatcagcaggggattttgaatccgttcaaaccattgctcgtcatataaaaaacagtcgtgtttgtgccttatcccgtgcaatggataaagacattgatattgcggctgacgcattaaaagtagctgaagcgttccgtattcatacgtttatcgccacttccgctttgcatgtcgaagctaaattacgccgcacttttgatgatgtcgtggaaatggcaatacaagcagtaaaacgtgccagacgttataccgatgatgtggaattttcctgcgaagatgccggtcgaacaggtgttgacaacatttgtcgtatcgttgaggcggcgattaaagcgggtgcaacaacagtcaatattccagatactgtaggtttttgtttacccaccgaatacggtaatatcatcaatcaagtgatgaacagagtaccgaatatcgataaagcagtaatttcggtgcattgccataatgatttaggcatggcgactgcaaattcgttgaccgcagtacaaaacggtgcaagacaaattgaatgtaccattaatggcattggggagcgtgcaggaaatactgcattggaagaagtagttatggcaattaaaacacgtcaagatatatttaagggcttagatacacgaattaatacacaagaaattcatcgtgtcagtcagatggttagccagttgtgtaatatgccaattcagccgaataaagctattgtcggatcaaatgcttttgcacattcttcaggtattcatcaagacggtatggttaaaaataaaaatacttacgaaattatgtcgccggaaaccatcggattgaaaaaagaaaaattgaatttaaccgctcgttcaggacgtgcagcagtaaaaagccatatggacgcaatgggttatcaacaaaacgattatgatttggataaattatacgccgcatttttaaaattagccgataaaaaagggcaagtatttgattatgatttggaagcattggcatttattgatatgcaacagggtgatgaagatcggctaagtttggatgttattacttctcaaacaatcagtaatttaccggcttctgcctttgtgcaagttgagctggacggtaaaaaaattagccaagtttcaaatgggggaaatggtcccgttgatgccgtttataacgctattttagcaattacagatatggatataactatgttgcattataacctgactgcaaaaggtgagggagcagaagccttaggacaagtggatattgttgtcgaacataaagggcgacgttttcatggtgtcggattggcaacggatattgtagaatcttcggctcgtgccttaattcatgcaatcaatgccatttatcgtgccaataaagtggcagatttaaaatcgcataaaatttcacagtaa

SEQ ID NO: 107765 - protein, 517 aa, Haemophilus somnus 129PT
MQNNIIIFDTTLRDGEQALKASLTVKEKLQIALALERLGVDVMEVGFPVSSAGDFESVQTIARHIKNSRVCALSRAMDKDIDIAADALKVAEAFRIHTFIATSALHVEAKLRRTFDDVVEMAIQAVKRARRYTDDVEFSCEDAGRTGVDNICRIVEAAIKAGATTVNIPDTVGFCLPTEYGNIINQVMNRVPNIDKAVISVHCHNDLGMATANSLTAVQNGARQIECTINGIGERAGNTALEEVVMAIKTRQDIFKGLDTRINTQEIHRVSQMVSQLCNMPIQPNKAIVGSNAFAHSSGIHQDGMVKNKNTYEIMSPETIGLKKEKLNLTARSGRAAVKSHMDAMGYQQNDYDLDKLYAAFLKLADKKGQVFDYDLEALAFIDMQQGDEDRLSLDVITSQTISNLPASAFVQVELDGKKISQVSNGGNGPVDAVYNAILAITDMDITMLHYNLTAKGEGAEALGQVDIVVEHKGRRFHGVGLATDIVESSARALIHAINAIYRANKVADLKSHKISQ

SEQ ID NO: 107766 - DNA, 1605 bp, Trichodesmium erythraeum IMS101
  CDS (1)..(1605): transl_table=11
atgaacaaaatctggatttacgatacaactctgcgggacggtgcccaacgagaaggattatccctatccttagaagataaattacgtattgtccaccagctcgacagtttagggattccctttatcgaaggcggttggcctggagccaatcctaaagatgtacaatttttttggcatctcaaagagcaacccctaactcaagcagaagtcgtagcattttgttccacccgacgtcctggaaaacaagcagcatcagatcctactctccaacctatcttgtctgcgggtacacggtgggtaacaatttttggtaaatcttgggacttgcacgttactgaagggttaaaaactactcttgaagaaaatttagagatgatttcagatacaatttcctatctgtgtagtcaaggttgtcaggttatttacgatgctgaacattggtttgatggttacaaacataaccccaattatgctttacaaactttaactgctgccaaaaatgcaggggctcaatggttagttctatgcgacacgaatggaggaaccctaccacacgaagctactcaaatagtagcagatgtttctagagagttacctaatactagattaggtattcacactcataatgattctggtactgctgtggctaatgccttgtctgcagtgatcgaaggagtacagatggtgcagggaactattaatggttatggggagcgttgtggtaatgctaatctctgtactttaattcctaatttacaaattaagttgggttatgattgtattcaatcacaaaaactggaaaaactgactcaggtcagtcgaggtattagtgaaatagttaatcttgctcctgacgaccatgcaccatttgtaggtttatcagcttttgctcataagggtggtattcatgtgtctgcggtggaacgtaaccctctaacttatgaacatattcaaccccaagaagtaggtaatactcgtcgtattgtgatttctgaccaagcaggtttgagtaatgtgttagcaaaggcaaaaagttttggcatagaactagatcgccaaaacccagcttgtcgaaaaattttggataagttaaaagagttggaaaatcaggggtatcaatttgaggcagcggaggccagttttgagttattaatgcgaagtgctttggagcgaaggcagcatttttttgagattaaaggtttccaggtacatttagataaggagagtgctaaggtttctaattctctggcaacggtgaaggttgctgttgatggtagggatattctcgaagctgctgaaggaaatggtccggtttctgctttggatactgctttacggaaggctttaggaaatttttatccagcgatcgctaatttttacttgacagactataaggtgagaattttggatagtggagcgggtacttctgctaagactagggtgttaattgagtcgagtaatggtcaacaacggtggactactgtgggagtttctactaatattttggatgcttcttatctcgctgttattgaaggtttggagtatggtttgatgttggaaagtcagtctcaagaaaatgcggtcagtgtagtgatcgtaaactga

SEQ ID NO: 107767 - protein, 534 aa, Trichodesmium erythraeum IMS101
MNKIWIYDTTLRDGAQREGLSLSLEDKLRIVHQLDSLGIPFIEGGWPGANPKDVQFFWHLKEQPLTQAEVVAFCSTRRPGKQAASDPTLQPILSAGTRWVTIFGKSWDLHVTEGLKTTLEENLEMISDTISYLCSQGCQVIYDAEHWFDGYKHNPNYALQTLTAAKNAGAQWLVLCDTNGGTLPHEATQIVADVSRELPNTRLGIHTHNDSGTAVANALSAVIEGVQMVQGTINGYGERCGNANLCTLIPNLQIKLGYDCIQSQKLEKLTQVSRGISEIVNLAPDDHAPFVGLSAFAHKGGIHVSAVERNPLTYEHIQPQEVGNTRRIVISDQAGLSNVLAKAKSFGIELDRQNPACRKILDKLKELENQGYQFEAAEASFELLMRSALERRQHFFEIKGFQVHLDKESAKVSNSLATVKVAVDGRDILEAAEGNGPVSALDTALRKALGNFYPAIANFYLTDYKVRILDSGAGTSAKTRVLIESSNGQQRWTTVGVSTNILDASYLAVIEGLEYGLMLESQSQENAVSVVIVN

SEQ ID NO: 107768 - DNA, 1626 bp, Trichodesmium erythraeum IMS101
  CDS (1)..(1626): transl_table=11
atgatcaccagtcaagaccgagttattatttttgatactaccctcagggatggagaacaatctccaggagcaactctcaatatagatgaaaaattgaccattgctcgacaactatctcttttgggagtagacgtcattgaagctggtttcccctatgctagtattggggattttgaggcagtacaaaaaattgctgagatagtgggagtagaaggaggcccaactatttgcggtttggcaagaacaactcgtgcagatattgaggcagcaggtaaagcccttaaaccagcagctaaagcgcgtattcatacctttattgctacctctgatattcacttagcttacaaactgaagaaaactagagcagaagtattggagattgcttcagaaatggttgcctatgctaaaacctttgtagacgatgtagagttttctccggaagatgcgggtcgctctgacccagaatttctttatcaagtattggaaaaggcgatcgctgctggagctactactgtgaatattcctgatactgtaggttatacaactcctgctgagtttggggggctgatccggggtattaaagaaaatgtaccaaatattgaccaagctattatttcagttcacggtcacaatgatttgggtttggcagtcgctaattttctggaagcagtgaaaaatggggctcgtcagttagaatgtactatcaatggcattggggaacgtgctggtaatgctgctttagaagaattggtaatggcgtttcacgttcggcgacaatatttcaacccattttttggtcgcccaccagagtcagaaacaccactaactaatattaatactcgtcatatttacaaaacatctcgtttggtttctagtttgacaggaatgttcgtgcaaccaaataaagctattgttggtgctaatgcttttgctcacgagtcaggtattcaccaagatggggtactcaaaaataaactgacctatgaaattatggatgctcagtcaattgggttgacagataatcagattgttttgggtaaactttcgggtcgtcatgctttccaaagtaggttgcaagagcttgggtttaaactttcagatgaagaaattaataaggcgtttatcaagttcaaagacttggcagataaaaagaaagaaataacagattgggatttggaatctattgttaatgctgaaattcaacaaccaccggaactattccgtttggagttggtgcaggtttcttgtggcgatcgctctcgccctacagctacagttattatccgcactcccaatggggaagaattaactgatgctgccattggtactggtcctgtagatgctgtgtacaaagcaattaaccgagtggtgaatgtagaaaatgatttagttgagttttctgtgcagtctgtaactgctggtattgatgctattggggaagtcactattcgcgtgcgccatgaagggcgggtttattctggtcatgctgctaatactgatattattgtggcatctgctgaggcttatctaagtgctttaaatcggttgtatgcagttttgcaaagaggtgtagagaaaataaatttaccaaaggatcaacctacggaagtagtagctggtagttga

SEQ ID NO: 107769 - protein, 541 aa, Trichodesmium erythraeum IMS101
MITSQDRVIIFDTTLRDGEQSPGATLNIDEKLTIARQLSLLGVDVIEAGFPYASIGDFEAVQKIAEIVGVEGGPTICGLARTTRADIEAAGKALKPAAKARIHTFIATSDIHLAYKLKKTRAEVLEIASEMVAYAKTFVDDVEFSPEDAGRSDPEFLYQVLEKAIAAGATTVNIPDTVGYTTPAEFGGLIRGIKENVPNIDQAIISVHGHNDLGLAVANFLEAVKNGARQLECTINGIGERAGNAALEELVMAFHVRRQYFNPFFGRPPESETPLTNINTRHIYKTSRLVSSLTGMFVQPNKAIVGANAFAHESGIHQDGVLKNKLTYEIMDAQSIGLTDNQIVLGKLSGRHAFQSRLQELGFKLSDEEINKAFIKFKDLADKKKEITDWDLESIVNAEIQQPPELFRLELVQVSCGDRSRPTATVIIRTPNGEELTDAAIGTGPVDAVYKAINRVVNVENDLVEFSVQSVTAGIDAIGEVTIRVRHEGRVYSGHAANTDIIVASAEAYLSALNRLYAVLQRGVEKINLPKDQPTEVVAGS

SEQ ID NO: 107770 - DNA, 1623 bp, Synechococcus sp. CC9311; identical to SEQ ID NO: 13124
  CDS (1)..(1623): transl_table=11

SEQ ID NO: 107771 - protein, 540 aa, Synechococcus sp. CC9311; identical to SEQ ID NO: 13125

SEQ ID NO: 107772 - DNA, 1569 bp, Shewanella sp. MR-4
  CDS (1)..(1569): transl_table=11
atgtctaacagagtaattatatttgataccaccttacgtgatggcgagcaggcgttagcggcaagcctgtcggtcaaagaaaagttacagatcgccatggcgttagaacgtctcggtgtggatgtgatggaagtggggttccctgtgtcgtcacccggtgattttgagtcggtgcagaccattgcccgtaccatcaaaaatagccgtgtatgcgccttatctcgcgcacttgaaaaggacatcgatgccgccgctcaggcattatccgttgccgaacagttccgtattcatacctttatctccacctccactatccatgtggagagcaagttaaagcgctcattcgagcaagtgttggagatggcggtaggcgcggtgaaatatgcccgcaggttcaccgatgatgtggagttttcctgcgaagatgcgggacgcacgccaatcgataatctgtgccgtatggtggaagcggcgattcatgctggcgctcgcaccatcaatatccctgataccgtgggttacacagtgccaagcgagtttggtggcattattcaaaccctgtttaatcgcgtaccgaatatcgaccaagccattatttcggttcactgccacgatgacttaggcatgtcggtagccaattcgattaccgccgtgcagcatggcgcccgccaaatcgaatgtaccatgaacggtattggtgagcgtgcgggtaactgctccctagaagaaatcgccatgatcttagcaacgcgtaagaatctgttgggagttgaaactgggatcaatgctaaggagatccaccgcacgtcgaatctcgtcagccagttatgcaatatgccgatccagtcgaataaggcgattgtgggggccaatgcctttactcactcttcaggtattcaccaagatggcatgttaaaggcgcaaaatacctatgaaatcatgacgccagagagtatcggcctaaaccgaaacaacctgaatatgacctcgcgctccggccgccatgtgattaagcatcgcatggaggaaatgggctacagtgagcaggattacaatctggacgccctctacgaacagtttttacatttggcggataaaaagggccaagtcttcgattacgacttagaagccttagcctttatggaagcgcaagcggcggaagataacttctatcaattacagcagttagtggtgcagtccgactccaccgaaggcgttgctacggcaacagtgcgcatcgatgtcggcggtgaaattaaaaccgaagccgcgactggtaatggtcccgtcgatgctgcctataacgccattgcccgtgcgacggaccgtcgtatcgatatcattagctacaaattgggcgccaagggcgaggggcaaaatgccttgggccaagtcgacattaccgcggtttaccatgagcaaaatttccacggtgtcgggttagcgaccgacgtggttgaggcatcagcccgtgcgttagtgcacgtgatgaacctgacatgccgcgccgataaggtcgcagattacaagcagaatatgcataaaaacagagagctgggcggcgtatag

SEQ ID NO: 107773 - protein, 522 aa, Shewanella sp. MR-4
MSNRVIIFDTTLRDGEQALAASLSVKEKLQIAMALERLGVDVMEVGFPVSSPGDFESVQTIARTIKNSRVCALSRALEKDIDAAAQALSVAEQFRIHTFISTSTIHVESKLKRSFEQVLEMAVGAVKYARRFTDDVEFSCEDAGRTPIDNLCRMVEAAIHAGARTINIPDTVGYTVPSEFGGIIQTLFNRVPNIDQAIISVHCHDDLGMSVANSITAVQHGARQIECTMNGIGERAGNCSLEEIAMILATRKNLLGVETGINAKEIHRTSNLVSQLCNMPIQSNKAIVGANAFTHSSGIHQDGMLKAQNTYEIMTPESIGLNRNNLNMTSRSGRHVIKHRMEEMGYSEQDYNLDALYEQFLHLADKKGQVFDYDLEALAFMEAQAAEDNFYQLQQLVVQSDSTEGVATATVRIDVGGEIKTEAATGNGPVDAAYNAIARATDRRIDIISYKLGAKGEGQNALGQVDITAVYHEQNFHGVGLATDVVEASARALVHVMNLTCRADKVADYKQNMHKNRELGGV

SEQ ID NO: 107774 - DNA, 1554 bp, Alkalilimnicola ehrlichei MLHE-1
  CDS (1)..(1554): transl_table=11
atgagcgagaaagaaagactcatcatcttcgacaccacgttgcgcgacggcgagcagagccccggcgcctccatgacccgcgaggagaaggtgcgcatcggccgtgccctggagcgactgaaggtggatgtcatcgaggccggtttccccgccgccagcgaaggcgacttcgagtcggtccgcgccgtcgcccgtgcggtacggggcagccgtatctgcggcctggcgcgcgcccgcgaggacgatatccggcgggccggtgaggcgctgcaggaggccgaggccgggcgtatccacaccttcctggccacctcgcccatccacatggagaagaagctgcggatgacccccgacgaggtggtggatgccgccgtccgggcggtgaagctggcccgctccctttgcgacgatgtggagttctcgccggaggacgccgggcgttccgatccggagttcctctgccgggtcattgaggcggtgatcgacgctggcgccggcaccgtgaacatccccgatacggtgggctacaacctgcccgagcaattcggcgggttgatcgggcggctgcgcgagcgggtgcccaactccgacaaggcggtcttctcggtgcactgccacaacgatctgggggtggcggtggccaactccctggccgcggtgatgaacggggcccgacaggtggagtgcaccatcaacggcctgggcgagcgggccggcaacgccgcactggaggaggtggtcatggcggtgcgcacccggcaggacttcttcccctgcgacaccgggatcgatgcccacgagatcgtccctgccagccgcctggtggccaatatcaccggtttccagccccagccgaacaaggccatcgtgggcgccaacgccttcgcccacgagtcgggcatccaccaggacggggtgctcaagcaccgcgagacctacgagatcatgcgcgccgaggacgtgggctggcacaccaaccgcatggtgctgggcaagcactcgggccgcaacgccttccgcgcccggctcaaggatctgggcatcgagtttgagtcggaggagcagcttaacgaggcctttcagcgcttcaaggggctggcggacaagaagcacgagatcttcgacgaggacctgcaggcgctggtcaccgaggccaacctggagctggagaacgagcgttaccggctgctcgcgctgcgggtctgctccgagaccggggagaccccggaggcgattgtcaccctggcggtggacggccacgagcgcagggcggtctgtccgggcagtggtccggtagatgccgccttcaaggccattgaggagctggtcggggcggcggataccgagctgttgctctactcggtgagcaatatcaccaccgggaccgactcccagggcgaggtgaccgtgcgcctggaacggggtgggcggatcgtcaacgggcaaggctcggacaccgacatcgtcatcgcctcggccaaggcctacctgaacgccctgaacaagatcgaccagggtgagctgcggcgccacccgcaggcggcggacgtttag

SEQ ID NO: 107775 - protein, 517 aa, Alkalilimnicola ehrlichei MLHE-1
MSEKERLIIFDTTLRDGEQSPGASMTREEKVRIGRALERLKVDVIEAGFPAASEGDFESVRAVARAVRGSRICGLARAREDDIRRAGEALQEAEAGRIHTFLATSPIHMEKKLRMTPDEVVDAAVRAVKLARSLCDDVEFSPEDAGRSDPEFLCRVIEAVIDAGAGTVNIPDTVGYNLPEQFGGLIGRLRERVPNSDKAVFSVHCHNDLGVAVANSLAAVMNGARQVECTINGLGERAGNAALEEVVMAVRTRQDFFPCDTGIDAHEIVPASRLVANITGFQPQPNKAIVGANAFAHESGIHQDGVLKHRETYEIMRAEDVGWHTNRMVLGKHSGRNAFRARLKDLGIEFESEEQLNEAFQRFKGLADKKHEIFDEDLQALVTEANLELENERYRLLALRVCSETGETPEAIVTLAVDGHERRAVCPGSGPVDAAFKAIEELVGAADTELLLYSVSNITTGTDSQGEVTVRLERGGRIVNGQGSDTDIVIASAKAYLNALNKIDQGELRRHPQAADV

SEQ ID NO: 107776 - DNA, 1560 bp, Hyphomonas neptunium ATCC 15444
  CDS (1)..(1560): transl_table=11
atgacctccaagaacaccgccgcgaacgacgcaaccaaaccccgtatcctgatattcgacacaacgatgcgcgatggcgagcaatcgccaggcgcctcgatgacgctgaacgagaagcttgagctggcaaccctgctcgaaagcatgggcgtcgatattatcgaagccggcttccccgccgcctcggaaggtgactttgccgccgtcagcgcaattgccgcccagtccaagagcgccgtgatctgcggactttcccgctcgacgccgaacgacattgaccgctgcggcgaggctgtgcgcaaggccgcccgcccgcgcattcacaccttcatttccaccagccccgtgcacatgaagcacaagctgaagatgggcccgaacgctgtgctggaagcggtcggccgctcggtctctcaggcccgcaacctggtcgatgatgtggagtggagcgccgaagacgcgacgcgcaccgaattcgatttcctctgcaaatgcatcgacaccgcgatcgcttcgggcgctaccaccatcaacgtgcctgatacggtgggctattcccaccccgacgaatatggcgcactgatccgccgactgatcgaaaacattccgaactcggacaaggtgatctggtcggcgcactgtcataacgatcttggtcttgccgttgccaactcgctggccggcatggccaatggcgtgcgccagatcgagtgcaccatcaacggcctaggcgagcgcgcgggtaatgcggcgcttgaagagatcgtcatggcgatgaaggtgcgcggcgacaccctgccctatgaaacccatatcgataccagctatctcgcccgcgcctcggcaatggtcagccgcatcacgggcttcccggtgcagtataacaaggccatcgttggcaagaatgccttcgcgcatgaaagcggcatccaccaggatggcatgctgaagaattccgagacctacgagatcatgaagcccgaagatgtgggcgtggcgaaaacctcgctcgtcatgggcaagctctccgggcgcaacgctttccgcgacaagctggaatcgatgggctatttcatcgagggcgacgcgctgaacgacgcgttcaagcgcttcaaggatctggccgaccgcaagaaacatgtgttcgatgacgacatcatcgcgctggtggatgagcagctggcggcagaaggcgagcggatcgcgttcaagcggctgcgcgttgtggcaggcacggaaggtccgcagacggcagaaatcgacctggtgattgacggcgaggagaaatactccatcgcgcgcggcaatggcccggtagacgccgtgttcaatgccattcgccagctggtgccgcatcaggccattctggagctttaccaggtgcatgccgtgaccggcggtacggacgcgcaggcaactgtgtctgtgcggctgaatggcgatgacatcatggcgacgggccggtcatccgatcccgacacgctggtggccagcgccaaggcctatctgcacgcgctgaacaagtttgaagtgcgcaaggcaaagcgcaaggcggcctga

SEQ ID NO: 107777 - protein, 519 aa, Hyphomonas neptunium ATCC 15444
MTSKNTAANDATKPRILIFDTTMRDGEQSPGASMTLNEKLELATLLESMGVDIIEAGFPAASEGDFAAVSAIAAQSKSAVICGLSRSTPNDIDRCGEAVRKAARPRIHTFISTSPVHMKHKLKMGPNAVLEAVGRSVSQARNLVDDVEWSAEDATRTEFDFLCKCIDTAIASGATTINVPDTVGYSHPDEYGALIRRLIENIPNSDKVIWSAHCHNDLGLAVANSLAGMANGVRQIECTINGLGERAGNAALEEIVMAMKVRGDTLPYETHIDTSYLARASAMVSRITGFPVQYNKAIVGKNAFAHESGIHQDGMLKNSETYEIMKPEDVGVAKTSLVMGKLSGRNAFRDKLESMGYFIEGDALNDAFKRFKDLADRKKHVFDDDIIALVDEQLAAEGERIAFKRLRVVAGTEGPQTAEIDLVIDGEEKYSIARGNGPVDAVFNAIRQLVPHQAILELYQVHAVTGGTDAQATVSVRLNGDDIMATGRSSDPDTLVASAKAYLHALNKFEVRKAKRKAA

SEQ ID NO: 107778 - DNA, 1614 bp, Rhizobium leguminosarum bv. viciae 3841
  CDS (1)..(1614): transl_table=11
atgaaagaacgcatctatctcttcgacacgacgctccgggacgggcagcagacgcccggcatcgatttctccgtcgaggacaagattgcgatcgccgccatgttggacgagttcggcctagactacgtcgagggcggatatcccggcgccaatccgacggatacggccttcttcagcgagaagcgcaccagccaggccagtttcgtcgccttcggcatgacgaagcgggcgggcgtttcggtctccaacgatcccggcattgccgggctgcttcaggccaagagcgatgccatctgtttcgtcgccaagagctgggactatcatgtcgcggtggcgctcggctgcaccaacgaggaaaacctcgaatgcatcgccgaaagcgtcagggcggcggttggcgcgggcaaggaggcgatcgtcgattgcgagcatttcttcgacggattcaaggccaatccggcctatgcgctcgcctgcgccaagacggcctatgagagcggcgcccgctgggtcgtgctctgcgacaccaatggcggcacgcagccgccggaggtgcgcgccatcgtcgaggcggtgatcgcctcaggagttcccggccactgtcttggcatccatgcgcataatgacaccggccaggcggtcgccaattcgcttgccgccgtcgaagccggcgtccggcagatccagggcacgctgaacggtatcggcgagcgctgcggcaatgccaatctggtgacgctgatcccgacgctggcgctgaagagcgcctacaacacacgtttcgaaacgacgatcgacgaggagcggctgctcaatctcacccggctctcgcatgccttcgacgagctgctcaaccgttcgcccgaccaccagatgccctatgtcggcgcttccgccttcgccaccaaggccggcatccacgcatcggcgctgctcaaggatccgcggacctatgaacacgtggcgccggaaaccatcggcaacttccgcaaggtcatggtctccgaccagggcggcaaggcgaacttcatcaatgcgctgaaaaggcgcggcatcaacgttgccaaggacgatccgaagctcgacctgctgatctcgatcgtcaaggaacgtgaatccatcggctatgcctatgagggcgcggatgcgagcttcgagctgctggcgcgccgcacgctcggcacgatcccggaattcttcactatcgaaggcttccgcgtgatgatcgaacgtcgcttcgacagtctcggccgtgtgaagatcgtctcggaggcagtggtcaagatcaccatcgacggccagacgctgatgtcggttgccgatgccgaaggcccggtcaacgcgctcgacctcgcgctacggaaggatttcggcaagtaccagcacgagatcgacgatctggtgctcgccgatttcaaggtgcgtatcctcaatggcggcacggaggcgatcacccgtgtgctgatcgaatccaccgacagcgacggcgtgcgctggtggaccgtcggcgtctcggagaacatcatcgacgcttcgttccaggcgctgatggattcggtcatctacaagctgatgaagaaccggcagctggcgggcaagatcgcggcggaataa

SEQ ID NO: 107779 - protein, 537 aa, Rhizobium leguminosarum bv. viciae 3841
MKERIYLFDTTLRDGQQTPGIDFSVEDKIAIAAMLDEFGLDYVEGGYPGANPTDTAFFSEKRTSQASFVAFGMTKRAGVSVSNDPGIAGLLQAKSDAICFVAKSWDYHVAVALGCTNEENLECIAESVRAAVGAGKEAIVDCEHFFDGFKANPAYALACAKTAYESGARWVVLCDTNGGTQPPEVRAIVEAVIASGVPGHCLGIHAHNDTGQAVANSLAAVEAGVRQIQGTLNGIGERCGNANLVTLIPTLALKSAYNTRFETTIDEERLLNLTRLSHAFDELLNRSPDHQMPYVGASAFATKAGIHASALLKDPRTYEHVAPETIGNFRKVMVSDQGGKANFINALKRRGINVAKDDPKLDLLISIVKERESIGYAYEGADASFELLARRTLGTIPEFFTIEGFRVMIERRFDSLGRVKIVSEAVVKITIDGQTLMSVADAEGPVNALDLALRKDFGKYQHEIDDLVLADFKVRILNGGTEAITRVLIESTDSDGVRWWTVGVSENIIDASFQALMDSVIYKLMKNRQLAGKIAAE

SEQ ID NO: 107780 - DNA, 1611 bp, Solibacter usitatus Ellin6076
  CDS (1)..(1611): transl_table=11
atgaaaatctttaccttcgacacgacgctccgggacggcacgcaaggcgagtcgatctctttttccgtggacgataaactgatcatcgcccagaagctggatgatctcggtattgattacattgaaggcggctggccgggcagcaatcccaaagacaaggacttctttgcgcgctcgggcgagctcaatttgaagcactccaagttgaccgcattcggcagcacgcgcttcgccaagaatccggtggaagaggaccgcaacgtgaaggcgctggtggaagccggcacaccggtggtttcgatcttcggcaagagctgggatctgcacgtgaggcgcgcgctcggcatcagcctggaagagaacctggtgctgatttccgacacggtcggctacatccatggccatgggcgggaagtggtttacgatgcggagcatttcttcgacggctatacggctgatccggattacgcgctgcgcacgctcgaagcggcccacaaggccggggccagcgtactgtgcctgtgcgacacgaacggcgggacggtgaccggacgcctggtggagattgtcgccgaggtgcgcaagcgcttcgacgggatcatcggaatccatacgcataacgatggcgatctggcggtggccaatacgatcgccgcggtggaggcaggcgcaacgcacgttcagggctgcatgaacggctatggcgagcgctgcggcaatgcgaatctggcgagcgtgatcgccaacctggaactcaagctgggacacaccacagtgggaccggagaagctggccgggctttccagcacgtgccgctttatcgcggagttggcaaacctgccgctgcggaatgaccagccgttcgtgggcaagagcgctttcgcacataagggcggagtgcacgtgagcgccgtgctgaaggactccgcaacctacgagcacatcaaaccggaagccgtgggcaaccgccagcgggtgctggtcagcgatctatccggccggggcaacatcatctacaagctcaagcagcacggcttggccgaccgattggaggaagacacgcgccgcgtcctgctggagcgcatcaagcagatggaatacgaagggtacgagttggaggcggccgaaggcaccttcgaactcctggtgcgcgaggccctgcatccgggtatgcatttcttcgacgtggagagctatgaagtctcgacgcgggcggcgggaaacgcggccagccactccaccgcgacggtcacgctcaaatcgcaggacggggtgcactccgcgacggaaaccgggcacggaccgttcgacgcgctgcaggtgtgcctgcgcaagtgcctgagcaagctctacccccagatcgtggacgtgcggctgacggactacaaggttcgcgtgctcgacaccaataaaggcacggcggccaacgttcgggtgctgatcgagtggagcgaccatcgccgcagctggagcacggtcggggtgagcgacaacgtgatcgaggcgagctggaaggcgctggtggacgcgatccggctggagctgatgcggctcaccgagaaggacgacacgatcgagaaggccgtggaagactactgctggggcgtgtaa

SEQ ID NO: 107781 - protein, 536 aa, Solibacter usitatus Ellin6076
MKIFTFDTTLRDGTQGESISFSVDDKLIIAQKLDDLGIDYIEGGWPGSNPKDKDFFARSGELNLKHSKLTAFGSTRFAKNPVEEDRNVKALVEAGTPVVSIFGKSWDLHVRRALGISLEENLVLISDTVGYIHGHGREVVYDAEHFFDGYTADPDYALRTLEAAHKAGASVLCLCDTNGGTVTGRLVEIVAEVRKRFDGIIGIHTHNDGDLAVANTIAAVEAGATHVQGCMNGYGERCGNANLASVIANLELKLGHTTVGPEKLAGLSSTCRFIAELANLPLRNDQPFVGKSAFAHKGGVHVSAVLKDSATYEHIKPEAVGNRQRVLVSDLSGRGNIIYKLKQHGLADRLEEDTRRVLLERIKQMEYEGYELEAAEGTFELLVREALHPGMHFFDVESYEVSTRAAGNAASHSTATVTLKSQDGVHSATETGHGPFDALQVCLRKCLSKLYPQIVDVRLTDYKVRVLDTNKGTAANVRVLIEWSDHRRSWSTVGVSDNVIEASWKALVDAIRLELMRLTEKDDTIEKAVEDYCWGV

SEQ ID NO: 107782 - DNA, 1530 bp, Solibacter usitatus Ellin6076
  CDS (1)..(1530): transl_table=11
ttgagggacggggaacaagccgccggaacccgcctgggaagccgcgagaagctcatcatcgcccgccaactcgccctgctcaacgttgacgtcattgaggccggctatcccaactcctcgccggaggatttcgacgccgtccagcgcatcgccgccgagattcaggggcccgccatctgcgcgctctcccgcgctgtggccgccgatatcgaggcctgcggtaaagccctcgccggctgcccccgccctcgcattcataccggcatcggcgcctccgacatccacatcgccggcaaatttcaggacgatcgctacggcaaatcgctcgccgaaaagaagcgcaagatcctccagatggcgatcgatgccgtcacgctcgcccgccactatgtcgctgaggtcgagttctacgccgaggatgccggccgcgccgatcctgtctacctttatgagatgatcgccgccgtcatcgacgccggcgcctccgtcgtcaacatccccgacaccactggctacaccgtgccggaacagtacggcgccctgatcgccggcatccgcacccatgtgcccggcatcgatcgagccgtcatcagcgtccactgtcacgacgatctcggcatggcggtagccaataccctgcatggcgtgctcaacggcgcccgccaggtcgaaggcaccatcaacgggctcggcgagcgcgcaggtaatgccgcgctagaggaaatcgtgatggccctcgccacgcgcgccgactatttcggcgtccacaccggcgtcaacacccgcgaactccatcgcaccagccgcctggtcgccgacctgctcggcgtacaggtcccacccaacaaggccgtcatcggcgcgaacgccttctcccacagctccggcattcacgtcgatggcgttctcaaaaaacgcgagacctacgagatcatgcggcccgaggatgtcggcatgaccgagagccgtgtcgtcctcactgcccgcaccggccgccacggcctcctcgaccggctccgcaagctcggctatgaactctccgatctcgagctggatcaggcctatcgccgcttcctcagcgtcgcggacaaaaagcaggaggtcttcgacgaagatctcatcgccatcctgcgcgacgaaatccacccgctgcccgcggtttatgagctccagtacctgcacatctacagcggtacttcggccattcccacggccaccgtaagattgctggttagcggcgacacgcgcgaaggcgccgcgatcggcgatggtcccgtggacgcggtctgccgggcgatctcacaggtcactgccaccgccgccaaactgcaacgctacgaaatccgcggcgtcaccagcggcaccgaggccatgggcgaagtcaccatccaactcgaggaggccggccgcaaggtgatcggccgcggcgcttccaccgatatcatcgaagccagcgccaaggcctacctcgacggtctcaacaagctcgccaacatcgctgccgcttcccaccgttccgccggcgcatag

SEQ ID NO: 107783 - protein, 509 aa, Solibacter usitatus Ellin6076
MRDGEQAAGTRLGSREKLIIARQLALLNVDVIEAGYPNSSPEDFDAVQRIAAEIQGPAICALSRAVAADIEACGKALAGCPRPRIHTGIGASDIHIAGKFQDDRYGKSLAEKKRKILQMAIDAVTLARHYVAEVEFYAEDAGRADPVYLYEMIAAVIDAGASVVNIPDTTGYTVPEQYGALIAGIRTHVPGIDRAVISVHCHDDLGMAVANTLHGVLNGARQVEGTINGLGERAGNAALEEIVMALATRADYFGVHTGVNTRELHRTSRLVADLLGVQVPPNKAVIGANAFSHSSGIHVDGVLKKRETYEIMRPEDVGMTESRVVLTARTGRHGLLDRLRKLGYELSDLELDQAYRRFLSVADKKQEVFDEDLIAILRDEIHPLPAVYELQYLHIYSGTSAIPTATVRLLVSGDTREGAAIGDGPVDAVCRAISQVTATAAKLQRYEIRGVTSGTEAMGEVTIQLEEAGRKVIGRGASTDIIEASAKAYLDGLNKLANIAAASHRSAGA

SEQ ID NO: 107784 - DNA, 1542 bp, Magnetococcus sp. MC-1; identical to SEQ ID NO: 13130
  CDS (1)..(1542): transl_table=11

SEQ ID NO: 107785 - protein, 513 aa, Magnetococcus sp. MC-1; identical to SEQ ID NO: 13131

SEQ ID NO: 107786 - DNA, 1605 bp, Magnetococcus sp. MC-1; identical to SEQ ID NO: 13132
  CDS (1)..(1605): transl_table=11

SEQ ID NO: 107787 - protein, 534 aa, Magnetococcus sp. MC-1; identical to SEQ ID NO: 13133

SEQ ID NO: 107788 - DNA, 1593 bp, Nocardioides sp. JS614; identical to SEQ ID NO: 13138
  CDS (1)..(1593): transl_table=11

SEQ ID NO: 107789 - protein, 530 aa, Nocardioides sp. JS614; identical to SEQ ID NO: 13139

SEQ ID NO: 107790 - DNA, 1536 bp, Azoarcus sp. BH72; identical to SEQ ID NO: 13142
  CDS (1)..(1536): transl_table=11

SEQ ID NO: 107791 - protein, 511 aa, Azoarcus sp. BH72; identical to SEQ ID NO: 13143

SEQ ID NO: 107792 - DNA, 1554 bp, Neisseria meningitidis FAM18
  CDS (1)..(1554): transl_table=11
atgacacaggccaaccgcgttatcattttcgacaccaccctgcgcgacggcgaacaatcgcccggcgccgctatgaccaaagaggaaaaaatccgcgtcgcccgccagctggaaaaattgggtgtggacatcatcgaagcgggttttgccgctgccagcccgggcgatttcgaggcggtcaatgcgattgcgaaaaccattaccaaatcaacggtctgttcattgtcccgtgccatcgagcgggacatccgtcaggcgggtgaggccgttgcgcccgcgccgaaaaaacgcatccacaccttcatcgccaccagccccatccatatggagtacaaattgaagatgaagccgaagcaggtgattgaggcggcggtcaaagcggtgaaaatcgctcgtgaatacaccgacgatgtggaattttcctgcgaagacgcgttgcgttcggaaatcgatttccttgccgaaatctgcggcgcggtaattgaagcgggcgcgaccaccatcaatattcccgataccgtcggctattccatcccgtacaaaaccgaagaatttttccgcgaactgattgtcaaaacgcccaacggcggcaaagtcgtttggtcggcacactgccacaacgatttgggcttggcggttgccaattcgcttgccgcattaaaaggcggtgcgcgtcaggtggaatgtactgtcaacggcttgggcgaacgtgcaggcaatgcttcggttgaagaaatcgtgatggcgttgaaagtgcgccacgacttgttcggcttggaaaccggcatcgataccacgcaaatcgtgccttcgtccaaactggtgtccaccattacgggctatcccgtgcagcccaacaaagccattgtcggtgccaatgccttttcgcatgaatcgggcatccatcaggacggggtgctgaaacaccgcgaaacttacgagattatgtccgccgaatcggtcggctgggcaacaaaccgtttgagcttgggcaaattgtccggccgcaacgccttcaaaaccaagctggcggatttgggcatcgagttggaaagcgaagaggcactgaacgccgcgtttgcccgcttcaaagaactcgccgacaaaaaacgcgaaatcttcgatgaagacctgcacgcactggtatccgacgaaatgggcagcatgaatgccgagagctacaaattcatctcccaaaaaatcagcaccgaaaccggcgaagagccgcgcgccgacatcgtgttcagcatcaaaggcgaagaaaaacgcgcttccgcaaccggttccggtccggttgatgcaattttcaaagcgattgaaagcgtggcgcaaagcggcgcgactttgcagatttattccgtcaacgccgtcacgcaaggtacggaaagccaaggcgaaaccagcgtccgtctggcacgcggcaaccgcgtcgtcaacggtcagggcgcggataccgacgttttggttgccactgccaaagcctacctttccgctttgagcaaactggaatttagtgccgccaaaccgaaagcgcaaggcagcggtacgatttga

SEQ ID NO: 107793 - protein, 517 aa, Neisseria meningitidis FAM18
MTQANRVIIFDTTLRDGEQSPGAAMTKEEKIRVARQLEKLGVDIIEAGFAAASPGDFEAVNAIAKTITKSTVCSLSRAIERDIRQAGEAVAPAPKKRIHTFIATSPIHMEYKLKMKPKQVIEAAVKAVKIAREYTDDVEFSCEDALRSEIDFLAEICGAVIEAGATTINIPDTVGYSIPYKTEEFFRELIVKTPNGGKVVWSAHCHNDLGLAVANSLAALKGGARQVECTVNGLGERAGNASVEEIVMALKVRHDLFGLETGIDTTQIVPSSKLVSTITGYPVQPNKAIVGANAFSHESGIHQDGVLKHRETYEIMSAESVGWATNRLSLGKLSGRNAFKTKLADLGIELESEEALNAAFARFKELADKKREIFDEDLHALVSDEMGSMNAESYKFISQKISTETGEEPRADIVFSIKGEEKRASATGSGPVDAIFKAIESVAQSGATLQIYSVNAVTQGTESQGETSVRLARGNRVVNGQGADTDVLVATAKAYLSALSKLEFSAAKPKAQGSGTI

SEQ ID NO: 107794 - DNA, 1539 bp, Acidovorax sp. JS42; identical to SEQ ID NO: 13144
  CDS (1)..(1539): transl_table=11

SEQ ID NO: 107795 - protein, 512 aa, Acidovorax sp. JS42; identical to SEQ ID NO: 13145

SEQ ID NO: 107796 - DNA, 1659 bp, Magnetospirillum magnetotacticum MS-1
  CDS (1)..(1659): transl_table=11
atgatgcctgccgccagcaccaagtaccgggcctatcccgccatccgtctcagccaccgccgctggcccgacgccaccatcacccgcccacccatgtggtgttccgtggatctgcgcgacggcaatcaggcgctgatcgatcccatgggatcggatcgcaagatggccctgtggcagaccctggtgggaatggggttcaaggagatcgaggtgggctttcccgccgcgtcccagaccgatttcgacttcatccgcctgctgatcgagggcggccatattcccgacgacgtcaccatccaggtgctggtccagtcgcgcgaagacctgatccgccgcactttcgaggccctggcgggggccaagcgctgcattcttcacatgtacaactccacctccgaggcccagcggcgcatcgtgttcggcatcgaccgccaaggctgcatcgatctcgccctgggcggagtcaaactggtgcgcgagctttccgcccaaaggcccgagggcgaggtggtgtttcagtactcggccgagagctttaccggcaccgagcccgacttcgcggtggagatcgtggagaaggtggccgaggcctggggcgccactccggaacgccggatgatctgtaatctcccggccacggtggagatgtcgacgcccaatatctatgccgatgtcatcgagtggttctgcgccacggtgaagaaccgcgactcgctcatcgtctcggttcatccccataacgaccggggcaccggcgtggcggccgccgaactggcggtgatggcgggcgctgaccgtgtcgagggaaccttgttcggcaatggcgaacgcaccggcaatgtggacgtggtgaccctggcgctcaacctctatacccagggcgtcgaccccgctctcgacctttccgacatcgacacggtgcggcgcaccgccgagcattgcaccgggctgcccgtccatccccgccatccttatgccggggaactggtctacaccgccttttccggctcgcatcaggatgccatcaagaagggcttcgccgcccgcaagaaggccaatgatccggtctgggaagtgccctatctccccatcgatccggccgatgtggggcgcagctacgaagcggtgatccgcatcaacagccagtcgggcaagggcggcatcgccgccgtgctggaacgcgaccatggattggagattccccgtccgctgcagatcgacttcgcccgcgtggttcaggccatggccgacaaggcaggccgcgaactggattcgggcgagatcatggccgccttctcccagacctatttcaaggactggccgctggaactggtggaatacgagacccattccgagggccgcggcgcatcgcggacgatttcggccaccatccgcgatcgcggcgtggaaaagcgcatcgaaggccagggcaacggcccgctggacgccttcatccatgcgctggaaaccggtttgggccgcaaggtcaaggtccgggactatcacgaacacgccatcggttcgggctcggaggcccaggccgcctgttatgtggagatcgccggagagggcggaggatcggtgcacggcgccgccctggattcctccatcaccatggcctcgctgaaggcggtggtcagcgcgctgaatagggcttag

SEQ ID NO: 107797 - protein, 552 aa, Magnetospirillum magnetotacticum MS-1
MMPAASTKYRAYPAIRLSHRRWPDATITRPPMWCSVDLRDGNQALIDPMGSDRKMALWQTLVGMGFKEIEVGFPAASQTDFDFIRLLIEGGHIPDDVTIQVLVQSREDLIRRTFEALAGAKRCILHMYNSTSEAQRRIVFGIDRQGCIDLALGGVKLVRELSAQRPEGEVVFQYSAESFTGTEPDFAVEIVEKVAEAWGATPERRMICNLPATVEMSTPNIYADVIEWFCATVKNRDSLIVSVHPHNDRGTGVAAAELAVMAGADRVEGTLFGNGERTGNVDVVTLALNLYTQGVDPALDLSDIDTVRRTAEHCTGLPVHPRHPYAGELVYTAFSGSHQDAIKKGFAARKKANDPVWEVPYLPIDPADVGRSYEAVIRINSQSGKGGIAAVLERDHGLEIPRPLQIDFARVVQAMADKAGRELDSGEIMAAFSQTYFKDWPLELVEYETHSEGRGASRTISATIRDRGVEKRIEGQGNGPLDAFIHALETGLGRKVKVRDYHEHAIGSGSEAQAACYVEIAGEGGGSVHGAALDSSITMASLKAVVSALNRA

SEQ ID NO: 107798 - DNA, 1668 bp, Magnetospirillum magnetotacticum MS-1
  CDS (1)..(1668): transl_table=11
atgttttccgggcagatcgagatcgtcatggccgagcgcgtttatctctacgacaccaccttgcgcgatggcgcgcagactcagggagtggacttctccgccgccgataaggtgcggatcgcgcgcgagcttgaccgaattggcatcgactatgtggagggtggctggccgggcgccaatcccaccgacgacgccttctttgccgatccgcccgccttcaagcgctcgcgtctcaccgccttcggcatgacgcgccgggccggacgctcggccgataacgatccggggcttaacgccctgctggtcactccggcccgtgtcgccaccatggtgggcaagagctgggatttccaggtcaccgtggctctcggcatcgaactggacgagaatctgcgcatggttgccgattctgtgcagcacgccctgaccaaggtcgaggaggtgatgttcgacgccgagcatttctttgacggctacaaggccaacccggcttacgccctggcggcggccaaggccgcctatgacgcgggtgcgcgctgggtggtgctgtgcgacaccaatggcggcaccctgccccacgagatgcgacgcatcgtgagcgaagtgatcaagggcggcatccccggcagccatctgggcgttcactgtcacaacgattccgatacggcggtggccaactcgctggcggcggtcgaggcgggcgtgcgtcaggtccagggcaccctgaacgggctgggcgagcgttgcggcaatgccaatctgatctccatcatcccggctttgacgctgaagatgggcttcgacaccggcatcgcccccgaggacctgaagaatctggtctcggtctcgcgtgcgctcgacgaggtgctggaccgcgcccccaatcgcggccagccctatgtgggcaactcggccttcgcccataagggcggcctgcacgtctccgccgtggccaaggaccccagatgttacgaacatgtggacccggcttcggtgggcaatctgcgccatatcgtcatgtccgatcaggccgggcgttccaatctggtggcgcgcctgaccgaaattggcgtcgacctcgattcgatcaaacgcgagagcctggtccgcgtggtggatcagatgcaggtcaccttcgacgcccgcgaagccaccgatctggtggatctggtcaagcgtctggagcatgagggctacgcctatgatcaggccgccgccagcttcgaactgctggtgcgccgcgccttgggcgaagtgccggaatacttccagttggaacgctaccgagtcatcgacgagcgccgccgcaacgcccatggcgagtggatcaccctgtccgaagccacggtcaaggtcgaggtgggcggcgtcgaatacatggaagtgggcgaaggcacgggcccggtccacgccttcgacgtggctttgcgcaaggtcttgacgcgggtctatccggcactgaccgcgatggaactcaaggactaccgggtgcgcatcaccgaaagcaccgtgggcaccgccgccaagacccgcgtcaccatcgaaagcgaggacgacaagggccatcgctggaccacggtaggcgtgcataccaatgtgctggaagcctcgctggaggcccttcaggattccatcaccttcatgctgttccgtttccgggacgagtga

SEQ ID NO: 107799 - protein, 555 aa, Magnetospirillum magnetotacticum MS-1
MFSGQIEIVMAERVYLYDTTLRDGAQTQGVDFSAADKVRIARELDRIGIDYVEGGWPGANPTDDAFFADPPAFKRSRLTAFGMTRRAGRSADNDPGLNALLVTPARVATMVGKSWDFQVTVALGIELDENLRMVADSVQHALTKVEEVMFDAEHFFDGYKANPAYALAAAKAAYDAGARWVVLCDTNGGTLPHEMRRIVSEVIKGGIPGSHLGVHCHNDSDTAVANSLAAVEAGVRQVQGTLNGLGERCGNANLISIIPALTLKMGFDTGIAPEDLKNLVSVSRALDEVLDRAPNRGQPYVGNSAFAHKGGLHVSAVAKDPRCYEHVDPASVGNLRHIVMSDQAGRSNLVARLTEIGVDLDSIKRESLVRVVDQMQVTFDAREATDLVDLVKRLEHEGYAYDQAAASFELLVRRALGEVPEYFQLERYRVIDERRRNAHGEWITLSEATVKVEVGGVEYMEVGEGTGPVHAFDVALRKVLTRVYPALTAMELKDYRVRITESTVGTAAKTRVTIESEDDKGHRWTTVGVHTNVLEASLEALQDSITFMLFRFRDE

SEQ ID NO: 107800 - DNA, 1551 bp, Magnetospirillum magnetotacticum MS-1; identical to SEQ ID NO: 13146
  CDS (1)..(1551): transl_table=11

SEQ ID NO: 107801 - protein, 516 aa, Magnetospirillum magnetotacticum MS-1; identical to SEQ ID NO: 13147

SEQ ID NO: 107802 - DNA, 1662 bp, Nostoc punctiforme PCC 73102
  CDS (1)..(1662): transl_table=11
atgaccacaaattcctcacctcaactttggctctatgacactacattacgggatggcactcagcgcgaggggctatctgtatcgatagaagataagttacgcattgccaagagactcgatcaactgggagttcccttcattgaaggcggttggcctggtgctaatcccaaggatgtacaatttttctggcaactccaagaagatccgctaaaacaagctgaaattgtggctttttgttcgactcgacggcccaactccactgccgcaaccgaaccgatgttacaggatattttggctgcgggaactcgctgggtaacgatttttggtaagtcttgggatttacatgtcacaactagcctcaaaacgacactagaagaaaatttggcgatgattcgtgacaccattgagtacctccgttctcaaggtcgtcgcattatctacgatgccgaacattggtttgatggttataagcacaatccagattatgctttacaaacattagaggctgcgatcgcatctggtgctgaatggctagtcctctgtgataccaatggcggcactttacctcatgaaattgggcaaattgtacaagatgtcagtagtcatttgtcatttgtcacttgtcaagaaacaatgacgaaggacaacggacaaaggataattccccaaattggaattcacactcataacgattcagaaatggcggtcgctaacgcaatagccgccgtgatggcaggggcaaagatggtacagggcacaattaatggttacggtgaacgttgcggtaatgctaacctctgttcgttaattcccaatttacaactgaagctgggttacagttgtatcacagaagaccagctaacacaacttacagaagctagtcgttttgttagtgaagtggtcaacctcgcgccagatgaacacgctccctttgtgggactttcggcttttgcccacaagggtggtattcatgtatcagctgtagaacgtaatcccctgacttacgaacacattcagccggaacaagtcgggaatcatcgccgcattgtgatttctgaacagtctggacttagcaatgttctagccaaagcccgcagttttgggattgacctcgatcaactcaaggcagaagccaaggaaattctccagcgtctcaaagatttggagagtgaaggatttcaatttgaagcagcagaggccagttttgcactactgatgcacgaagctttgggaggtcgccagaagttttttgaagtcaaaggttttcaagtccactgtgacttggttgagggaaaagaaactagtaacgccctagctacagtcaaaatcgctgttgacggcaaaaatattctggaggcggcggaaggtaacggccccgttgcagctttggatgctgctttacgcaaggctttggtgaatttttatccccaaatagctacctttgatttgacagattacaaagtgcgaattctcaacggacatacggggactgcggcaaaaactcgtgtgttggtagaatccggcaatggtcgtcagcgctggacgacggtaggggtttccaccaatattttggaggcttcctatcaagcggtggtggagggcttggaatacggtttattattgcattcccaagcagaagcggcggtgaaagcttctacttga

SEQ ID NO: 107803 - protein, 553 aa, Nostoc punctiforme PCC 73102
MTTNSSPQLWLYDTTLRDGTQREGLSVSIEDKLRIAKRLDQLGVPFIEGGWPGANPKDVQFFWQLQEDPLKQAEIVAFCSTRRPNSTAATEPMLQDILAAGTRWVTIFGKSWDLHVTTSLKTTLEENLAMIRDTIEYLRSQGRRIIYDAEHWFDGYKHNPDYALQTLEAAIASGAEWLVLCDTNGGTLPHEIGQIVQDVSSHLSFVTCQETMTKDNGQRIIPQIGIHTHNDSEMAVANAIAAVMAGAKMVQGTINGYGERCGNANLCSLIPNLQLKLGYSCITEDQLTQLTEASRFVSEVVNLAPDEHAPFVGLSAFAHKGGIHVSAVERNPLTYEHIQPEQVGNHRRIVISEQSGLSNVLAKARSFGIDLDQLKAEAKEILQRLKDLESEGFQFEAAEASFALLMHEALGGRQKFFEVKGFQVHCDLVEGKETSNALATVKIAVDGKNILEAAEGNGPVAALDAALRKALVNFYPQIATFDLTDYKVRILNGHTGTAAKTRVLVESGNGRQRWTTVGVSTNILEASYQAVVEGLEYGLLLHSQAEAAVKAST

SEQ ID NO: 107804 - DNA, 1623 bp, Nostoc punctiforme PCC 73102; identical to SEQ ID NO: 13148
  CDS (1)..(1623): transl_table=11

SEQ ID NO: 107805 - protein, 540 aa, Nostoc punctiforme PCC 73102; identical to SEQ ID NO: 13149

SEQ ID NO: 107806 - DNA, 1548 bp, Haemophilus influenzae R2846
  CDS (1)..(1548): transl_table=11
atgacagatcgcgttattatttttgatacgactttgcgtgatggggaacaggcgttaaaagcaagtttgacggtaaaagaaaaattacagatcgctttagcacttgaacgcttaggcgtggatgtaatggaagtggggtttcccgtttcttctcaaggggattttgaatcggtacaaaccattgcgcgccatatcaaaaacgctcgtgttgccgcgttatctcgagccgtagataaagacattgatgccgcataccaagcattgaaagtcgctgaagcatttcgtattcatacttttattgcaagctcggcattacatgttgaagcgaaattaaaacgttcttttgatgatgtggtaggaatggctgttgcagcagtgaaacgcgcacgtaattatacggatgatgttgagttttcttgcgaagatgcggggcgtacaggcattgataatatctgtcgtattgttgaagccgcaatcaatgcaggtgcaactacagtaaacattccagataccgttggtttttgcttaccaaatgaatacggcaatattattgctcaagtgcgtaatcgcgtgccgaatatcgacaaagctgtgatttctgtgcattgtcataatgacttaggtatggcaacggctaattctttaacggctgtacaaaatggtgcgcgtcaaattgaatgtaccattaatggaattggggaacgtgcgggcaatacttcccttgaagaagtagtcatggcaatgaaagttcgtcaggattttatgggcgtggatactcgtatcaatacccaagaaattcatcgtgtcagccaaatggttagccaactttgcaatatgccgattcaaccgaataaagccattgtgggttcaaatgcttttgcccattcttctggtatccatcaagatggtatgttgaaaaacaaaaatacctacgaaattatgtctccagaaactattggcttaaaaaaagaaaaattgaatttaactgcccgttctggtcgcgcggctgtgaaaggtcatatgacggatatgggctataacgaacaagattatgatttggataaattgtatgacacgttcttaaaattggcggataaaaaaggtcaagtgtttgattatgatttggaagcattggcgtttatcgatatgcaacaaggggatgaagatcgtttggtattagataaactttctgcgcattcaacgaaagaatatccagccacagcctttgttcaattgaaattagatggcgaaaaattaagcacttcgtcaattggtggcaatggcccagtagatgcggtttataacgccatcttaaatttaacgggtttagaaattaaaatgtctcactataacttaaccgctaaaggcgagggtgcagaagcattagggcaagtggatattgtggtggaacacaaagggcgtaaattccatggtgttggtttagcaacagatattgttgaatcttccgcacttgctttagtccacgccatcaatgccatttatcgagcgcataaagtggcagatattaagaatcataaacagcattaa

SEQ ID NO: 107807 - protein, 515 aa, Haemophilus influenzae R2846
MTDRVIIFDTTLRDGEQALKASLTVKEKLQIALALERLGVDVMEVGFPVSSQGDFESVQTIARHIKNARVAALSRAVDKDIDAAYQALKVAEAFRIHTFIASSALHVEAKLKRSFDDVVGMAVAAVKRARNYTDDVEFSCEDAGRTGIDNICRIVEAAINAGATTVNIPDTVGFCLPNEYGNIIAQVRNRVPNIDKAVISVHCHNDLGMATANSLTAVQNGARQIECTINGIGERAGNTSLEEVVMAMKVRQDFMGVDTRINTQEIHRVSQMVSQLCNMPIQPNKAIVGSNAFAHSSGIHQDGMLKNKNTYEIMSPETIGLKKEKLNLTARSGRAAVKGHMTDMGYNEQDYDLDKLYDTFLKLADKKGQVFDYDLEALAFIDMQQGDEDRLVLDKLSAHSTKEYPATAFVQLKLDGEKLSTSSIGGNGPVDAVYNAILNLTGLEIKMSHYNLTAKGEGAEALGQVDIVVEHKGRKFHGVGLATDIVESSALALVHAINAIYRAHKVADIKNHKQH

SEQ ID NO: 107808 - DNA, 1521 bp, Bacillus cereus G9241
  CDS (1)..(1521): transl_table=11
atgaagcagattttgttcatggatacgacgctacgtgatggcgaacaatcaccaggagtaaatttaaatgaacaagagaaattgcaaattgcaaggcaattagagagactagggattcatgtcatggaagctggctttgcagcagcttccgaaggggattttcaatcggtaaaacgcatcgcgaatacaattcaaaatgctacagttatgagtttagctagagcgaaagaaagcgacattcgaagagcatatgaagctgtgaaaggtgcggtatctcctcgtttacacgtatttttagctacgagtgatattcatatgaaatataaactttgtatgtcaaaagaagatgtattagatagtatttaccgctcgattacacttgggaagtcgttatttccgacagtacaattttcagcagaagatgcgacaagaacatcaagagattttttagctgaggcagtagaagttgcgattcgtgcgggagcgaatgtaattaatattccagatacagttggatatacgaatccagaagaatattattctctttttaagtacttacaagaatccgttccttcatatgaaaaagcaattttctcttgtcattgtcacgatgatcttgggatggctgtagcaaattcgctagctgcagttgaagggggagcattgcaagtagagggaacaattaatggaattggtgaaagagcagggaatgcggcattagaagaagtcgcagttgcccttcatattagaaaagatttctatcaagcagagccttctatgacgctaaaagaaattaaagcgacaagtacattagtaagcagattaacaggtatggttgtaccgaaaaataaagcgatcgttggagcgaatgcatttgctcatgaatcaggaattcatcaagatggtgtattaaaagaagtgacaacatatgaaattattgaaccagcgctagtaggtgaatctcaaaacctatttgtacttgggaaacattctggacgtcatgcgtttacagaaaaaatgaaagagcttggttatgaatttacaacggaagaacgagatgcggtgtttgaagcgtttaaaaaattagctgatcgtaagaaggaaattactgaggaagatttaagagcacttatgcttggtgaagcggcatttgcggctcagcaatataacattacgcaattgcaagtacatttcgtatcaaatagtacacaatgcgcgacagttgtactaaaagatgaggagggaaatgtattcgaagatgcagctactggctctggtagtattgaagcgatttacaatgcaatccaaagaattttaggattagaatgtgaattggcggattatcgcatacaatctattacacaaggtcaagatgcactggctcatgttcatgttgaattaaaagaaggaacacatcaagtatcaggttttggtgttgcgcaagacgtattggaagcgtcggcaagagcatatgtccacgcagcggggaaattgaaatcttttatccagcttgtgaaataa

SEQ ID NO: 107809 - protein, 506 aa, Bacillus cereus G9241
MKQILFMDTTLRDGEQSPGVNLNEQEKLQIARQLERLGIHVMEAGFAAASEGDFQSVKRIANTIQNATVMSLARAKESDIRRAYEAVKGAVSPRLHVFLATSDIHMKYKLCMSKEDVLDSIYRSITLGKSLFPTVQFSAEDATRTSRDFLAEAVEVAIRAGANVINIPDTVGYTNPEEYYSLFKYLQESVPSYEKAIFSCHCHDDLGMAVANSLAAVEGGALQVEGTINGIGERAGNAALEEVAVALHIRKDFYQAEPSMTLKEIKATSTLVSRLTGMVVPKNKAIVGANAFAHESGIHQDGVLKEVTTYEIIEPALVGESQNLFVLGKHSGRHAFTEKMKELGYEFTTEERDAVFEAFKKLADRKKEITEEDLRALMLGEAAFAAQQYNITQLQVHFVSNSTQCATVVLKDEEGNVFEDAATGSGSIEAIYNAIQRILGLECELADYRIQSITQGQDALAHVHVELKEGTHQVSGFGVAQDVLEASARAYVHAAGKLKSFIQLVK

SEQ ID NO: 107810 - DNA, 1503 bp, Bacillus anthracis str. A2012
  CDS (1)..(1503): transl_table=11
atggatacgacgctacgtgatggcgaacaatcaccaggagtaaatttaaatgaacaagagaaattgcaaattgcaaggcaattagagagactagggattcatgtcatggaagctggctttgcagcagcttccgaaggggattttcaatcggtaaagcgcatcgcaaatacaattcaaaatgctacagttatgagtttagcaagagcgaaagaaagtgatattcgaagagcatatgaagctgtgaaaggtgcggtatctcctcgtttacacgtatttttagctacgagtgatattcatatgaagtataaactttgtatgtcaaaagaagatgtattagatagtatttatcgatcggttacacttgggaaatcgttatttccgacagtacaattttcagcagaagatgcaacaagaacagcaagagattttttagctgaagcggtagaagttgcgattcgtgcaggagcgaatgtaattaatattccagatacagttgggtatacgaatccagaagaatattatgctctttttaaatatttacaagaatccgttccttcatatgaaaaagcaattttctcttgtcattgtcatgatgatcttgggatggcggtagcaaattcattagctgcagttgaaggcggagcgttgcaagtagaaggaacaattaatgggattggagaaagagcagggaatgcggcgttagaagaggttgcagttgctcttcatattaggaaagatttctataaagcagagccttctatgacgctaaaagaaattaaagcgacaagtacattagtaagcagattaacgggtatggttgtatcgaaaaataaagcgattgttggagcaaatgcattcgctcatgaatcaggcattcatcaagatggtgtattaaaagaagtgacaacatatgaaattattgaaccagcgctagtaggcgaatctcaaaatctatttgtacttggaaaacattctgggcgtcacgcgtttacagaaaaaatgaaagaacttggctatgaatttacaaacgacgagcgggatgcagtatttgaagcatttaaaaaattagctgatcgtaagaaggaaattactgaggaagatttacgagcacttatgcttggtgaagcagcatttgcggctcagcaatataacattacgcaattgcaagtacatttcgtatcaaatagtacacaatgtgcgacagttgtactaaaagatgaggaaggaaatgtattcgaagatgcagctactggctctggtagtattgaagcgatttataatgcaatccaaagaattttaggattggaatgtgaattggcggattatcgcatacaatctattacacaaggtcaagatgcactggctcatgttcatgttgaattaaaagaaggagcacatcaagtatcaggttttggtgttgcacaagacgtattggaagcgtcggcaagagcatatgtccacgcagcggggaaattgaaatcttttatccagcttgtgaaataa

SEQ ID NO: 107811 - protein, 500 aa, Bacillus anthracis str. A2012
MDTTLRDGEQSPGVNLNEQEKLQIARQLERLGIHVMEAGFAAASEGDFQSVKRIANTIQNATVMSLARAKESDIRRAYEAVKGAVSPRLHVFLATSDIHMKYKLCMSKEDVLDSIYRSVTLGKSLFPTVQFSAEDATRTARDFLAEAVEVAIRAGANVINIPDTVGYTNPEEYYALFKYLQESVPSYEKAIFSCHCHDDLGMAVANSLAAVEGGALQVEGTINGIGERAGNAALEEVAVALHIRKDFYKAEPSMTLKEIKATSTLVSRLTGMVVSKNKAIVGANAFAHESGIHQDGVLKEVTTYEIIEPALVGESQNLFVLGKHSGRHAFTEKMKELGYEFTNDERDAVFEAFKKLADRKKEITEEDLRALMLGEAAFAAQQYNITQLQVHFVSNSTQCATVVLKDEEGNVFEDAATGSGSIEAIYNAIQRILGLECELADYRIQSITQGQDALAHVHVELKEGAHQVSGFGVAQDVLEASARAYVHAAGKLKSFIQLVK

SEQ ID NO: 107812 - DNA, 1629 bp, Crocosphaera watsonii WH 8501
  CDS (1)..(1629): transl_table=11
atggggactgataagcgcatttggctctacgataccaccctcagagatggggcccaacgggaaggaatttccttatccttagaagataaactgaaaattgctcgtcaactggataaaatgggtattcccttcattgaagggggttggccaggggctaaccctaaagatgtgcagtttttctggaaattacaagaagaacctctcactcaggccgaagtagtagccttttgttccacccgtcgccccaataaactagcagcagaagaccccctcttaaaagcgattttagccgccggaacccgttgggtgaccatttttggtaaatcttgggatctccacgtcacagaagggctaaaaaccagcctagaagagaatttaaacatgatcgccgacaccattgagtatctccgcagtcagggacggcgtgtcatttacgatgcagaacattggtttgatggttatctgaataaccctgaatatgccctaaaaaccctgaaaaccgccaaagaagccggggcagaatggttagtgttatgcgacaccaacgggggaaccttaccccaggatgtcacccgtattattcaagatgtggtgactgccttagatattcaacccgacaatggtagtccacaattgggtattcatactcataacgactcaggaaccgccgtagctaacgggttagctggtgtagtagaaggggtgagaatggtacagggaaccatcaacggttacggggaaaggtgtggtaatgccaatttatgcactttagttcctaatttacagttaaaaatgggttatcactgtttagcagacagggagttaacccaactgacaaaaaccagccgtttaatcagcgaaatggttaatttagccccggatcatcacgctccttttgtgggacgttctgcctttgctcataaaggaggcattcatgtgtctgcggtacagaaaaaccctttgacttatgaacatattaaaccagaaaatattggtaatgaaagacgaattgttatctcagaaatggctggtttaagtaatgttttatctaaggctaaaaccttcgggatcgaattaaataaagaagatgctgcctgtcgagaaattttaaccagaataaaagaattagaacataaaggctatcaatttgaagtggcagaagctagttttgaactattaatgcgtcaagctttagggcaaacaaaaagcttctttcagttgcaaggatttcaagttcattgtgatatgttgtatggggaaggaatgccctatagtaatgccttagctactattaaactaacggttaatggagaagatagattagaagcagcagaaggtaacgggcccgtttctgctttagatagtgctttacgcaaagcgttggtcaatttttacccagaaattgctcaattccatctcacagattataaggtgagaattttagatggaggtgccggaacttcagccaatactagggttttaattgagtcgagtaatggtcataaacgctggacaaccgtgggggtttctgctaacattttagaagcgtcttatcaagcagtagtagaaggaattgaatacggcttattgttacaatcaacaattaaaaagccagctaaatcactgtga

SEQ ID NO: 107813 - protein, 542 aa, Crocosphaera watsonii WH 8501
MGTDKRIWLYDTTLRDGAQREGISLSLEDKLKIARQLDKMGIPFIEGGWPGANPKDVQFFWKLQEEPLTQAEVVAFCSTRRPNKLAAEDPLLKAILAAGTRWVTIFGKSWDLHVTEGLKTSLEENLNMIADTIEYLRSQGRRVIYDAEHWFDGYLNNPEYALKTLKTAKEAGAEWLVLCDTNGGTLPQDVTRIIQDVVTALDIQPDNGSPQLGIHTHNDSGTAVANGLAGVVEGVRMVQGTINGYGERCGNANLCTLVPNLQLKMGYHCLADRELTQLTKTSRLISEMVNLAPDHHAPFVGRSAFAHKGGIHVSAVQKNPLTYEHIKPENIGNERRIVISEMAGLSNVLSKAKTFGIELNKEDAACREILTRIKELEHKGYQFEVAEASFELLMRQALGQTKSFFQLQGFQVHCDMLYGEGMPYSNALATIKLTVNGEDRLEAAEGNGPVSALDSALRKALVNFYPEIAQFHLTDYKVRILDGGAGTSANTRVLIESSNGHKRWTTVGVSANILEASYQAVVEGIEYGLLLQSTIKKPAKSL

SEQ ID NO: 107814 - DNA, 1614 bp, Crocosphaera watsonii WH 8501; identical to SEQ ID NO: 13154
  CDS (1)..(1614): transl_table=11

SEQ ID NO: 107815 - protein, 537 aa, Crocosphaera watsonii WH 8501; identical to SEQ ID NO: 13155

SEQ ID NO: 107816 - DNA, 1575 bp, Prosthecochloris aestuarii DSM 271
  CDS (1)..(1575): transl_table=11
atgagccagaaagaaaaggttcttatattcgatacgacattacgcgacggcgagcagtctcctggggcatcgctcaacgttcaggaaaaaattgagattgccaggcaactcgaaaaactcaatgttgatgtgattgaggccggatttccggcctcctcgccgcttcagttagaggcagtccgacgagtaggcgaagagtcctccagaattgtagcggctcttgccagagcggttgaacacgatatcagcacagcgtggaaagcgcttcaaagcgctcgacatcctcgtatccatacgtttatcagtacatcggatatccatatcatgggcaagtttggccatgagcgctatggaaaaacactggctgaaaaacaaaagaccatactccggatggcagtcgatgctgtcctctacgcaaaaaccttctgtcatgatatcgagttttcggcagaagatgctggacgcaccgatcccggatatcttgcagaagtcattgaagccgttatcgatgccggagcaacaaccgtcaatattcccgatacaaccggctacacgtggccatcggaattcggaaaaaaaatagcggatctgaaagaaagggtcaccaatattgaccaggcggtcataagcgttcactgccacaacgatctcggcctcgccgtagcaaatactctcagcgccatagaaaacggggcacgtcaggcagaatgttctatcaacggcataggagaaagagcgggaaacgcatcgcttgaggagatcgttatggccctcaaagtacgcagtgacctgcacgactactccaccggcattacaacacgtgaaatatacaacaccagccggatggtatcgtcgttcaccggacttattgtacagccaaataaagctattgtaggcgacaatgcattttcccatgagtcgggtatccatcaggacggcatgctgaaaaaccgtcagacctatgaggtcatgacgcctcagtcggtaggagttcccgaaacccatatcgttttagggcgtcattccggcaaacacggccttcagtcaaggctgcttgtgctcggctacaaggttgagggcgaagagcttgacaaggtctatcaaagattcctcagcgttgccgacaagaaaaaagagatttatgacgatgatctgagagtgctcatgggtgacgaattcaaccgccctgctgagcctattgaactcgattatctgcacatcaacagcgggaccgcatccataccgacggcaacagtacggattaaaacccgtggcagaacatttgaagaatcgtccacgggagacggaccggttgacgcctgcttcagagcgatcgaaagggctctgaaactcgattcacttctcaattcctactcggtacgttcaacctccgccggcaggcaggctcttggagaagcaacggtgcggctcagggacggagataatttttatacagggcgaggcgtttccaccgatattattgaagcaagtgcaaaagcatatctgcaggcactgagctttcatgaggatgccttgcaaaacgacaacaacaattcaatcgataacgggatataa

SEQ ID NO: 107817 - protein, 524 aa, Prosthecochloris aestuarii DSM 271
MSQKEKVLIFDTTLRDGEQSPGASLNVQEKIEIARQLEKLNVDVIEAGFPASSPLQLEAVRRVGEESSRIVAALARAVEHDISTAWKALQSARHPRIHTFISTSDIHIMGKFGHERYGKTLAEKQKTILRMAVDAVLYAKTFCHDIEFSAEDAGRTDPGYLAEVIEAVIDAGATTVNIPDTTGYTWPSEFGKKIADLKERVTNIDQAVISVHCHNDLGLAVANTLSAIENGARQAECSINGIGERAGNASLEEIVMALKVRSDLHDYSTGITTREIYNTSRMVSSFTGLIVQPNKAIVGDNAFSHESGIHQDGMLKNRQTYEVMTPQSVGVPETHIVLGRHSGKHGLQSRLLVLGYKVEGEELDKVYQRFLSVADKKKEIYDDDLRVLMGDEFNRPAEPIELDYLHINSGTASIPTATVRIKTRGRTFEESSTGDGPVDACFRAIERALKLDSLLNSYSVRSTSAGRQALGEATVRLRDGDNFYTGRGVSTDIIEASAKAYLQALSFHEDALQNDNNNSIDNGI

SEQ ID NO: 107818 - DNA, 1692 bp, Prosthecochloris aestuarii DSM 271; identical to SEQ ID NO: 13158
  CDS (1)..(1692): transl_table=11

SEQ ID NO: 107819 - protein, 563 aa, Prosthecochloris aestuarii DSM 271; identical to SEQ ID NO: 13159

SEQ ID NO: 107820 - DNA, 1560 bp, Xylella fastidiosa Ann-1
  CDS (1)..(1560): transl_table=11
gtgaacacgggcatatccagccagccaccctgtatccggatttttgataccaccctgcgggacggtgagcaatctcccggttgcagtatgcctgcacaacaaaaactggtcatggcgcgcgcattagatgcattgggcgtagacattatcgagactggtttcccagccagttcccaatccgactacgaagccatgacgctgatcgcacgcgagttacgtagaccaactctggcagtactgtcacgttgtctgcaagccgatatcgaaacttcagcacgcgcactggaatcagcaaccaaaccacgcttgcatgtgtttctgtcaaccagcccattacaccgcgagcacaagctacgcatgagcaaggaacaggtgctggagtcagtgcacaagcatgtgagtctcagtcgaaccttgattgacgatgtggaattctcggccgaggatgcgacgcgcactgaggaggatttcctgatagaggttacccgcgtggcaatcgccgctggtgcaaccacgatcaacctgccagacaccgtagggttcagcacgcctgaagaaatccgcaacatgtttacgcgcgtcatcgccaacgtcgaaggtgcaaacaaagtgatctttagtgcgcactgccacgacgatctgggtttggccgttgctaactcgctggcagccattgagggcggtgcacgccaaatcgaatgtactatcaacggcattggtgagcgcgctggtaactgcgcgctggaagaactcactatggtgttgaaagtacgcaacgcgttttacaacattgatacttcaatccacacatcacgtatcgtctccacctcccagttactgcaacgattggttggcatgcccgtgcaacgtaacaaggcagtagtaggtgccaatgcctttgcacatgaatcgggtatccaccagcacggtatgctgcgccatcgcggcacctacgaaatcatgcgtccacaagaagtcggttgggtatgttcgcacatggtgctcggccgccatagcggccgtgctgcggtcgaacagcgtctacgcgcactgggctacttgctggaggaagaagatctaaaactggtatttgaagaattcaaacagctttgtgagaaacagcgtttggtcaccgatgtcgacctgcaagtactgatgcaagatacaacagtacagcatggctatcgcttggcctcaatgacaatcagtgatgttggtaatcaggccaacgcactggtggaattgtccaatccccaaggtcagcgtgtggctgaaactgcgcaaggcaacggcccagtagatgcactgttcggagcgctggctgcagcaaccggggtcaaactggagttggacagctatcaggtacacagtgttggtatcggggccgatgcacgtggtgaagccaacctcagtgtacgccacaacgatactcagtacgaaggtacagggaccagtaaagacattatcgaagccagtgcgctcgcttggctagacgtcgccaaccgtttgctacgtaaccccgaaaatatgcaaaataaacaaaacacagcactggcctga

SEQ ID NO: 107821 - protein, 519 aa, Xylella fastidiosa Ann-1
MNTGISSQPPCIRIFDTTLRDGEQSPGCSMPAQQKLVMARALDALGVDIIETGFPASSQSDYEAMTLIARELRRPTLAVLSRCLQADIETSARALESATKPRLHVFLSTSPLHREHKLRMSKEQVLESVHKHVSLSRTLIDDVEFSAEDATRTEEDFLIEVTRVAIAAGATTINLPDTVGFSTPEEIRNMFTRVIANVEGANKVIFSAHCHDDLGLAVANSLAAIEGGARQIECTINGIGERAGNCALEELTMVLKVRNAFYNIDTSIHTSRIVSTSQLLQRLVGMPVQRNKAVVGANAFAHESGIHQHGMLRHRGTYEIMRPQEVGWVCSHMVLGRHSGRAAVEQRLRALGYLLEEEDLKLVFEEFKQLCEKQRLVTDVDLQVLMQDTTVQHGYRLASMTISDVGNQANALVELSNPQGQRVAETAQGNGPVDALFGALAAATGVKLELDSYQVHSVGIGADARGEANLSVRHNDTQYEGTGTSKDIIEASALAWLDVANRLLRNPENMQNKQNTALA

SEQ ID NO: 107822 - DNA, 1563 bp, Streptococcus suis 89/1591; identical to SEQ ID NO: 13162
  CDS (1)..(1563): transl_table=11

SEQ ID NO: 107823 - protein, 520 aa, Streptococcus suis 89/1591; identical to SEQ ID NO: 13163

SEQ ID NO: 107824 - DNA, 1572 bp, Sulfitobacter sp. EE-36
  CDS (1)..(1572): transl_table=11
atgacagataccacacaacaagaccgcgtcttgattttcgacacgacattgcgcgacggcgaacaatcccccggcgccaccatgacccacgccgaaaagatcgagatcgcgggcctgctggacgagatgggcgtcgacattatcgaggccggtttccctatcgcgtccgaaggggatttcgccgccgtcagcgaaatcgcgaagctgtcgaagaactcggtcatctgcgggctggcccgcgcccaattcggcgacatcgatcgttgttacgaggcgatcaaacacgcggcccagccccgcattcacacgtttatcggcacctcgccgctgcaccgtgccattccgaacctcacgatggacgaaatggccgaccgcatccacgaaacggtgacccatgcgcgcaacctgtgcgacaatgtgcaatggtcgccgatggacgccacgcggaccgagcttgactacctctaccgtgtcgtcgaaatcgcgatcaaggcgggtgcgaccacgatcaacatccccgataccgtcggctataccgccccccgcgaaagcgccgatctgatccgcaagctcttggaaaacgtgcccggcgcggacgagatcgtctttgccacgcattgtcacaacgaccttggcatggcgacagccaacagccttgccgccgtcgaagcgggtgcgcgccagatcgaatgtacgatcaacggcttgggcgaacgcgcgggcaacaccgcgttggaagaggtcgtgatggcgctgaaagtgcgcaatgacatcatgccgttccagaccaagatcgacagcaccaagatcatgaatatctcgcgccgcgttgccgctgtttcgggcttcgccgtgcagttcaacaaggccatcgtcggcaagaacgcctttgcgcatgaaagcggcatccatcaggacggcatgctgaagaacgccgaaacattcgagatcatgcgccccgaagacgtgggcctgaccgagaccaacatcgtcatgggcaaacactcgggccgtgcggcgttgcgctcgaagctggaaaacctcggctatgaattgggggataaccagctcaaggatgtgtttgtccgcttcaaggaactggccgaccgcaagaaagagatctacgacgacgatctgatcgccctgatgcgcaccgccaccgatcctgaaagcgaccgcattgtgctgggtagcatgaccgtcgtctgcggcaccgaaggcccgcagaaggcagagatgtcgctgacggtggatggtgcggaaacctctacctcgcaaaccggtgacgggcctgtggatgccgcgttcaactgcatcaaggcactggtcgatcacagcgcgcgcttgcaattgtatcaggtgcacgccgtgaccgaaggcaccgacgcgcaggccaccgtttctgtccggcttgaggaagacgggcgcatcgtgaccggtcagtcggcggatacagacaccgtggtcgcatcggtccgcgcctatatccacgcgctcaaccgtctgttggtgcgccgcgagaagggcggcaccgacaagcgcgagatcagctataaggatgtggtgggctaa

SEQ ID NO: 107825 - protein, 523 aa, Sulfitobacter sp. EE-36
MTDTTQQDRVLIFDTTLRDGEQSPGATMTHAEKIEIAGLLDEMGVDIIEAGFPIASEGDFAAVSEIAKLSKNSVICGLARAQFGDIDRCYEAIKHAAQPRIHTFIGTSPLHRAIPNLTMDEMADRIHETVTHARNLCDNVQWSPMDATRTELDYLYRVVEIAIKAGATTINIPDTVGYTAPRESADLIRKLLENVPGADEIVFATHCHNDLGMATANSLAAVEAGARQIECTINGLGERAGNTALEEVVMALKVRNDIMPFQTKIDSTKIMNISRRVAAVSGFAVQFNKAIVGKNAFAHESGIHQDGMLKNAETFEIMRPEDVGLTETNIVMGKHSGRAALRSKLENLGYELGDNQLKDVFVRFKELADRKKEIYDDDLIALMRTATDPESDRIVLGSMTVVCGTEGPQKAEMSLTVDGAETSTSQTGDGPVDAAFNCIKALVDHSARLQLYQVHAVTEGTDAQATVSVRLEEDGRIVTGQSADTDTVVASVRAYIHALNRLLVRREKGGTDKREISYKDVVG

SEQ ID NO: 107826 - DNA, 1560 bp, Roseovarius nubinhibens ISM
  CDS (1)..(1560): transl_table=11
atgacaaaacccgacaatgaccgcgtggtgatctttgacaccaccttgcgcgatggcgaacaaagccccggcgcaaccatgacccatgacgaaaagctcgagatcgccgggctgctcgacgagatgggtgtcgacatcatagaagcgggctttcccattgcttctgaaggagattttcgcgccgtaagcgagatcgccaagcaggcgcagaacgccgtgatctgtggtctcgcccgcgccaatctcaaggatatcgaccgctgctgggaggccgtgaaacacgcccgccagccgcgcatccacacctttatcggcacctcgccgctgcaccgcgccatccccgatctcacccgtgacgagatggccgaacgcatccatgagaccgtgacccacgcccgcaatctctgcgacaatgtgcaatggtcgccgatggatgcgacccgcaccgaatgggattatctctgccgcgtggtcgagatcgccatcaaggccggggccagcacgatcaacattcccgacaccgtgggctataccgccccggtcgagagcgccgatctcatcaagcgcctgatcgaaaccgtgcccggcgccgatgacgtggtgtttgccacccattgccacaatgatctcggcatggcgaccgccaattccctcgccgccgtcgccggtggcgcgcgtcaaattgagtgcacgatcaatggcttaggcgagcgcgctggcaacaccgcgctcgaagaagtggtgatggcgctcaaggtgcgcaatgacatcatgccctggcacaccgggatcgacaccaccaaaatcatgaatatctcgcgccgggtctcgaccgtctcgggctttgtggtgcagcccaacaaggccatcgtcggcaagaacgcctttgcccatgagagcggcatccaccaggacggcatgctcaagaacgccgaaaccttcgagatcatgcgcccggaagatgtcggtatttcaggcacttcgctccccttgggcaagcattcgggccgcgccgcgctgcgcgccaagctcaaggatctcggcatcgaagtgggggacaatcagctcaaggacatctttgtgcggttcaaggatctcgccgaccgcaaaaaagaagtttacgacgacgatattctcgcgctggtgagtgtcacgggcgagacctcgaaccatctcgagctgatcaatctcaaggtgatctgcggcaccggcccggccgaggccgtgctcgaaatggacgtgggcggcgaggaaaaaagcgccacttgtcaaggggatggccccgtcgatgccacgttcaaggcggtgcgggaaatctggcccaatgacgccaagctgcagctctaccaggtgaacgccgtgaccgaaggcaccgacgcccaagccaccgtcagcgtccgcctcgaagaggctggcaagatcgccaccggccagtccgcggacaccgacaccgtcgtcgcctcggcccgcgcctatatccatgcgctcaaccggctcatggtgcgccagtcgcgcggcggcagcgatatccccgaggtgagctacaaggatctcacctga

SEQ ID NO: 107827 - protein, 519 aa, Roseovarius nubinhibens ISM
MTKPDNDRVVIFDTTLRDGEQSPGATMTHDEKLEIAGLLDEMGVDIIEAGFPIASEGDFRAVSEIAKQAQNAVICGLARANLKDIDRCWEAVKHARQPRIHTFIGTSPLHRAIPDLTRDEMAERIHETVTHARNLCDNVQWSPMDATRTEWDYLCRVVEIAIKAGASTINIPDTVGYTAPVESADLIKRLIETVPGADDVVFATHCHNDLGMATANSLAAVAGGARQIECTINGLGERAGNTALEEVVMALKVRNDIMPWHTGIDTTKIMNISRRVSTVSGFVVQPNKAIVGKNAFAHESGIHQDGMLKNAETFEIMRPEDVGISGTSLPLGKHSGRAALRAKLKDLGIEVGDNQLKDIFVRFKDLADRKKEVYDDDILALVSVTGETSNHLELINLKVICGTGPAEAVLEMDVGGEEKSATCQGDGPVDATFKAVREIWPNDAKLQLYQVNAVTEGTDAQATVSVRLEEAGKIATGQSADTDTVVASARAYIHALNRLMVRQSRGGSDIPEVSYKDLT

SEQ ID NO: 107828 - DNA, 1572 bp, Oceanicola batsensis HTCC2597
  CDS (1)..(1572): transl_table=11
atgacaccgaccacggaccaggaccgcgtcctgattttcgacacgaccctccgcgacggcgaacagagccccggagcgacgatgacccatgaggaaaagctcgagatcgcggccgcgctcgacgagatgggcgtcgacatcatcgaagccggcttcccgattgcgtcggagggcgactttaatgcggtctccgagatcgcgaagaattcgcgaaactcggtgatctgcggcctcagccgcgcgaacttcaaggatatcgaccgcaactgggaggcgatccgccatgccgcccggccccgcatccacaccttcatcggcacctcgccgctgcaccgcgccatccccaacctgacccaggacgagatggccgaccgtatccacgagaccgtgacccatgcccgcaacctctgcgacgacgtgcagtggtcgccgatggatgcgacacggaccgagcacgactatctctgccgtgttgtcgagatcgccatcagggccggcgccaccacgatcaacatccccgacaccgtcggctacaccgccccccgcgaaagcgccgacctgatccgcatgctgatcgagaaggtgcccggcgcggacgaggtggtgttctcgacccattgtcacaacgacctggggatggcgacggcaaactcgctcgccgcggtcgaggcgggcgcgcgccagatcgaatgcacgatcaacgggctgggcgaacgcgcgggcaacaccgcgctcgaagaggtggtgatggcgctgcgcgtccgcaacgacatcatgcccttcgccacgaacgtcgacaccaccaggatcatgaagctctcgcggcgggtcgccaccgtctcgggctttccggtgcagtacaacaaggccatcgtcggcaagaacgcctttctccatgaatcgggtatccaccaggacggcgtgctcaagaacgtcgaaaccttcgaaatcatgaagcccgccgacatcggcctgaacgaggacaacatcgtcctcggcaagcattcgggtcgtgcggcgctcaaatccaagctcgccgccctcgggatcgacctgggccagaaccagctcaacgacgtcttcgtgcggttcaaggacctggccgatcgcaagaaggaggtctacgaggacgacctctggacgctcgtccgcgatgccgaggacgagacaccggaccggctggagctgaaggatctcaaggtgatctgcggcaccggcggccagtcggccgagatggtgatgctcgtcgacggcaaggagacgcgcgccgagacctccggcgacggccctgtcgacgcgtgtttcaacgcggtcaaggagatcttcccgcaccaggccaagctggaactctaccaggtgcacgccgtgacccagggcaccgacgcccaggccacggtcagcgtccgcctgaacgaggacggccgcatcgtgaccggccagagcgccgataccgacacggtcgtggccagcgtcaaggcctatcttcacgcgctcaatcgcctgctggtccgccgcggcaaggtcggcgaaggcgccgacacccgcgagatcagctacaaggacgtcagctga

SEQ ID NO: 107829 - protein, 523 aa, Oceanicola batsensis HTCC2597
MTPTTDQDRVLIFDTTLRDGEQSPGATMTHEEKLEIAAALDEMGVDIIEAGFPIASEGDFNAVSEIAKNSRNSVICGLSRANFKDIDRNWEAIRHAARPRIHTFIGTSPLHRAIPNLTQDEMADRIHETVTHARNLCDDVQWSPMDATRTEHDYLCRVVEIAIRAGATTINIPDTVGYTAPRESADLIRMLIEKVPGADEVVFSTHCHNDLGMATANSLAAVEAGARQIECTINGLGERAGNTALEEVVMALRVRNDIMPFATNVDTTRIMKLSRRVATVSGFPVQYNKAIVGKNAFLHESGIHQDGVLKNVETFEIMKPADIGLNEDNIVLGKHSGRAALKSKLAALGIDLGQNQLNDVFVRFKDLADRKKEVYEDDLWTLVRDAEDETPDRLELKDLKVICGTGGQSAEMVMLVDGKETRAETSGDGPVDACFNAVKEIFPHQAKLELYQVHAVTQGTDAQATVSVRLNEDGRIVTGQSADTDTVVASVKAYLHALNRLLVRRGKVGEGADTREISYKDVS

SEQ ID NO: 107830 - DNA, 1611 bp, Prochlorococcus marinus str. MIT 9211
  CDS (1)..(1611): transl_table=11
atggccaaggatccaggccgagttttaatttttgataccaccttaagagatggtgagcaatctcctggtgcgagtttgaatttagaagagaaacttgccattgcgcagcaacttgcaaggttaggagttgacataattgaagcagggttcccatacgcaagccaaggagactttactgctgttcaaaggatagctgagcaagtcggtggagaagaagggcctattatctgcggtcttgcccgagcttcaaaagcagatatcaaagcttgtggagaagcaattgcgcctgctcctaaaaagagaattcatacatttattgcaactagtgatatacatcttgagcataaacttcgaaaaacaagagaggaagtgattcagattgtccctgagatggttcattatgcgaagtctttctcagaagatgttgaattctcttgtgaagatgccgctagaagtgatccagattttttatatgaactaattgagcttgctatttctgcaggtgccggcactattaacattcccgacacagtgggttatataacaccatcagaatttggagaattaattcaaggaatagatgccaatgtgccaaatattgatgaggcgattttatccgtgcacggtcataatgatctgggtcttgcagtggctaatttcttggaagcaattaagagaggtgcgagacagttggaatgcacaattaatggcataggagaaagagcagggaatgcagctttagaagaattggttatggctttacatgtgcgtaggagtttttataacccctttttcggtagagatcctgaaagccctacaccacttacagcaattcgtactgaagaaataacaaagacttcacgtctggtctcaaatttaactgggatggtggttcaaccaaacaaggcaattgttggcgctaatgcctttgctcatgaatcaggcattcatcaagatggagttttaaaaaatcggctaacttatgaaatagttgacgcaaaaacagtcggtcttacagataataggatctcattagggaagctaagtggaagaagtgctgtaagggcaagacttgaagaattaggatatgatcttacgagagatgatttaaatgaggcattcgccaaatttaaggatttggcagatcgtaaaagagaaattactgatagagatttagaagcgatagttagcgaacaggtgatgcaacccgatgcaagatttcaactacaacttgttcaagtaagttgtggaacgacattaaagcctacagccacagtcactcttgcagatcaagatggtactgagcaaacggcagtcgcccttggaactgggcctgttgatgctgtttgcaaggcacttgactctttagcaggagaaagtaatgaattgattgaattttcagttaagtctgtaacggaaggaattgatgccttgggcgaagttacaattcgtctaaggagagaaggcaaaattttttctggtcattctgctgatacagatgttgttgttgccgcagctcaggcatacgtaaatgctcttaataggcttatatattttgaaaaaaagaaccctattcaccctcagcatgatctgatcaaggcaaacctatga

SEQ ID NO: 107831 - protein, 536 aa, Prochlorococcus marinus str. MIT 9211
MAKDPGRVLIFDTTLRDGEQSPGASLNLEEKLAIAQQLARLGVDIIEAGFPYASQGDFTAVQRIAEQVGGEEGPIICGLARASKADIKACGEAIAPAPKKRIHTFIATSDIHLEHKLRKTREEVIQIVPEMVHYAKSFSEDVEFSCEDAARSDPDFLYELIELAISAGAGTINIPDTVGYITPSEFGELIQGIDANVPNIDEAILSVHGHNDLGLAVANFLEAIKRGARQLECTINGIGERAGNAALEELVMALHVRRSFYNPFFGRDPESPTPLTAIRTEEITKTSRLVSNLTGMVVQPNKAIVGANAFAHESGIHQDGVLKNRLTYEIVDAKTVGLTDNRISLGKLSGRSAVRARLEELGYDLTRDDLNEAFAKFKDLADRKREITDRDLEAIVSEQVMQPDARFQLQLVQVSCGTTLKPTATVTLADQDGTEQTAVALGTGPVDAVCKALDSLAGESNELIEFSVKSVTEGIDALGEVTIRLRREGKIFSGHSADTDVVVAAAQAYVNALNRLIYFEKKNPIHPQHDLIKANL

SEQ ID NO: 107832 - DNA, 1677 bp, Erythrobacter sp. NAP1
  CDS (1)..(1677): transl_table=11
atgttgaaaaatcccgcgaacaagtaccgccctttcacgccaatcaacctgcccgaccgccaatggccctcgcgcgttattgaaggcccgccgcgctggctctcgaccgatcttcgcgacgggaaccagtcgatcatcgacccgatggacggggtgaagaaagcgcgctttttcgatctgctcgtcgagatcggagtgaaggaaatcgaagtcggctttcccagtgccggcgcgaccgaattcaccttcatcaaacatctggtggaatcgggcacgatccccgacgacgtgattgtgcaggtgcttactcaaagccgcgaagaccttatacgcacaagtttcgagagcctcgaaggcgcgcgagcagccatcgttcacctctacaacgcggtcagccccgcctggcgcgatatcgtcttccgtatgtcgaaagacgaggtgcgcgagatcgcgaagcagggcgccaaggtcatgcgcgacgaagccgctaagcggccagacactgactggcatttccaatattcgcccgaaacattctctactgccgagatcgatttcagcatcgaggtttgcgaggcggtgatgcaggtgctcgcgccgacgcccgaacatccgatcatcctcaacctgcccgccacggtcgaggcgtcgacgcccaatatctacgccgaccagatcgagtatttctgccgcaatctcccgaaccgcgacagcgcggtgatctcgcttcacacgcataacgatcgcggaaccggtgtggctgcggccgagctaggccttatggcaggcgcggaccgtgtcgaaggctgtctgttcggaaatggagagcgcacgggcaattgctgcctcgtgacgatggcgctcaacatgtacacgcagggcgtcgatccggggctcgacttctccgacatcgaccgcgtgatcgagacggttgagtactgcaacgacctgccggtccaccagcgccatccctatggcggcgagctggtctacaccgccttctccggcagtcaccaggacgcgatcaagaagggcttcgaagcccatgaccagcaaaatgatgagctttggcgcgttccctacctgccgatcgatccggctgatctcgggcgcgattacgaggccgtcatccgtgtcaactcgcagagcggcaaaggcggctttgcgtgggtgctcgaacagcgcgagggtctgaaattgcccaaggccatgcagcgcgatttttccaagcatgtccagcgcctcgccgatgaaagctcacgcgagctcaacgccgaggacatctggcaggcattcaaaggcgcctaccacgtgcagacgccagacaagcacttccaactggtcgattacaatgaaacccgtgccagcgacggaacgcgggtattcagcggaaagatcgcggtcgaaggacgcgagcaaagcgtgtcgggccgcggcaagggtctgatctccagcgtcatggcgaccattcgcgacgtattcggcgtggagctcgaagtggtggactacacccagcaatcgctgggcagcggcaccgatgcaaatgcggcgacatatctggaatgtgtcgatccggacggacggaccgtctggggctgcggcatcgacgaggacgttgccaccgcaagcgtccgcgccgtgctcagtgctgctaaatcagctgtttccgtcgactaa

SEQ ID NO: 107833 - protein, 558 aa, Erythrobacter sp. NAP1
MLKNPANKYRPFTPINLPDRQWPSRVIEGPPRWLSTDLRDGNQSIIDPMDGVKKARFFDLLVEIGVKEIEVGFPSAGATEFTFIKHLVESGTIPDDVIVQVLTQSREDLIRTSFESLEGARAAIVHLYNAVSPAWRDIVFRMSKDEVREIAKQGAKVMRDEAAKRPDTDWHFQYSPETFSTAEIDFSIEVCEAVMQVLAPTPEHPIILNLPATVEASTPNIYADQIEYFCRNLPNRDSAVISLHTHNDRGTGVAAAELGLMAGADRVEGCLFGNGERTGNCCLVTMALNMYTQGVDPGLDFSDIDRVIETVEYCNDLPVHQRHPYGGELVYTAFSGSHQDAIKKGFEAHDQQNDELWRVPYLPIDPADLGRDYEAVIRVNSQSGKGGFAWVLEQREGLKLPKAMQRDFSKHVQRLADESSRELNAEDIWQAFKGAYHVQTPDKHFQLVDYNETRASDGTRVFSGKIAVEGREQSVSGRGKGLISSVMATIRDVFGVELEVVDYTQQSLGSGTDANAATYLECVDPDGRTVWGCGIDEDVATASVRAVLSAAKSAVSVD

SEQ ID NO: 107834 - DNA, 1623 bp, Synechococcus sp. WH 5701; identical to SEQ ID NO: 13166
  CDS (1)..(1623): transl_table=11

SEQ ID NO: 107835 - protein, 540 aa, Synechococcus sp. WH 5701; identical to SEQ ID NO: 13167

SEQ ID NO: 107836 - DNA, 1623 bp, Synechococcus sp. WH 7805
  CDS (1)..(1623): transl_table=11
atggcccatgatccaggccgcgttctgatcttcgacaccaccctcagggatggtgagcagtcgccgggagccagcctcaacctcgaggaaaagctggccattgcccaacaactggcacgtctcggcgttgatgtcatcgaagcgggcttcccatttgccagccccggggatttcgccgccgtgcagcggattgcccagcaggtgggtggtgagcagggcccgattatctgcggtcttgcccgggcgtcccgcggggacattaaggcttgcgctgatgcggtggccccagccccccgccgccgcattcacacgttcatcgccacaagcgacattcaccttgagcacaaattgcgcaagagccgccaggaggtgttggcgatcgtgcccgagatggtggcctatgcccgctcgctcgtcgacgacgtggaattctcctgtgaggatgctggccgaagtgatcccgaattcctctacgaggtgatcgaagctgccatcgctgccggcgctagcactatcaacatccctgacaccgttggctacacgacgccggccgagttcggcgccttgatcgcgggcatcgaccagcacgtgcccaacatcgctgatgccgtgctctccgtccatggccacaacgatctcggtttggctgtggccaactttcttgaggccgtgaaaaacggtgcccgccagttggagtgcaccatcaatggcatcggcgagagagctggtaacgcggcccttgaagagctggtgatggcgttgcacgtacgccgccggtacttcaatcccttctttggccgagaggacgattcacccactcccctgactggtgtgaggaccgaggagatcacgaaaacgtcgcgtttggtctccaatctcaccggcatggtggtgcagcccaacaaggcgatcgtgggtgccaatgcctttgcccatgaatcgggcattcaccaagacggtgttctcaaaaaccgtctcacctacgagatcgtcgatgcccgcacggtcggtctcacggacaacaggatttccctcggcaagctgagcggccgcagtgcggtgcgtgcccgtctcgaggagctcggctacgacctcagccgtgaagaccttgacgatgcgttcgcccggttcaaggagttggcggatcgcaagcgcgatatcaccgatcgcgatctcgaagccatcgtgagcgagcaggttcagcaacccgacgcccgctatcagctcacgtctgtgcaggtgagctgcggcagcaacctgcagcccacggccaccgtgaccctgctggatgaagagggtcaagaacagagtgaggcggcgattggtacaggccctgtggatgccgtgtgccgtgccctcaatgcactggccggggaaccgaacgagctggtggagttttcggtgaagtccgtcacagagggcattgatgccatgggtgaggtcacgatccggttgcgacgcgacgggcagctcttttccggccatgctgccgacactgatgtggtggtggctgccgctcaggccttcgtgaatgccctgaatcgcttggtggccggttccttgaacccggcccttcatccccagcgggatgccacgcctttggatgccagccccaccctctga

SEQ ID NO: 107837 - protein, 540 aa, Synechococcus sp. WH 7805
MAHDPGRVLIFDTTLRDGEQSPGASLNLEEKLAIAQQLARLGVDVIEAGFPFASPGDFAAVQRIAQQVGGEQGPIICGLARASRGDIKACADAVAPAPRRRIHTFIATSDIHLEHKLRKSRQEVLAIVPEMVAYARSLVDDVEFSCEDAGRSDPEFLYEVIEAAIAAGASTINIPDTVGYTTPAEFGALIAGIDQHVPNIADAVLSVHGHNDLGLAVANFLEAVKNGARQLECTINGIGERAGNAALEELVMALHVRRRYFNPFFGREDDSPTPLTGVRTEEITKTSRLVSNLTGMVVQPNKAIVGANAFAHESGIHQDGVLKNRLTYEIVDARTVGLTDNRISLGKLSGRSAVRARLEELGYDLSREDLDDAFARFKELADRKRDITDRDLEAIVSEQVQQPDARYQLTSVQVSCGSNLQPTATVTLLDEEGQEQSEAAIGTGPVDAVCRALNALAGEPNELVEFSVKSVTEGIDAMGEVTIRLRRDGQLFSGHAADTDVVVAAAQAFVNALNRLVAGSLNPALHPQRDATPLDASPTL

SEQ ID NO: 107838 - DNA, 1548 bp, Pseudoalteromonas tunicata D2; identical to SEQ ID NO: 13168
  CDS (1)..(1548): transl_table=11

SEQ ID NO: 107839 - protein, 515 aa, Pseudoalteromonas tunicata D2; identical to SEQ ID NO: 13169

SEQ ID NO: 107840 - DNA, 1545 bp, Photobacterium sp. SKA34; identical to SEQ ID NO: 13170
  CDS (1)..(1545): transl_table=11

SEQ ID NO: 107841 - protein, 514 aa, Photobacterium sp. SKA34; identical to SEQ ID NO: 13171

SEQ ID NO: 107842 - DNA, 1542 bp, Oceanospirillum sp. MED92
  CDS (1)..(1542): transl_table=11
atgagtaatgacaaccgagtaattatttttgatacaaccttgcgcgatggtgagcaaagccccggcgcgtcgatgactcgtgatgaaaagctgcgcgttgccaaacagctggaaaaaatgcgtgttgacgttatcgaagccggttttgctattgccagcccgggtgacttcgaatctgttaaaacgattgctgaagccgtgactgaaagccgggtttgttcactttcccgagcgcttgatgcagatatcgatcgtgcaggtgaagctctgcagaatgccgctatggggcgtatccatacctttattgctacgtcacctatccacatgaaatacaaactgcagatggaacctgatcaggttgtagagcaggcagttaaagcagtcacgcgtgcacgtaatctgattgacgacgtcgaattttcgcttgaagatgcgagtcgctctgaactggacttcatgtgccggatcattgagaaagtaattgatgcgggtgcgagtacaatcaatattccggatacagtgggttatgcagtaccggaagagttcgcgcatacgattggccaattagtccagcgcattcctaacgctgataaggcaattttctcggtgcactgccataacgacctgggtcttgcggttgcaaactctttggccgcggttggcgcaggtgctcgtcaggttgaatgtacgatcaatggtttgggtgagcgtgcaggtaatgcttcgctggaagagatcgtgatggcgatccgtacccgtaaagatacgctaggcctggaaaccaatatcgacacgacccagatcgtaccggcatcgcgcctggtgtccagtgttacgggcttcccggtacaacctaacaaggcgattgttggggcgaatgcttttgcgcatgaatcgggtattcatcaggatggtgtactaaaacatcgtgaaacttacgagatcatgaccgcacaggatgttggctggaatactaaccgtatggttttgggtaaacattctggtcgtgccgctttccgtagtcgcctggaagagttaggtacaacgtttgcaacggattcagagcttaataatgctttctctcgttttaaagatctggccgataagaagcatgagatctttgacgaagatctggttgcgctggtcagtgatacccgtgcagaggcaagcagtgagcagttcaaactttccagtctgtcagtgacttctcagacaggtgaaacgcccgttgcgaaaattgtgatgcaggttgggaacgaagagagaagagctgaatccacaggtagtggcccagtcgatgcgacctttaaagcgattgagtcgattgctgagtccggtgcaagcttgcagatctactctgtaaatgccgtaacggaaggcacagattctcagggtgaagtgacggtgcgtctggaaaatggtggccgaattgtgaatggccttggcgccgatacagatatcattatcgcttctgcaaaggcttatattcatgccctgaacatgcttgatgccaatgtgcagaaagcacatccgcaagtgtaa

SEQ ID NO: 107843 - protein, 513 aa, Oceanospirillum sp. MED92
MSNDNRVIIFDTTLRDGEQSPGASMTRDEKLRVAKQLEKMRVDVIEAGFAIASPGDFESVKTIAEAVTESRVCSLSRALDADIDRAGEALQNAAMGRIHTFIATSPIHMKYKLQMEPDQVVEQAVKAVTRARNLIDDVEFSLEDASRSELDFMCRIIEKVIDAGASTINIPDTVGYAVPEEFAHTIGQLVQRIPNADKAIFSVHCHNDLGLAVANSLAAVGAGARQVECTINGLGERAGNASLEEIVMAIRTRKDTLGLETNIDTTQIVPASRLVSSVTGFPVQPNKAIVGANAFAHESGIHQDGVLKHRETYEIMTAQDVGWNTNRMVLGKHSGRAAFRSRLEELGTTFATDSELNNAFSRFKDLADKKHEIFDEDLVALVSDTRAEASSEQFKLSSLSVTSQTGETPVAKIVMQVGNEERRAESTGSGPVDATFKAIESIAESGASLQIYSVNAVTEGTDSQGEVTVRLENGGRIVNGLGADTDIIIASAKAYIHALNMLDANVQKAHPQV

SEQ ID NO: 107844 - DNA, 1638 bp, delta proteobacterium MLMS-1
  CDS (1)..(1638): transl_table=11
atgcaagagcagcttaccatatacgacaccaccctgcgggacggtacccaggccgaaaatttcaatctttcggtggaggacaagctgcggatcaccctcaagctcgatgaactggggatcgatttcgtcgaagggggctggccgggggccagtccagcctccacccgttattttgatgaaatcaaaaactacgaacttaagcataccgtggtcaccgcctttggcagtacccgcaacttcagcaaaccgccggcggaagaccccaacttaaacgccctgttggccgccaagacccgggcgatcaccattttcggcaaaagctgggatatccatgtccgggacgcgctgcgcatcgagctggcggataacctgcagatcattgaggattcgctggcctatctgcgcccccaggtggaatttctgttctacgacgccgagcattttttcgacggctacaaggccaaccccgaatacgccctggccaccctggacaaggcggtggccggcggcgcccagtgcctggtgctctgcgataccaacggcggcgccctgccggccgaaatcgccgccattatcaacgaggtcaaacgccacctggccggcggcagcgaaccggagcaggcaactctgccggtggagctgggcattcatgcccacaacgacgccgaatgcgcggtggccaattcgctggtggcggtgtcgctgggaatcagccatatccaggggaccatcaacgggatcggcgagcgctgcggcaacgccaatctgacctcgatcatgccggggctggcccttaagatgaagcgctatttcaaggccgccgagcacctggaaaagctcaccgaaacctccaggtttgtcagcgaactgggtaatatggcgcatcataaatatcagccctatgtcggccaggcggcttttgcccataagggcggaattcatgtcagcgccgtcaagcgcaatccgctgacctacgagcatatcgccccggagcgggtgggcaatgtccgccggatcctgatctccgatcaggccgggcgtagcaatatcctgcacaaggccaaaaaattcggtatcgatctcgacagccaggaccccctggtcagttccatcctgaaaaagctcaaggggttggaaaaccgtggttttcagtacgaaggggccgaggcctcctttgagctgctgatgcgccaggccctgggcacccgcaaggagtacttcaatcttaaggggttccgggtgttgagccagatggtgcccggcaccggcggcgatgagctggagcaagccatggaggaggccaccatcctgctggaagtcggcggcgagacggtgcatgccgccgctttgggcaatggcccggtcaatgccctggacaacgccctgcgcaaggccttgaccggcttctatcccaagttgcaggcggtggagttggaggattacaaggtccgggtactggccagtgagcatggtaccggggcccgggtgcgggtgttgatcgaatcccgcgatgaggatgccagctggggtacggtgggggtttcccacgatatcatcgaagccagctggcaggccctggtggacagtatcacctacaagctgatgaaagatgagcagcgggatcgcggccaatcctga

SEQ ID NO: 107845 - protein, 545 aa, delta proteobacterium MLMS-1
MQEQLTIYDTTLRDGTQAENFNLSVEDKLRITLKLDELGIDFVEGGWPGASPASTRYFDEIKNYELKHTVVTAFGSTRNFSKPPAEDPNLNALLAAKTRAITIFGKSWDIHVRDALRIELADNLQIIEDSLAYLRPQVEFLFYDAEHFFDGYKANPEYALATLDKAVAGGAQCLVLCDTNGGALPAEIAAIINEVKRHLAGGSEPEQATLPVELGIHAHNDAECAVANSLVAVSLGISHIQGTINGIGERCGNANLTSIMPGLALKMKRYFKAAEHLEKLTETSRFVSELGNMAHHKYQPYVGQAAFAHKGGIHVSAVKRNPLTYEHIAPERVGNVRRILISDQAGRSNILHKAKKFGIDLDSQDPLVSSILKKLKGLENRGFQYEGAEASFELLMRQALGTRKEYFNLKGFRVLSQMVPGTGGDELEQAMEEATILLEVGGETVHAAALGNGPVNALDNALRKALTGFYPKLQAVELEDYKVRVLASEHGTGARVRVLIESRDEDASWGTVGVSHDIIEASWQALVDSITYKLMKDEQRDRGQS

SEQ ID NO: 107846 - DNA, 1524 bp, delta proteobacterium MLMS-1
  CDS (1)..(1524): transl_table=11
atgtccgagaaaattattgtttttgataccacgttgcgtgatggcgagcagtcccccggcgccagcatgaatatccacgaaaaataccgtctggcccagcagttgaccaaactgggggtggatgtcatcgaggccggctttcccgccgcctccctgggtgattttgaatgcgtgaagaatatcgccgacaatattcgcggcacccagatcgccgccctgtgccgctgtaaccccaaggatatcgacaccgcctggcaggctttgaaaaacggggaaaatccccggattcacaccttcctggccacctccgagattcatatgcagcataagctgcggatgagtcctgagcaggtggtggagcgggcggcggccatggtggcccatgccgcccagtataccggcaatgtcgagttttccgccgaggatgcctcccgcagcgatctcgactttgtctgccgggtctttgcggcggtgatcgaggccggggccaccaccctcaattttcccgacaccaccggttacgccctgcccgacgaatttggcgccaagatccgttatctggtggaaaacgtgcccaatatcgacaaggcggtactgagtgtgcactgtcacaacgatctggggctggcggtggccaattcgctggcggccatcaataacggggcccgccaggtggagtgcacggtcaacggtctgggcgagcgggccggcaataccgccatggaagaggtggtgatgatcctgcggacccgggcggaaacctcgccttatcataccgatatcgtcaccgagcatatctaccccagcagccggttggtcagcaccatcaccgggatgccggtgcaacccaacaaggccattgtcggggccaacgccttccgccacgagtccggagtgcatcaggatggggtactcaaggagcggaccacctacgagatcatcgatcccaaggatgtggggatctccatcggcaatatcgtcctgggtaagcactccggccgccacgccctgcgggataaggtcctggagctgggttacggcgacctgagcgaggaggaggtggagcgggtcttcaaacgcttcaaggaagtggccgatcgcaaaaaagagatgtttgaggaagacctggaggcgatcatcatggatgaagtgctgcgggtgccggaatcattcaagctgttgcatctgggctccatgagcggcagtatgtcgttgcccaccgccgctgtccggatgcgggtcaacgaccaggagaaggagaccgcggtgctgggggttggggccatcgatgccactttccgggccattgccgagttgaccggcaccggcagcaagctgctctacttttcggtcagctcgatcaccggcggcaccgacgcccagggcgaggtgatggtccgcgtggaagacaacggcaagctggtgatcggtcagggggccgatccggatatcatcaccgccgctgccaaggcctatttgatggccttgaatcggctggaatttttaaaaaagcagttgcagtaa

SEQ ID NO: 107847 - protein, 507 aa, delta proteobacterium MLMS-1
MSEKIIVFDTTLRDGEQSPGASMNIHEKYRLAQQLTKLGVDVIEAGFPAASLGDFECVKNIADNIRGTQIAALCRCNPKDIDTAWQALKNGENPRIHTFLATSEIHMQHKLRMSPEQVVERAAAMVAHAAQYTGNVEFSAEDASRSDLDFVCRVFAAVIEAGATTLNFPDTTGYALPDEFGAKIRYLVENVPNIDKAVLSVHCHNDLGLAVANSLAAINNGARQVECTVNGLGERAGNTAMEEVVMILRTRAETSPYHTDIVTEHIYPSSRLVSTITGMPVQPNKAIVGANAFRHESGVHQDGVLKERTTYEIIDPKDVGISIGNIVLGKHSGRHALRDKVLELGYGDLSEEEVERVFKRFKEVADRKKEMFEEDLEAIIMDEVLRVPESFKLLHLGSMSGSMSLPTAAVRMRVNDQEKETAVLGVGAIDATFRAIAELTGTGSKLLYFSVSSITGGTDAQGEVMVRVEDNGKLVIGQGADPDIITAAAKAYLMALNRLEFLKKQLQ

SEQ ID NO: 107848 - DNA, 1536 bp, Oceanobacter sp. RED65
  CDS (1)..(1536): transl_table=11
atgagcgaactaatcatctttgataccactatgcgtgatggcgagcaaagcccaggcgcttctatgactctggatgagaaggtacgtatcggtaaagccctggaaaagatgcgtgtagacgtcattgaagccggcttcgccgctgccagtatcggcgattttgaatccattgcggctgtggctaaagcggtcaaagaatcgactatctgttctcttgcgcgggccgttgataatgatattgatcgcgcagcagaagcgcttaagcaggctgaacgagctcgaatccatacgtttattgctaccagcccgattcatatggagcataagcttcgtatgtctccagaccaagtggtagagcgtgcagtctatgcagtgaaacgcgcccgcagtcatgtggcggatgtagagttttcatgtgaagatgctggtcgcagtgacatggatttcttgtgtcgtgtgattgaagccgctatcgatgcaggtgctagcaccatcaatattcctgataccgtgggttatgcgatccctgaagagtttggttataaaatcaaaaccttgttagagcgcattcccaatgctgataaagcgattttttctgtgcattgtcacaatgatcttggtttggctgtagctaattctctggccgccgtgagcaatggtgctcgtcaggttgagtgtaccattaatggtttaggtgagcgcgcgggcaacgcggctctagaagaaatcgtcatgggtgtgaaaacacgtcctgatttgtttgacgtgcaaaccaatattgatcctcaatttattgtgcctacgtcgcgcatggtctccaccattaccggtttcccggtacagcccaataaggccattgtgggcgcgaatgcgtttgcacacgaatcaggcattcaccaagatggtgtattaaagcatcgcgaaacctacgaaatcatgaaagcggaagatgtgggttggggcgccaaccgtatggtaatgggcaagcactcaggtcgtgcggctttccgttctcgattagaagagctgggtgtgacgtttgaatcagatcaagatctgaataaagcgttcgctcaattcaaagagttagctgataaaaagcatgaaattttcgatgaagatttgcaggcattggtaagcgccgctcgtaatatggacgataaatatcagttggtcactttggaagcgcatagccaaacaggtgaatcacctactgctaaattgaccattactgtggatggcaaagaggtgaagacatctgcgcaaggcagtggtcctgtggatgctacgtttaaagcgatcgaagaagtggttaaaagcaatactaccgttcagttgtacagtgtgaacgcgattaccagtggcacagacagtcaaggtgaagtgacggttcgtttagaaaaggccggtcgtatcgtgaatggtttgggcagtgatacggatattgtgattgcctcggctaaagcctatatcaatgcgctgaatttactggaaagcaaaaccgaacgtgcgcatccgcagtctgaaggcgtgtaa

SEQ ID NO: 107849 - protein, 511 aa, Oceanobacter sp. RED65
MSELIIFDTTMRDGEQSPGASMTLDEKVRIGKALEKMRVDVIEAGFAAASIGDFESIAAVAKAVKESTICSLARAVDNDIDRAAEALKQAERARIHTFIATSPIHMEHKLRMSPDQVVERAVYAVKRARSHVADVEFSCEDAGRSDMDFLCRVIEAAIDAGASTINIPDTVGYAIPEEFGYKIKTLLERIPNADKAIFSVHCHNDLGLAVANSLAAVSNGARQVECTINGLGERAGNAALEEIVMGVKTRPDLFDVQTNIDPQFIVPTSRMVSTITGFPVQPNKAIVGANAFAHESGIHQDGVLKHRETYEIMKAEDVGWGANRMVMGKHSGRAAFRSRLEELGVTFESDQDLNKAFAQFKELADKKHEIFDEDLQALVSAARNMDDKYQLVTLEAHSQTGESPTAKLTITVDGKEVKTSAQGSGPVDATFKAIEEVVKSNTTVQLYSVNAITSGTDSQGEVTVRLEKAGRIVNGLGSDTDIVIASAKAYINALNLLESKTERAHPQSEGV

SEQ ID NO: 107850 - DNA, 1623 bp, Synechococcus sp. RS9916; identical to SEQ ID NO: 13176
  CDS (1)..(1623): transl_table=11

SEQ ID NO: 107851 - protein, 540 aa, Synechococcus sp. RS9916; identical to SEQ ID NO: 13177

SEQ ID NO: 107852 - DNA, 1548 bp, Vibrio sp. Ex25
  CDS (1)..(1548): transl_table=11
atgaacgatcaggtcattatattcgacaccacattgcgtgatggcgagcaagcgttgtcagcaagcttgacggttaaagaaaaactgcaaattgcctatgcgctggaaagactcggcgttgatgttatcgaagctggcttcccaatctcttcacctggtgatttcgagtcggtacaaaccattgcaaaaaacatcaaaaacagtcgagtttgtgccctttcgcgtgccgttgcgaaagatattgatgccgccgctgaagcattaaaagtggccgaccaattccgtattcacacgtttttagccacttccaccattcacgtagaagacaaactacgccgcagctacgacgatgtacttgaaatggcggtcaacgccgttaaacatgcgcgtaactacaccgatgatgtcgagttttcttgtgaagatgcagggcgtactcctatcgacaacctatgtcgcatggtagaagctgccatcaatgcaggtgcgagcacaatcaacattccagataccgttggctacacagtaccaagcgagtttggtggcattattcaaacccttttcaaccgcgttccaaacattgataaagcgatcatctccgttcactgtcacgacgatttggggatgtcagttgccaactctattgccgccgttcaagctggcgcacgtcagatagaaggaacgattaatggcattggagagcgagcgggtaactgttcacttgaagagatcgcaatgatcatcaagacgcgtcaagagttcttgggcgttcacactggcattaagcatgatgaaattcaccgcaccagtaagttggttagccagctatgcaatatgccgattcaaagcaataaagcaattgtgggtgcaaatgcgtttagccactcttcaggcatccaccaagatggtatgttgaagaataagaatacctacgaaatcatgacccctgagtctattggcctaaaaaaccaagctctaaacctaaccagccgcagcggtcgcgctgccgtgaagagccatatggacacgatgggttacaacgaagacgagtacaacctagacgcactgtatgcggatttcttgaaacttgctgaccgcaaaggccaagtgttcgattacgatctagaggccctaatgcacttctcgaacctgcgtgaagaagatgacttctacaaactgaactacctaagcgtgcaatcgggcagcgtaatggccaccaccagcatcaaaatgcaatgtggcgatgaagaaatgtgtgaagcggcagtcggtaatggcccagttgatgcgctataccaatgtatctaccgcgtgacaggctacgacatcgtactggataaattcgacctaaccgcgaaaggcgaaggtgaagatggtttgggtcaagctgacatcattgccaactacaaaggtcgtaaataccacggtacaggcgtttccaccgatatcgttgaagcttccggccaagcactattgcacgttattaatagcatccaccgtgcagacaaaatcgaagaaatgaagcagaaaaagattgcgactgtgtaa

SEQ ID NO: 107853 - protein, 515 aa, Vibrio sp. Ex25
MNDQVIIFDTTLRDGEQALSASLTVKEKLQIAYALERLGVDVIEAGFPISSPGDFESVQTIAKNIKNSRVCALSRAVAKDIDAAAEALKVADQFRIHTFLATSTIHVEDKLRRSYDDVLEMAVNAVKHARNYTDDVEFSCEDAGRTPIDNLCRMVEAAINAGASTINIPDTVGYTVPSEFGGIIQTLFNRVPNIDKAIISVHCHDDLGMSVANSIAAVQAGARQIEGTINGIGERAGNCSLEEIAMIIKTRQEFLGVHTGIKHDEIHRTSKLVSQLCNMPIQSNKAIVGANAFSHSSGIHQDGMLKNKNTYEIMTPESIGLKNQALNLTSRSGRAAVKSHMDTMGYNEDEYNLDALYADFLKLADRKGQVFDYDLEALMHFSNLREEDDFYKLNYLSVQSGSVMATTSIKMQCGDEEMCEAAVGNGPVDALYQCIYRVTGYDIVLDKFDLTAKGEGEDGLGQADIIANYKGRKYHGTGVSTDIVEASGQALLHVINSIHRADKIEEMKQKKIATV

SEQ ID NO: 107854 - DNA, 1554 bp, Alteromonadales bacterium TW-7; identical to SEQ ID NO: 13178
  CDS (1)..(1554): transl_table=11

SEQ ID NO: 107855 - protein, 517 aa, Alteromonadales bacterium TW-7; identical to SEQ ID NO: 13179

SEQ ID NO: 107856 - DNA, 1548 bp, marine gamma proteobacterium HTCC2143
  CDS (1)..(1548): transl_table=11
atgagcacgaaagacaatctgattatttttgatacaacactgcgagatggcgagcagagccccggcgcttcaatgacacgggatgaaaaagtccgtatcgccaagatgttggaaaaaatgcatgttgatgttatcgaggctggttttgctattgccagcggtggcgatttcgatgcgattaaagccgtggccgaaacggttcaagatagcaccatctgtagtttgtcccgggcgatgcctgctgacataaagcgcacagcagaagcgataaagagtgctaattctggtcgaattcatacctttattgccacctcgccgatccacatgaaatataagttgatgatgagccctgagcaagtgctagagcaggcggtaggaatggttagtctggctcggaacctctgtggggacgttgagttctcgctggaagatggtagtcgatcagagtttgacttccagtgtcgaatgatcgaggcggtgattgacgcgggcgcaacgaccattaatatccccgataccgtgggctatggcaccccggaagaatacggtgctatgtttaagaacatcatggaaagggttccgaatgccgacaaagcgatattttcgacgcactgccacaatgatttgggcttggctgttgctaactcgctggcggctgttatgaatggcgtgcgacaggtggaatgcacgattaatggcttgggagagcgagccggcaatgcttctcttgaagaaattgtcatggcggtaaaaacgcgcgccgatgtgtttccagtaacaacgcgtattgaccccatacatattgttcccacttcgcgattagtgtcttcaattaccgggtttccggtacagccgaataaagccattgtcggtgccaacgcttttgctcatgagtcgggtattcatcaggacggcatcttaaaacatcgcgaaacctacgaaattatgaaagcagaagacgtcggatggaaatccaataagttagtgcttggaaaacattcggggcgggctgcagtgagagcgcgttttgaagagctgggagtcaccttcgagtctccagaggagcttggtcacgcctttgctcgctttaaagagttagcggataagaagcacgaaatctttgatgaggatctgcaggcactggttagccgggtaactgcaccgagtattgctgagaaatttcaattttcaaatttagaggcaacgtcgaaatccggcgttaaaccccacgcttcactaacgctcactattgccggtgttgaccatcagactgaatctgaaggtgatggtttggtggacgcggcctttaaggctattgaaaaaatcgctagtagccagaccgcgttgcagctgtatctcgttagcgcggtgacacagggaaccgattcgctgggtgatgtcacagtcagacttgaaaaagaaggcgaaatagttaacggcctcggctcagatacagatgttatcgtggcatcagttaaagcgtatctgaatgcgcttaatgtgctggacgctggtgtcataaaagcccatccccagagcggtgtctag

SEQ ID NO: 107857 - protein, 515 aa, marine gamma proteobacterium HTCC2143
MSTKDNLIIFDTTLRDGEQSPGASMTRDEKVRIAKMLEKMHVDVIEAGFAIASGGDFDAIKAVAETVQDSTICSLSRAMPADIKRTAEAIKSANSGRIHTFIATSPIHMKYKLMMSPEQVLEQAVGMVSLARNLCGDVEFSLEDGSRSEFDFQCRMIEAVIDAGATTINIPDTVGYGTPEEYGAMFKNIMERVPNADKAIFSTHCHNDLGLAVANSLAAVMNGVRQVECTINGLGERAGNASLEEIVMAVKTRADVFPVTTRIDPIHIVPTSRLVSSITGFPVQPNKAIVGANAFAHESGIHQDGILKHRETYEIMKAEDVGWKSNKLVLGKHSGRAAVRARFEELGVTFESPEELGHAFARFKELADKKHEIFDEDLQALVSRVTAPSIAEKFQFSNLEATSKSGVKPHASLTLTIAGVDHQTESEGDGLVDAAFKAIEKIASSQTALQLYLVSAVTQGTDSLGDVTVRLEKEGEIVNGLGSDTDVIVASVKAYLNALNVLDAGVIKAHPQSGV

SEQ ID NO: 107858 - DNA, 1662 bp, Candidatus Desulfococcus oleovorans Hxd3
  CDS (1)..(1662): transl_table=11
gtggggcaccatcggcgtgtcggaagacatcatcgaggccagctgggaggcccttgccgacagctgccagtacaaactttccaaggaactgaacaagaaaaagaaaaaacaggactagagatcgccatgacggaaaaactgatcatattcgacacgaccttgagagacggcgaacagtcgcccggcgccagcatgaacgtggcggaaaagctgcgcattgcctcccggctggaagagctgggggtggacgtgattgaggcggggtttccggccgcctccaagggggacatggaagcggtctcccaggtggcccagaagctgtcacgaagtgcggtggccggtcttgcccgcaccaacaaggatgatatcgacaaggcatgggccgcggtctccggtgccaggcacccccggattcacgtgtttatcgccagctcggacattcacatggagcacaagctgcgcatgcccagggacaccgttgtggagcacgccattgccggggtccgttatgccaggacctttaccgatgacgtggagttttccgccgaagacgcctcccgcagcgacagggtctttctgtgcaagctgtttgaagccgccatctccgccggcgccaccaccatcaatattcccgataccgttggatacgccattcccagcgagttcgccgacctggtcaaatacgtgaggcagcacacccccaatattcacaaggccgttatcagtgtccattgccacaacgatctggggctggccacggccaacaccctggcggccctggccgcgggcgcccggcaggccgaggtgaccatcaacggcatcggcgaaagggccggcaacacctccatggaggaggtagtgatggccatccgcacccgggccagctcttttccgctgatctccaccatcgacaccgccaagatctaccccaccagcaagctggtgagcatgctcaccggcatgatcgtccagcccaacaaggccatcgtgggggccaacgcctttgcccacgaggcgggcattcaccaggacggcatgctgaaaaaccccatgacctacgagatcatgcggcccgaagacgtaggcgtgagcagcagtactctggtgctgggcaagcactcgggcagaaaggccctgtacgaccgcctgaaagagatcggttacaacctttcccccccggagatcgacacggtttttgtcaaattcaaggaactggccgaccgaaagaaaaacatcgtggaagaggacctggaaatcctggtctctgaaaacatcatggacaccgccgacctgttccagctggaatacctgcacgtgaccagcggcaccacggtgtcgcccgtggccagcgtgaaaatggttatcaatggaaaatcggtgaagggcgaaagctcgggcaacggtcccattgacgcggcataccgggccattgccaagctcaccaaaaccgaatccgagatgctgcggtttaccatcagcgcccttaccggcggcaccgacgcccagggcgaggtgaccgtgcgcctgaaggagcagggcctggtggccctgggccggggcgcggacccggatatcatcattgccagcgtcaaggcctacatcaacggattaaaccgcctggcctatctcaagcgccatcctgtcgccgacggcatgatctga

SEQ ID NO: 107859 - protein, 553 aa, Candidatus Desulfococcus oleovorans Hxd3
MGHHRRVGRHHRGQLGGPCRQLPVQTFQGTEQEKEKTGLEIAMTEKLIIFDTTLRDGEQSPGASMNVAEKLRIASRLEELGVDVIEAGFPAASKGDMEAVSQVAQKLSRSAVAGLARTNKDDIDKAWAAVSGARHPRIHVFIASSDIHMEHKLRMPRDTVVEHAIAGVRYARTFTDDVEFSAEDASRSDRVFLCKLFEAAISAGATTINIPDTVGYAIPSEFADLVKYVRQHTPNIHKAVISVHCHNDLGLATANTLAALAAGARQAEVTINGIGERAGNTSMEEVVMAIRTRASSFPLISTIDTAKIYPTSKLVSMLTGMIVQPNKAIVGANAFAHEAGIHQDGMLKNPMTYEIMRPEDVGVSSSTLVLGKHSGRKALYDRLKEIGYNLSPPEIDTVFVKFKELADRKKNIVEEDLEILVSENIMDTADLFQLEYLHVTSGTTVSPVASVKMVINGKSVKGESSGNGPIDAAYRAIAKLTKTESEMLRFTISALTGGTDAQGEVTVRLKEQGLVALGRGADPDIIIASVKAYINGLNRLAYLKRHPVADGMI

SEQ ID NO: 107860 - DNA, 1629 bp, Candidatus Desulfococcus oleovorans Hxd3
  CDS (1)..(1629): transl_table=11
atggaacaggtacgcatatacgacacaaccctgcgggacggtatgcagggcgacaccatcaactttacggtggatgaaaagatccgcgtcgcccgtcaactggacgaccttggtgttcattacatcgagggcggatggccgggatccaatcccagggatgtccagttttttgaaaaggccgcgaagatcgacttcaaaaacgcccggctcaccgcctttggatccacccggcgggccggcctggccgtggaaaaagacgataacattcggctgctgctggaatgcggggcgcctgccgtggccctggtgggaaagacatgggatctgcatatcaccgaagtgatgagcaacacacttgaaagcaacctggagatgattcacgactcggtggcctacgtcaagtcccacggccgtgaggtgttctttgacgccgagcactttttcgacggctgtacccacaacagggagtacaccttcaaagcgattctgaccgcggcccaggcaggggccgacgccgtgatcctgtgcgacaccaacggcggcgccctgccccacgacgtggaggccatcaccgccgaggtatgcaccacactggcggaccggtttcccggtccggacggcggctccaccgtgcaagtcggcattcacactcataatgacagtaacctggccgtggccaacagcattgccgcaatacgggccggggcacgaatcgtccagggcaccatcaacggctatggggagcggtgcggcaacgccgacctcacctccattatcccgattcttgccgcaaaaatggaatatgactgcatcacaccggaaaatcttaaaaaactgcggaaggtgtcccggtttgtcagcgaaaccgccaacatgacaccggtcaacagccggccctttgtgggcaaaagcgccttctcccacaagggcggccttcatgtcagcgccatcatgaaaaacccccgggcctacgagcacatggacccggaactggtgggcaacaagcggcgggtcctgatatccgacctgtcgggccgaagcaacgtcacctacaaggccagggaactgggcatcaataccgacaccgaacattttgacgtggaccgcatcctgtccgaagtcaagatgctggagttagaaggattccagttcgacgcggcggacggctccttcaagatcgtgatggaaaagatttccggcctgtatacccccctttttgatctgctctccttccgggtgacagtggaaaaagagaaagaccggccctgcacggcccacgcgaccatacggctgggggtgggagagttggagaccaccaccgccgcagagggagacggcccggtgagcgccctggacacggccctgcgaatggccatcgccgagttctatcccgattctttgggcctggacgccatgcagctggtggacttcaaggtgcgggtcctggacggacgggacggcacatcggccaaggtccgggtgctgatcgactccagggacgaagacgaggtgtggggcaccatcggcgtgtcggaagacatcatcgaggccagctgggaggcccttgccgacagctgccagtacaaactttccaaggaactgaacaagaaaaagaaaaaacaggactag

SEQ ID NO: 107861 - protein, 542 aa, Candidatus Desulfococcus oleovorans Hxd3
MEQVRIYDTTLRDGMQGDTINFTVDEKIRVARQLDDLGVHYIEGGWPGSNPRDVQFFEKAAKIDFKNARLTAFGSTRRAGLAVEKDDNIRLLLECGAPAVALVGKTWDLHITEVMSNTLESNLEMIHDSVAYVKSHGREVFFDAEHFFDGCTHNREYTFKAILTAAQAGADAVILCDTNGGALPHDVEAITAEVCTTLADRFPGPDGGSTVQVGIHTHNDSNLAVANSIAAIRAGARIVQGTINGYGERCGNADLTSIIPILAAKMEYDCITPENLKKLRKVSRFVSETANMTPVNSRPFVGKSAFSHKGGLHVSAIMKNPRAYEHMDPELVGNKRRVLISDLSGRSNVTYKARELGINTDTEHFDVDRILSEVKMLELEGFQFDAADGSFKIVMEKISGLYTPLFDLLSFRVTVEKEKDRPCTAHATIRLGVGELETTTAAEGDGPVSALDTALRMAIAEFYPDSLGLDAMQLVDFKVRVLDGRDGTSAKVRVLIDSRDEDEVWGTIGVSEDIIEASWEALADSCQYKLSKELNKKKKKQD

SEQ ID NO: 107862 - DNA, 1674 bp, Pseudomonas putida GB-1
  CDS (1)..(1674): transl_table=11
atgaccatgctcaaagacccttcgaagaagtaccgcgctttcccgaccatcgacctgcctgaccgcacctggccgtcgaagaccatcaccgaagcacctatctggtgcagctccgacctgcgtgatggcaaccagtcgctgatcgagccgatggattcggagaagaaactgcgcttctggaagaccttggtgcaggtgggcgtgaaggaaatcgaagcctcgttcccgtctgcctcgcagaccgatttcgacttcgtgcgcaccctgattcaggacggccacatcccggacgacaccaccatccaggtgctcacccaagcccgtgaagacctgatcgcccgcaccttcgagtcgctgcgcggtgccaagaaagccatcgtccacctgtacaacgccaccagcccgtcgttccgccgcatcgtcttcaatcaggacaaacaaggcgtgaaggacatcgcggtgaacgcggccaagctgttcgtcaaatacgctgcccagcagccagaaacccactggaccttccagtactcgccagaaaccttcagcgccaccgaaatggaattcgccaaggaagtctgcgacgcggtcatcgaggtgtggaacccaacacctgaacacaagatcatcctcaacctgccggccaccgtggaagtgtccacgccaaacatctacgccgaccagatcgagtggttctgccgcaacgtcagccgccgcgacagcgtgatcatcagcctgcactgccacaacgaccgtggcaccggcatcgcagccaccgagctgggcctgatggccggtgccgaccgcgccgaaggctgcctgttcggcaacggcgagcgtaccggtaacgtcgacctggtgaccttggcactgaacctctacacccagggcatcgacccgcagctggacttctccgacatcgacggcgtgcgcaaggtggtcgaagagtgcaaccagctgccagtgcaccctcgccacccgtatgttggcgacctggtccacaccgcgttctccggctcgcaccaggatgccatccgcaagggcttcgccaagcagcaggaaggcgaacggtgggaagtgccgtacctgccgatcgacccggccgacatcggccgcagctacgaggcggtgatccgcgtcaacagccagtcgggcaaaggcggcatcacctacctgctcgaacaggaatatggcatcagcctgccgcgccgcatgcaaatcgagttcagccaagtggtgcaaggtgaaaccgaccgccttggcctggaaatgaccgcccagcaaatctacagcctgctgcacaaggaatacctccaggccaacgcgccatacgcattggtcagccatcgcctgcaggaagaaaacggccacagcgccgtggaagtggaagtggccggtgaaggcgaaaccaccctgcactggcgcggcaagggcaatggcgccctggaagcactggtggctggcttgccgattgccgtggagatcatggactacaacgagcacgccattggtgcgggcaccaatgccaaggcagcggcctacattgaactgcgcgtggccggtggccgcccggtacatggcgtaggcatcgatgaaaacatcaccaccgccagcttcaaggcactgttcagcgcgctgaaccgctcgctgagccagcaggaggccaaggcggcctga

SEQ ID NO: 107863 - protein, 557 aa, Pseudomonas putida GB-1
MTMLKDPSKKYRAFPTIDLPDRTWPSKTITEAPIWCSSDLRDGNQSLIEPMDSEKKLRFWKTLVQVGVKEIEASFPSASQTDFDFVRTLIQDGHIPDDTTIQVLTQAREDLIARTFESLRGAKKAIVHLYNATSPSFRRIVFNQDKQGVKDIAVNAAKLFVKYAAQQPETHWTFQYSPETFSATEMEFAKEVCDAVIEVWNPTPEHKIILNLPATVEVSTPNIYADQIEWFCRNVSRRDSVIISLHCHNDRGTGIAATELGLMAGADRAEGCLFGNGERTGNVDLVTLALNLYTQGIDPQLDFSDIDGVRKVVEECNQLPVHPRHPYVGDLVHTAFSGSHQDAIRKGFAKQQEGERWEVPYLPIDPADIGRSYEAVIRVNSQSGKGGITYLLEQEYGISLPRRMQIEFSQVVQGETDRLGLEMTAQQIYSLLHKEYLQANAPYALVSHRLQEENGHSAVEVEVAGEGETTLHWRGKGNGALEALVAGLPIAVEIMDYNEHAIGAGTNAKAAAYIELRVAGGRPVHGVGIDENITTASFKALFSALNRSLSQQEAKAA

SEQ ID NO: 107864 - DNA, 1551 bp, Marinobacter sp. ELB17
  CDS (1)..(1551): transl_table=11
atgtctgccaatgatcacctcgtcatatttgacaccactctgcgcgatggcgagcaaagccctggcgctaccatgaacaaggccgaaaagctgcgcattgccaaagcgctggaaaaattgcgtgttgacgtcattgaagccggctttgccatagccagtcagggcgatttcgaggcgatcaaagggatcgcagaaaccatcaaagactccacaatatgcagtctggctcgcgccattgatggtgacattgatcgggctgccgaggctgtgcgcccggcaaatcgcagtcgcattcacacctttatagcaacgtcccctatccatatgaagcacaagctgaatatggcgcctgacgaggtggtagagcaggccgtgcgcgcggttaaacgcgcgcgtaatcacgttgccgatgtagaattttcctgcgaagacgcgggtcgttccgagttggattttctgtgccgcattattgaggcggcgattgacgccggtgctacaaccatcaatattccggacaccgtgggttacgctataccccatcagttcggcaacaccatggctcagttgctgaaccgcattcccaacgccgacaaggctattttctcggttcattgccacaacgacttggggcttgccgttgccaactctttggcggctgtgtcccagggcgcacgccaggttgaatgcactattaatggtttgggcgagcgcgctggtaacgcttccctggaagagattgttatggcagtgcgtacccgtcaggactacttcaatcttgatacccgcatagacgccacttacatcgttccggcctcccgtttggtatcgaccattaccggtttcccggtacagcctaacaaagcgattgtaggcgccaacgcctttgcccacgagtccggtattcaccaggacggcgtactcaagcatcgcgaaacctatgaaatcatgagggctgaagacgttggctggcacaccaacagcctggtgatgggtaagcattccggccgcaatgcattccgcacgcggttgctagagctgggcatccagtttggtaccgaaaccgagttgaatgaggcttttgcccgcttcaaagcgcttgcggatctgaagcacgagatttttgacgaagacttgcaggctattgccagcaacacccgtcaaaaagatcagttagggcgcttcggattggtgtgcatgaaagtgtgctcggaaaccggtgttattccgaaagccgatctgacgatcaccatggatgacaaagagcaccgtgtgcaggcggaaggcagtggcccggtagatgcgacattcaaagccattgagtcgttggtggattccggttgcaagcttcagctttactcggtgaacaacatcaccagtggtactgattcacaaggtgaggttacggttcgccttgagcgcggtggtcgcattgttaatggcgtaggggcagacactgacatcattattgcgtcggctaaagcttacatagctgcgttgaatttgatcagtgcgggcggcatacggcaccatccgcaagaagctgatgtatag

SEQ ID NO: 107865 - protein, 516 aa, Marinobacter sp. ELB17
MSANDHLVIFDTTLRDGEQSPGATMNKAEKLRIAKALEKLRVDVIEAGFAIASQGDFEAIKGIAETIKDSTICSLARAIDGDIDRAAEAVRPANRSRIHTFIATSPIHMKHKLNMAPDEVVEQAVRAVKRARNHVADVEFSCEDAGRSELDFLCRIIEAAIDAGATTINIPDTVGYAIPHQFGNTMAQLLNRIPNADKAIFSVHCHNDLGLAVANSLAAVSQGARQVECTINGLGERAGNASLEEIVMAVRTRQDYFNLDTRIDATYIVPASRLVSTITGFPVQPNKAIVGANAFAHESGIHQDGVLKHRETYEIMRAEDVGWHTNSLVMGKHSGRNAFRTRLLELGIQFGTETELNEAFARFKALADLKHEIFDEDLQAIASNTRQKDQLGRFGLVCMKVCSETGVIPKADLTITMDDKEHRVQAEGSGPVDATFKAIESLVDSGCKLQLYSVNNITSGTDSQGEVTVRLERGGRIVNGVGADTDIIIASAKAYIAALNLISAGGIRHHPQEADV

SEQ ID NO: 107866 - DNA, 1692 bp, Erythrobacter sp. SD-21
  CDS (1)..(1692): transl_table=11
atgaccatgctcagcgacccgagcgccaaatattcgcccttcccgcaggtcccgctgatcgaccggcaatggcccacgcgcaccatcaccgccccgccccgctggctcagcaccgatctgcgcgacggcaaccaggcgatcgtcgacccgatggacgcgcacaagaagaaccgcttcttcgacctgctagtggaagtcggcgtgaaggaaatcgaggtcggcttccccagcgcaggcgcgaccgagttcgatttcatctccggcctcgtgaaatcgggccgcatacccgatgacgttatcgtgcaggtcctgacgcaaggccgcgaggacctcattcgcaccagcttcgccagcctcaccggcgcgcgcgcggccatcgtccatctctacaacgccgtcagccccgcctggcgcgaggtcgtcttcagaatgacgaaggaccaggtgcgcgacattgcggtgcacggcgccaaggtcatgcgcgacgaagcgggcaagcagcccggcaccgactggcatttccagtacagccccgaaaccttctcgaccgccgagctcgatttcagcctcgaagtttgcgaggccgtgatggaagtcctcgcccccacgcccgagcacccgatcatccttaacctgcccgccacggtggaggcggcgacgcccaatatctacgccgaccaggtcgaatatttcatccgcaacctgccgaaccgcgagagcgctgtaatctcgctgcacacccacaacgatcgcggcaccggcgtcgcggcggcggaactcgccctgatggcgggcgcggaccgcgtggaaggctgcctgttcggcaatggcgagcgcacgggcaattgctgcctggtgaccatggcgctcaatatgtacacgcagggcgtcgaccccaagctcgacttctccgacatcgaccgcgtcatcgagacggtcgaatattgcaacgaattgcctgtccaccagcgccatccctacggcggcgaactggtctacacggcattctccggcagccaccaggacgcgatcaagaagggctttgccgccaacgagctgcagaacgatccgcactggcgcgtcccctacctgcccatcgaccccgccgatctcggacgcagctacgaggcggtcatccgcgtcaactcgcaatccggcaaaggcggctttgcgtgggtgctcgaacaggaccagggcctcaagctgcccaagaagatgcaggccgatttcagcccgcacgtccagcgcatggccgacgaactgggccgcgaactgggcgcgcccgacatctgggaggcgttcaaagccgcctaccacgtccagatcgagaagaagcacttccagctggtcgattacgaagaacgccgcgcgaccgacggcacgcgcctcttcagcggcaccatcgcggtgcagggtcaggaacagagcgtctcgggtcgcggcaacggcctgatctccagcgtcctttccactatcgaggaaagcttcggccttgcgctggaagtcgtcgattacaccgaacacgcgctgaccgcgggccgcgattcccgcgcggccgcctatctcgaatgccgcacgccggaggggcgcaccatctggggcgtcgggatcgacgaagacgtcgccaccgccagcgtccgcgccgtcctcagcgcggcgaattcggcagtggcgacaaacgctgcagtctag

SEQ ID NO: 107867 - protein, 563 aa, Erythrobacter sp. SD-21
MTMLSDPSAKYSPFPQVPLIDRQWPTRTITAPPRWLSTDLRDGNQAIVDPMDAHKKNRFFDLLVEVGVKEIEVGFPSAGATEFDFISGLVKSGRIPDDVIVQVLTQGREDLIRTSFASLTGARAAIVHLYNAVSPAWREVVFRMTKDQVRDIAVHGAKVMRDEAGKQPGTDWHFQYSPETFSTAELDFSLEVCEAVMEVLAPTPEHPIILNLPATVEAATPNIYADQVEYFIRNLPNRESAVISLHTHNDRGTGVAAAELALMAGADRVEGCLFGNGERTGNCCLVTMALNMYTQGVDPKLDFSDIDRVIETVEYCNELPVHQRHPYGGELVYTAFSGSHQDAIKKGFAANELQNDPHWRVPYLPIDPADLGRSYEAVIRVNSQSGKGGFAWVLEQDQGLKLPKKMQADFSPHVQRMADELGRELGAPDIWEAFKAAYHVQIEKKHFQLVDYEERRATDGTRLFSGTIAVQGQEQSVSGRGNGLISSVLSTIEESFGLALEVVDYTEHALTAGRDSRAAAYLECRTPEGRTIWGVGIDEDVATASVRAVLSAANSAVATNAAV

SEQ ID NO: 107868 - DNA, 1566 bp, Moritella sp. PE36; identical to SEQ ID NO: 13180
  CDS (1)..(1566): transl_table=11

SEQ ID NO: 107869 - protein, 521 aa, Moritella sp. PE36; identical to SEQ ID NO: 13181

SEQ ID NO: 107870 - DNA, 1539 bp, Moritella sp. PE36
  CDS (1)..(1539): transl_table=11
atggaaatcatgcgccctcaagtccaattaatggacacaactcttcgtgatggagagcaaacccaaggggtctccttcacccccgacgaaaaagttagtattgccaaagccctactccaatcccttaatgttgaccgaattgaagttgcatctgcacgcgtttctcttggcgaaaaacaggccgtatcctcattaatgcagtgggcagaacaagaacaagttgcagaccgaatcgagatactgggttttgtcgatcataccaaaagcgttgactggataacatccagcggtgccaaagtgataaacttactcaccaaaggcagtgaaaaacactgtaccgaacagctcagaaaaaccccttctcaacatattgccgatgtcagggaaacgatttattacgcaatagaacaaggattatcggtaaatatttaccttgaagattggtctaacggttacagtgataaccctgaatacgtttataacatggtcagtgagctatcggatttacctatccaacattacatgctgcctgatacgcttgggattatgtctccagacgaggttcacactagcctatctgacatgatcaggcgtttcccccagctgaaatttgattttcatccacacaatgattatggcttggcaacagcgaatgcgcttaccgctgccaaagtcggcattagcgctatccattgcacagtaaactgcttaggtgaacgcgctggtaatgcgtctctggccgaagttgcggtggtattgaaagataaactcggtatcgaatcatcaatcaatgaacaacgcattcatcagattagccaaatgattgaaaacttctcaggtaagatcacatcggcaaacgcgccaatcatcggtgctgacgtgtttacacaaaccagtggtattcatgctgatggcgataacaaaggcggattatatcaaacggtattaggccctgaacgatttgaacgtacacgtacctacgcactcggtaaaatgagtggcaaagcatcgcttgagaagaatttagaagatttaaacattgatttgagtgcggaacaaaaaaccaagttactccaacgaattgtgacactcggcgatcaaaaatccactatcacaccagaggatttgccctttattattgcagacctcttggaaagcaaagattactcgcacattgaactgctcgactgttcgataacatcagggttaaatgttgactcaacggcaagtatccgtgctcgcattggtgatgaaatgtataaatctgctggctcaggtaatggcggatttgatgccttcagtatggcgatacaagcgattatgcaaaaggttggctttgactaccctagcttagaaaactaccaagtgcgtattccaccaggtggtaaaaccagtgcattaacagaaagctttatcacttggcagcaagataataaaaccttccgcacccgtggcgttagctctaaccaagtatttgcaggtgtgcaagccacaatgagaatgttaaataaattgctacatgaaaaaataacagcataa

SEQ ID NO: 107871 - protein, 512 aa, Moritella sp. PE36
MEIMRPQVQLMDTTLRDGEQTQGVSFTPDEKVSIAKALLQSLNVDRIEVASARVSLGEKQAVSSLMQWAEQEQVADRIEILGFVDHTKSVDWITSSGAKVINLLTKGSEKHCTEQLRKTPSQHIADVRETIYYAIEQGLSVNIYLEDWSNGYSDNPEYVYNMVSELSDLPIQHYMLPDTLGIMSPDEVHTSLSDMIRRFPQLKFDFHPHNDYGLATANALTAAKVGISAIHCTVNCLGERAGNASLAEVAVVLKDKLGIESSINEQRIHQISQMIENFSGKITSANAPIIGADVFTQTSGIHADGDNKGGLYQTVLGPERFERTRTYALGKMSGKASLEKNLEDLNIDLSAEQKTKLLQRIVTLGDQKSTITPEDLPFIIADLLESKDYSHIELLDCSITSGLNVDSTASIRARIGDEMYKSAGSGNGGFDAFSMAIQAIMQKVGFDYPSLENYQVRIPPGGKTSALTESFITWQQDNKTFRTRGVSSNQVFAGVQATMRMLNKLLHEKITA

SEQ ID NO: 107872 - DNA, 1545 bp, Magnetospirillum gryphiswaldense
  CDS (1)..(1545): transl_table=11
atggacaacaaccgcgtcattattttcgacaccacgctgcgcgacggcgaacaatcccccggcgcctcgatgaatctcgaggaaaaggtgaagatcgccctggcgctggaggaaatgggcgtcgacgtcatcgaggccggcttccccatcgccagcaatggcgacttcgaggcggtgcaggcggtggcccgcgcggtaaaaaactccaccatctgcggcttggcccgcgccgcccgtggcgatatcgaacgctgcgccgaggcggtgaagctggcgcccttgcaccgtatccacaccttcatttccaccagcccgctgcacatgaagttcaagttgcagatggaacccgagcgcgtgctggaaaagatcaaggaatcggtggctttcgcccgcaatctggtggacgacgtcgaatggtcggcggaagacggctcgcgcaccgaacacgacttcctgtgccgttcggtcgaggccgccattgatgccggcgcgcgcaccatcaacatccccgacaccgtcggctatgcggtgccggatgaatacgctgccctgatcaagatgctggtcaaccgcgtccccaacatcgacaaggccatcttgtcggtgcattgccacaacgatctcgggctggcggtggccaattcgctggcgacgctgagcgcaggcgcccggcaggtggaatgcaccatcaacggcctgggcgaacgcgccggcaacgccgccatggaagaaatcgtcatggcgttgcgcacccgccacgacctgatgccctataccaccggcatcaagaccgagaacatcacccgcgtctcgcggctggtctcggccatctccggcttcgtcgtccagcccaacaaggccatcgtcggcaagaacgcttttgcccacgaatccggcatccatcaggacggcatgctgaaatgtgcccagacctacgagatcatgacgccggaatctgtggggctcaaccgctccagtctggtcatgggcaagcattccggtcgtgccgcctttaaagacaagctcaaacaattgggctatgatcttggtgacaacgccatcgaggacgccttcgcccgtttcaaggacgtggccgaccgcaagaaggaagtgttcgacgaagacatcgtcgccctggtcgatgaagcggtgttccgcgacaacgaacgcatccgcttcaaggggctggaggtgctgtgcggcacccgccacaacccgcccaaggcggaactggaactggaaatcgacggcgaactgaaatcggtgaaggccaccggcgacggcccggtcgacgccacctttaacgccatcaaggccttgtgcccgcatgaggcgcgcctgctgctctatcaggtgcacgcggtgacgcaaggaaccgacgcccaagcggaagtgaccgtgcggttggaagaggacggcaaaaccgtcaacggccagggcgcggataccgacaccatggtggcttcggcccgagcctacgtgaaggctttgaacaaacttttgacgaaacggcaaaaaagcgctcccgccgccgtcacgccctga

SEQ ID NO: 107873 - protein, 514 aa, Magnetospirillum gryphiswaldense
MDNNRVIIFDTTLRDGEQSPGASMNLEEKVKIALALEEMGVDVIEAGFPIASNGDFEAVQAVARAVKNSTICGLARAARGDIERCAEAVKLAPLHRIHTFISTSPLHMKFKLQMEPERVLEKIKESVAFARNLVDDVEWSAEDGSRTEHDFLCRSVEAAIDAGARTINIPDTVGYAVPDEYAALIKMLVNRVPNIDKAILSVHCHNDLGLAVANSLATLSAGARQVECTINGLGERAGNAAMEEIVMALRTRHDLMPYTTGIKTENITRVSRLVSAISGFVVQPNKAIVGKNAFAHESGIHQDGMLKCAQTYEIMTPESVGLNRSSLVMGKHSGRAAFKDKLKQLGYDLGDNAIEDAFARFKDVADRKKEVFDEDIVALVDEAVFRDNERIRFKGLEVLCGTRHNPPKAELELEIDGELKSVKATGDGPVDATFNAIKALCPHEARLLLYQVHAVTQGTDAQAEVTVRLEEDGKTVNGQGADTDTMVASARAYVKALNKLLTKRQKSAPAAVTP

SEQ ID NO: 107874 - DNA, 1761 bp, Ostreococcus tauri; identical to SEQ ID NO: 13188
  CDS (1)..(1761)

SEQ ID NO: 107875 - protein, 586 aa, Ostreococcus tauri; identical to SEQ ID NO: 13189

SEQ ID NO: 107876 - DNA, 1509 bp, Arabidopsis lyrata subsp
  CDS (1)..(1509)
atggcttcgtttcttctcacatcttccagtatgataaccaccacatgtccctccatggttctccggtcaggcttatccattggatcttcccttccctctcttcgcctgacccgtccatacaacaagccgactttgttcaccgcatgttactcttctgagtccaaaaaggtggcaagtagtgctgatctcaaacctgccgtggaacggagaccagagtacataccgaacaagcttcctcacaagaactatgttcgtgtattagacacgacgctccgtgatggtgaacaatctcccggtgcagcacttatcccaccgcagaagctagagattgcccgacagcttgctaaactccgagttgacatcatggaagttggttttccggtatcgtctgaggaagagttcgaagccattaaaaccatcgccaagaccgtggggaacgaggtggatgaggaaacaggttacgtccctgtgatatgcggcattgcccgatgcaaaaatagagacattgaggcggcttgggaggcactgaagtatgcgaagaggccgagggtactactattcacatctactagtgacattcacatgaaatataagttgaaaaagactaaagaagaagtgatcgagatggccgtgaacagtattaagtacgctaaaagcttgggattcacagacatcgaatgtgggtgcgaagatggcggcaggacggagaaggattttctatgtaagattctcggagaaatgattaaagcgggtgcaaccacggtgggctttgcggacacggtcgggatcaacatgccgccagaattcggagaactcgtggcctatgtcaaagaaaacactcctggagctgatgatattgtcctcgccattcattgccacaacgaccttggtgttgctaccgccaacacaatatccggtatatgtgcgggagcaagacaagtagaagtaacgatcaacggaattggtgaaagaagtgggaatgcgccgcttgaagaggtcgtgatggctttgaaatgtcgaggagaatatcttatgaatggtgtttacacaaatatagacacacgccaaattatggctacaagcaagatggttcaagagcataccggcatgtatgttcaaccacataagccaatagttggagacaactgttttgttcatgagagcggcattcaccaggatggaatattgaaaaatcgaagtacatatgagattttgtcaccagaagatgttgggatcgtaaaatctgaaaattctggcattgttcttggaaagcttagtggacgtcatgctgtaagagaccggcttaaagagttgggatatgacatcagtgatgagaaattcaacgacatcttctcacgatacagagaattaaccaaggagaaaaagagaatcacggacgctgatctgaaagcattagtggtgaacggtgatgaaatctcatcagataaattaaacagtaaaggaattaacaaccttatgtcaagccctcagatttcctctgttgtataa

SEQ ID NO: 107877 - protein, 502 aa, Arabidopsis lyrata subsp
MASFLLTSSSMITTTCPSMVLRSGLSIGSSLPSLRLTRPYNKPTLFTACYSSESKKVASSADLKPAVERRPEYIPNKLPHKNYVRVLDTTLRDGEQSPGAALIPPQKLEIARQLAKLRVDIMEVGFPVSSEEEFEAIKTIAKTVGNEVDEETGYVPVICGIARCKNRDIEAAWEALKYAKRPRVLLFTSTSDIHMKYKLKKTKEEVIEMAVNSIKYAKSLGFTDIECGCEDGGRTEKDFLCKILGEMIKAGATTVGFADTVGINMPPEFGELVAYVKENTPGADDIVLAIHCHNDLGVATANTISGICAGARQVEVTINGIGERSGNAPLEEVVMALKCRGEYLMNGVYTNIDTRQIMATSKMVQEHTGMYVQPHKPIVGDNCFVHESGIHQDGILKNRSTYEILSPEDVGIVKSENSGIVLGKLSGRHAVRDRLKELGYDISDEKFNDIFSRYRELTKEKKRITDADLKALVVNGDEISSDKLNSKGINNLMSSPQISSVV

SEQ ID NO: 107878 - DNA, 1524 bp, Arabidopsis lyrata subsp; identical to SEQ ID NO: 13190
  CDS (1)..(1524)

SEQ ID NO: 107879 - protein, 507 aa, Arabidopsis lyrata subsp; identical to SEQ ID NO: 13191

SEQ ID NO: 107880 - DNA, 1512 bp, Boechera divaricarpa; identical to SEQ ID NO: 13194
  CDS (1)..(1512)

SEQ ID NO: 107881 - protein, 503 aa, Boechera divaricarpa; identical to SEQ ID NO: 13195

SEQ ID NO: 107882 - DNA, 1515 bp, Boechera divaricarpa; identical to SEQ ID NO: 13196
  CDS (1)..(1515)

SEQ ID NO: 107883 - protein, 504 aa, Boechera divaricarpa; identical to SEQ ID NO: 13197

SEQ ID NO: 107884 - DNA, 1509 bp, Arabidopsis cebennensis; identical to SEQ ID NO: 13198
  CDS (1)..(1509)

SEQ ID NO: 107885 - protein, 502 aa, Arabidopsis cebennensis; identical to SEQ ID NO: 13199

SEQ ID NO: 107886 - DNA, 1524 bp, Arabidopsis cebennensis; identical to SEQ ID NO: 13200
  CDS (1)..(1524)

SEQ ID NO: 107887 - protein, 507 aa, Arabidopsis cebennensis; identical to SEQ ID NO: 13201

SEQ ID NO: 107888 - DNA, 1524 bp, Arabidopsis lyrata subsp; identical to SEQ ID NO: 13202
  CDS (1)..(1524)

SEQ ID NO: 107889 - protein, 507 aa, Arabidopsis lyrata subsp; identical to SEQ ID NO: 13203

SEQ ID NO: 107890 - DNA, 1548 bp, Buchnera aphidicola
  CDS (1)..(1548): transl_table=11
atgaatcaaaaagttattatttttgacactactttacgagatggtgaacaagcacttcaagctagtctaagcattaataaaaaaatacaaattgcacagtcattagagcgaatgggaattgatattatagaagtaggatttcctatttcttctcctggtgattataaagcagttcaaatgatttctcaaaaaattaaaaatagtaaaatttgtagtttagcgcgttgtttaaaagaagatattgagattgccgcaaaagcaatgaaaaatgcaatttctccacgtattcatttatttttaggaacttctacattacatatacaatctaaattaaaaaaaaatttttcagaaattgtagatatgatgttaatgtctattaagtgggcgaaacgttatacagatgatgtagaattttcttgcgaggacgcaggaagaacttctttagatgatttgtgttatattgtagagaaagctattcacgctggagctaaaacgattaatattccagatactgtgggttacactattcctacacaatttaaaaacattattcaaactttatttttaaaagttcctaatattcataaagctattatttcagttcattgtcataacgatttaggtatggctactggaaattcaattagcgccattgaagctggtgacgtcaaaatcgaagggactattaatggattaggagagagagctggaaatacagcattagaagaaattattatggctttaaaaatccatgaaaaaactttaaatgtttatacaaatattaaatatcaagaaatatcacgcacgagtaaaatcgttagtcatttatgtaatactccaatagcattgaataaatctattgtaggaaaaaatgcattttctcattcttctgggattcatcaagatggtgttttaaaaaatcgagaaaattatgagattttagatcctaatagtataggtttaaaaagttgccctttaaatttaacatcacgttctggtcgagctgcaataaaacatcgaatgaaagaattaggatatttagagactgactataatttagatatattgtatattgattttttaaaattagctgataaaaaaggacaaatttttgattatgatttagaggctttagcatttattaatcaacaacaagtaaaaacagaattttttaaattagaatattttcatgttgaatctaaattatcaggtttagcaaccgcttcaattattttattatgtggaaaaaaaataaatattcaaaaatctacaacttacaatggtcctgtagatgcaatatatcaagctttaaataaagctgctttatatcctattgtattaaaaaaatttcatttagaagctaatggagaaggaaaagatgcattaggaaaagtagatattgttgtaaaatataaatgtcgtaattttcatggaataggattagcaacagatataatagaagcttctgctcaagctttaattaatgtatttaatggcatttggaaatctcaacaagtagataaaaaattagaaaaattatgtaaataa

SEQ ID NO: 107891 - protein, 515 aa, Buchnera aphidicola
MNQKVIIFDTTLRDGEQALQASLSINKKIQIAQSLERMGIDIIEVGFPISSPGDYKAVQMISQKIKNSKICSLARCLKEDIEIAAKAMKNAISPRIHLFLGTSTLHIQSKLKKNFSEIVDMMLMSIKWAKRYTDDVEFSCEDAGRTSLDDLCYIVEKAIHAGAKTINIPDTVGYTIPTQFKNIIQTLFLKVPNIHKAIISVHCHNDLGMATGNSISAIEAGDVKIEGTINGLGERAGNTALEEIIMALKIHEKTLNVYTNIKYQEISRTSKIVSHLCNTPIALNKSIVGKNAFSHSSGIHQDGVLKNRENYEILDPNSIGLKSCPLNLTSRSGRAAIKHRMKELGYLETDYNLDILYIDFLKLADKKGQIFDYDLEALAFINQQQVKTEFFKLEYFHVESKLSGLATASIILLCGKKINIQKSTTYNGPVDAIYQALNKAALYPIVLKKFHLEANGEGKDALGKVDIVVKYKCRNFHGIGLATDIIEASAQALINVFNGIWKSQQVDKKLEKLCK

SEQ ID NO: 107892 - DNA, 1935 bp, Aspergillus oryzae
  CDS (1)..(1935)
atgccgatgctcaaagatccctcaaaaaagtacaagcggtttaagccgctgcatctccccgatcgccaatggcccaacaaggtcatcgaaaaggctccccggtggctggccaccgatctaagagatggcaatcagagcttgcctgatccaatggatggtgaacaaaaattccgcttctttaaaatgctcgtcgatatcggctacaaggagatcgaagtttcattcccatctgcctcacaaacagacttcgacttcaccaggcgtctggtggagactcctggcgtcgttccagatgatgtatggctccaggttctgtccccttgtcgtgaggacctcatccgccgcacggtggactctctaaagggtgcgaagaaggctatcctgcacatttacctagctacaagcccatgcttccgtcgaattgtcttcaacatggacaagcagaagagtttggaaatggctgtccgctgcaccaagttcgcacgttcgatcactaaggatgacccctcgaccgccggtaccgagtggcacttcgagttctcccccgaaaccttctctgacacggagcccgagttcgctgctcaggtttgccaggccgtcaaggaggcttggggtcctacagaggaggctcccattatctttaacctgcccgcgacagtagaaatgtcgacccccaacgtttttgcggaccagattgagtacttctgccgtcatgtgtcggagcgagagaagtacgtcgtctccattcacccgcataacgaccgtggctgtgccattgcggccgctgagctggctcagatggccggcgcgcagcgtgtggaaggcactctgttcggaaacggtgaaagaacgggtaacgttgacctggtcactctggctctcaacctctacacacagggtatcacccccaatgttgacttctccgatatcaacgctgtcatcaaggttgttgaagaaagcaataaaatccctgtcaacgaacggtggccctacggcggtcagctggttgtttgcgcttttagtggaagtcaccaagatgctatcaagaaaggcttcaagcttcgtgatgatgccacggcagcgtcagatgaggaagttcaatgggaaattccttacctccccttggatcctcaagatattggcagaacttatgaggctgttattcgtgtcaactcccagagtggcaagggtggtgctgcttgggtcatcttgcgcagcttggagctggatctcccacgcgccttgcaggtcgagttcagcaagatcgttcaaaagaagtcggaagaggtcagccgggagctgcgggcaagcgagattgtcggccttttcgaagaggcataccacctcaagtccaacccccgcttcaacctggtcgactacaatatcaccacggaccgctcaacatccccggcaccccccgagcctggcaaagcgctgaacaccaagaacctgaaacggcgcttcactggtgtcatcgagatcgatggtgttcagcacgctattactggtgttggtcctggtgctatctcctctttggctggcgccttgtccaccctcggcatcgatctcgacgttgtcgactacaaggaacactccattggtttgggtagggaggtgaaggccgcaacgtacatccagtgcactgcggccggtagcaaggagcaggtctggggtgttggtatccaccaggacgttgtccaggccagtttgatcgctttgctcagtgctgctagctcgttcctgactagtcgtgccggttctcctgctcccttccgccctatccgctccaacaccctcacagatgaggatctgcaagccctagagaccctcaccggctccagcgatcttgccaccaacctggctaaggctgctaacggcagttctaagtcccaggtcgatattgatgccctgacgagacaagccgagagccagtaa

SEQ ID NO: 107893 - protein, 644 aa, Aspergillus oryzae
MPMLKDPSKKYKRFKPLHLPDRQWPNKVIEKAPRWLATDLRDGNQSLPDPMDGEQKFRFFKMLVDIGYKEIEVSFPSASQTDFDFTRRLVETPGVVPDDVWLQVLSPCREDLIRRTVDSLKGAKKAILHIYLATSPCFRRIVFNMDKQKSLEMAVRCTKFARSITKDDPSTAGTEWHFEFSPETFSDTEPEFAAQVCQAVKEAWGPTEEAPIIFNLPATVEMSTPNVFADQIEYFCRHVSEREKYVVSIHPHNDRGCAIAAAELAQMAGAQRVEGTLFGNGERTGNVDLVTLALNLYTQGITPNVDFSDINAVIKVVEESNKIPVNERWPYGGQLVVCAFSGSHQDAIKKGFKLRDDATAASDEEVQWEIPYLPLDPQDIGRTYEAVIRVNSQSGKGGAAWVILRSLELDLPRALQVEFSKIVQKKSEEVSRELRASEIVGLFEEAYHLKSNPRFNLVDYNITTDRSTSPAPPEPGKALNTKNLKRRFTGVIEIDGVQHAITGVGPGAISSLAGALSTLGIDLDVVDYKEHSIGLGREVKAATYIQCTAAGSKEQVWGVGIHQDVVQASLIALLSAASSFLTSRAGSPAPFRPIRSNTLTDEDLQALETLTGSSDLATNLAKAANGSSKSQVDIDALTRQAESQ

SEQ ID NO: 107894 - DNA, 1872 bp, Brassica insularis
  CDS (1)..(1872)
atggagtcttcgattctcagaaaccctatgctctcatcaccaacaacaatcaccaccccttctcttccctccttctcctcgaaaccctcacctctctcattccgcttcccaccctcccaccaccgctcctccctccgcatcaaatccctacgcctctcgtgctccctgtcagatccctctcctcccctctgccgccgccgcccggagtacatccccaaccgcatttccgaccccaactacgtccgagtcttcgacaccactctccgcgacggcgaacagtcccccggagccaccctcacttccaaagagaaactcgacatcgcgcgtcagctcgcgaagctgggcgtcgacgtaatcgaggccgggttccccgccgcctccaaggacgacttcgaagccgtgaaaaccatagccggaaccgtgggaaacgccgtcgacggagacggttacgtccccgtcatctgcggactctcgagatgcaacaagagagatatcgagacggcgtgggaggctgtgaagtacgccaaaaggccgaggatccataccttcatcgccacgagtgacattcacttggagtataagctgaagaagagcaaagacgaggtcatcgagatcgctaggaatatggttaagttcgcgaggagcttggggtgtgaggacgttgagtttagtcctgaagatgcaggaagatcggagagagagtttttgtatcagattcttggggaagtgataaaagctggagcgacaacgcttaatatacctgacactgttggtataacgttgcctagtgagtttggtcagttgattgctgatatcaaagccaatactcctgggatcgagaatgttatcatctcaacgcattgtcagaatgatcttgggctctccactgccaacactttatctggtgcacattcgggtgcaaggcaagtggaagtgactatcaatggcattggcgaaagagctggaaacgcttcactagaagaggttgtgatggccataaaatgccgtggagatcatgtattaggaggcctgtatactggaatcgatactcggcacattgttatgacaagcaagatggttgaagactatactggaatgcaaacacagccccataaggctattgtaggagcgaatgcctttgcgcatgaaagtggtattcatcaggatggaatgctcaaacacaagggcacatatgaaattatatgccccgaagaaattggacttgaacgatctaatgatgctggcattgttttggggaagcttagtgggcgtcatgcgttgaaagaccgtttgactgagcttggttatgtactagatgatgaacaactaagttccattttctggcgcttcaaatctgtggctgagcggaaaaagagagttaccgacgcagatataatagctttggtttctgatgaggttttccagccagaagctctgtggaaactcctggacattcagataacttgtgggactttggggctttcaacagcaaccgtgaaactggctgacgctgatggcaaagagcatgttgcttgttctatgggaaccgggcctgtcgattcagcttacaaggcagtcgatcttattgtcaaggaaccagcgactctgcttgagtactcaatgaatgcagtaacagaaggcatcgatgccattgcaaccacaagagttcttatccgaggaaacaacaattactcaactacaaacgcaatcactggtgaagaagttcaaaggacctttagtggaaccggagcaggaatggacatcgtggtctcgagcgtcaaagcttatgtcggagctctgaacaagatgctcgatttcaaagagaactccacaacaaaaatcccttctcaaaacaacaaagtacctgcctga

SEQ ID NO: 107895 - protein, 623 aa, Brassica insularis
MESSILRNPMLSSPTTITTPSLPSFSSKPSPLSFRFPPSHHRSSLRIKSLRLSCSLSDPSPPLCRRRPEYIPNRISDPNYVRVFDTTLRDGEQSPGATLTSKEKLDIARQLAKLGVDVIEAGFPAASKDDFEAVKTIAGTVGNAVDGDGYVPVICGLSRCNKRDIETAWEAVKYAKRPRIHTFIATSDIHLEYKLKKSKDEVIEIARNMVKFARSLGCEDVEFSPEDAGRSEREFLYQILGEVIKAGATTLNIPDTVGITLPSEFGQLIADIKANTPGIENVIISTHCQNDLGLSTANTLSGAHSGARQVEVTINGIGERAGNASLEEVVMAIKCRGDHVLGGLYTGIDTRHIVMTSKMVEDYTGMQTQPHKAIVGANAFAHESGIHQDGMLKHKGTYEIICPEEIGLERSNDAGIVLGKLSGRHALKDRLTELGYVLDDEQLSSIFWRFKSVAERKKRVTDADIIALVSDEVFQPEALWKLLDIQITCGTLGLSTATVKLADADGKEHVACSMGTGPVDSAYKAVDLIVKEPATLLEYSMNAVTEGIDAIATTRVLIRGNNNYSTTNAITGEEVQRTFSGTGAGMDIVVSSVKAYVGALNKMLDFKENSTTKIPSQNNKVPA

SEQ ID NO: 107896 - DNA, 1872 bp, Brassica oleracea; identical to SEQ ID NO: 13210
  CDS (1)..(1872)

SEQ ID NO: 107897 - protein, 623 aa, Brassica oleracea; identical to SEQ ID NO: 13211

SEQ ID NO: 107898 - DNA, 1518 bp, Brassica oleracea; identical to SEQ ID NO: 13212
  CDS (1)..(1518)

SEQ ID NO: 107899 - protein, 505 aa, Brassica oleracea; identical to SEQ ID NO: 13213

SEQ ID NO: 107900 - DNA, 1512 bp, Arabidopsis thaliana; identical to SEQ ID NO: 13218
  CDS (1)..(1512)

SEQ ID NO: 107901 - protein, 503 aa, Arabidopsis thaliana; identical to SEQ ID NO: 13219

SEQ ID NO: 107902 - DNA, 1512 bp, Arabidopsis thaliana; identical to SEQ ID NO: 13220
  CDS (1)..(1512)

SEQ ID NO: 107903 - protein, 503 aa, Arabidopsis thaliana; identical to SEQ ID NO: 13221

SEQ ID NO: 107904 - DNA, 1512 bp, Arabidopsis thaliana; identical to SEQ ID NO: 13222
  CDS (1)..(1512)

SEQ ID NO: 107905 - protein, 503 aa, Arabidopsis thaliana; identical to SEQ ID NO: 13223

SEQ ID NO: 107906 - DNA, 1512 bp, Arabidopsis thaliana; identical to SEQ ID NO: 13224
  CDS (1)..(1512)

SEQ ID NO: 107907 - protein, 503 aa, Arabidopsis thaliana; identical to SEQ ID NO: 13225

SEQ ID NO: 107908 - DNA, 1521 bp, Arabidopsis thaliana; identical to SEQ ID NO: 13226
  CDS (1)..(1521)

SEQ ID NO: 107909 - protein, 506 aa, Arabidopsis thaliana; identical to SEQ ID NO: 13227

SEQ ID NO: 107910 - DNA, 1521 bp, Arabidopsis thaliana; identical to SEQ ID NO: 13228
  CDS (1)..(1521)

SEQ ID NO: 107911 - protein, 506 aa, Arabidopsis thaliana; identical to SEQ ID NO: 13229

SEQ ID NO: 107912 - DNA, 1521 bp, Arabidopsis thaliana; identical to SEQ ID NO: 13230
  CDS (1)..(1521)

SEQ ID NO: 107913 - protein, 506 aa, Arabidopsis thaliana; identical to SEQ ID NO: 13231

SEQ ID NO: 107914 - DNA, 1521 bp, Arabidopsis thaliana; identical to SEQ ID NO: 13232
  CDS (1)..(1521)

SEQ ID NO: 107915 - protein, 506 aa, Arabidopsis thaliana; identical to SEQ ID NO: 13233

SEQ ID NO: 107916 - DNA, 1521 bp, Arabidopsis thaliana; identical to SEQ ID NO: 13234
  CDS (1)..(1521)

SEQ ID NO: 107917 - protein, 506 aa, Arabidopsis thaliana; identical to SEQ ID NO: 13235

SEQ ID NO: 107918 - DNA, 1464 bp, Brassica oleracea; identical to SEQ ID NO: 13236
  CDS (1)..(1464)

SEQ ID NO: 107919 - protein, 487 aa, Brassica oleracea; identical to SEQ ID NO: 13237

SEQ ID NO: 107920 - DNA, 1521 bp, Arabidopsis thaliana; identical to SEQ ID NO: 13240
  CDS (1)..(1521)

SEQ ID NO: 107921 - protein, 506 aa, Arabidopsis thaliana; identical to SEQ ID NO: 13241

SEQ ID NO: 107922 - DNA, 1512 bp, Arabidopsis thaliana; identical to SEQ ID NO: 13242
  CDS (1)..(1512)

SEQ ID NO: 107923 - protein, 503 aa, Arabidopsis thaliana; identical to SEQ ID NO: 13243

SEQ ID NO: 107924 - DNA, 1512 bp, Arabidopsis thaliana; identical to SEQ ID NO: 13244
  CDS (1)..(1512)

SEQ ID NO: 107925 - protein, 503 aa, Arabidopsis thaliana; identical to SEQ ID NO: 13245

SEQ ID NO: 107926 - DNA, 1512 bp, Arabidopsis thaliana; identical to SEQ ID NO: 13246
  CDS (1)..(1512)

SEQ ID NO: 107927 - protein, 503 aa, Arabidopsis thaliana; identical to SEQ ID NO: 13247

SEQ ID NO: 107928 - DNA, 2028 bp, Arabidopsis thaliana
  CDS (1)..(2028)
atggcgtcttcgcttctgagaaaccctaatctctactcatcaacaacaatcaccaccacttcttttcttcccaccttctcctctaaacccacacctatctcctcctctttccgtttccaaccatctcaccaccgttcaatctccctccgaagtcaaaccctccgtctctcatgctcaatctcagatccttctccactaccacctcacactcctcgccgtccccgtcctgaatacatccccaaccgcatttccgatccaaactacgtccgcgtcttcgatactactctccgtgacggtgaacaatctccaggagctacacttacttccaaggaaaaacttgacatcgctcgtcagctagctaaacttggtgttgacatcatcgaggctgggtttcctgctgcttccaaggatgattttgaagcggttaagactatagctgaaacagttggaaacactgttgatgagaatggttatgttcctgttatctgtggactctctagatgcaataagaaggatattgagagagcttgggatgctgtgaaatacgctaaacggcctaggattcatacttttatagctactagtgatatacatttggagtataaactaaagaaaaccaaagcagaggtcatcgaaatcgctaggagtatggttagattcgcgaggagcttggggtgcgaagatgttgagttcagtccagaagatgcaggaagatcggagagagagtacttatacgagattcttggtgaagtgataaaagcaggagcaacaactctcaacatacctgatactgttggtataactttgcctagtgagtttggtcaactgattactgatttaaaggccaatactccggggattgaaaatgttgtcatctcaacacattgtcagaatgatcttggactctctacggccaacactttatctggggcacatgcaggtgcgaggcagatggaagtgacgatcaatggaattggtgaaagagctggaaacgcttcactggaagaggttgtgatggccataaaatgccgtggagatcatgtattaggaggtctatttaccggaattgatactcggcacattgttatgacaagcaagatggtagaggagtacactgggatgcagacacaacctcataaggctattgtaggagcgaatgcctttgcgcatgaaagtggaattcaccaggatggaatgctgaaacacaagggtacatatgaaattatatgtcccgaagaaattggacttgaacgatcaaatgatgctggcattgtcttggggaagcttagtgggcgtcatgcgctgaaagaccgtttgactgaggtgcacagcaatcttacacatacaaatacttgtattgccatctttgtgggagacactaatgttctcttatcttttgtacatttccagcttggttatcaattagatgatgaacagctaagtaccattttctggcgcttcaaaaccgtggctgagcagaaaaagagagttactgatgcggacataatagctttagtatctgatgaagttttccagccagaagccgtgtggaaactcctggacattcagataacttgtggaactctcgggctttcaacagcaactgtaaaacttgctgacgctgatggcaaagaacatgtcgcttgttctattggaactgggcctgtggattcagcttacaaggcagtagatcttatcgtaaaggtactgtttataccgctgaggctctcatctacaaataactcaccagaaccggctactctgcttgagtactcaatgaatgcagtaacagaaggcattgatgccatcgcaaccacaagagttcttatccgtggaagcaacaaatactcatctacaaacgcaataactggtgaagaggttcaaagaacctttagtggaactggagcaggaatggatattgtggtgtcaagcgtcaaagcttatgttggagctttgaacaaaatgatggacttcaaagaaaactccgccacaaaaatcccttcccaaaaaaacagagtcgctgcctga

SEQ ID NO: 107929 - protein, 675 aa, Arabidopsis thaliana
MASSLLRNPNLYSSTTITTTSFLPTFSSKPTPISSSFRFQPSHHRSISLRSQTLRLSCSISDPSPLPPHTPRRPRPEYIPNRISDPNYVRVFDTTLRDGEQSPGATLTSKEKLDIARQLAKLGVDIIEAGFPAASKDDFEAVKTIAETVGNTVDENGYVPVICGLSRCNKKDIERAWDAVKYAKRPRIHTFIATSDIHLEYKLKKTKAEVIEIARSMVRFARSLGCEDVEFSPEDAGRSEREYLYEILGEVIKAGATTLNIPDTVGITLPSEFGQLITDLKANTPGIENVVISTHCQNDLGLSTANTLSGAHAGARQMEVTINGIGERAGNASLEEVVMAIKCRGDHVLGGLFTGIDTRHIVMTSKMVEEYTGMQTQPHKAIVGANAFAHESGIHQDGMLKHKGTYEIICPEEIGLERSNDAGIVLGKLSGRHALKDRLTEVHSNLTHTNTCIAIFVGDTNVLLSFVHFQLGYQLDDEQLSTIFWRFKTVAEQKKRVTDADIIALVSDEVFQPEAVWKLLDIQITCGTLGLSTATVKLADADGKEHVACSIGTGPVDSAYKAVDLIVKVLFIPLRLSSTNNSPEPATLLEYSMNAVTEGIDAIATTRVLIRGSNKYSSTNAITGEEVQRTFSGTGAGMDIVVSSVKAYVGALNKMMDFKENSATKIPSQKNRVAA

SEQ ID NO: 107930 - DNA, 1476 bp, Methanococcus jannaschii; identical to SEQ ID NO: 13254
  CDS (1)..(1476): transl_table=11

SEQ ID NO: 107931 - protein, 491 aa, Methanococcus jannaschii; identical to SEQ ID NO: 13255

SEQ ID NO: 107932 - DNA, 1461 bp, Pyrococcus abyssi; identical to SEQ ID NO: 13274
  CDS (1)..(1461): transl_table=11

SEQ ID NO: 107933 - protein, 486 aa, Pyrococcus abyssi; identical to SEQ ID NO: 13275

SEQ ID NO: 107934 - DNA, 1542 bp, Ralstonia solanacearum
  CDS (1)..(1542): transl_table=11
atgagcgacaaactgattattttcgacaccaccttgcgagacggcgagcagtcgcccggggcgtcgatgaccaaggaagaaaagatccgcatcgccaagcagctcgagcggctgaaggtggacgtgatcgaggcggggttcgccgccagctccaacggcgacttcgaggccatccgcgccatcgcccagtcggtcaaggattcccgcatctgctcgctggcgcgtgcgaacgaccgcgacatctcccgcgccgccgaggcgctcaagccggcagggcagttccgcatccacaccttcatcgccacgtccgcgctgcatatggagaagaagctgcgcatgacgccggaccaggtgtacgagcaggcccgcctggctgtgcgtttcgcgcgtcagttcacggacgacatcgagttctcgccggaagacggcagccgctccgacatggatttcctgtgccgcgtgctggaaggcgtgatcgccgagggggccaccaccatcaacctgccggacacggtcggctatgcggtgccggaaggctatgccgcgctgatccgctcggtgcgcgagcgcattcccaactccgacaaggcgatctggtcggtgcactgccacaatgacctgggcatggcggtcgcgaactcgctggccgcggtcaagctgggcggcgcgcgccagatcgagtgcacgatcaacggcctgggcgagcgcgccggtaacaccagcctcgaagaggtggtgatggccgtcaagacccgccgcgactacttcaacctcgatgtcggcgtcgataccacgcagatcgtgccggcctccaagctggtctcgcagatcaccggcttcgtggtgcagccgaacaaggcggtggtgggcgccaacgccttcgcgcatgcctccggcatccaccaggacggcgtgctcaaggcgcgcgatacctacgagatcatgcgcgccgaagacgtgggctggaccgccaacaagatcgtgctgggcaagctctcgggccgcaacgcgttcaagcagcgtctgcaggagctcggcatcgagctcgattccgaagccgaactgaacgccgccttcacgcgcttcaaggagctggccgaccagaaggccgagatcttcgatgaggacatcgtcgccatcgtctccaacgaagcgcagcacgccgagggtgagcacttccgcttcgtgtcgctgtcgcagcgctcggagaccggcgagcggccgcacgcgcgcatcgtcttcgtcgccgacggcaaggaagtgacgggcgaggcagagggcaacggcccggtcgacgcgacgctcaacgccatcgagagcaaggtcgccagcggcgccgaacagctgctgtactcggtcaacgccattaccaccggcacccaggcgcagggcgaagtgacggtgcgcctgtccaagtcgggccgcatcgtcaacggcgtgggcaccgatccggacatcgtcgcggcatcggccaaggcgtacctggcggcgctgaacaagctgcaggacaagagcagcgagaagctcaatccgcagatctga

SEQ ID NO: 107935 - protein, 513 aa, Ralstonia solanacearum
MSDKLIIFDTTLRDGEQSPGASMTKEEKIRIAKQLERLKVDVIEAGFAASSNGDFEAIRAIAQSVKDSRICSLARANDRDISRAAEALKPAGQFRIHTFIATSALHMEKKLRMTPDQVYEQARLAVRFARQFTDDIEFSPEDGSRSDMDFLCRVLEGVIAEGATTINLPDTVGYAVPEGYAALIRSVRERIPNSDKAIWSVHCHNDLGMAVANSLAAVKLGGARQIECTINGLGERAGNTSLEEVVMAVKTRRDYFNLDVGVDTTQIVPASKLVSQITGFVVQPNKAVVGANAFAHASGIHQDGVLKARDTYEIMRAEDVGWTANKIVLGKLSGRNAFKQRLQELGIELDSEAELNAAFTRFKELADQKAEIFDEDIVAIVSNEAQHAEGEHFRFVSLSQRSETGERPHARIVFVADGKEVTGEAEGNGPVDATLNAIESKVASGAEQLLYSVNAITTGTQAQGEVTVRLSKSGRIVNGVGTDPDIVAASAKAYLAALNKLQDKSSEKLNPQI

SEQ ID NO: 107936 - DNA, 1548 bp, Methanosarcina acetivorans
  CDS (1)..(1548): transl_table=11
atgtacacactgaaagaagggatcgatttttacatcgaacccatgcagaataaaaaagtaactgtttttgacacaacactgcgtgacggagaacagacccctggagtatccctgacttcttctcagaagctggagatttctcgtcaactcgacaaactgggggtagacataatagaagccggatttcccatatcttcagaaggggataaagaatccgtaaaatcgatttctaatgctgggcttgaaaccacagtctgtggacttgctcgtgtgctgaaaaaagatatcgatgcctgttttgaaagtgatgttggccttgtgcacactttcgttccgacctcggatgtacagcggatctataccatcaaaaagagccaggaagaagtcattcaactggctgtggaagcggtccagtacatcaaagatcacggactgaagtgtatgttttctgcaatggatgccaccagaaccgatcctgcatacctcatagaggttttcaaggcggttcaggaggcaggatgcgatatcattaacgtgccggacaccgtcggcgttatggttccgtctgcaatgtacaggcagataaaagacattgcagctgaaataacgattccgatagacgtacactgccacaatgatttcgggcttgcagtagcaaacagtcttatggctgttgaagcaggggcatctcaggtacaggtcactattaacggtataggagaaagagcaggaaatgctgaccttgcccagacagtgatgagcctggcatcaatctacggtataaaaaccaatattcggacagaatacctcgtagaaacctcgaaaatgatcgaaaactacaccggaatcaggcttccaccaaacacgcctgtggtcgggcaaaacgccttttcccacgagtcgggaatccacagccagggagtgcttgaaaaatccgataccttcgaaccaggtattatgaccccggaaatggtcgggcacagacggcgcattgttcttggaaagcatacaggcaaacacgcagtcaaacagtcccttgagtctgctggcgtaaaaaccagtgaaaatcagctcgatgagattgtgctcaggatcaaagaaatcgcaaacaaagggaaacagataacagacgctgatctctatgcagttgcctctgcagtgctaggaaaagcaagttctgaagaagaactgattaaactcaaagaagtatccgtcatgacaggaaacatcctcacacctacagctgtggtcaaggcagatattgaaggcaaagaaataattgcagcaaaaaccggagtaggtcctgtggatgctgcccttaaagccgtaagggatatcctgggcgagagcaaccatttcaggctccaggaattcaggatcgatgctatcacgggaggagctgacgctcttgccgatgtgtacataggtctcgaaaacgaaaagggcagaattgtaacagcacgttccgcaaacccggacatagtcatggcttccgtagaagccctcataaacgctatgaacctgctgtataagaaagaaaaaagctaa

SEQ ID NO: 107937 - protein, 515 aa, Methanosarcina acetivorans
MYTLKEGIDFYIEPMQNKKVTVFDTTLRDGEQTPGVSLTSSQKLEISRQLDKLGVDIIEAGFPISSEGDKESVKSISNAGLETTVCGLARVLKKDIDACFESDVGLVHTFVPTSDVQRIYTIKKSQEEVIQLAVEAVQYIKDHGLKCMFSAMDATRTDPAYLIEVFKAVQEAGCDIINVPDTVGVMVPSAMYRQIKDIAAEITIPIDVHCHNDFGLAVANSLMAVEAGASQVQVTINGIGERAGNADLAQTVMSLASIYGIKTNIRTEYLVETSKMIENYTGIRLPPNTPVVGQNAFSHESGIHSQGVLEKSDTFEPGIMTPEMVGHRRRIVLGKHTGKHAVKQSLESAGVKTSENQLDEIVLRIKEIANKGKQITDADLYAVASAVLGKASSEEELIKLKEVSVMTGNILTPTAVVKADIEGKEIIAAKTGVGPVDAALKAVRDILGESNHFRLQEFRIDAITGGADALADVYIGLENEKGRIVTARSANPDIVMASVEALINAMNLLYKKEKS

SEQ ID NO: 107938 - DNA, 1557 bp, Methanococcus jannaschii; identical to SEQ ID NO: 13280
  CDS (1)..(1557): transl_table=11

SEQ ID NO: 107939 - protein, 518 aa, Methanococcus jannaschii; identical to SEQ ID NO: 13281

SEQ ID NO: 107940 - DNA, 1551 bp, Methanosarcina mazei
  CDS (1)..(1551): transl_table=11
atgtacacactgaaagaagggatcgatttttacatcgaacccatgcagagtaaaaaagtaactgtttttgacacaacactgcgtgacggagaacaaacccctggagtatccctgacttctacacagaagctggaaattgctcatcaacttgacaaactcggggtagacataatagaagccggatttcccatctcttcagaaggagataaagaatccgtaaaatcgatttctaatgccgggcttgacaccacagtttgcggactggctcgtgtgctgaaaaaagatatcgatgcctgttttgaaagtgatgttggccttgtgcacaccttcgtccctacctcggatgtacagcggatctataccatcaaaaagagccgggaagaagtcattcaactggctgtagaagctgtccagtacatcaaagaccacgggctgaagtgcatgttttccgcaatggacgccaccagaacagaccctgaatacctcatagaggttttcaaagcggttcaggaagcaggctgcgacatcatcaacgtgccggatactgttggcgtgatggtcccgtctgcaatgtacaggcagataaaaggcattgcagctgaaataacgattcctatagacgtgcactgtcataatgacttcgggcttgctgtggcaaatagccttatggctgttgaagccggggcatctcaggtacaggtcaccataaacggcataggagaaagggcaggaaatgctgatctttcccagacagtaatgagcctgacatcaatctacggtgcaaaaaccaatatccggacagaataccttgtagaaacctcgaaaatggttgaaaactatacaggaatcaggctccctccaaacacgcctgtggtggggcaaaacgcattttcccatgagtcaggaattcacagtcagggagtgcttgaaaaatccgacaccttcgaaccaggaattatgactccggaaatggttgggcacagacggcgcattgtccttggtaagcataccggcaaacatgcggtcaaacagtcccttgagtctgccgggataaaaaccaatgataatcaactcgatgaaattgtgatcaggattaaagaaatcgcaaacaaaggtaaacagataacagatgctgatctttatgcagttgcctctgcagttctcggtaaagcgagttctgaggaagagctgatcaaactcaaagaagtatccgtcatgacaggaaacatccttacacctacggctgtggttaaggcagatattgaaggaaaagaaatcattgcagcaagaacaggagtcggtcctgtggacgcagccctccatgccgtaagagacattcttggcgagagtaatcatttcagactccaggatttcaggatcgatgctatcacaggtggggcagatgcccttgccgatgtatacataggtctggaaaatgaaaagggaaggattgtaacagcccggtccgcaaatccggacatagtaatggcttccgtggaagcccttgtaaatgctatgaaccttctctataaaaaagaaaacaaaagctga

SEQ ID NO: 107941 - protein, 516 aa, Methanosarcina mazei
MYTLKEGIDFYIEPMQSKKVTVFDTTLRDGEQTPGVSLTSTQKLEIAHQLDKLGVDIIEAGFPISSEGDKESVKSISNAGLDTTVCGLARVLKKDIDACFESDVGLVHTFVPTSDVQRIYTIKKSREEVIQLAVEAVQYIKDHGLKCMFSAMDATRTDPEYLIEVFKAVQEAGCDIINVPDTVGVMVPSAMYRQIKGIAAEITIPIDVHCHNDFGLAVANSLMAVEAGASQVQVTINGIGERAGNADLSQTVMSLTSIYGAKTNIRTEYLVETSKMVENYTGIRLPPNTPVVGQNAFSHESGIHSQGVLEKSDTFEPGIMTPEMVGHRRRIVLGKHTGKHAVKQSLESAGIKTNDNQLDEIVIRIKEIANKGKQITDADLYAVASAVLGKASSEEELIKLKEVSVMTGNILTPTAVVKADIEGKEIIAARTGVGPVDAALHAVRDILGESNHFRLQDFRIDAITGGADALADVYIGLENEKGRIVTARSANPDIVMASVEALVNAMNLLYKKENKS

SEQ ID NO: 107942 - DNA, 1518 bp, Methanobacterium thermoautotrophicum
  CDS (1)..(1518): transl_table=11
atgtacatagaagaggttaaaggagaaatgaatctcccggagaatgtcaggatatttgacacaacactgagggatggtgaacagacacctggagtggccctcacagtggaggaaaagacgggtatagcaaggaagctcgacgcccttggagtcgatacaatcgaggcagggttccctgcagcatctccaggtgaaatgaactccataaggagaatagttgaactcggacttgaagcaaatatctgtggtttggcaagggtgctccgtgaggacatagacgcggcaatagactgtggagttgattacatacacaccttcatagggacatcaccactccaccgggaatacaagctcaaaatgtcccctgatgagataatagacagggcggtctttggagtggaatatgcggctgaacatggcctgaaggttgagttctctgcggaggatgcaacaaggactgaatttgattacctggttgaggtataccgtgcagccgaggatgccggtgccgagatcataaacgtcccggataccgtcggggtcatgataccccgggccatgaaccacctggtatcccggcttaaggaggaactcagggtacccataagcgtgcactgtcacaatgacttcggcctggcagtcgccaactcccttgcagcggtggaggccggggcatcacaggtacatgcaacagtgaatggtctcggtgaaagggcaggaaacgctgcccttgaggaggttgtaatggccctcataaccaggtatgacctcccggtggatataagaaccgtggaactcgtcaacatctcagaattcgtctcaaagataaccggtgtcaggatgccccccaacaaggccatagtcggtgaaaacgcctttgcacatgaagccggcatacacgtgcatggagtccttgaaaaggctgaaacctatgaaccaataacccctgagatggtgggccacaagaggaggatagtccttggtaaacacacaggagccaacgccctcagatcaaagctccaggaatacggaatagagatgaaggaggaacagttctgcacactctatgaacaggtcaagaggcttggagataagggtaagaggatcacggatgctgatctgagggccatggccgtcaccatccttggaaaggccagcagggaaatagtgaagctggagggcatagcagtcatgacaggggagagtgtgatgccaacagccacagttaagctcagaatcggtgacgaggtcaagacaacatccatgacaggggttggacctgtagatgctgcaataaacgccatacaaagccttgtaagtgaaacagcagacatagaactcgatgaatacaacatagaggccataactggtggtacaaacgcacttgcagaggtcttcgttgtcatgagtgacggggagggtaacaaggccacaggaaggtccaccagggaggacatagtcatggcgagtgttgaggcagtactggacgccataaacaagattctgagccttaaatag

SEQ ID NO: 107943 - protein, 505 aa, Methanobacterium thermoautotrophicum
MYIEEVKGEMNLPENVRIFDTTLRDGEQTPGVALTVEEKTGIARKLDALGVDTIEAGFPAASPGEMNSIRRIVELGLEANICGLARVLREDIDAAIDCGVDYIHTFIGTSPLHREYKLKMSPDEIIDRAVFGVEYAAEHGLKVEFSAEDATRTEFDYLVEVYRAAEDAGAEIINVPDTVGVMIPRAMNHLVSRLKEELRVPISVHCHNDFGLAVANSLAAVEAGASQVHATVNGLGERAGNAALEEVVMALITRYDLPVDIRTVELVNISEFVSKITGVRMPPNKAIVGENAFAHEAGIHVHGVLEKAETYEPITPEMVGHKRRIVLGKHTGANALRSKLQEYGIEMKEEQFCTLYEQVKRLGDKGKRITDADLRAMAVTILGKASREIVKLEGIAVMTGESVMPTATVKLRIGDEVKTTSMTGVGPVDAAINAIQSLVSETADIELDEYNIEAITGGTNALAEVFVVMSDGEGNKATGRSTREDIVMASVEAVLDAINKILSLK

SEQ ID NO: 107944 - DNA, 1770 bp, Solanum pennellii; identical to SEQ ID NO: 13288
  CDS (1)..(1770)

SEQ ID NO: 107945 - protein, 589 aa, Solanum pennellii; identical to SEQ ID NO: 13289

SEQ ID NO: 107946 - DNA, 1839 bp, Solanum pennellii; identical to SEQ ID NO: 13290
  CDS (1)..(1839)

SEQ ID NO: 107947 - protein, 612 aa, Solanum pennellii; identical to SEQ ID NO: 13291

SEQ ID NO: 107948 - DNA, 1575 bp, Aquifex aeolicus; identical to SEQ ID NO: 107582
  CDS (13)..(1575): transl_table=11

SEQ ID NO: 107949 - protein, 520 aa, Aquifex aeolicus
MGEKVYIFDTTLRDGEQAPGFSMTTEEKLQMAHQLAKLNVDIIEAGFAAASKGDFEAVNRIAKEVKGPVICSLARALESDIEIAAKALEPAERKRIHTFIATSPIHMEYKLRMTPDQVLERIKKAVSFARNFTDDVEFSCEDATRSEREFLYRAIETAIKHGATVINIPDTVGYAIPEEFGQLIEDIMNNVPNIDKVILSVHCHDDLGLATANSLTAVKHGARQVECTINGIGERAGNAALEEVVMALKVRKDFFGDLYTDVNTKEIYKTSRLLCRITGNFVQPNKAIVGDNAFAHESGIHQHGVLSHRMTYEIMNPEDVGFPMSRIVLGKHSGRHALKRRLEELGFKFTKEELDRIFEKFKELADRKKEVYDEDLEALIYQEFMKIEDHEPVKVLHFQVQSGDNMIPTATVKLEFKGEEREASSTGNGPVDATIKAIQKALGIEPKLLDYSIKALTPNTDAQAEARVVLELDGVKASGRGVDTDIIKASVKAFTDALNRAIVRKEYIIQRQEIREEGTV

SEQ ID NO: 107950 - DNA, 1521 bp, Bacillus anthracis; identical to SEQ ID NO: 13292
  CDS (1)..(1521): transl_table=11

SEQ ID NO: 107951 - protein, 506 aa, Bacillus anthracis; identical to SEQ ID NO: 13293

SEQ ID NO: 107952 - DNA, 1548 bp, Bacillus halodurans; identical to SEQ ID NO: 13294
  CDS (1)..(1548): transl_table=11

SEQ ID NO: 107953 - protein, 515 aa, Bacillus halodurans; identical to SEQ ID NO: 13295

SEQ ID NO: 107954 - DNA, 1548 bp, Bacillus stearothermophilus
  CDS (1)..(1548): transl_table=11
gtgcgaaacattaagttttttgatactacattgcgcgatggggaacagtcggccggcgtcaatttgaacttgcaagaaaagttggaaattgcccgtcagcttgaacggctgcgggttgacatcatcgaggcgggcttccccgcctcgtcaaaaggcgattttgaggcggtcaaacaaattgccgaaacggtgagaacatgctcggtcaccgggctgtcgcgctcggtccgaagcgacattgatgcggcgtgggaggcgttaaaaggcggcgcggagccgcggctccacctattcatcgccacctcgccgatccatatggtgcataaattgcggatgacgccggaacaagtgattgaagcggcggttgaggcagtgaaatacgcgaagcgctttttcccgatcgtccaatggtcggcggaagatgcgtgccggagcgagctgccgtttttggcgaaaatcgtcgccgaagtgatcaaagccggcgcctcggtcatcaacatcccggatacggtcggctatattacgccgaaagaatacggggaaattttcctctatttgcaaaacaatgttcagaatattgaaaatgtttcgctctccgctcattgtcatgatgacttgggcatggcggtggtgaactcgttgtcggccattgagcatggggcgacgcaggtcgagtgcacgatcaacggcatcggcgagcgggccggcaacgcggcgcttgaggagatcgccgtcgcccttcacattcgcaaagattattatcaagtggaaacgcgcctcaatttgcaagaaattaagcgcacaagcaatcttgtcagcaagctgaccggggtcgtcgttccacccaacaaagcggtcgtcggcaaaaacgcgtttgcgcatgaatccggcatccatcaagacggcgtcttaaaagaaaaaacgacgtacgaaatcatttcaccggagctcgtcggcgtgccgtcgaattcgatggtgctcggcaaaaattccggccgccatgcgcttcgctaccgggttgaggagctcggctacacgttgtccgatgaagagatcaatcagctgtttgtccgttttaaagaactggcggacaaaaagaaggatattaccgacgacgatttaatcgcgttgattttcgaagagaagttcgaccacttcaaagatttttatcaattgtcttccattcaagtgcaatacgggacgaatcaaattccgaccgcggtcgtggtactgaaatacgggaaggggaatgaaatccaagaagcggcgaccggctccggcagcgtctatgcgctgtacaatactctcgagcgctgcttccaaacggaagtgacactgcttgactaccggattgagtcggtcggcggcggccgcgatgcgctagcgcaagtgtttgtgaaagtgcgcgtgcgcgatgttgaaacgagcgggcgcggaacggcgcaagacgtgcttgaggcgtcggcgaaagcgtacatcaacgccatgaaccgcgtgtttatgatcgaagcgatgcgtgctgaaaacgaaaaggtggcaacatcataa

SEQ ID NO: 107955 - protein, 515 aa, Bacillus stearothermophilus
MRNIKFFDTTLRDGEQSAGVNLNLQEKLEIARQLERLRVDIIEAGFPASSKGDFEAVKQIAETVRTCSVTGLSRSVRSDIDAAWEALKGGAEPRLHLFIATSPIHMVHKLRMTPEQVIEAAVEAVKYAKRFFPIVQWSAEDACRSELPFLAKIVAEVIKAGASVINIPDTVGYITPKEYGEIFLYLQNNVQNIENVSLSAHCHDDLGMAVVNSLSAIEHGATQVECTINGIGERAGNAALEEIAVALHIRKDYYQVETRLNLQEIKRTSNLVSKLTGVVVPPNKAVVGKNAFAHESGIHQDGVLKEKTTYEIISPELVGVPSNSMVLGKNSGRHALRYRVEELGYTLSDEEINQLFVRFKELADKKKDITDDDLIALIFEEKFDHFKDFYQLSSIQVQYGTNQIPTAVVVLKYGKGNEIQEAATGSGSVYALYNTLERCFQTEVTLLDYRIESVGGGRDALAQVFVKVRVRDVETSGRGTAQDVLEASAKAYINAMNRVFMIEAMRAENEKVATS

SEQ ID NO: 107956 - DNA, 1557 bp, Bacillus subtilis
  CDS (1)..(1557): transl_table=11
ttgcgcaaaattaattttttcgatacgacgcttcgtgatggtgaacagtcccctggagtgaacttgaatacacaggagaaacttgccatagctaagcagctcgaaagactcggggcagacatcattgaagcgggatttcccgcttcgtcccgaggtgactttttagctgttcaggaaatcgcaagaaccattaaaaattgttcagtaactggtctggcccgttgtgtaaaaggtgatattgatgctgcttgggaagcgttaaaggatggcgctcaaccaagaattcatgtatttatcgcgacatcggacattcatttgaagcacaagctgaaaatgacacgtgaacaagtcattgaaagagcagttggaatggtgaaatacgcaaaagaacgttttccgattgtgcaatggtcagctgaagatgcctgccgcactgaactgccgtttctagcagaaatcgtcgagaaagtgattgacgcaggcgccagtgttatcaatcttccggacactgtcggctacctggccccggcggaatacggaaatatctttaaatatatgaaagaaaacgttccgaacattcacaaagcaaagctttcagcccactgtcatgatgatttgggaatggcagtcgcaaactctcttgctgcgattgaaaatggcgctgatcaaatcgaatgcgctgtgaacgggatcggtgaaagagccggaaacgcggcattagaggaaattgccgtagccctccataccagaaaagatttctaccaagtcgaaacaggtattacgctgaacgagattaagagaacaagtgatttagtaagcaaactgacaggcatggctgtcccgcgcaacaaagcggttgttggagataatgcatttgctcatgaatcaggcatccatcaggacggctttttaaaggaaaaatcgacttatgaaattatttcaccggagcttgtcggcgtaaccgcagatgcgcttgtcctaggtaaacattccggacgccacgcatttaaagaccggctgactgctttaggattccaatttgacagtgaagagattaataaattctttacgatgttcaaagagttgactgagaagaaaaaagaaatcactgatgaggatcttgtttctcttattttagaagaaaaagtaacagatcgcaagattgggtatgaatttctttctctgcaagtacattacggaacaagtcaggtccctacggctactctatctttgaaaaatcaagaaaacgcacagcttattcaggaagctgcaactggagctggaagcgtggaagcaatctacaatacgcttgagcgctgcatcgataaggatgtggagctcttagactaccgcattcagtctaatagaaaaggcgaagatgcatttgcccaggtgtatgtaagagttttggtgaacggaaaagaatcagcagggcggggcatagcgcaagacgtattagaagcatcagcgaaagcctatttgaacgcagtaaaccgtcaattggttttccagtcgaatatgagcggattgaaaaaccacacagctgtcggatcataa

SEQ ID NO: 107957 - protein, 518 aa, Bacillus subtilis
MRKINFFDTTLRDGEQSPGVNLNTQEKLAIAKQLERLGADIIEAGFPASSRGDFLAVQEIARTIKNCSVTGLARCVKGDIDAAWEALKDGAQPRIHVFIATSDIHLKHKLKMTREQVIERAVGMVKYAKERFPIVQWSAEDACRTELPFLAEIVEKVIDAGASVINLPDTVGYLAPAEYGNIFKYMKENVPNIHKAKLSAHCHDDLGMAVANSLAAIENGADQIECAVNGIGERAGNAALEEIAVALHTRKDFYQVETGITLNEIKRTSDLVSKLTGMAVPRNKAVVGDNAFAHESGIHQDGFLKEKSTYEIISPELVGVTADALVLGKHSGRHAFKDRLTALGFQFDSEEINKFFTMFKELTEKKKEITDEDLVSLILEEKVTDRKIGYEFLSLQVHYGTSQVPTATLSLKNQENAQLIQEAATGAGSVEAIYNTLERCIDKDVELLDYRIQSNRKGEDAFAQVYVRVLVNGKESAGRGIAQDVLEASAKAYLNAVNRQLVFQSNMSGLKNHTAVGS

SEQ ID NO: 107958 - DNA, 1560 bp, Blochmannia floridanus; identical to SEQ ID NO: 13296
  CDS (1)..(1560): transl_table=11

SEQ ID NO: 107959 - protein, 519 aa, Blochmannia floridanus; identical to SEQ ID NO: 13297

SEQ ID NO: 107960 - DNA, 1563 bp, Bradyrhizobium japonicum; identical to SEQ ID NO: 13298
  CDS (1)..(1563): transl_table=11

SEQ ID NO: 107961 - protein, 520 aa, Bradyrhizobium japonicum; identical to SEQ ID NO: 13299

SEQ ID NO: 107962 - DNA, 1557 bp, Buchnera aphidicola subsp
  CDS (1)..(1557): transl_table=11
atgaactcacaagttattatttttgatacgaccttacgtgatggtgaacaagcacttcaagcaagtttaagcgttaaacaaaaactacaaattgcattatctttagaaaatgctggtattgatattatcgaagtagggttcccaatttcatcccccggtgattttaaatcagttcagactatatctaaaaatattaaaaatagtagaatatgtagtttagcccgttgtttaaataaagatattgatacagcagcagaggcaatgtcttcttctaacacatttcgaattcatatttttttagcaacttcaacattacatatggaatctaaattaaaaaagaatttcgatcaaattatagatatggcaatatcgtcagttaaaagagcattacgttacactgatgatgttgaattttcttgtgaagatgctagcagaactacaatggataatctctgccgcattgtagaacaattgataaaggcaggggtaaaaactataaatataccagatactgtaggatatacggtacctaatgaattatctactataattcataatctattcaaacgtgttcctaatattgatcaatctatcatttcagttcattgtcataatgatttaggtatggctgtaggtaattcgatatcagctatacaagcaggtgctagacaaatagaaggaactattaatggaattggagaaagagcaggtaatacagctttagaagaagtcattatggctataaaagttagagaagatattttaggtgtttctactaacataaaacataaggaaatttatcgcactagtcaaattattagtcaaatctgtaatttgccaataccgcccaataaagcaatagtaggaagtaatgcatttgcacattcttctggtattcatcaagatggtgttttaaaaaatagaaaaaattatgaaatcatggaacctagtagtattggtttaaaagaagttaaattaaacctaacttctagatcaggtagagcagctgtaaaatattatatgacacaaatgggttataaggaatgtgattacaatatagacgaactttatacatcttttttaaaattagcagataaaaaaggacaggtatttgattatgatttggaagcattagcatttataaacatgcaacaagaagagtcagaatatttctctctttctttttttagtgttcaatctatttctaatggattgtcgactgcttcggtaaaattattatgtggtaaaaaagtctctatagaatctgctacaacaagtaacggtcctatagatgctatttatcaagcgttaaataggattactaattttccaataactttacaaaaatatcagcttgtagctaagggtaagggtagggatgctttaggtcaagttgatattttagttgagtataaaaaacgtaaatttcatggtgtgggtttagctacagatattattgaatcttcagcgcaagcaatggttaatgtattaaataatatatggaaggcaaaccaagtcaatgaaaagttaaaaacactaaaaaaagtaaacaattaa

SEQ ID NO: 107963 - protein, 518 aa, Buchnera aphidicola subsp
MNSQVIIFDTTLRDGEQALQASLSVKQKLQIALSLENAGIDIIEVGFPISSPGDFKSVQTISKNIKNSRICSLARCLNKDIDTAAEAMSSSNTFRIHIFLATSTLHMESKLKKNFDQIIDMAISSVKRALRYTDDVEFSCEDASRTTMDNLCRIVEQLIKAGVKTINIPDTVGYTVPNELSTIIHNLFKRVPNIDQSIISVHCHNDLGMAVGNSISAIQAGARQIEGTINGIGERAGNTALEEVIMAIKVREDILGVSTNIKHKEIYRTSQIISQICNLPIPPNKAIVGSNAFAHSSGIHQDGVLKNRKNYEIMEPSSIGLKEVKLNLTSRSGRAAVKYYMTQMGYKECDYNIDELYTSFLKLADKKGQVFDYDLEALAFINMQQEESEYFSLSFFSVQSISNGLSTASVKLLCGKKVSIESATTSNGPIDAIYQALNRITNFPITLQKYQLVAKGKGRDALGQVDILVEYKKRKFHGVGLATDIIESSAQAMVNVLNNIWKANQVNEKLKTLKKVNN

SEQ ID NO: 107964 - DNA, 1551 bp, Buchnera aphidicola subsp
  CDS (1)..(1551): transl_table=11
atgagttctaaagttattatttttgataccaccttacgtgatggtgaacaagcattacaagcaagtttaagcgttaaagaaaaattacaaatagcattgtccctagaaaaatgtggcatagatattattgaagtaggatttcctatttcatcacctggagattttaaatcagttcagaccatatcaaaaaaaattaaaaatagtagaatatgtagtttagcaagatgtgttgaaaaagatatagaggtagcaggtgatgcaatgtcttcatctgatttttttcgaattcacatttttttagctacttcaacacttcatatggaatctaaattaagaaagaattttgatgaaattatagatatggctgtttcatcagtaaaaaaagcattacgttatactgatgatgttgaattttcttgtgaagatgcaagtagaaccacaatggataatttatgtcgaattgtagagaaattgataaaagctggtgtgaaaactattaatatccctgatacagtaggttatactatacctaatgaattatctaatattataaaaaatttatttgaacgagtaccaaatattcataaatctataatttctgttcattgtcataatgatttaggaatggcagtaggtaattcgatatctgctatacaagcaggtgctagacagattgaaggtactattaatgggattggagaaagagctggaaatacagcattagaagaaattattatggctataaaagttagagaagatattttgggtgtttcaacaaacatagtacataaagaaatttatcgtactagtcaaattatcagtcaaatttgtaatatgcctatacctgctaataaagcaattgtaggtagtaatgcatttgcacattcttctggtattcatcaagatggtgtattaaaaaatagaaaaaattatgaaattatggaacctaatactattggtgtaaaagaagtaaaacttaatttaacttcacgatcaggaagagctgcagtaaaatactatatggataaaatgggttataaagatgatgattatgatatagatgaactttactctgcatttttaaaattagcagataaaaaaggacaagtgtttgattatgatttagaggctttagcaatttttagtaaaaaacaagaaaatgcagaatatttttatttaaaattttttagtgtgcaatctatttctaatggcttatctactgcttcagtgaaattaaaatgtggtaaaaaagtttatacagaatcttctactactagtaatggaccggtagatgctacttatcaggcattaaataaaattataaattttccaataacattacaaaaatttcaacttgtagcaaaaggaaagggtaaagatgcattaggtcaagtagatattttagtgaaatatgaaaatcgtcaatttcatggaataggtttagctacggatattattgaatcgtcagctcaagctatgattaatgttttaaataatatatggaaatctcaacaagtgaataaaaagctaaaaaatttaaagaaatattaa

SEQ ID NO: 107965 - protein, 516 aa, Buchnera aphidicola subsp
MSSKVIIFDTTLRDGEQALQASLSVKEKLQIALSLEKCGIDIIEVGFPISSPGDFKSVQTISKKIKNSRICSLARCVEKDIEVAGDAMSSSDFFRIHIFLATSTLHMESKLRKNFDEIIDMAVSSVKKALRYTDDVEFSCEDASRTTMDNLCRIVEKLIKAGVKTINIPDTVGYTIPNELSNIIKNLFERVPNIHKSIISVHCHNDLGMAVGNSISAIQAGARQIEGTINGIGERAGNTALEEIIMAIKVREDILGVSTNIVHKEIYRTSQIISQICNMPIPANKAIVGSNAFAHSSGIHQDGVLKNRKNYEIMEPNTIGVKEVKLNLTSRSGRAAVKYYMDKMGYKDDDYDIDELYSAFLKLADKKGQVFDYDLEALAIFSKKQENAEYFYLKFFSVQSISNGLSTASVKLKCGKKVYTESSTTSNGPVDATYQALNKIINFPITLQKFQLVAKGKGKDALGQVDILVKYENRQFHGIGLATDIIESSAQAMINVLNNIWKSQQVNKKLKNLKKY

SEQ ID NO: 107966 - DNA, 1548 bp, Buchnera aphidicola subsp
  CDS (1)..(1548)
  misc_feature (400)..(400): r is g or a
  misc_feature (679)..(679): r is g or a
atgggcgaaaaaattattatttttgacaccactttacgtgatggagaacaagctttacaagcaagtctcactacgaaaaaaaaattaaaaattgctttatctttagaagagatgggaattgatattatagaagcaggttttcctatttcatctcctggtgattttaaatcagtagaaactatttctaaagaatttaaaagtagcataatatgtagtttagctagatgtgtggaaaaagatattgatatcgctgctgaagctatgagatttgcaaaacattttcgtattcatatttttttaggcacttctccgttacatgttaaatctaaattaaaaaaaaatttctcagaaataatagatatggctatattcgctattaaaaaggcaaaacgttatacaratgatattgaattttcttgtgaagatgcaggaaggactccaataaatcagttgtgttatattgttgaaaatgtcataaaagcaggagcaacaactattaatattccggatactgtcggttttacaattccttatgagtttaatcaaattataaaatctttatataacaaagtacctaatattgataaagtaattttatctgttcattgtcataacggtttaggtatggctacagctaactccataacagcgattcaagctggtgctcgtcaaatagaargaactatgaatggtatgggtgaaagagcaggtaatacagcattagaagaagttattatagctataaaactcaaaaaaaataatttgaatttacatactaacattaaacataaaaaaatatataaaactaggaaattaattagtgaaatttgtaacactgttattccatcaaataaagctattataggaactaatgctttttctcattcatccggtattcatcaggatggtatattaaaaaatagaaaaaattatgaaataattacaccaaaaagtattggtttaaaacctattaaattaaatttaacatcacgctctggtagagctgctgtaaaatatcatatgacagaaatgggttatgatgaaaaattatataaattagatatattatacaattctttcttaaaactagctgatagaaaaggacaagtattcgattatgaattagaatcattagcttttatcgatcaaaaagaaaatactacagaacattttcgtttaaaaaaatttaatgtacaacatcagtctactggtattactatttctagtatagaattatattgtggaaaaaagataaaaactgcaaatacaagaaccaaaaaaggattagttaactctatatatataacattaaataaaataactaatttacctatatatttaaaaaatattcaattaattactcaaaaaaaaccaattaatattataatatcgataaaagtgcaaattgaatataaaaaacgtcaattttatggtattggtaactcaaaagatattgttgagtcaactgctcaagctatgattcatatattaaataatatatggaaagctaataaagtaaatattttattaaaaaatattaaaacataa

SEQ ID NO: 107967 - protein, 515 aa, Buchnera aphidicola subsp
  misc_feature (227)..(227): The Xaa at location 227 stands for Arg, or Gly.
MGEKIIIFDTTLRDGEQALQASLTTKKKLKIALSLEEMGIDIIEAGFPISSPGDFKSVETISKEFKSSIICSLARCVEKDIDIAAEAMRFAKHFRIHIFLGTSPLHVKSKLKKNFSEIIDMAIFAIKKAKRYTBDIEFSCEDAGRTPINQLCYIVENVIKAGATTINIPDTVGFTIPYEFNQIIKSLYNKVPNIDKVILSVHCHNGLGMATANSITAIQAGARQIEXTMNGMGERAGNTALEEVIIAIKLKKNNLNLHTNIKHKKIYKTRKLISEICNTVIPSNKAIIGTNAFSHSSGIHQDGILKNRKNYEIITPKSIGLKPIKLNLTSRSGRAAVKYHMTEMGYDEKLYKLDILYNSFLKLADRKGQVFDYELESLAFIDQKENTTEHFRLKKFNVQHQSTGITISSIELYCGKKIKTANTRTKKGLVNSIYITLNKITNLPIYLKNIQLITQKKPINIIISIKVQIEYKKRQFYGIGNSKDIVESTAQAMIHILNNIWKANKVNILLKNIKT

SEQ ID NO: 107968 - DNA, 1557 bp, Buchnera aphidicola subsp
  CDS (1)..(1557): transl_table=11
atgaattcacaagttattatttttgataccaccctacgcgatggtgaacaagcacttcaagctagtctgagtgttaaacaaaaactacaaattgcactatctttagaaaataccggtatagatattatcgaagtaggttttccaatttcatctcctggagattttaaatcagttcaaactatatctaaaaatattaaaaatagtagaatatgcagtttggctcgttgtttagataaagatatcgatgctgctgcagaagcgatgcattcatctaatgcatttagaattcacatttttctagcaacttcaatacttcatatggaatctaaattaaagaaaaatttcgatcaaataatagatatggcaataacgtcagttaaaagagcattacgttatactgatgatgttgaattttcttgtgaagatgcaagcagaactacaatggataatttgtgtcgtattgtagaaaaattaataaatgcaggagtaaaaacaataaatataccagatactgtaggatatacagtacctaatgaattatcttctataattcataatttatttcaacgtgttcctaatattgataaatcaataatttcagttcattgtcataatgatttaggtatggctgtaggaaactcaatatcagctatacaagcaggagctaggcaaatagaaggaactattaatggaattggagaaagagctggtaatacagctttagaagaagtaattattgctataaaagtaagagaagatgttttaggtgtttctactaaaataaaacataaagaaatttatcgaactagtcagattataagtcaaatttgcaatttgccaatcccacctaataaggcaatagtaggaagtaatgcatttgcacattcttctggtattcatcaagatggtgttttaaaaaatagaaaaaattatgaaattatggaacctagtagtattggtttaaaggaagttaaattaaacttaacttctagatctggtagagctgctgtaaaacattatatgactgaaatgggttatagagaatgtgattataaaatagatgaactttatgcatcttttttaaaattagcagataaaaagggacaagtgtttgattatgatttggaagcattggcttttataaatcaacaacaagaagaattagaacacttttctttatctttttttagtgttcaatctatttctaatggtttgtctactgcttcagtaaaattattatgtggtaaaaaaacttttatagaatctgctacaacaagcaatggccctatagacgctatttatcaagctttaaataggattactcactttcctataattttacagaaatatcaacttatagcaaaaggtaagggaaaagatgctttaggtcaagttgatattttagttgaacataaaaaacgcaagtttcatggtatgggtttagctacagatattattgaatcttcagctcaagcaatggtgaatgtattaaataatatatggaaagctaatcaagtaaatgaaaagttaaaaaaattaaaaaaaataaacaattag

SEQ ID NO: 107969 - protein, 518 aa, Buchnera aphidicola subsp
MNSQVIIFDTTLRDGEQALQASLSVKQKLQIALSLENTGIDIIEVGFPISSPGDFKSVQTISKNIKNSRICSLARCLDKDIDAAAEAMHSSNAFRIHIFLATSILHMESKLKKNFDQIIDMAITSVKRALRYTDDVEFSCEDASRTTMDNLCRIVEKLINAGVKTINIPDTVGYTVPNELSSIIHNLFQRVPNIDKSIISVHCHNDLGMAVGNSISAIQAGARQIEGTINGIGERAGNTALEEVIIAIKVREDVLGVSTKIKHKEIYRTSQIISQICNLPIPPNKAIVGSNAFAHSSGIHQDGVLKNRKNYEIMEPSSIGLKEVKLNLTSRSGRAAVKHYMTEMGYRECDYKIDELYASFLKLADKKGQVFDYDLEALAFINQQQEELEHFSLSFFSVQSISNGLSTASVKLLCGKKTFIESATTSNGPIDAIYQALNRITHFPIILQKYQLIAKGKGKDALGQVDILVEHKKRKFHGMGLATDIIESSAQAMVNVLNNIWKANQVNEKLKKLKKINN

SEQ ID NO: 107970 - DNA, 1536 bp, Campylobacter jejuni
  CDS (1)..(1536): transl_table=11
atgaaagataataaaatcataatctttgataccactttgcgagatggagaacaagctttaggcagttctttgggtatcaatcaaaaattacaaatcgctttagcgcttgaaaatttaggcgtagatgttatagaagcaggttttccggtatcttcacaaggggattttaaagcggtgcaaaagatcgcttctaaggttaaaaactcaactatttgtgcactttctagagcattggataaagatatagatatggcttatgaagctttaaaagtggcaaagcattttagaattcatacttttatagccacttcgactttgcatatgcaagataaattaaaaaaagattttgatgaaattttgtctatggcaaaaagagcgattataagagcaagatcttatactgatgatgtagaattttcatgcgaagatgcaggaagaacgcctatagataatctttgttttatggtggaaaatgcgataaaagcaggtgctaaaactataaatatcccagataccgtaggctatactctgccaagcgaatttgctaatatcatcaaaattttatttaacaaagtgccaaatatagacaaagctattatttctgtgcattgtcacaatgacttaggtatggcaacgggcaatagtttaagtgctattttacaaggtgcaagacagatagagtgcactataaatggacttggcgaaagggcgggcaattgtgctttagaagaagtggttatggcgataaaaactagaaaagattatttaaaaggtttttatactgatattaaatgtgaaaatatctttaaaacttcaaaattggtttcagctatcactaatgaaagcataccttcacataaagctatagtgggtagcaatgcgttttctcatagttcaggcattcatcaagatggagtgcttaaaaataggcaaacttacgagatcataagccctagtgccataggaattcatgaaaatcgtatgttaatgacagcaagaagtggaagggctatgataaaaacttgccttgaaaatttaggctatgatgaaaatacttataatttagatgatgtttatgagcgttttttacgccttgcggataaaaagggtcaagtatatgattatgatttagaagctttgatgtttttaagttatgagagtgaagaagaaaatgaatttgtgcttgaaaaattaagtgtgatcagtggaaatatcccaactgcttgtgtttgtatgcgtatcaaagaagagctaaaaactgaagcttgcacaggaaatggtcctgttgaagcagtttttaactgcattgctaggataacgaatttaaagcctgcgctaaaagcttatagtatcaatgcaaaaagttcaggagtagatgctcaagggcaagtggatgtagatttggaatttaaagggagaaaattccatggaaaaggactttcaacagatgtgatagaagcttcagcacaagcttttgtgagtgcttacaatgcgatttatcgctctttaaaagtagaagaaaggaaaatggcatga

SEQ ID NO: 107971 - protein, 511 aa, Campylobacter jejuni
MKDNKIIIFDTTLRDGEQALGSSLGINQKLQIALALENLGVDVIEAGFPVSSQGDFKAVQKIASKVKNSTICALSRALDKDIDMAYEALKVAKHFRIHTFIATSTLHMQDKLKKDFDEILSMAKRAIIRARSYTDDVEFSCEDAGRTPIDNLCFMVENAIKAGAKTINIPDTVGYTLPSEFANIIKILFNKVPNIDKAIISVHCHNDLGMATGNSLSAILQGARQIECTINGLGERAGNCALEEVVMAIKTRKDYLKGFYTDIKCENIFKTSKLVSAITNESIPSHKAIVGSNAFSHSSGIHQDGVLKNRQTYEIISPSAIGIHENRMLMTARSGRAMIKTCLENLGYDENTYNLDDVYERFLRLADKKGQVYDYDLEALMFLSYESEEENEFVLEKLSVISGNIPTACVCMRIKEELKTEACTGNGPVEAVFNCIARITNLKPALKAYSINAKSSGVDAQGQVDVDLEFKGRKFHGKGLSTDVIEASAQAFVSAYNAIYRSLKVEERKMA

SEQ ID NO: 107972 - DNA, 1575 bp, Caulobacter crescentus
  CDS (1)..(1575): transl_table=11
atgacctccgtacccgctggcgctatcagcaagcgcgacaacgtcgtcgtatttgacaccaccatgcgcgacggcgagcagtcgcccggcgcctccatgtcgctggaagagaagctggaactggccaagatcctcgaggagatgggggtcgacgtcatcgaggccggcttcccgatcgcctcgaacggcgacttcgaagctgtccgccagatcgccgaactgatcaccgagagcaccgtctgcggcctggcgcgcgctgccgccggcgatatcgaccgctgcgccgaggccgttcgtcgcgccaagcgcggccgcatccacaccttcatctccaccagccccgtacacatgaagtacaagctgcagatggagccggacgcggttctggaagcgatcacccgttcggtcagccacgctcgtaacctggtcggtgacgtcgagtggtcggccgaggacgccacccgcaccgagcgcgacttccttaagcgctgcgtcgaggcggccatcaaggccggcgccaccacgatcaacctgcccgacaccgtcggctactcgtatccgtcggagtacggcgagctgttccgtgacgtgatcaccagcgttccgggcgccgacaaggcgatcttctcggcccactgccacaacgatctgggcctggctgtggccaactcgatcgccgccatcgaaggcggggcgcgtcaggtcgaggtcgccatcaacggcatcggcgagcgcgccggcaacgccgcgctggaagagatcgtcatggccctgcgcgtgcgcggcgaccatctgccgtacggcaccagcgttgatcccgtgcacatcacccgcgccagccgctacgtctcggccatcaccggcttcccggtgcagttcaacaaggcgatcgtcggcaagaacgccttcgcgcatgagagcggcatccaccaggacggcatgctgaagaacgccgagacctacgagatcatgaagccggaggacgtggggcagggcgccacgaacctagtcatgggcaagcactcgggccgtcacgccttccgcgagaagctgaaggctctgggttacgagctgggccagaacgccctgaacgacgcctttggccgcttcaaggaactggccgacaagaagaagcacgtcttcgacgacgacatcgtcgccctggtcgacgacgctctggcccgtggctcggagaagatccgcgtctcgcgcctgcgcgtggtggccggcaccgacggccagtcggccgagctgaccctggatatcgacggcgtcgccagcacggccgaggcgacgggcgacggcccggtcgacgcagtgttcaacgccatccacaagatcgtgccgcacagcgccgccctgcgcctcttccaggtgcatgcggtgaccgaaggcacggacgcccaggcccaggtctcggtgcgtctggaggaggacggccgcatcgccaccggcgcggccgccgacaccgacaccctgaccgcctcggccaaggcctatgtcaacgcgctgaacaacctcttcgcccgcaaggagaagagccggcctgaagcggcgatcgccagcgggttctaa

SEQ ID NO: 107973 - protein, 524 aa, Caulobacter crescentus
MTSVPAGAISKRDNVVVFDTTMRDGEQSPGASMSLEEKLELAKILEEMGVDVIEAGFPIASNGDFEAVRQIAELITESTVCGLARAAAGDIDRCAEAVRRAKRGRIHTFISTSPVHMKYKLQMEPDAVLEAITRSVSHARNLVGDVEWSAEDATRTERDFLKRCVEAAIKAGATTINLPDTVGYSYPSEYGELFRDVITSVPGADKAIFSAHCHNDLGLAVANSIAAIEGGARQVEVAINGIGERAGNAALEEIVMALRVRGDHLPYGTSVDPVHITRASRYVSAITGFPVQFNKAIVGKNAFAHESGIHQDGMLKNAETYEIMKPEDVGQGATNLVMGKHSGRHAFREKLKALGYELGQNALNDAFGRFKELADKKKHVFDDDIVALVDDALARGSEKIRVSRLRVVAGTDGQSAELTLDIDGVASTAEATGDGPVDAVFNAIHKIVPHSAALRLFQVHAVTEGTDAQAQVSVRLEEDGRIATGAAADTDTLTASAKAYVNALNNLFARKEKSRPEAAIASGF

SEQ ID NO: 107974 - DNA, 1677 bp, Clostridium acetobutylicum
  CDS (1)..(1677): transl_table=11
atgttgtataataaatatgtcaaatatcctaaagtaaaattggacaatcgtgaatggcctgataagcaaatagaaaaggcacctatatggtgcagtgttgatttaagagatggaaatcaagcattaccaaaacctatgaatgtagatgaaaaaataaagatgtttaaaatgcttgtagatataggttttaaggagatagagattggatttccttctgcttcagaaacagaatacgaattcacaagaaagcttatagaagataaattaatccctgaagatgttactatacaagttttaacacaagctagagaacatttagttaaaaaaacatttgaggcattaaagggagttaaaacagctattgtccatgtgtataattcaacatctgagcttcaaagaagagttgtgttcaaaaaagataaggatgaagttaaaagtcttgccataaaaggtgcacaaatggtaaaaaaatatagcgaatatactgaatatagtgaaagtaaatttgtttttgaatattcgcccgaaagctttactggaaccgaacttgattatgctcttgaggtgtgtgaagctgtacttaatgtgtggaaacccagtaaagagaataaagctattataaatttaccttcaactgtagaaatggcaacccctaatatatatgcagatcaaattgaatggttttgtaaaaaattattaaatagggagtccgtgatacttagcctgcatacgcataacgataggggaacttgtactgcttccagtgaacttgggattcttgcaggagcggatagagtggaaggaacactttttggaaatggagaaaggactggcaacctcgatataatgaatatggcattgaatatgtattcacaaggtgtagatcctgaacttgaattttctaatttaaatgatatagttgaagcctatgaagaatgtactaagatggttgtgcatgaacgccacccatatgcaggtaagcttgtgtttacggctttctcaggttcccatcaagatgctatacgtaagggattaaagtcattaaaggaaggtaaaaacaaacattgggaggttccatatcttgcagtagatccccacgatttgggaagagaatacgaagaaattatacgtataaatagtcaatcaggaaaaggtgggacagcgtatataatggaaagtgattttggctttatacttccaaaggcaatgcaccctgagtttggaaaggtaataaagaaaaaatctgatgagcttgattgtgagctttcaccagagcaaattttcaagttttttaaggaagagtatttagaaaacagaagcccatactacttgaaaaattacaagatacattcaatacaaaatatagaggaagagaaaaatactgtagatatcgaagctgtaatatcggtaaatggtaaggatacaagtatagaaggggtaggaaatggacctgtggatgctttctttaatgcaatgaataataaaaagtataatggttgtaaatttatatcatatgatgagcatgcgttaaatattgggtctcattcaaaagctgttgcatatgttcaaattgaaagtcaagataagaaatattttggagtcggaatatccgataatatagatacggcatctattaatgccattgtaagtgctttgaatagaagtaaattaaaataa

SEQ ID NO: 107975 - protein, 558 aa, Clostridium acetobutylicum
MLYNKYVKYPKVKLDNREWPDKQIEKAPIWCSVDLRDGNQALPKPMNVDEKIKMFKMLVDIGFKEIEIGFPSASETEYEFTRKLIEDKLIPEDVTIQVLTQAREHLVKKTFEALKGVKTAIVHVYNSTSELQRRVVFKKDKDEVKSLAIKGAQMVKKYSEYTEYSESKFVFEYSPESFTGTELDYALEVCEAVLNVWKPSKENKAIINLPSTVEMATPNIYADQIEWFCKKLLNRESVILSLHTHNDRGTCTASSELGILAGADRVEGTLFGNGERTGNLDIMNMALNMYSQGVDPELEFSNLNDIVEAYEECTKMVVHERHPYAGKLVFTAFSGSHQDAIRKGLKSLKEGKNKHWEVPYLAVDPHDLGREYEEIIRINSQSGKGGTAYIMESDFGFILPKAMHPEFGKVIKKKSDELDCELSPEQIFKFFKEEYLENRSPYYLKNYKIHSIQNIEEEKNTVDIEAVISVNGKDTSIEGVGNGPVDAFFNAMNNKKYNGCKFISYDEHALNIGSHSKAVAYVQIESQDKKYFGVGISDNIDTASINAIVSALNRSKLK

SEQ ID NO: 107976 - DNA, 1569 bp, Deinococcus radiodurans
  CDS (1)..(1569): transl_table=11
gtggccatgacccagaccgagaaccagaccgcaccccagcagcacatccgcatttttgacaccaccctgcgggacggcgagcagtcgccgggcgtggccctgaaccacgcgcagaagctcgaaatcgcccacacgctcgcccgcatgggcgtggacgtgatcgaggcgggctttcccatcgcctcgccgggtgatttggaaggcgtctcgcgcatcgcccgcgaggtccgggggcccgtcatcacggcgctggcgcgggcgaaccgggccgacatcgaagccgccgccaagggcgtggaggccgccgaaaagtcgcgcatccacaccttcatcgccaccagccccattcacatgcagaagaaactgaatctggaacccgacgcggtcatcgagcgggcggtggaagcggtgcgcctcgcccggcagtacgtggacgacgtggaattcagcgccgaggacgccacccgcagcgagtgggacttcctgagccgcattttcaaggcggcagttgaagcgggtgccaccaccatcaacgtgcccgacacggtgggctataccacgcccgaggaaatgcgaaaactgttcgcgtacctgaaggccaaactgcccgcgcacgtcatcctgtcgagccactgtcacgacgacctcggcatggcggtcgccaactccatcgcggcggcggaggggggcgcccggcaaatcgaatgcaccatcaacggcatcggcgagcgggccgggaatgccagcctggaagaaatcgtgatggctttccacacccggcgcgacgtgtacggctatgaaacgggcatccgcacccgcgagctctaccgcgcctcccgcctggtcagtcgcctgagcggaatgccggtgcagccgaacaaggccatcgtgggcgacaacgctttcgcgcacgagtcgggcattcatcaagacggcgtgatcaaggcgcgcgaaacctacgagatcatgaatgccgaactcgtgggccgcgaggccgccgtgctcgtcatgggcaagcactcgggccgcgccgctttccgcaaggcgctgaccgacctcggctacggcgacattcctgacgacaaggtgcagcacctgttcgggcgcttcaaggatctcgccgaccgcaagggccagatctacgccgaggacctccgcgcgctggtggacgcccgcagcgacgtgccgcagaccttcagcctggaagggttccagatcacttcgggcatgaatatgatgccggtggccttcgtgcgcctgcacacgcccgacggtccggtggacgccaccgcgcacggcgacggcccggtggaagccgcgtttcaggcgatcagcaagatcaccggcatcagccccaccctggagagctaccgcattcagtcggtcacgcgcggcgacgacgcgctcggcgaagtcagcattcacgtccgacacggcgaaacgcagctcaacggcaccggcgtcgccaccgacatcgtggaagcgtcggcgcgcgcctggattcgcgtgatgaacatgatcgtggccggcatgggcaagaacaaggcgatcacgcagatgacgccctga

SEQ ID NO: 107977 - protein, 522 aa, Deinococcus radiodurans
MAMTQTENQTAPQQHIRIFDTTLRDGEQSPGVALNHAQKLEIAHTLARMGVDVIEAGFPIASPGDLEGVSRIAREVRGPVITALARANRADIEAAAKGVEAAEKSRIHTFIATSPIHMQKKLNLEPDAVIERAVEAVRLARQYVDDVEFSAEDATRSEWDFLSRIFKAAVEAGATTINVPDTVGYTTPEEMRKLFAYLKAKLPAHVILSSHCHDDLGMAVANSIAAAEGGARQIECTINGIGERAGNASLEEIVMAFHTRRDVYGYETGIRTRELYRASRLVSRLSGMPVQPNKAIVGDNAFAHESGIHQDGVIKARETYEIMNAELVGREAAVLVMGKHSGRAAFRKALTDLGYGDIPDDKVQHLFGRFKDLADRKGQIYAEDLRALVDARSDVPQTFSLEGFQITSGMNMMPVAFVRLHTPDGPVDATAHGDGPVEAAFQAISKITGISPTLESYRIQSVTRGDDALGEVSIHVRHGETQLNGTGVATDIVEASARAWIRVMNMIVAGMGKNKAITQMTP

SEQ ID NO: 107978 - DNA, 1572 bp, Escherichia coli O157; identical to SEQ ID NO: 13302
  CDS (1)..(1572): transl_table=11

SEQ ID NO: 107979 - protein, 523 aa, Escherichia coli O157; identical to SEQ ID NO: 13303

SEQ ID NO: 107980 - DNA, 1572 bp, Escherichia coli; identical to SEQ ID NO: 13304
  CDS (1)..(1572): transl_table=11

SEQ ID NO: 107981 - protein, 523 aa, Escherichia coli; identical to SEQ ID NO: 13305

SEQ ID NO: 107982 - DNA, 1617 bp, Gloeobacter violaceus; identical to SEQ ID NO: 13306
  CDS (1)..(1617): transl_table=11

SEQ ID NO: 107983 - protein, 538 aa, Gloeobacter violaceus; identical to SEQ ID NO: 13307

SEQ ID NO: 107984 - DNA, 1539 bp, Listeria monocytogenes serotype 4b
  CDS (1)..(1539): transl_table=11
atgaagaaaatccagttttttgatactacacttagagatggcgaacaaacccctggagttaattttgacgtaaaggagaaaatccagattgccttacaactcgaaaaacttggaattgatgtgattgaagccggctttccgatttcttctcctggagattttgaatgcgttaaggcgattgcaaaagcgattaaacattgttctgtaacagggctagcgcgctgtgttgaaggagatattgaccgtgccgaggaagcgctaaaagacgctgtttctccgcaaatacatatcttccttgcaacgagcgatgtgcatatggaatacaaattaaaaatgagtcgggcggaagttcttgcttccattaaacaccacattagttatgcgagacaaaaatttgatgttgtacagttttcaccagaagatgcaactcggtcagatcgtgcttttctgattgaagcagttcaaacagcgattgatgcaggagcaactgtcatcaacattccagatacggtcggatatacaaaccccaccgaatttgggcaattattccaagatttgcgccgcgaaataaagcaatttgatgatattattttcgcttctcattgccatgatgaccttggtatggcgacagcaaacgcacttgctgcaatcgaaaatggcgcaagacgcgtcgaaggtacgattaatgggattggtgagcgtgctgggaatacggcactggaagaagttgcggtagcgcttcatattcgcaaagatttttatcaagctgaaacaaacattgtattgaatcaatttaaaaattcaagtgatttgattagccgcttgtctggtatgcctgttccacgtaacaaagctgtaattggtggcaatgcttacgcgcatgaatctggtattcatcaagatggtgtcctaaaaaatcctgatacgtatgaaatcatcacccctgctcttgtcggcgtggataaaaactctcttccacttggcaaactttctggcaaacatgccttcaatacgcgcatggaagaaatgggctacacactaaccgaacaagaacaaaaagatgcctttaaacgtttcaaacaattagcagatgcgaaaaaagaagtaacagaagaagacttgcacgcgttaattctcggacaatcttccgaatcagccgatgatttcgaactaaaacatttgcaagttcaatatgttactggcggcgtccaaggtgcgattgttcgcattgaagaacgtgatggcgctctagtagaagacgcagcaactggttcaggtagcattgaagcgatttataatacgattaaccgtcttatgaaacaagatattgaattaaccgattatcgtatccaagcaattacagccggtcaagatgcccaagcagaagtccatgtcgtcattaaaaatgacaaaggcgctgtgttccatggtatcggtattgattttgacgttttaactgctagtgctaaagcttatttgcaagcatcaggcaaaagcaaaaccgccagtaagcaagctgatttcgaggaggtaaaataa

SEQ ID NO: 107985 - protein, 512 aa, Listeria monocytogenes serotype 4b
MKKIQFFDTTLRDGEQTPGVNFDVKEKIQIALQLEKLGIDVIEAGFPISSPGDFECVKAIAKAIKHCSVTGLARCVEGDIDRAEEALKDAVSPQIHIFLATSDVHMEYKLKMSRAEVLASIKHHISYARQKFDVVQFSPEDATRSDRAFLIEAVQTAIDAGATVINIPDTVGYTNPTEFGQLFQDLRREIKQFDDIIFASHCHDDLGMATANALAAIENGARRVEGTINGIGERAGNTALEEVAVALHIRKDFYQAETNIVLNQFKNSSDLISRLSGMPVPRNKAVIGGNAYAHESGIHQDGVLKNPDTYEIITPALVGVDKNSLPLGKLSGKHAFNTRMEEMGYTLTEQEQKDAFKRFKQLADAKKEVTEEDLHALILGQSSESADDFELKHLQVQYVTGGVQGAIVRIEERDGALVEDAATGSGSIEAIYNTINRLMKQDIELTDYRIQAITAGQDAQAEVHVVIKNDKGAVFHGIGIDFDVLTASAKAYLQASGKSKTASKQADFEEVK

SEQ ID NO: 107986 - DNA, 1539 bp, Listeria monocytogenes
  CDS (1)..(1539): transl_table=11
atgaagaaaatccagttttttgatactacacttagagatggcgaacaaacccctggagttaattttgacgtaaaggagaaaatccagattgccttacaactcgaaaaacttggaattgatgtgattgaagccggctttccgatttcttctcctggagattttgaatgcgtcaaggccattgcaaaagcgattaaacattgttctgtaacagggctagcgcgctgtgttgaaggagatatcgaccgcgcggaagaagcgcttaaagacgctgtttctccgcaaatacatatcttcttagcaacgagcgatgtgcacatggaatacaaattaaaaatgagtcgggcggaagttcttgcttccattaaacaccacattagttatgcaagacaaaaattcgaagtagtacagttttcaccagaagatgcaactcggtcagatcgtgcttttctaattgaggccgttcaaacagcaattgatgccggggcaactgtcatcaacattccggacacggtcggatatactaacccaaccgaattcggacagctattccaagatttgcgtagggaaattaaacaatttgatgatattactttcgcttcccattgtcatgatgaccttggtatggcgactgcaaatgcacttgctgcaatcgaaaatggcgcaagacgcgtcgaaggtacaattaatgggattggcgaacgagctgggaatacggctcttgaagaagttgctgtcgcgctgcatattcgcaaagatttttatcaagcagaaacaaatatcgttttgaaccaatttaaaaattctagtgatctgattagtcgtttgtcgggtatgcctgttccgcgtaataaagccgtaattggtggtaatgcttacgcgcacgagtccggtattcatcaagatggcgtgctgaaaaacccagatacgtatgaaatcatcacccctgcccttgtcggcgtggataaaaactcgcttcctcttggtaaactttctggcaaacatgccttcaatacgcgcatggaagaaatgggctacacactaaccgaacaagaacaaaaagatgcctttaaacgtttcaaacaactagcagatgcgaaaaaagaagtaactgaagaagacttgcacgcgttaattctcggccaatcttccgagtcagccgatgatttcgaactaaaacatttgcaagttcaatatgttactggcggcgtccaaggtgcgattgttcgcattgaagaacgtgatggcgctctagtagaagatgcagcaactggttcaggtagcattgaagcgatttacaacacaattaatcgcctaatgaaacaagacatcgaattaaccgattatcgtatccaagcaattacagccggccaagatgcccaagcagaagtccatgtcgtcattaaaaatgacaaaggcgctgagttccatggtatcggtattgattttgacgttttaaccgctagtgctaaagcttatttgcaagcatcaggcaaaagcaaaaccgccagtaagcaagctgatttcgaggaggtaaaataa

SEQ ID NO: 107987 - protein, 512 aa, Listeria monocytogenes
MKKIQFFDTTLRDGEQTPGVNFDVKEKIQIALQLEKLGIDVIEAGFPISSPGDFECVKAIAKAIKHCSVTGLARCVEGDIDRAEEALKDAVSPQIHIFLATSDVHMEYKLKMSRAEVLASIKHHISYARQKFEVVQFSPEDATRSDRAFLIEAVQTAIDAGATVINIPDTVGYTNPTEFGQLFQDLRREIKQFDDITFASHCHDDLGMATANALAAIENGARRVEGTINGIGERAGNTALEEVAVALHIRKDFYQAETNIVLNQFKNSSDLISRLSGMPVPRNKAVIGGNAYAHESGIHQDGVLKNPDTYEIITPALVGVDKNSLPLGKLSGKHAFNTRMEEMGYTLTEQEQKDAFKRFKQLADAKKEVTEEDLHALILGQSSESADDFELKHLQVQYVTGGVQGAIVRIEERDGALVEDAATGSGSIEAIYNTINRLMKQDIELTDYRIQAITAGQDAQAEVHVVIKNDKGAEFHGIGIDFDVLTASAKAYLQASGKSKTASKQADFEEVK

SEQ ID NO: 107988 - DNA, 1602 bp, Microcystis aeruginosa; identical to SEQ ID NO: 13308
  CDS (1)..(1602): transl_table=11

SEQ ID NO: 107989 - protein, 533 aa, Microcystis aeruginosa; identical to SEQ ID NO: 13309

SEQ ID NO: 107990 - DNA, 1533 bp, Nitrosomonas europaea
  CDS (1)..(1533): transl_table=11
atgaaagagcatttggttatttttgatacgactttgcgtgacggggaacagagtcccggcgcatccatgaccatggaagaaaaggtacgcatcgccaggcagttggagcgtatgggtgtggatgtgatagaagcgggtttcccggctgcttcgagaggtgattttgaagcggtccgggcagtggcagaggcagtaagcaacagtacggtgtgtggtcttgcccgtgcgatggaggccgacatcgatcgtaccggggaagctttgcaggtcaatcagaatgtgcgtattcataccttcatcgcgacatctccgatccatatgaagaacaagctgcgcatgtcgcccgatcaggtcatcgatcaggcgatcaaggcagtaaagtgggcacgtcagtacactgataacgtcgaattttcccctgaagatgccgggcgatccgagatcgattttctgtgccgagtgctggaagcagtgatcgatgcaggtgcacggacactgaatattccggatacggtgggatataccatgccggatcagtttggtggtctgatccgtacgctgcgagagcgcattccgaattctgacaaggctatattctcggttcactgccataacgatctcggtttggcagtggctaactcactgtccgcggtcatgaatggtgcacgccaggtggaatgtaccatcaatggtctgggtgagcgggccggtaatgctgcacttgaagaaatcgtgatggccgtgcgtacacggcaggattattttccatgcgatacacgtatcgatacaacgcagatcgtacccgccagcaagctggtttcagggattaccgggtttccggtgcagcccaacaaggcaattgtcggtgccaatgcctttgcccatgaatcaggtattcatcaggatggagtactcaagcaccgtgaaacctatgaaatcatgcgtgcagaagatgtgggctggggagcaaacaaattgctgctgggtaaacattctggccggaatgcgtttcgcagtcgtttgaaagaactgggaatcgggttggaatcagaagagaaactgaatgccatattcttgcgcttcaaggatcttgcagacaagaagcatgaaatcttcgatgaggatctgcatgcgctggtctcggatgaggcacagattcccgaggagcactatcgcctgctttcactgcatgcagtcagtgaaaccggagaaataccctcggcccaggtcgtcattgccgtgggaggcagtgaaaaacaggccgtatccgaagggagtggcccggtagatgcaacatttcgcgcgatcgagaaaatactggacagtaaagtagagctgcaattgttctccgtgaacaatatcaccagcgggacggatgcacagggtgaagtaactgttcgcctgcagaaagccgggcggatcgtcaatggtcatggagcagataccgatatcattgcggcttctgccaaagcctatctgagtgcctgcaataaattgcactccagtctggaacgaacccatccccagatttag

SEQ ID NO: 107991 - protein, 510 aa, Nitrosomonas europaea
MKEHLVIFDTTLRDGEQSPGASMTMEEKVRIARQLERMGVDVIEAGFPAASRGDFEAVRAVAEAVSNSTVCGLARAMEADIDRTGEALQVNQNVRIHTFIATSPIHMKNKLRMSPDQVIDQAIKAVKWARQYTDNVEFSPEDAGRSEIDFLCRVLEAVIDAGARTLNIPDTVGYTMPDQFGGLIRTLRERIPNSDKAIFSVHCHNDLGLAVANSLSAVMNGARQVECTINGLGERAGNAALEEIVMAVRTRQDYFPCDTRIDTTQIVPASKLVSGITGFPVQPNKAIVGANAFAHESGIHQDGVLKHRETYEIMRAEDVGWGANKLLLGKHSGRNAFRSRLKELGIGLESEEKLNAIFLRFKDLADKKHEIFDEDLHALVSDEAQIPEEHYRLLSLHAVSETGEIPSAQVVIAVGGSEKQAVSEGSGPVDATFRAIEKILDSKVELQLFSVNNITSGTDAQGEVTVRLQKAGRIVNGHGADTDIIAASAKAYLSACNKLHSSLERTHPQI

SEQ ID NO: 107992 - DNA, 1548 bp, Oceanobacillus iheyensis
  CDS (1)..(1548): transl_table=11
atgtcccgaattaagattttcgacacaacactacgagatggagagcaatctccaggagttaacttgaataaagcagaaaagcttgagatagcaaaacaacttgaaaagtatggtgtggaccggatggaggcagggtttcctgcttcctctaaaggggattttgaatcggtgaaacaaattgctgaaacgatcaagtcttcctccgtcattgcgcttgctcgtgcggtgaaatctgatattgatattgcttatgaagcgttaaaaggagcagagaaacctgcgattcatattttcttagcaacatctccaattcatatgacgtataaattgaagaaatcaccagaacaagtgattgaaacagccgttaacatggtcacttatgcaaaagaacgttttgatgaaattgaatggtctgcagaggatgcaactcgttcggattggaatttcttagcgcaaattattgaaaaggttattgaagctggggcaaccgtaataaatcttccagacacggtgggttatacaactcctgaagaatatgggaaattatttcgatttatcaaagaaacagttccaaatattaatcaagttgctttatcttgtcattgtcacaacgaccttggaatggcagtagctaattcaatagcagcagtggaaaatggggctacacaagtagagggaacgatcaatggaatcggtgagagagcaggaaatgcggctttagaagaagtagctgtcgcgttaaaaattcgttctgattattatccatttgagacaggattaattctgaaagagacgaagcgtacaagtgatttggtagcaaagctaactggtatgtatgtgcaagcaaataaggcggttattggaagaaatgcattttcacacgaatcgggtatccaccaagatggtgtcttaaaaaataccgagacatatgagattattactcctgaaatggttggtgtatcctctaacacactatttcttggaaaacattctggaaggcatgcgtttaaagataaattaaaagagtttggtgttgagttatcagaagaagagcttaaaacagcatttgaacaatttaaattattaacagaccaaaagaaagaagtaacggacgatgatttatatactattttaatggatattaagacagattcaactgtagttgataaatacaaattaattcaatttggagtttcttatgatacagcagccactccaaaagcaaatgtcatcttagaatctccaaatggttcactaatcgaggcaacgcaacaaggaaatggtagtgttgaggcgttatataaaacgataaattacttgattgcagaaaatataacactagtagattatcaaattaattcggttggtggggggaaagacgccctggcagaatcccatgttcaaattattattaatggagaaacaatcaatggtagagggtctgctcaggatgtgcttcaagcgtctgcagtagcattcattcaggcagtaaatcgttattacgttcaaaagaaagcaaatctaactcgacttgtctatgagtcataa

SEQ ID NO: 107993 - protein, 515 aa, Oceanobacillus iheyensis
MSRIKIFDTTLRDGEQSPGVNLNKAEKLEIAKQLEKYGVDRMEAGFPASSKGDFESVKQIAETIKSSSVIALARAVKSDIDIAYEALKGAEKPAIHIFLATSPIHMTYKLKKSPEQVIETAVNMVTYAKERFDEIEWSAEDATRSDWNFLAQIIEKVIEAGATVINLPDTVGYTTPEEYGKLFRFIKETVPNINQVALSCHCHNDLGMAVANSIAAVENGATQVEGTINGIGERAGNAALEEVAVALKIRSDYYPFETGLILKETKRTSDLVAKLTGMYVQANKAVIGRNAFSHESGIHQDGVLKNTETYEIITPEMVGVSSNTLFLGKHSGRHAFKDKLKEFGVELSEEELKTAFEQFKLLTDQKKEVTDDDLYTILMDIKTDSTVVDKYKLIQFGVSYDTAATPKANVILESPNGSLIEATQQGNGSVEALYKTINYLIAENITLVDYQINSVGGGKDALAESHVQIIINGETINGRGSAQDVLQASAVAFIQAVNRYYVQKKANLTRLVYES

SEQ ID NO: 107994 - DNA, 1557 bp, Pasteurella multocida
  CDS (1)..(1557): transl_table=11
atggcagacaatatcattatttttgacaccacattacgtgatggcgaacaggcattaaaagccagcttaacggtaaaagaaaaattacaaattgccttcgccttggaacgtttaggcgtggatgtcatggaagtggggttccccatttcgtctgctggagattttgaatcggtgcaaaccattgcccgccatattaagcatagccgcgtttgtgctttatctcgcgctgtggataaagatattgatgctgcagcagaagcgttgaaagtagcggaggcattccgtattcacacgtttattgccacgtctgctttacatgtggaagccaaattacgtcgtacctttgaagatgtggtcgatatggcgatcaatgccgtgaaacgcgcgagaaactacaccgatgatgtggagttttcttgtgaagatgcagggcgtactggtgtggataatatctgtcgtattgtagaagccgcaattaaagcaggtgccacgactgtcaatattcccgatactgtcggctactgtttgccatatcaatacggcgatattattgcgaatgtgatgaatcgtgtaccaaacattgataaagcgattatttctgtgcattgccacaatgatttagggatggcaactgccaattcattaacagcggttcaaaatggcgcacgacaaattgaatgtaccattaacgggatcggtgaacgtgccggtaataccgcattagaagaagtagtgatggcaattaaaacgcgccaagatatgttcaatggtttagatactcgcattaacacacaagaaattcaccgtgtcagccaaatggtgagccaactttgtaatatgccaatccaaccgaataaagcgattgtgggatccaatgcctttgcccattcttcaggtatccaccaagatggtatggtaaaacataaaaatacttatgaaattatgtcgcctgaaagcattggcttgaaaaaagaaaaattgaacttaaccgcgcgttcaggtcgtgctgcggtgaaaaaccatatgagcgagatgggctaccaagaaagtgattacgatttagataaactctatgaagcattcttgaaattggcggacaaaaaagggcaagtgttcgactatgatttagaagcgcttgcgtttattgatatgcaacaaggcgatgaagatcgcttaaccttagacgtgatcacttcacaatgtatcagccacttacccgcatctgcctttgtgcaagtggaattagacggcaaaaaaatgagccaagtgtctaacggtggtaatggacctgttgatgcggtttacaatgcgattttagcgatcaccggcttagagatgaaaatgcttaactacaacttgacggctaaaggtgaaggtgccgaagctttggggcaagtagatattgtggtggaacatgaaggcagacgtttccacggcgtgggacttgcgactgacattgtggaatcctctgccagagcattgattcatgcgattaatgccatttaccgttcgcaaaaagtggcagatttgaaattacataaaattgctggcgtgtaa

SEQ ID NO: 107995 - protein, 518 aa, Pasteurella multocida
MADNIIIFDTTLRDGEQALKASLTVKEKLQIAFALERLGVDVMEVGFPISSAGDFESVQTIARHIKHSRVCALSRAVDKDIDAAAEALKVAEAFRIHTFIATSALHVEAKLRRTFEDVVDMAINAVKRARNYTDDVEFSCEDAGRTGVDNICRIVEAAIKAGATTVNIPDTVGYCLPYQYGDIIANVMNRVPNIDKAIISVHCHNDLGMATANSLTAVQNGARQIECTINGIGERAGNTALEEVVMAIKTRQDMFNGLDTRINTQEIHRVSQMVSQLCNMPIQPNKAIVGSNAFAHSSGIHQDGMVKHKNTYEIMSPESIGLKKEKLNLTARSGRAAVKNHMSEMGYQESDYDLDKLYEAFLKLADKKGQVFDYDLEALAFIDMQQGDEDRLTLDVITSQCISHLPASAFVQVELDGKKMSQVSNGGNGPVDAVYNAILAITGLEMKMLNYNLTAKGEGAEALGQVDIVVEHEGRRFHGVGLATDIVESSARALIHAINAIYRSQKVADLKLHKIAGV

SEQ ID NO: 107996 - DNA, 1563 bp, Photorhabdus luminescens subsp
  CDS (1)..(1563): transl_table=11
atgaaccagcaagttattatcttcgacaccacgttacgtgatggagaacaagcattacaggccagcttatgtgtgaacgaaaaactccagattgccttggccttggagagaatgggtgttgatatcatggaagtcggttttccagtttcctctcctggtgattttgaatctgtacagacgatcgctaagcagataaaaaacagccgtgtttgcgccttagcccgttgtgtagaaaaagacattgacgtggcagcagaagcattaaaagttgcagacgcttttcgaatccacgtttttttagccacttccgatttacatattgaatccaagctgaaaaaaacattcgaaaatgtcatggaaatggcaacgcaatcaatcaaacgagcacgtcgttacactgatgatgtcgaattctcctgtgaagatgcgggccgtacacctattgataatctgtgtcggatcgttgaaaacgctatcaaagcaggcgcaacaacgatcaatatcccagatactgtcggttacaccacgccatatcaatttggcggcatcatcactaacttgatcgaacgcgttcctaatattgataaagcgataatatccgtccattgccacgatgatttggggatgtctgtcgccaactctatcacagcagtacaatccggtgcccgtcagatagaagggacgataaacggtctgggtgaacgtgccggtaactgttcactggaagaagtcattatggcgattaaggtccgtcagcaaatgttaggcgtttatactaatatcaaccatcaggaaatttaccgcaccagtcagttggtcagtcaattatgcaatatgccgatccccgcgaataaagcaattgttggtagcaatgcattttcccactcatccgggattcatcaagacggggtactgaaaaatcgtgaaacttacgaaattatgacaccagagtccatcggcctgaaagaaattcaattgaacctgacttcccgttctggtcgcgccgcagtgaaacaccgtatggaagagatgggatatcaggataaagattacgatctgggtagcttatacgaagcctttttacgcctggcagataaaaaaggccaggtatttgactatgatttggaagccttagcgttcatcaatttgcaacaacaagaacccgaatttttccatctggacaactttaatatccaatctggctccaacgtgatggcaacagccgctgtatgtttagtgtgtggtaaagagttgaaatcagaagcggccacaggtaacggcccggtagatgctgtctatcaggcaatcagtcgaataactgaatacccaattgaactggtttcttatcagttatcaggtaaaggccaaggaaaaaatgcattgggtcaggtcaatatcgttgtcgaatgctttggacgtcgcttccacggcatgggattagaaaccgatattgttgaatcctctgccaaagcaatggttcatgctctgaactgcgtttggcgtacagagcaagttaagaaagagaaacaacgcatacagcaaaatacaaaggaaatggtgtaa

SEQ ID NO: 107997 - protein, 520 aa, Photorhabdus luminescens subsp
MNQQVIIFDTTLRDGEQALQASLCVNEKLQIALALERMGVDIMEVGFPVSSPGDFESVQTIAKQIKNSRVCALARCVEKDIDVAAEALKVADAFRIHVFLATSDLHIESKLKKTFENVMEMATQSIKRARRYTDDVEFSCEDAGRTPIDNLCRIVENAIKAGATTINIPDTVGYTTPYQFGGIITNLIERVPNIDKAIISVHCHDDLGMSVANSITAVQSGARQIEGTINGLGERAGNCSLEEVIMAIKVRQQMLGVYTNINHQEIYRTSQLVSQLCNMPIPANKAIVGSNAFSHSSGIHQDGVLKNRETYEIMTPESIGLKEIQLNLTSRSGRAAVKHRMEEMGYQDKDYDLGSLYEAFLRLADKKGQVFDYDLEALAFINLQQQEPEFFHLDNFNIQSGSNVMATAAVCLVCGKELKSEAATGNGPVDAVYQAISRITEYPIELVSYQLSGKGQGKNALGQVNIVVECFGRRFHGMGLETDIVESSAKAMVHALNCVWRTEQVKKEKQRIQQNTKEMV

SEQ ID NO: 107998 - DNA, 1611 bp, Prochlorococcus marinus; identical to SEQ ID NO: 13310
  CDS (1)..(1611): transl_table=11

SEQ ID NO: 107999 - protein, 536 aa, Prochlorococcus marinus; identical to SEQ ID NO: 13311

SEQ ID NO: 108000 - DNA, 1623 bp, Prochlorococcus marinus
  CDS (1)..(1623): transl_table=11
atggccaaggatccaggccgcgttttgatttttgacaccaccctcagggatggagagcagtcccctggggcaagtctcaatcttgaggaaaagctggctattgcccagcaactcgctcgtttgggtgtggatgtgatagaagctggctttccttttgccagccagggcgattttgctgccgtgcaacgtattgcccagcaggttggtggggatgaagggccaatcatttgtggcttggctagggcttcgcgtgctgatatcaaggcttgtgctgatgccgttgccccagcacctcgacgacgaattcacacattcattgccacgagtgatattcacttggagcacaagctgcgtaaatctcgggcggaggttctggcgattgttccagagatggttgcctacgcccgctcacttgttgatgatgttgagttctcttgtgaggacgccgctagaagcgatcctgagtttctttatgaggtgatcgaggctgcgattgctgcgggggcgggcaccatcaatatccccgacacagttggttttacaactccctctgagttcggggcgttgattgctggtatcgattgccatgttccaaacatgaatgaggcggttatttctgttcatggtcacaacgacctcggactggctgtagccaattttttagaagctgtgaagagtggagcccggcagtttgaatgcacaatcaacggcattggagagcgagcagggaatgctgcgcttgaggagttggtgatggctttgtatgtgaggcggcgttatttcaatcccttctttgggcgtgaacctgatagccctactcctctaacagccgttcgcacggaggaaatcaccaagacctctcgattggtctcaaatctcaccggcatggtggtgcagcccaataaggcgattgtaggcagcaatgctttcgcccatgagtctggtattcatcaagatggtgtgcttaaaaatcgtctgacttatgaaattgttgatgcccgtacggttgggctgagcgacaatcggatctcgcttggcaagctaagtggccgcagtgccgtccgagctcgccttgaggagctcggttacgacttgactcgggaggatcttgacgaggcctttgcacgatttaaggatctggccgatcgcaagcgcgatataaccgatcgagatcttgaggccattgtcagcgaacaggttcagcagtctgaagctcgttttcagttacgactggtgcaagtcagttgcggtagcagtcttaggcctacggctactgtcattcttgcgcaagaggatggacaggagcagactgccgctgcagtgggcaccggtccagtagatgctgtctgtcgtgcattgaatgctctagctggcgaacctaatgagctgatcgagttctcggtgaagtcggtaacggaagggattgatgcgatgggtgaagtcacgattcggctacgtcgggatgggcagcttttctcaggtcattccgctgacactgatgtggttgttgctgcagctcaagcatttgtgaatgcgcttaatcggctggtggcaggttgcggtcgccagtctcttcatccccaacatgatgctgtgctagctgatctacggtcaggcatctga

SEQ ID NO: 108001 - protein, 540 aa, Prochlorococcus marinus
MAKDPGRVLIFDTTLRDGEQSPGASLNLEEKLAIAQQLARLGVDVIEAGFPFASQGDFAAVQRIAQQVGGDEGPIICGLARASRADIKACADAVAPAPRRRIHTFIATSDIHLEHKLRKSRAEVLAIVPEMVAYARSLVDDVEFSCEDAARSDPEFLYEVIEAAIAAGAGTINIPDTVGFTTPSEFGALIAGIDCHVPNMNEAVISVHGHNDLGLAVANFLEAVKSGARQFECTINGIGERAGNAALEELVMALYVRRRYFNPFFGREPDSPTPLTAVRTEEITKTSRLVSNLTGMVVQPNKAIVGSNAFAHESGIHQDGVLKNRLTYEIVDARTVGLSDNRISLGKLSGRSAVRARLEELGYDLTREDLDEAFARFKDLADRKRDITDRDLEAIVSEQVQQSEARFQLRLVQVSCGSSLRPTATVILAQEDGQEQTAAAVGTGPVDAVCRALNALAGEPNELIEFSVKSVTEGIDAMGEVTIRLRRDGQLFSGHSADTDVVVAAAQAFVNALNRLVAGCGRQSLHPQHDAVLADLRSGI

SEQ ID NO: 108002 - DNA, 1641 bp, Prochlorococcus marinus subsp
  CDS (1)..(1641): transl_table=11
atgtccaaagatcctggcagaatattgatctttgatacaacactgagagatggtgagcaatcccctggcgcgagtttaaatcttgaggaaaagcttgcaattgcccatcaacttgcaagattaggagtagatgttattgaagcaggatttccatttgctagtcctggagattttaaggccgtaaataaaattgctgaagtagttggtggagaaaatggtccaataatttgtggtttagccagggcttctacaaatgatataaaagcttgttatgaagctataagcccagcccctaaaaaaagaattcatacatttatagccactagtgatatacacctaaaacataaacttagaaaaacaagatcagatgttctttgtatagttcctgaaatggttagttatgctaaatcgttagttgatgatattgagttctcttgtgaagatgcctcaaggagtgatcctgaatttctttatgaagtaattcaactagcgattacatcaggagctacaactataaatattccagatacagttgggttcacaactccaagtgaatttgggaagcttatttttgatattaataaaaatgttccaaatattgatgaagctattatttcagttcatggtcataatgatttaggtttagctgtagctaattttttagaagcagcaaagaacggagctaggcaattagagtgcacaataaatgggataggtgaaagagcagggaatgcctctttagaagagttagtaatggcattacacgtgaggaaaagtttttttaatagtttctttggaagaagttcagattcaccgactccattaacagccataagaacagaagaaatcacaaaaacttcgagattagtatctaacttaactggaatgaatgttcagcctaataaggcaattgttggagcaaatgcttttgctcatgagtcgggaatccatcaggatggtgtactaaaaaatagactcacatatgaaattattgatgcaaaaactgttggtttgaatgataataaaatttcattagggaaacttagcggaagaagtgccgtaagagcaagattggaagagatgggatacgatttaagtagagaagacctgaatgatgcttttgctcgtttcaaagaactcgctgatagaaaacgagaaattactgatagagatttagaagctattgttagtgaacaggttcaacttcctgaatctaaatttcaactaagccatgttcaagttagttgcggcagtacatcaaagcctaccgcgacagtaactcttataaatacagaagatcatactgaagatactgctgtcgcaataggtactggacctgttgatgcggtttgcgaagcgctaaatgcattaactaaagttcctaatgaattaatagagttttcagtaaaatctgtaacggaaggaatagatgcactaggggaagttactataagaattcgtaacaagaataaaatatattcaggccattctgcggatacagacgtagttgttgctgctgcgaatgcttttgttaatgctttaaacaggcttgtattttcagagaagaaaaactctattcacccccaatttgatgatttagaaaatcctaaaaataaggtactatcaaatcctaaaaaatag

SEQ ID NO: 108003 - protein, 546 aa, Prochlorococcus marinus subsp
MSKDPGRILIFDTTLRDGEQSPGASLNLEEKLAIAHQLARLGVDVIEAGFPFASPGDFKAVNKIAEVVGGENGPIICGLARASTNDIKACYEAISPAPKKRIHTFIATSDIHLKHKLRKTRSDVLCIVPEMVSYAKSLVDDIEFSCEDASRSDPEFLYEVIQLAITSGATTINIPDTVGFTTPSEFGKLIFDINKNVPNIDEAIISVHGHNDLGLAVANFLEAAKNGARQLECTINGIGERAGNASLEELVMALHVRKSFFNSFFGRSSDSPTPLTAIRTEEITKTSRLVSNLTGMNVQPNKAIVGANAFAHESGIHQDGVLKNRLTYEIIDAKTVGLNDNKISLGKLSGRSAVRARLEEMGYDLSREDLNDAFARFKELADRKREITDRDLEAIVSEQVQLPESKFQLSHVQVSCGSTSKPTATVTLINTEDHTEDTAVAIGTGPVDAVCEALNALTKVPNELIEFSVKSVTEGIDALGEVTIRIRNKNKIYSGHSADTDVVVAAANAFVNALNRLVFSEKKNSIHPQFDDLENPKNKVLSNPKK

SEQ ID NO: 108004 - DNA, 1674 bp, Pseudomonas putida
  CDS (1)..(1674): transl_table=11
atgaccatgctcaaagacccttcgaagaaataccgcgctttcccgaccatcgacctgcctgaccgtacctggccgtcgaagaccatcacccaggcacctatctggtgcagttccgacctgcgtgacggcaaccagtcgctgatagagccgatggactcggagaagaaactgcgcttctggaagaccttggtgcaggttggcgtgaaggagatcgaagcctcgttcccgtctgcctcgcaaaccgatttcgacttcgtgcgcaccctgatcgaggacggccacatcccggatgacaccaccatccaggtgctcacccaggcacgtgaagacctgattgcccgtaccttcgaatcactgcgcggtgcgaagaaggccatcgtccacctgtacaacgccaccagcccgtcgttccgccgcatcgtcttcaatcaggacaagcaaggcgtgaaggacatcgcggtgaacgcggccaagctgttcgtcaagtacgccgcccagcagccggaaacccagtggaccttccagtactcgccagaaaccttcagcgccactgaaatggagttcgccaaggaggtctgcgacgcggtcatcgaggtgtggaaccctacccctgaacacaagatcatcctcaacctgccggccaccgtggaagtgtccacgccaaatatctacgccgaccagatcgagtggttctgccgcaacgtcagccgccgcgacagcgtgatcatcagcctgcactgccacaacgaccgcggcaccggcatcgctgccaccgaactgggcctcatggccggcgccgaccgtgccgaaggctgcctgttcggcaacggcgagcgtaccggtaacgtcgacctggtgaccttggcactgaacctctacacccagggcatcgacccgttgctggacttctccgacatcgacggcgtgcgcaaggtggtcgaagaatgcaaccagttgccggtacatcctcgtcacccctatgtgggggatctggtccataccgcgttctccggctcgcaccaggacgccatccgcaagggcttcgccaagcagcaggatggggaactgtgggaggtgccttacctgccgatcgacccggccgacatcggccgcagctacgaagcggtaatccgcgtcaacagccagtcgggcaaaggcggtatcacctacctgctcgagcaggaatatggcatcagcctgccgcgtcgcatgcagatcgaattcagccaggtggtgcagggtgagactgaccgcctgggcctggaaatgaccgcccagcagatctacagcctgctgcacaaggaatacctccaggccaacgcgccatatgcactggtcagccatcgcctgcaggaagaaaacggccacagcgccgtggaagtggaagttgccggtgaaggcgaaaccaccctgcactggcgcggcaagggcaacggcgccctggaagcactggtggccggcctgccgattgccgtggagatcatggactacaacgagcatgcgattggcgctggcaccaatgccaaggcagctgcctacatcgaactgcgcgtggccggtggccgcccggtacatggcgtgggtatcgatgagaacatcaccacggccagcttcaaggcgctgttcagtgcgctgaaccgctcgctgagccagcaggaagccaaggcggcctga

SEQ ID NO: 108005 - protein, 557 aa, Pseudomonas putida
MTMLKDPSKKYRAFPTIDLPDRTWPSKTITQAPIWCSSDLRDGNQSLIEPMDSEKKLRFWKTLVQVGVKEIEASFPSASQTDFDFVRTLIEDGHIPDDTTIQVLTQAREDLIARTFESLRGAKKAIVHLYNATSPSFRRIVFNQDKQGVKDIAVNAAKLFVKYAAQQPETQWTFQYSPETFSATEMEFAKEVCDAVIEVWNPTPEHKIILNLPATVEVSTPNIYADQIEWFCRNVSRRDSVIISLHCHNDRGTGIAATELGLMAGADRAEGCLFGNGERTGNVDLVTLALNLYTQGIDPLLDFSDIDGVRKVVEECNQLPVHPRHPYVGDLVHTAFSGSHQDAIRKGFAKQQDGELWEVPYLPIDPADIGRSYEAVIRVNSQSGKGGITYLLEQEYGISLPRRMQIEFSQVVQGETDRLGLEMTAQQIYSLLHKEYLQANAPYALVSHRLQEENGHSAVEVEVAGEGETTLHWRGKGNGALEALVAGLPIAVEIMDYNEHAIGAGTNAKAAAYIELRVAGGRPVHGVGIDENITTASFKALFSALNRSLSQQEAKAA

SEQ ID NO: 108006 - DNA, 1500 bp, Pyrococcus furiosus
  CDS (1)..(1500): transl_table=11
atggcgaggaagataaagattttcgacactacactaagggatggagagcagaccccaggagttagcttaacagtagaagaaaagatagagatagcaaagcaactggcaaggcttaatgtagatgtcattgaggcaggattcccaatatcttctcctggggaatttgaggctgtaaagagaatagctagggaggttagaggcccaacaattgcggctttagctagggccgtaaagaaggatatagatgccgcaggagaagccctaaaggatgcagaaagcaagagaatacatacattcatagcaacctcactaattcacatgaagtataagctgaggaaaactccagaagaagttaaaaagatggccgtagaggccgtggagtatgccactaagtacacggatgacattgaattttctgcagaagatgccacgagaagtgactggaactttttggttgaggtctacgaggcagtcatagatgcgggagcaacaacaattaacgttcccgataccgttggttatacaactcctgaagaattttatgagttgattaggtatctcaagcgcaacataactaatctaaatggcgtaacgataagcgttcactgtcacaacgatctaggcttagcggttgcaaactccctctcagcagtgagggctggagctgatcaggttgaagtcaccgttaatggaattggagagagagctggaaatgctgcattagaagaagttgtcgtggcattagacgtgaggaaagacttctacaatgttgagacgggcataaatctaggggagatagccaggacaagcaagctagtggcgaggctaactggaattgaagttccaccaaataaagcagtggtaggagcaaatgcctttgcccatgaatctggaattcatcaggatggggttctaaaggaaagaacgacttatgagataatagaccccaggaagctggggttctcgggaagtaaaatagttttaggtaaacactctggaaggcacgcatttaggaaaaagctcgaggagatgggatatagacttagtgaagaggagataaataggttgtttgcaaaattcaaggagatagccgacaggaagaagggcttaactgagctcgatattgaagcaatagtccaggaagagctagggaaagggaaaggcaagtatagcgttgaggttctccacgtaatttctgggaagatttccacagccacggtgagggttcaaggggatggtattgataaaattgagagtgcttggtcgagcaatggccccatagatgcactctttgctgctataaatagagcccttggaattgattgcaaattaaaggagtacagagtttcttctgttacctctggaagagatgccttgggagaagttttagttagagttgaatataacggagagatttacgttggaagaggtttgagcaccgacattattgaggcaagtgctcaggcgtatctttctgctctaaatagaattaggaggtga

SEQ ID NO: 108007 - protein, 499 aa, Pyrococcus furiosus
MARKIKIFDTTLRDGEQTPGVSLTVEEKIEIAKQLARLNVDVIEAGFPISSPGEFEAVKRIAREVRGPTIAALARAVKKDIDAAGEALKDAESKRIHTFIATSLIHMKYKLRKTPEEVKKMAVEAVEYATKYTDDIEFSAEDATRSDWNFLVEVYEAVIDAGATTINVPDTVGYTTPEEFYELIRYLKRNITNLNGVTISVHCHNDLGLAVANSLSAVRAGADQVEVTVNGIGERAGNAALEEVVVALDVRKDFYNVETGINLGEIARTSKLVARLTGIEVPPNKAVVGANAFAHESGIHQDGVLKERTTYEIIDPRKLGFSGSKIVLGKHSGRHAFRKKLEEMGYRLSEEEINRLFAKFKEIADRKKGLTELDIEAIVQEELGKGKGKYSVEVLHVISGKISTATVRVQGDGIDKIESAWSSNGPIDALFAAINRALGIDCKLKEYRVSSVTSGRDALGEVLVRVEYNGEIYVGRGLSTDIIEASAQAYLSALNRIRR

SEQ ID NO: 108008 - DNA, 1689 bp, Rhodopirellula baltica
  CDS (106)..(1689): transl_table=11
gtgcccgaatgcatgtgcggcgggtgcgattccggggctccgaagtttatcttcttccctttccgagattgcagtcccatgtctgaccaaccgacacctgatgccatgaaccagtccgccgaagccccgtcctctgagaacgtggccactcgccaaatccgaattttcgacaccacgctgcgcgacggcgagcaatcgcctggtgccagcatgaacttggcggagaaactcgaggtcgcatcggctctggtcgatttgggtgtcgacatcatcgaagccggtttcccaatcgcctccccgggtgacttcgaatcggtccggcaaatcgccaccacgattcgcggggcgacaatctgcgggttggctcgttgtgccgaaaaggacatcgatcgagcctgggaagcgttgaagaccgccccgcaagctcgcattcacgtgttcttggccaccagcgccatccaccgcgaattcaagttgcggatgacgcccgacgagatcgtcgaacgggcggtcgccggggttcgccgtgccgcttcgcattgcgatgacgtggagttctcacccgaggacgcctgccggaccgaacacgatttcctgtgccgcgtggtcgaagccgcgatcgacgcgggagccaccacgatcaacgttcctgacacggtcggctacaccacacccggtgagatttacgatcgattcaaaatgttgcgggaccgtgttcccaacatggacaaagccgtcttgagcacgcactgccacgatgacttggggatggcggtcgccaattcgctggccgcagtcgacgcgggtgccgggcagatcgaatgcacgatcaacggcattggcgagcgagccggcaatgcggccctcgaggaattggtgatggcaatgaagactcgccaagacttctatcactgccaaaccaacatcaattcaaaacgcttggtccccgtcagtcgattggtcagcaagaccactggcatcaacgtgcaacgcaacaaagcgatcgttggtcgcaacgcgttcgcacacgaatccggcattcaccaagacgggatgttgaaggaacgcaccacgtacgaaatcatgtcgcccgaagaagtcggcttcaccaaaaccgatttggtcctcggcaaacacagcggacgcgcggcgttggccgatcgtgccaaacaattgggcatgacgttgaccggcgaacagttgcaagaagtcttcgaggcattcaaagaactcgccgacaagaagaaagagatctacgacggtgacatcgtcgcgttggtccaacaaaagatcagcgagacggttgccccagaatggacactggtcgattacgaagtcaccagcggcaagaaccaaacgccaaatgtgcgagtcacgctgcgacgcgacgagcaggacatcaccgagcaagttgcacagggcgatggaccgattgatgccgcgttttgggcggtcgagaagatcaccggaatccaagtggtctgcaaagactttcgcgtccgcagtgccacgctcggtcgtgacgcgatcggcgaagtcaacttggaagtcgagcacgagggcaagacttatcgcggcaccggggtgagcacggacagtgtcgagagcacgatcttggccatgctcaacgcgatcaaccgcatcgttgctggcatcgcatcggatcccggcgaactgcctcagccctga

SEQ ID NO: 108009 - protein, 527 aa, Rhodopirellula baltica
MNQSAEAPSSENVATRQIRIFDTTLRDGEQSPGASMNLAEKLEVASALVDLGVDIIEAGFPIASPGDFESVRQIATTIRGATICGLARCAEKDIDRAWEALKTAPQARIHVFLATSAIHREFKLRMTPDEIVERAVAGVRRAASHCDDVEFSPEDACRTEHDFLCRVVEAAIDAGATTINVPDTVGYTTPGEIYDRFKMLRDRVPNMDKAVLSTHCHDDLGMAVANSLAAVDAGAGQIECTINGIGERAGNAALEELVMAMKTRQDFYHCQTNINSKRLVPVSRLVSKTTGINVQRNKAIVGRNAFAHESGIHQDGMLKERTTYEIMSPEEVGFTKTDLVLGKHSGRAALADRAKQLGMTLTGEQLQEVFEAFKELADKKKEIYDGDIVALVQQKISETVAPEWTLVDYEVTSGKNQTPNVRVTLRRDEQDITEQVAQGDGPIDAAFWAVEKITGIQVVCKDFRVRSATLGRDAIGEVNLEVEHEGKTYRGTGVSTDSVESTILAMLNAINRIVAGIASDPGELPQP

SEQ ID NO: 108010 - DNA, 1572 bp, Salmonella typhi
  CDS (1)..(1572): transl_table=11
atgagccagcaagtcattatttttgatacgaccttacgcgacggcgaacaagcgttacaggccagcctgagcgcgaaagagaagctgcagattgccctggcccttgagcgcatgggtgtcgatgtcatggaagtgggcttcccggtctcttctccgggtgattttgaatccgtccaaaccatcgcccgcaccatcaaaaacagccgcgtttgcgccctggcgcgttgtgtagaaaaagacatcgacgttgcggcacaggcgctgaaggtcgccgacgcgtttcgtatccatacttttatcgccacctcgccaatgcacatcgccaccaagctgcgcagcacgctggatgaggtcatcgaacgcgcggtatacatggttaagcgggcgcgtaattacactgatgacgtggagttctcctgcgaggatgctggccggacgcctgttgacgatctggcgcgcgtggtggaagccgctataaacgccggcgcgagaaccatcaatattcccgataccgtgggctataccatgccgtttgagttcgcgggaatcatttccggtctgtatgaacgtgtccccaatatcgacaaagctatcatctccgttcatacccacgacgatttagggatagcggtaggcaactcgctggcggcagtacatgcgggcgcgcgtcaagttgaaggcgcgatgaacggtatcggagaacgtgccggtaactgcgcgctggaagaggtgatcatggcgattaaagtgcgcaaagacatcataaacgtacacaccaacatcaatcaccacgaaatctggcgcaccagccagaccgtcagccagatctgtaacatgccgatcccggccaacaaagcgattgttggcagcggcgcttttgcccactcttccggcatccaccaggatggcgtcctcaagaaccgcgaaaactatgaaatcatgacgccagagtccatcggtctgaaccagatacagctgaacctgacctcccgctctggccgtgccgccgtgaaacatcgcatggaagagatgggttacaaggacacagactacaacatgggccacctgtacgacgcgttcctgaagctggcggacaaaaaaggccaggtgttcgactatgacctggaagcgctggcgtttattaataaacagcaagaagaaccagagcatttccgtctggattacttcagcgtgcagtccggctccagcgatatcgccaccgcttccgtgaagctggcctgtggtgaagagatcaaggccgaggcggcgaacggcaacggcccggtcgacgccatctatcaggcgattaaccgcatcactggctacgacgttgagttggttaaatacgacctgaacgccaaaggccagggcaaagacgcgctgggtcaggtcgatatcgtcgtgaaccatcatggtcgccgcttccacggcgtcgggctggcgacggatatcgtcgaatcctccgccaaagcgatggtacacgtactgaacaatatctggcgcgccgccgaagttgaaaaagaattgcaacgcaaagctcaaaataaagagaacaacaaggaaaccgtgtaa

SEQ ID NO: 108011 - protein, 523 aa, Salmonella typhi
MSQQVIIFDTTLRDGEQALQASLSAKEKLQIALALERMGVDVMEVGFPVSSPGDFESVQTIARTIKNSRVCALARCVEKDIDVAAQALKVADAFRIHTFIATSPMHIATKLRSTLDEVIERAVYMVKRARNYTDDVEFSCEDAGRTPVDDLARVVEAAINAGARTINIPDTVGYTMPFEFAGIISGLYERVPNIDKAIISVHTHDDLGIAVGNSLAAVHAGARQVEGAMNGIGERAGNCALEEVIMAIKVRKDIINVHTNINHHEIWRTSQTVSQICNMPIPANKAIVGSGAFAHSSGIHQDGVLKNRENYEIMTPESIGLNQIQLNLTSRSGRAAVKHRMEEMGYKDTDYNMGHLYDAFLKLADKKGQVFDYDLEALAFINKQQEEPEHFRLDYFSVQSGSSDIATASVKLACGEEIKAEAANGNGPVDAIYQAINRITGYDVELVKYDLNAKGQGKDALGQVDIVVNHHGRRFHGVGLATDIVESSAKAMVHVLNNIWRAAEVEKELQRKAQNKENNKETV

SEQ ID NO: 108012 - DNA, 1572 bp, Salmonella typhimurium; identical to SEQ ID NO: 13314
  CDS (1)..(1572): transl_table=11

SEQ ID NO: 108013 - protein, 523 aa, Salmonella typhimurium; identical to SEQ ID NO: 13315

SEQ ID NO: 108014 - DNA, 1569 bp, Shewanella oneidensis
  CDS (1)..(1569): transl_table=11
atgtctaacagagtaattatatttgataccaccttacgtgatggcgagcaggcattagccgctagcttgtcagtcaaagaaaagttacagatcgccatggcgctggaacgtcttggtgttgacgtcatggaagtgggatttcccgtatcttcccccggtgattttgagtcggtgcaaaccattgctcgcaccattaaaaatagccgagtgtgcgccttatcccgcgccttggaaaaagatatcgatgccgccgctcaagcgttatcggtggctgaacagttccgtattcacacctttatctccacctcgaccatccatgtggagagcaaattaaaacgttcattcgagcaagtgttggaaatggcggtcggtgcggtgaaatatgcccgtcgctttaccgatgatgttgaattctcttgtgaagatgcagggcgtacgccgattgataatttgtgtcgcatggtggaagcggctattcatgctggcgcgcgtactatcaatattcccgatacagtgggctacacggtgccaagcgagtttggcagcattattcaaactttgtttaatcgcgtaccgaatatcgatcaggcaattatctctgttcactgtcacgatgacttaggtttatcggtcgcgaactcgattactgctgtgcagcatggcgcgcgccaaatcgaatgtaccatgaatggtattggtgagcgtgcgggtaactgctccttagaagaaatcgccatgatcttagccacccgcaagaatttgttagggtttgaaacggggataaatgcgaaggaaattcaccgcacctcaaatttagtcagccaattatgcaatatgccgatccagtcgaataaggcgattgtgggcgcgaatgcctttacccactcttcgggcattcaccaagatggcatgttaaaagcgcaaaacacttatgaaattatgacgccagagagcatcggcttaaaccgtaacaacctgaatatgacctcgcgctcaggccgccatgtgattaagcatcgcatggaggaaatgggctatagctcgcaggattacaacttggatgccctgtacgaacagtttttacatttggcggataaaaagggtcaagtcttcgattacgacttagaagccttagcttttatagaggcgcaagccgcggaagataacttctatcaattacggcagttagtcgtgcagtccgactcgaccgaaggcgtggccacggccactgtgcgcatcgaggtgggtggtgagattaaaaccgaggccgctacaggcaatggtcctgtcgatgctgcctataatgctatcgcccgtgccactgatcgccgtatcgatatcatcagctacaaattaggtgcgaaaggcgtagggcaagatgcgctcggccaagtcgatattactgcggtttaccatgaacaaaatttccacggtgtgggtttagccaccgatgtggttgaagcgtcagcgcgtgcattagtgcatgtgatgaacctgacttgccgtgccgataaggtcgcagattacaaacagaatatgcataaaaacagagagctgggcggcgtatag

SEQ ID NO: 108015 - protein, 522 aa, Shewanella oneidensis
MSNRVIIFDTTLRDGEQALAASLSVKEKLQIAMALERLGVDVMEVGFPVSSPGDFESVQTIARTIKNSRVCALSRALEKDIDAAAQALSVAEQFRIHTFISTSTIHVESKLKRSFEQVLEMAVGAVKYARRFTDDVEFSCEDAGRTPIDNLCRMVEAAIHAGARTINIPDTVGYTVPSEFGSIIQTLFNRVPNIDQAIISVHCHDDLGLSVANSITAVQHGARQIECTMNGIGERAGNCSLEEIAMILATRKNLLGFETGINAKEIHRTSNLVSQLCNMPIQSNKAIVGANAFTHSSGIHQDGMLKAQNTYEIMTPESIGLNRNNLNMTSRSGRHVIKHRMEEMGYSSQDYNLDALYEQFLHLADKKGQVFDYDLEALAFIEAQAAEDNFYQLRQLVVQSDSTEGVATATVRIEVGGEIKTEAATGNGPVDAAYNAIARATDRRIDIISYKLGAKGVGQDALGQVDITAVYHEQNFHGVGLATDVVEASARALVHVMNLTCRADKVADYKQNMHKNRELGGV

SEQ ID NO: 108016 - DNA, 1572 bp, Shigella flexneri
  CDS (1)..(1572): transl_table=11
atgagccagcaagtcattattttcgataccacattgcgcgacggtgaacaggcgttacaggcaagcttgagtgtgaaagaaaaactgcaaattgcgctggcccttgagcgtatgggtgttgacgtgatggaagtcggtttccccgtctcttcgccgggcgattttgaatcggtgcaaaccatcgcccgccaggttaaaaacagccgcgtatgtgcgttagctcgctgcgtggaaaaagatatcgacgtggcggccgaatccctgaaagtcgccgaagccttccgtattcatacctttattgctacctccccaatgcacatcgccaccaagctgcgcagcaccctagacgaggtgatcgaacgcgctatctatatggtgaaacgcgcccgtaattacaccgatgatgttgaattttcttgcgaagatgccgggcgtacacccattgccgatctggcgcgagtggtcgaagcggcgattaatgccggtgccaccaccatcaacattccggacaccgtgggctacaccatgccgtttgagttcgccggaatcatcagcggcctgtatgaacgcgtacctaacatcgacaaagccattatttccgtacatacccacgacgatttaggcctggcggtcggcaactcactggcggcggtacatgccggtgcacgccaggtggaaggtgcaatgaacgggatcggcgagcgtgccggtaactgttcgctggaagaagtcatcatggcgattaaagttcgtaaggatattctcaacgtccacaccgccattaatcaccaagagatatggcgcaccagccagttagttagccagatttgtaatatgccgatcccggcaaacaaagccattgttggcagcggcgcattcgctcactcctccggtatccaccaggatggcgtgctgaaaaaccgcgaaaactacgaaatcatgacaccagaatctattggtctgaaccaaatccagctgaatctgacctctcgttcggggcgtgcggcggtgaaacatcgcatggatgagatggggtataaagaaagtgaatataatttagacaatttgtacgatgctttcctgaagctggcggacaaaaaaggtcaggtgtttgattacgatctggaggcgctggccttcatcggtaagcagcaagaagagccggagcatttccgtctggattacttcagcgtgcagtctggctctaacgatatcgccaccgccgccgtcaaactggcctgtggcgaagaagtcaaagcagaagccgccaacggtaacggtccggtcgatgccgtctatcaggcaattaaccgcatcactgactataacgtcgaactggtgaaatacagcctgaccgccaaaggtcacggtaaagatgcgctgggtcaggtggatattgtcaccaactacaacggtcgccgcttccacggcgtcggcctggccaccgatattgtcgagtcctccgccaaagccatggtgcacgtactgaacaatatctggcgtgccgcagaagtcgaaaaagagttgcaacgcaaaactcaacacaacgaaaacaacaaggaaaccgtgtga

SEQ ID NO: 108017 - protein, 523 aa, Shigella flexneri
MSQQVIIFDTTLRDGEQALQASLSVKEKLQIALALERMGVDVMEVGFPVSSPGDFESVQTIARQVKNSRVCALARCVEKDIDVAAESLKVAEAFRIHTFIATSPMHIATKLRSTLDEVIERAIYMVKRARNYTDDVEFSCEDAGRTPIADLARVVEAAINAGATTINIPDTVGYTMPFEFAGIISGLYERVPNIDKAIISVHTHDDLGLAVGNSLAAVHAGARQVEGAMNGIGERAGNCSLEEVIMAIKVRKDILNVHTAINHQEIWRTSQLVSQICNMPIPANKAIVGSGAFAHSSGIHQDGVLKNRENYEIMTPESIGLNQIQLNLTSRSGRAAVKHRMDEMGYKESEYNLDNLYDAFLKLADKKGQVFDYDLEALAFIGKQQEEPEHFRLDYFSVQSGSNDIATAAVKLACGEEVKAEAANGNGPVDAVYQAINRITDYNVELVKYSLTAKGHGKDALGQVDIVTNYNGRRFHGVGLATDIVESSAKAMVHVLNNIWRAAEVEKELQRKTQHNENNKETV

SEQ ID NO: 108018 - DNA, 1698 bp, Glycine max; identical to SEQ ID NO: 13316
  CDS (1)..(1698)

SEQ ID NO: 108019 - protein, 565 aa, Glycine max; identical to SEQ ID NO: 13317

SEQ ID NO: 108020 - DNA, 1530 bp, Staphylococcus aureus
  CDS (1)..(1530): transl_table=11
atgagtagtcatattcaaatttttgatacgacactaagagacggtgaacaaacaccaggagtgaattttacttttgatgaacgcttgcgtattgcattgcaattagaaaaatggggtgtagatgttattgaagctggatttcctgcttcaagtacaggtagctttaaatctgttcaagcaattgcacaaacattaacaacaacggctgtatgtggtttagctagatgtaaaaaatctgacatcgatgctgtatatgaagcaacaaaagatgcagcgaagccggtcgtgcatgtttttatagcaacatcacctattcatcttgaacataaacttaaaatgtctcaagaagacgttttagcatctattaaagaacatgtcacatacgcgaaacaattatttgacgttgttcaattttcacctgaagatgcaacgcgtactgaattaccattcttagtgaaatgtgtacaaactgccgttgacgctggagctacagttattaatattcctgatacagtcggctacagttaccatgatgaatatgcacatattttcaaaaccttaacagaatctgtaacatcttcaaatgaaattatttatagtgctcattgccatgacgatttaggaatggctgtttcaaatagtttagctgcaattgaaggcggtgcgagacgaattgaaggcactgtaaatggtattggtgaacgagcaggtaatgcagcacttgaagaagtcgcgcttgcactatacgttcgaaatgatcattatggtgctcaaactgctcttaatctcgaagaaactaaaaaaacatcggatttaatttcaagatatgcaggtattcgagtgcctagaaataaagcaattgttggccaaaatgcatttagtcatgaatcaggtattcaccaagatggcgtattaaaacatcgtgaaacatatgaaattatgacacctcaacttgttggtgtaagcacgactgaacttccattaggaaaattatctggtaaacacgccttctcagagaagttaaaagcattaggttatgacattgataaagaagcgcaaatagatttatttaaacaattcaaggccattgcggacaaaaagaaatctgtttcagatagagatattcatgcgattattcaaggttctgagcatgagcatcaagcactttataaattggaaacactgcaactacaatatgtctctagcggccttcaaagtgctgttgttgttgttaaagataaagagggtcatatttaccaggattcaagtattggtactggttcaatcgtagcaatttacaatgcagttgatcgtattttccagaaagaaacagaattaattgattatcgtattaattctgtcactgaaggtactgatgcccaagcagaagtacatgtaaatttattgattgaaggtaagactgtcaatggctttggtattgatcatgatattttacaagcctcttgtaaagcatacgtagaagcacatgctaaatttgcagctgaaaatgttgagaaggtaggtaattaa

SEQ ID NO: 108021 - protein, 509 aa, Staphylococcus aureus
MSSHIQIFDTTLRDGEQTPGVNFTFDERLRIALQLEKWGVDVIEAGFPASSTGSFKSVQAIAQTLTTTAVCGLARCKKSDIDAVYEATKDAAKPVVHVFIATSPIHLEHKLKMSQEDVLASIKEHVTYAKQLFDVVQFSPEDATRTELPFLVKCVQTAVDAGATVINIPDTVGYSYHDEYAHIFKTLTESVTSSNEIIYSAHCHDDLGMAVSNSLAAIEGGARRIEGTVNGIGERAGNAALEEVALALYVRNDHYGAQTALNLEETKKTSDLISRYAGIRVPRNKAIVGQNAFSHESGIHQDGVLKHRETYEIMTPQLVGVSTTELPLGKLSGKHAFSEKLKALGYDIDKEAQIDLFKQFKAIADKKKSVSDRDIHAIIQGSEHEHQALYKLETLQLQYVSSGLQSAVVVVKDKEGHIYQDSSIGTGSIVAIYNAVDRIFQKETELIDYRINSVTEGTDAQAEVHVNLLIEGKTVNGFGIDHDILQASCKAYVEAHAKFAAENVEKVGN

SEQ ID NO: 108022 - DNA, 1530 bp, Staphylococcus aureus
  CDS (1)..(1530): transl_table=11
atgagtagtcatattcaaatttttgatacgacactaagagacggtgaacaaacaccaggagtgaattttacttttgatgaacgcttgcgtattgcattgcaattagaaaaatggggtgtagatgttattgaagctggatttcctgcttcaagtacaggtagctttaaatctgttcaagcaattgcacaaacattaacaacaacggctgtatgtggtttagctagatgtaaaaaatctgacatcgatgctgtatatgaagcaacaaaagatgcagcgaagccggtcgtgcatgtttttatagcaacatcacctattcatcttgaacataaacttaaaatgtctcaagaagacgttttagcatctattaaagaacatgtcacatacgcgaaacaattatttgacgttgttcaattttcacctgaagatgcaacgcgtactgaattaccattcttagtgaaatgtgtacaaactgccgttgacgctggagctacagttattaatattcctgatacagtcggctacagttaccatgatgaatatgcacatattttcaaaaccttaacagaatctgtaacatcttcaaatgaaattatttatagtgctcattgccatgacgatttaggaatggctgtttcaaatagtttagctgcaattgaaggcggtgcgagacgaattgaaggcactgtaaatggtattggtgaacgagcaggtaatgcagcacttgaagaagtcgcgcttgcactatacgttcgaaatgatcattatggtgctcaaactgcccttaatctcgaagaaactaaaaaaacatcggatttaatttcaagatatgcaggtattcgagtgcctagaaataaagcaattgttggccaaaatgcatttagtcatgaatcaggtattcaccaagatggcgtattaaaacatcgtgaaacatatgaaattatgacacctcaacttgttggtgtaagcacgactgaacttccattaggaaaattatctggtaaacacgccttctcagagaagttaaaagcattaggttataacattgataaagaagcgcaaatagatttatttaaacaattcaagaccattgcggacaaaaagaaatctgtttcagatagagatattcatgcgattattcaaggttctgagcatgagcatcaagcactttataaattggaaacactacaactacaatatgtctctagcggccttcaaagtgctgttgttgttgttaaagataaagagggtcatatttaccaggattcaagtattggtactggttcaatcgtagcaatttacaatgcagttgatcgtattttccagaaagaaacagaattaattgattatcgtattaattctgtcactgaaggtactgatgcccaagcagaagtacatgtaaatttattgattgaaggtaagactgtcaatggctttggtattgatcatgatattttacaagcctcttgtaaagcatacgtagaagcacatgctaaatttgcagctgaaaatgttgagaaggtaggtaattaa

SEQ ID NO: 108023 - protein, 509 aa, Staphylococcus aureus
MSSHIQIFDTTLRDGEQTPGVNFTFDERLRIALQLEKWGVDVIEAGFPASSTGSFKSVQAIAQTLTTTAVCGLARCKKSDIDAVYEATKDAAKPVVHVFIATSPIHLEHKLKMSQEDVLASIKEHVTYAKQLFDVVQFSPEDATRTELPFLVKCVQTAVDAGATVINIPDTVGYSYHDEYAHIFKTLTESVTSSNEIIYSAHCHDDLGMAVSNSLAAIEGGARRIEGTVNGIGERAGNAALEEVALALYVRNDHYGAQTALNLEETKKTSDLISRYAGIRVPRNKAIVGQNAFSHESGIHQDGVLKHRETYEIMTPQLVGVSTTELPLGKLSGKHAFSEKLKALGYNIDKEAQIDLFKQFKTIADKKKSVSDRDIHAIIQGSEHEHQALYKLETLQLQYVSSGLQSAVVVVKDKEGHIYQDSSIGTGSIVAIYNAVDRIFQKETELIDYRINSVTEGTDAQAEVHVNLLIEGKTVNGFGIDHDILQASCKAYVEAHAKFAAENVEKVGN

SEQ ID NO: 108024 - DNA, 1608 bp, Synechococcus elongatus; identical to SEQ ID NO: 13318
  CDS (1)..(1608): transl_table=11

SEQ ID NO: 108025 - protein, 535 aa, Synechococcus elongatus; identical to SEQ ID NO: 13319

SEQ ID NO: 108026 - DNA, 1623 bp, Synechococcus sp
  CDS (1)..(1623): transl_table=11
atggccaaggacccaggtcgtgtcttgattttcgacaccaccctgcgggatggtgagcagtctcccggggccagcctcaacctggaggaaaagctggccatcgctcagcagctggcccgtcttggcgtggatgtcattgaggctggattcccctttgccagtgcaggggacttcgcggctgtgcagcggattgcccagcaggtcgggggcgagaacggtcccatcatctgcgggctggcccgtgcatcgcagagggacatcaaggcttgtgcagaggcggtctcaccggcaccgcgtcgccgaatccacactttcatcgccaccagcgacattcacctcgagcacaaattgcgcaagagccgtgccgacgtgctcggcatcgttcccgagatggtcagctatgcccgctccctgatggacgacattgaattttcctgtgaagacgccggccgcagcgacccggagttcctctacgaggtgatcgaggcggcgattgccgctggcgccaccacgatcaacattccagacactgtcggttacaccacgccaagcgaatttggcgatctgattgctggaatcaatcgctatgtccccaacatcggagaagcggttctctccgttcatggccataacgatctgggcttggctgtggcgaactttctggaggcggtcaagaacggcgcccgtcagctggaatgcaccatcaacggcatcggcgagcgggcaggcaatgcctcactcgaggaattggtaatggctttgcacgtgcgccgtcgttacttcaatccgtttttcggccgcgatcaggacagtcccactcccctctcggcggttcgcaccgaggaactcaccaagacctcgcgattggtgtccaacctcacgggcatggtggttcagcccaacaaggccatcgttggtgccaatgcctttgcccatgaatcgggcattcaccaggacggcgtgctgaaaaaccgcctcacctacgaaatcatcgatgccaagaccgttggtctgagcgacaaccgaatttcactgggcaagctcagcggccgcagtgcggtaagagcaaggctggaagagctcgggtacgacctgactcgagaggatcttgatgaggcgttcgcccgcttcaaagacctagccgatcgcaaacgggagatcaccgatcgcgatcttgaggcgattgtcagcgaacaggtgcaacagcccgaggctcgctatcagctccagctggtgcaggtgagttgcggaacgcgtttgaagccgaccgccaccgttgccctttcggaggagaatggtccggatcaaaccgtctcggccgttggcacaggaccggtagatgcggtgtgccgggctctgaaccaactggcgggagttcccaatgagctcatcgagttctcggtgaagtcggtcaccgagggcattgatgccatgggtgaagtgacgattcgcttgcgtcgtgacgggtcgctttattcaggccatgcggctgataccgacgtggtggttgctgccgccatggcctttatcaatgccttgaatcgtcttgtggcagcccaggagcaccagcctttgcatcctcagcgggatgctgttgttctcgacgctcggccgaccctctga

SEQ ID NO: 108027 - protein, 540 aa, Synechococcus sp
MAKDPGRVLIFDTTLRDGEQSPGASLNLEEKLAIAQQLARLGVDVIEAGFPFASAGDFAAVQRIAQQVGGENGPIICGLARASQRDIKACAEAVSPAPRRRIHTFIATSDIHLEHKLRKSRADVLGIVPEMVSYARSLMDDIEFSCEDAGRSDPEFLYEVIEAAIAAGATTINIPDTVGYTTPSEFGDLIAGINRYVPNIGEAVLSVHGHNDLGLAVANFLEAVKNGARQLECTINGIGERAGNASLEELVMALHVRRRYFNPFFGRDQDSPTPLSAVRTEELTKTSRLVSNLTGMVVQPNKAIVGANAFAHESGIHQDGVLKNRLTYEIIDAKTVGLSDNRISLGKLSGRSAVRARLEELGYDLTREDLDEAFARFKDLADRKREITDRDLEAIVSEQVQQPEARYQLQLVQVSCGTRLKPTATVALSEENGPDQTVSAVGTGPVDAVCRALNQLAGVPNELIEFSVKSVTEGIDAMGEVTIRLRRDGSLYSGHAADTDVVVAAAMAFINALNRLVAAQEHQPLHPQRDAVVLDARPTL

SEQ ID NO: 108028 - DNA, 1602 bp, Synechocystis sp; identical to SEQ ID NO: 13320
  CDS (1)..(1602): transl_table=11

SEQ ID NO: 108029 - protein, 533 aa, Synechocystis sp; identical to SEQ ID NO: 13321

SEQ ID NO: 108030 - DNA, 1542 bp, Thermotoga maritima
  CDS (1)..(1542): transl_table=11
atgaggagaattaagatcttcgatacaacgttgagagacggagagcaatccccgggagcttcgatgtcgattgaagaaaaagtagaaatggcgctcatgttggaggatctcggcgtcgatctcatcgaagccgggtttcccgtttcatctcccgtgcagttcgaggctgtgaaaagagttgcgagcgccgttcagaaacccatagtggtgggactcgcaaggtgcgttgaaaaagacatagacgcagcatacgaggctctcaaggatcgaccaaaggacaaacgtatgatacacgttttcatagcgacttctccgattcacagaaagtacaagctgagaatggaaaaagaagagatcctcgagaggatcagaagatacgtcggttacgccaaacagttcttcgacctcgtggagttctcggcggaagacgcttcgagaacggaggttcccttcctgatagaggcttacaagacggcgatcgaagccggagccactacgatcaacgttccggacacggtggggtacgcccttcccgacgagtttggagaactcataaagactctgagggagggtgtgcccggtatagaaaacgtcgatctctctgtgcactgtcacaacgatctcggactcgccgtggcgaactcccttgccgccgttcagaacggagccacccaggtcgaggtgactttgaacggcatcggagaaagggcaggaaactgcgccctggaagagttcgtgatgatcctcaaggtgaggaaagacaaacttccctacgagacgggtataaagacggagctcatataccccgcttccagactcctcacacacataacggggctcatcccgtccagaaacaaacccatagtgggagagaacgtgttccttcacgagtcgggaatacaccaggacggtgtgctgaaacacagagaaacctacgagatcatgaaaccttcagatatcggcaggtcttccgagacgctcgtgcttggaagacactccggaaaacacgccctcaggaagaaactggagacatacggcatcaaactcgacgaagagactttccagaaagtgttcgagaaattcacagaactcgccgacagaaagaaagaggtttacgacgatgatcttttctcgatcgtctctgaagttttgagggaacccatcaacggttacaaactcgttcacttccatgtacacaccggaaacacactgcttccaactgcggcggtcgtgcttcaggttggaaacgagaagagagaagcagcagaggcaggaaacggaccggtggatgccattttcaaggccatagacaaagcgctcggtatacagcccaagctcgaagagtacataattcaggcggttggaactggaaagaacgcgcagggagaagtcaaactcacgttgagaatagacaacgaactctacagtggaaggggagtttccacggacatagtggaggcctccgcgatagcttacataaacgcgataaacaagtacctcatcgccaaaggtcttctcagaaaaaacggaggtgctgagtga

SEQ ID NO: 108031 - protein, 513 aa, Thermotoga maritima
MRRIKIFDTTLRDGEQSPGASMSIEEKVEMALMLEDLGVDLIEAGFPVSSPVQFEAVKRVASAVQKPIVVGLARCVEKDIDAAYEALKDRPKDKRMIHVFIATSPIHRKYKLRMEKEEILERIRRYVGYAKQFFDLVEFSAEDASRTEVPFLIEAYKTAIEAGATTINVPDTVGYALPDEFGELIKTLREGVPGIENVDLSVHCHNDLGLAVANSLAAVQNGATQVEVTLNGIGERAGNCALEEFVMILKVRKDKLPYETGIKTELIYPASRLLTHITGLIPSRNKPIVGENVFLHESGIHQDGVLKHRETYEIMKPSDIGRSSETLVLGRHSGKHALRKKLETYGIKLDEETFQKVFEKFTELADRKKEVYDDDLFSIVSEVLREPINGYKLVHFHVHTGNTLLPTAAVVLQVGNEKREAAEAGNGPVDAIFKAIDKALGIQPKLEEYIIQAVGTGKNAQGEVKLTLRIDNELYSGRGVSTDIVEASAIAYINAINKYLIAKGLLRKNGGAE

SEQ ID NO: 108032 - DNA, 1551 bp, Vibrio cholerae; identical to SEQ ID NO: 13322
  CDS (1)..(1551): transl_table=11

SEQ ID NO: 108033 - protein, 516 aa, Vibrio cholerae; identical to SEQ ID NO: 13323

SEQ ID NO: 108034 - DNA, 1548 bp, Vibrio parahaemolyticus
  CDS (1)..(1548): transl_table=11
atgaacgatcaggtcattatattcgacaccaccttgcgtgatggcgagcaagcgttgtcagcaagcttgacggttaaagaaaaactgcagattgcctatgcgcttgaaaggctgggcgttgatgttatcgaagctggttttcctatctcttcccctggcgatttcgagtccgtacaaactattgcaaaacacatcaaaaatagccgagtttgtgccctttcgcgtgccgttgcgaaagacatcgatgccgcagctgaagcgctaaaagttgctgaccaattccgtatccacacttttctagccacttccacgattcacgttcaagacaagctacgccgcagttacgatgacgtacttgaaatggcggtcaacgccgttaaacacgcgcgtaactataccgatgatgtcgaattttcttgtgaagacgcaggccgtacgccaatcgacaatctatgtcgcatggttgaagccgcaattgatgctggcgcaagtaccatcaacattcccgataccgttggctacacagtgccaagcgagttcggtggcatcatccaaacgcttttcaaccgcgtgccgaacatcgacaaggccatcatttcagtgcactgtcatgatgacttgggcatgtcggtcgcaaactcaattgcagcagtacaagccggtgctcgccaaattgaaggcaccatcaatggtatcggcgagcgtgcgggtaactgctcactagaagagatcgcgatgatcatcaagacgcgtcaagagcttctgggcgtaagcacggggatcaagcacgaagaaatccatcgtactagcaagttagtgagtcaactgtgcaacatgccgatccaaagcaacaaagcggtcgtgggtgccaatgcattcagccattcttcaggtatccaccaagacggcatgttaaagaacaagaacacttacgagatcatgacgcctgagtcgattggtcttaagaaccaagcacttaacctaaccagtcgtagcggccgagcggcggtgaagagccacatggattccatgggttataaagaagatgagtacaacctagacgcactgtacgccgacttcttgaaactggccgaccgtaaaggccaagtgtttgattacgatttggaagcgctaatgcacttctccaacttgcgtgaagaagatgacttctacaagttgaattacctaagcgtgcaatcgggcagcgtgatggcaaccaccagcatcaagatgcaatgtggtgatgcggaaatgtgtgaagcggcggtcggcaatggtccggttgatgcgctataccaatgtatctaccgcgtgacaggttacgagatcgtactagataaattcgatctaaccgcaaaaggtgaaggtgaggatggtctaggtcaagcagacatcattgccaactacaaaggtagaaaataccacggtacgggcgtttcaaccgatatcgtagaagcttctggtcaagcgctattgcatgttatcaacagcatccatcgcgcagacaccattgccgagatgaagcagaaaaagattgctacggtatag

SEQ ID NO: 108035 - protein, 515 aa, Vibrio parahaemolyticus
MNDQVIIFDTTLRDGEQALSASLTVKEKLQIAYALERLGVDVIEAGFPISSPGDFESVQTIAKHIKNSRVCALSRAVAKDIDAAAEALKVADQFRIHTFLATSTIHVQDKLRRSYDDVLEMAVNAVKHARNYTDDVEFSCEDAGRTPIDNLCRMVEAAIDAGASTINIPDTVGYTVPSEFGGIIQTLFNRVPNIDKAIISVHCHDDLGMSVANSIAAVQAGARQIEGTINGIGERAGNCSLEEIAMIIKTRQELLGVSTGIKHEEIHRTSKLVSQLCNMPIQSNKAVVGANAFSHSSGIHQDGMLKNKNTYEIMTPESIGLKNQALNLTSRSGRAAVKSHMDSMGYKEDEYNLDALYADFLKLADRKGQVFDYDLEALMHFSNLREEDDFYKLNYLSVQSGSVMATTSIKMQCGDAEMCEAAVGNGPVDALYQCIYRVTGYEIVLDKFDLTAKGEGEDGLGQADIIANYKGRKYHGTGVSTDIVEASGQALLHVINSIHRADTIAEMKQKKIATV

SEQ ID NO: 108036 - DNA, 1548 bp, Vibrio vulnificus
  CDS (1)..(1548): transl_table=11
atgaacgatcaggtaattatattcgacaccacgttacgtgatggcgaacaagcgttatcagcgagcctaacggtaaaagagaagttgcagattgcttatgcgcttgaacgacttggcgttgatgtgatcgaagcaggcttcccggtttcttctcctggtgattttgagtccgtacaaaccatcgctcgtaatattaaaaacagccgcgtatgtgccctttctcgcgccgtagaaaaagacattgatgccgccgctgaagccttgaaagtggcagaagcatttcgtatccacacttttatttccacctcgaccattcacgtgcaagacaaattacgtcgtagctacgatgatgtcgttgaaatgggcgttagagcagtaaaacatgctcgcaaatacacggacgatgtggaattttcttgcgaagatgccggacgtacgcctatcgacaatctttgccgcatggtagaagccgcgataaatgcgggcgcgcgtaccatcaatatcccagacaccgtgggctacaccgtaccaagcgaatttggcggcattatccaaaccctatttaaccgcgtaccgaacatcgacaaagcgatcatttcagttcactgtcacgatgatttaggcatgtctgtcgccaactccattgctgctgttcaagctggagctcgtcaggtcgaagggacaatcaatggcattggtgaacgagcgggtaactgctctctagaagagatcgccatgatcatcaaaactcgtcaagagttactaggggttcgaacaggcatcaaccacgaagaaatccatcgtaccagtaagttggtcagccaactttgcaacatgccaatccaagccaataaagccattgtcggtgccaatgcctttagccactcttccggtatccaccaagatggcatgctaaagaataagaacacttacgaaatcatgacgcctgagtcgattggcctgaagaaccaagcgctgaacctaaccagtcgcagtggccgtgctgcggtgaagagccacatggatgccatgggctataaggaagatgagtacaacttagatgcgctataccaagatttcctaaaactagcggatcgcaaaggacaagtcttcgactatgacctagaagcactgatgcacttctctaacctgcgcgaagaagatgattattacaagctgaactacctaagcgtgcaatcaggcagcgtgatggcgaccaccagcattaaactgttgtgtggcgatgaagagaaatgcgaagcagccgttggtaatggtcctgtcgatgcgttataccaatgtatctaccgtctgacgggctacgacatcgtattggacaagttcgatctcactgccaaaggggaaggtgaagacggcttaggccaagcagacattatcgccaattacaaaggccgtaagtaccacggtacgggtatctcaacggatatcgttgaagcatcaggtcaggcattgctgcacgttatcaacagcattcatcgtgccgacgaaattgccgaaatgaaacagaaaaagatcgcaaccgtataa

SEQ ID NO: 108037 - protein, 515 aa, Vibrio vulnificus
MNDQVIIFDTTLRDGEQALSASLTVKEKLQIAYALERLGVDVIEAGFPVSSPGDFESVQTIARNIKNSRVCALSRAVEKDIDAAAEALKVAEAFRIHTFISTSTIHVQDKLRRSYDDVVEMGVRAVKHARKYTDDVEFSCEDAGRTPIDNLCRMVEAAINAGARTINIPDTVGYTVPSEFGGIIQTLFNRVPNIDKAIISVHCHDDLGMSVANSIAAVQAGARQVEGTINGIGERAGNCSLEEIAMIIKTRQELLGVRTGINHEEIHRTSKLVSQLCNMPIQANKAIVGANAFSHSSGIHQDGMLKNKNTYEIMTPESIGLKNQALNLTSRSGRAAVKSHMDAMGYKEDEYNLDALYQDFLKLADRKGQVFDYDLEALMHFSNLREEDDYYKLNYLSVQSGSVMATTSIKLLCGDEEKCEAAVGNGPVDALYQCIYRLTGYDIVLDKFDLTAKGEGEDGLGQADIIANYKGRKYHGTGISTDIVEASGQALLHVINSIHRADEIAEMKQKKIATV

SEQ ID NO: 108038 - DNA, 1560 bp, Wolinella succinogenes; identical to SEQ ID NO: 13324
  CDS (1)..(1560): transl_table=11

SEQ ID NO: 108039 - protein, 519 aa, Wolinella succinogenes; identical to SEQ ID NO: 13325

SEQ ID NO: 108040 - DNA, 1563 bp, Xanthomonas axonopodis pv
  CDS (1)..(1563): transl_table=11
gtgaacacgaccgtatccaaccagaccccgcgtatccgaattttcgacaccaccctgcgcgacggcgagcaatcccccggctgcagcatgacgccccagcagaagctggtcatggcgcgcgcgctggacgaactcggcgtggacatcatcgaaaccggttttcctgccagctcgcattcggaccgcgaagcggtggcgatgatgggccgggaactgcgccgccccaccctggcggtgttgtcgcgctgcctgcaggccgatatcgaaacctcggccaaggcgctggagacagccgcaaacccgcgcctgcatgtgttcctgtccaccagcccgctgcaccgcgagcacaagctgcgcatgagccgcgagcaggtgctggaatcggtgcaccgacacgtgacgctggcgcgcggctatgtcgacgatgtggaattttctgccgaggatgcaacccgcaccgaagaagatttcctggccgaggtcacccgcgtggcgatcgccgccggcgccaccacgatcaatttgcccgacacggtcggcttcaccacgccggaagaaatccgtggcatgttctcgcgcctgatcgccagcgtggaaggtgccgacaaggtcatcttcagcgcgcactgccacaacgatctgggcctggcggtggccaactcgctggcggccatcgaaggcggtgcgcgccaggtggaatgcaccatcaatggcatcggtgagcgcgcgggcaattgcgcgctggaagaaatcaccatggcgctgaaggtgcgcggtgccttctacaacatcgattcggcgatcaatacgccgcgtatcgtgtctacctcgcaattgttgcaacgcctggtcggcatgccggtgcagcgcaacaaggcagtcgtgggcggcaacgccttcgcgcacgaatcgggcattcatcagcacggcatgctgcgccatcgcggcacctacgaaatcatgcgcccggaagatgtaggctgggaatcctcgcaaatggtactgggccgccacagcggccgcgccgcggtcgagcagcggctgcgcgcgctgggttatctgctggaggaggaagaggtcaagctggtgttcgaacagttcaaggcgctgtgcgagaagcagcgcgtggtgaccgatgccgatctgcaggcattgatgcaggacgccacggtgcaggaaggctatcgcctggcgtcgatgaccatcagcgacgtgggcagccgcgccaacgcgttggtggagttgtccgacccagaaggcaaccgtgtggccgaaaccgcgcagggcaacgggccggtggatgcgctcttcggcgcactggcctcggccaccggcgtgaagctggagctggacagctaccaggtgcacagcgtgggcatcggtgcggacgcgcgcggcgaagccagcctgagcgtgcgccacgacggcgtggaatacgaaggcaccggcaccagcaaggacatcatcgaagccagcgcgcttgcgtggctggatgtggccaaccgcttgttgcgtcagcgcgagcgtggcgtggtcgccggcaagaccgctgcggtggcgtaa

SEQ ID NO: 108041 - protein, 520 aa, Xanthomonas axonopodis pv
MNTTVSNQTPRIRIFDTTLRDGEQSPGCSMTPQQKLVMARALDELGVDIIETGFPASSHSDREAVAMMGRELRRPTLAVLSRCLQADIETSAKALETAANPRLHVFLSTSPLHREHKLRMSREQVLESVHRHVTLARGYVDDVEFSAEDATRTEEDFLAEVTRVAIAAGATTINLPDTVGFTTPEEIRGMFSRLIASVEGADKVIFSAHCHNDLGLAVANSLAAIEGGARQVECTINGIGERAGNCALEEITMALKVRGAFYNIDSAINTPRIVSTSQLLQRLVGMPVQRNKAVVGGNAFAHESGIHQHGMLRHRGTYEIMRPEDVGWESSQMVLGRHSGRAAVEQRLRALGYLLEEEEVKLVFEQFKALCEKQRVVTDADLQALMQDATVQEGYRLASMTISDVGSRANALVELSDPEGNRVAETAQGNGPVDALFGALASATGVKLELDSYQVHSVGIGADARGEASLSVRHDGVEYEGTGTSKDIIEASALAWLDVANRLLRQRERGVVAGKTAAVA

SEQ ID NO: 108042 - DNA, 1563 bp, Xanthomonas campestris pv
  CDS (1)..(1563): transl_table=11
gtgaacacgaccgtatccaaccagaccccgcatatccgaattttcgacaccaccctgcgcgacggcgagcaatcccccggctgcagcatgacgccccaacaaaagctggtcatggcgcgcgcgctggacgcgcttggcgtggacatcatcgaaaccggtttcccggccagctcgtattccgaccgcgaagcggtggcgatgatgggccgcgaattgcgccgccccaccctggcggtgctgtcgcgctgcctgcaggccgatatcgagatctctgcccgtgcactggaagcggccgccaacccgcgcctgcatgtgttcctgtccaccagcccgctgcaccgcgagcacaagctgcgcatgagccgcgagcaggtgctggaatcggtgcacaagcacgtgacgctggcgcgcggctacatcgacgacatcgagttctcggccgaagatgccacgcgcaccgaagaagatttcctggccgaagtgacacgcgtggccatcgccgcaggtgcgaccacgatcaacctgccggacacggtgggtttcaccacgccggaagaaatccgcggcatgttctcgcggctgatcgccagcgtcgaaggtgccgagaaggtgatcttcagcacgcactgccacaacgacctgggcctggcggctgccaactcgctggccgcaatcgaaggcggcgcgcgccaggtggaatgcaccatcaacggcatcggcgaacgcgccggcaattgcgcgctggaagaaatcaccatggccctgaaggtgcgtggtgcgttctacaacctggacaccgcaatcaatacgccgcgcatcgtctccacttcgcagctgctgcagcgtttggttggcatgccggtgcagcgcaacaaggcggtggtgggcggcaacgcgttcgcgcatgaatcgggcatccaccagcacggcatgctgcgtcaccgcggcacttacgaaatcatgcgcccggaagatgtgggctgggagtcgtcgcagatggtgctgggccgccacagcggccgcgcggcagtggaacagcgcctgcgcgcgctgggttacctgctggaggaagatgaggccaagctggtgttcgaacagttcaaggcattgtgcgaaaagcagcgcgtcgtcaccgacgccgacctgcaagccttgatgcaggacgccaccgtgcaggaaggctaccgcctggcctcgatgaccatcagcgatgtcggcagccgcgccaatgcactggttgagctgtccgacccggacggcaatcgcgttgcagaaacggcgcaaggcaatggcccggtagacgcgctattcggcgcgctggcgtcggccaccggtgtgaagctggaattggacagctaccaggtacacagcgtaggcatcggcgccgatgcccgcggcgaagccagcctgagcgtgcgccacgacggcgtggaatacgaaggcaccggcaccagcaaggacatcatcgaggccagtgccctggcctggctcgatgttgccaaccgcctgctgcgtcagcgcgagcgtggcgtggtggcggggaagacggcggcggtggcgtaa

SEQ ID NO: 108043 - protein, 520 aa, Xanthomonas campestris pv
MNTTVSNQTPHIRIFDTTLRDGEQSPGCSMTPQQKLVMARALDALGVDIIETGFPASSYSDREAVAMMGRELRRPTLAVLSRCLQADIEISARALEAAANPRLHVFLSTSPLHREHKLRMSREQVLESVHKHVTLARGYIDDIEFSAEDATRTEEDFLAEVTRVAIAAGATTINLPDTVGFTTPEEIRGMFSRLIASVEGAEKVIFSTHCHNDLGLAAANSLAAIEGGARQVECTINGIGERAGNCALEEITMALKVRGAFYNLDTAINTPRIVSTSQLLQRLVGMPVQRNKAVVGGNAFAHESGIHQHGMLRHRGTYEIMRPEDVGWESSQMVLGRHSGRAAVEQRLRALGYLLEEDEAKLVFEQFKALCEKQRVVTDADLQALMQDATVQEGYRLASMTISDVGSRANALVELSDPDGNRVAETAQGNGPVDALFGALASATGVKLELDSYQVHSVGIGADARGEASLSVRHDGVEYEGTGTSKDIIEASALAWLDVANRLLRQRERGVVAGKTAAVA

SEQ ID NO: 108044 - DNA, 1560 bp, Xylella fastidiosa
  CDS (1)..(1560): transl_table=11
gtgaacacgagcatatccagccagccaccccgtatccggatttttgataccaccctgcgggacggtgagcaatctcccggttgcagtatgcctgcacaacaaaaactggtcatggcgcgcgcattagatgcattgggcgtagacattatcgagactggtttcccagccagttcccaatccgactacgaagccatgacgctgatcgcacgcgagttacgtagaccaactctggcagtactgtcacgttgtctgcaagccgatatcgaaacttcagcacgcgcactagaatcagcaacaaaaccacgcttgcatgtatttctgtcaaccagcccattacaccgcgagcacaagctacgcatgagcaaggaacaggtgctggagtcagtgcacaagcatgtgagtctcagtcgaaccttgattgacgatgtggaattctcggccgaggatgcgacgcgcactgaagaggatttcctgatagaggttacccgcgtggcaatcgccgctggtgcaaccacgatcaacctgccagacaccgtagggttcagcacccctgaagaaatccgcaacatgtttacgcgcatcatcgcgaacgtcgaaggtgcaaacaaagtgatctttagtgcgcactgccacgacgatctgggtttggccgttgctaactcgctggcagccattgagggcggtgcacgccaaatcgaatgtactatcaacggcattggtgagcgcgctggtaactgcgcgctggaagaactcactatggtgttgaaagtacgcaacgcgttttacaacattgatacttcaatccacacatcacgtatcgtctccacctcccagttactgcaacgattggttgggatgcccgtgcaacgtaacaaggcagtagtaggtgccaatgcctttgcacatgagtcgggtatccaccagcacggtatgctgcgccatcgcggcacctacgaaatcatgcgtccacaagaagtggggtgggtatgttcgcacatggtgctcggccgccatagcggccgtgctgcggtcgaacagcgtctacgcgcactgggctacttgctggaggaagaagatctaaaactggtatttgaagaattcaaacagctttgtgagaaacagcgtttggtcaccgatgtcgacctgcaagtgctgatgcaagatacaacagtacagcatggctatcgcttggcctcaatgacaatcagtgatattggtaaccgggccaacgcactggtggaattgtccgatccccaaggtcagcgtgtggccgaaactgcgcaaggcaacggcccagtagatgcactgttcggagcgctggctgcagcaaccggggtcaaactggagttggacagctatcaggtacacagtgttggtatcggggccgatgcacgtggtgaagctaacctcagtgtacgccacaacgatactcagtacgaaggtacagggaccagtaaagacattatcgaagccagtgcgctcgcttggctagacgtcgccaaccgtttgctacgtaaccccgaaaatatgcaaaataaacaaaacacagcactggcctga

SEQ ID NO: 108045 - protein, 519 aa, Xylella fastidiosa
MNTSISSQPPRIRIFDTTLRDGEQSPGCSMPAQQKLVMARALDALGVDIIETGFPASSQSDYEAMTLIARELRRPTLAVLSRCLQADIETSARALESATKPRLHVFLSTSPLHREHKLRMSKEQVLESVHKHVSLSRTLIDDVEFSAEDATRTEEDFLIEVTRVAIAAGATTINLPDTVGFSTPEEIRNMFTRIIANVEGANKVIFSAHCHDDLGLAVANSLAAIEGGARQIECTINGIGERAGNCALEELTMVLKVRNAFYNIDTSIHTSRIVSTSQLLQRLVGMPVQRNKAVVGANAFAHESGIHQHGMLRHRGTYEIMRPQEVGWVCSHMVLGRHSGRAAVEQRLRALGYLLEEEDLKLVFEEFKQLCEKQRLVTDVDLQVLMQDTTVQHGYRLASMTISDIGNRANALVELSDPQGQRVAETAQGNGPVDALFGALAAATGVKLELDSYQVHSVGIGADARGEANLSVRHNDTQYEGTGTSKDIIEASALAWLDVANRLLRNPENMQNKQNTALA

SEQ ID NO: 108046 - DNA, 1560 bp, Xylella fastidiosa
  CDS (1)..(1560): transl_table=11
gtgaacacgagcatatccagccagccgccctgtatccggatttttgataccaccctgcgggacggtgagcaatctcccggttgcagtatgcctgcacaacaaaaactggtcatggcacgcgcattagatgcattgggcgtagacattatcgagactggtttcccagccagttcccaatccgactacgaagccatgacgctgatcgcacgcgagttacgtagaccaactctggcagtactgtcacgttgtctgcaagccgatatcgaaacttcagcacgcgcactggaatcagcaaccaaaccacgcttgcatgtatttctgtcaaccagcccattacaccgcgagcacaagctacgcatgagcaaggaacaggtgctggagtcagtgcacaagcatgtgagtctcagtcgaaccttgattgacgatgtggaattctcggccgaggatgcgacgcgcacagaggaggatttcctgatagaggttacccgcgtggcaatcgccgctggtgcaaccacgatcaacctgccagacaccgtagggttcagcacgcctgaagaaatccgcaacatgtttacgcgcgtcatcgcgaacgtcgaaggtgcaaacaaagtgatctttagtgcgcactgccacgacgatctgggtttggccgttgctaactcgctggcagccattgagggcggtgcacgccaaatcgaatgtactatcaatggcattggtgagcgcgctggtaactgcgcgctggaagaactcactatggtgttgaaagtacgcaacgcgttttacaacattgatacttcaatccacacatcacgtatcgtctccacctcccagttactgcaacgattggttggcatgcccgtgcaacgtaacaaggcagtagtaggtgccaatgcctttgcacatgaatcgggtatccaccagcacggtatgctgcgccatcgcggcacctacgaaatcatgcgtccacaagaagtcggttgggtatgttcgcatatggtgctcggccgccatagcggccgtgctgcggtcgaacagcgtctacgcgcactgggctacttgctggaggaagaagatctaaaactggtatttgaagaattcaaacagctttgtgagaaacagcgtttggtcaccgatgtcgacctgcaagtactgatgcaagatacaacagtacagcatggctatcgcttggcctcaatgacaatcagtgatgttggtaaccgggccaacgcactggtggaattgtccgatccccaaggtcagcgtgttgccgaaactgcgcaaggcaacggcccagtagatgcactgttcggagcgctggctgcagcaactggggtcaaactggagttggacagctatcaggtacacagtgttggtatcggggccgatgcacgtggtgaagcaaacctcagtgtacgccacaacgatactcagtacgaaggtacagggaccagtaaagacattatcgaagccagtgcgcttgcttggctagaggtcgccaaccgtttgctacgtaaccccgaaaatatgcaaaataaacaaaacacagcactggcctga

SEQ ID NO: 108047 - protein, 519 aa, Xylella fastidiosa
MNTSISSQPPCIRIFDTTLRDGEQSPGCSMPAQQKLVMARALDALGVDIIETGFPASSQSDYEAMTLIARELRRPTLAVLSRCLQADIETSARALESATKPRLHVFLSTSPLHREHKLRMSKEQVLESVHKHVSLSRTLIDDVEFSAEDATRTEEDFLIEVTRVAIAAGATTINLPDTVGFSTPEEIRNMFTRVIANVEGANKVIFSAHCHDDLGLAVANSLAAIEGGARQIECTINGIGERAGNCALEELTMVLKVRNAFYNIDTSIHTSRIVSTSQLLQRLVGMPVQRNKAVVGANAFAHESGIHQHGMLRHRGTYEIMRPQEVGWVCSHMVLGRHSGRAAVEQRLRALGYLLEEEDLKLVFEEFKQLCEKQRLVTDVDLQVLMQDTTVQHGYRLASMTISDVGNRANALVELSDPQGQRVAETAQGNGPVDALFGALAAATGVKLELDSYQVHSVGIGADARGEANLSVRHNDTQYEGTGTSKDIIEASALAWLEVANRLLRNPENMQNKQNTALA

SEQ ID NO: 108048 - DNA, 1860 bp, Saccharomyces cerevisiae
  CDS (1)..(1860)
atggttaaagagagtattattgctcttgctgagcatgcggcctccagagcctcaagagttattcctccagtgaagctagcctataaaaatatgcttaaggacccttcctccaagtacaagccatttaacgctccaaagctatctaatagaaagtggccggataaccggatcacgagggctcctcgttggttatcaacagatttgagagatggtaaccaatctctgccggatcccatgtcagtggaacaaaagaaagaatactttcacaagctggtcaatattgggttcaaagaaatcgaggtttccttcccctctgcatctcaaacagatttcgacttcactagatatgctgtagaaaacgccccagacgatgttagtattcaatgtcttgtccaatctagagaacacttgattaagagaacggtggaagcattaacaggtgctaaaaaggctactatacatacttacttggcaacaagtgatatgttccgtgaaattgtttttaatatgtctagagaggaagctatttccaaggcagtagaggccaccaaactagttaggaaactaactaaggatgacccttcccaacaagccactcgttggtcctatgagttttcccccgaatgtttcagtgatactccaggtgaatttgctgtagaaatttgcgaagctgttaagaaggcttgggaacctaccgaggaaaatccaatcattttcaacttacctgctaccgtagaagttgcctctccaaatgtttatgctgatcagattgaatacttcgctacccatattactgagcgtgagaaggtttgcatctctacacattgtcacaatgaccgtggttgcggtgtcgccgccacagagttaggtatgcttgcaggtgccgaccgtgtagaaggatgtctctttggtaatggtgaacgtacaggtaatgtggacttggttactgttgctatgaatatgtatacccaaggtgtttctcctaatttggatttctctgacttgacctctgtcctagatgtggttgagcgttgtaataagatcccagtatcgcaaagagcaccatacggcggtgacttggtcgtttgtgccttttccggttctcaccaagacgccattaagaagggtttcaacttacaaaacaagaagcgtgctcaaggtgaaactcaatggagaatcccatacttgccattggatccaaaggacattggccgtgattacgaagctgtcatcagagtcaactctcagtctggtaaaggtggtgccgcttgggttattttgagatctttgggtttggatctaccaagaaacatgcaaatcgaattttctagcgccgttcaagaccatgctgactccttgggtagagaactaaaatcagatgagatttccaagttattcaaagaggcttacaactacaatgacgaacagtaccaagctattagtttagtcaattataatgttgaaaaattcggcactgaacgtagagtgttcactggtcaagtcaaagtaggcgaccagatcgtcgatattgaaggtacaggtaatggtccaatctcttctttggtcgacgccctatcaaacttgttgaacgtgagatttgccgtagcaaactacacagagcattctctaggttctggttcttctacgcaagctgcttcttacatccatctatcgtataggcgtaatgccgacaacgaaaaggcctacaaatggggtgtaggtgtctccgaagatgtcggtgattcttcagtgagagccatctttgccaccattaacaatattatccattctggtgatgtgtccattccatctttggccgaggtcgaaggtaagaatgctgcggcatctggctctgcataa

SEQ ID NO: 108049 - protein, 619 aa, Saccharomyces cerevisiae
MVKESIIALAEHAASRASRVIPPVKLAYKNMLKDPSSKYKPFNAPKLSNRKWPDNRITRAPRWLSTDLRDGNQSLPDPMSVEQKKEYFHKLVNIGFKEIEVSFPSASQTDFDFTRYAVENAPDDVSIQCLVQSREHLIKRTVEALTGAKKATIHTYLATSDMFREIVFNMSREEAISKAVEATKLVRKLTKDDPSQQATRWSYEFSPECFSDTPGEFAVEICEAVKKAWEPTEENPIIFNLPATVEVASPNVYADQIEYFATHITEREKVCISTHCHNDRGCGVAATELGMLAGADRVEGCLFGNGERTGNVDLVTVAMNMYTQGVSPNLDFSDLTSVLDVVERCNKIPVSQRAPYGGDLVVCAFSGSHQDAIKKGFNLQNKKRAQGETQWRIPYLPLDPKDIGRDYEAVIRVNSQSGKGGAAWVILRSLGLDLPRNMQIEFSSAVQDHADSLGRELKSDEISKLFKEAYNYNDEQYQAISLVNYNVEKFGTERRVFTGQVKVGDQIVDIEGTGNGPISSLVDALSNLLNVRFAVANYTEHSLGSGSSTQAASYIHLSYRRNADNEKAYKWGVGVSEDVGDSSVRAIFATINNIIHSGDVSIPSLAEVEGKNAAASGSA

SEQ ID NO: 108050 - DNA, 1587 bp, Aquifex aeolicus
  CDS (1)..(1587): transl_table=11
atggcagaaaaggtatacatctacgacacgacactcagagacggttcacagatggaaggagtgagtttctcccttgaggataagataaggatagcggaaaagctggatgactttggcatacactacatagaaggcggttggccctacgcaaacccgaaagataatttattcttccagaaggctaaaaagatgaactttaaaaacgcaaagctgacagccttcggttctacgaggagacccaataagaaagtgagtgaggaccctcaagtggaatctttgataaaggcggaaacaccggtggtaacgattttcggaaagagctgggatctacacgttacagatgccctcaaaaccacccttgaagagaatttaaatatgatttacgagaccgttgagtacctcaagaggtacgttgacgaggttatatttgacgctgagcacttcttcgacggctacaagtcaaaccccgagtacgcacttcaagttttggaagctgctctgaaaggcggagcggactgggtcgttctctgcgacacaaacggaggcacccttccacacgagatatacgaaatcacgaagaaagtaaaagagaggtttaaggatgcaaacgtaggaatacacgcccacaacgactcggaaactgcggtggcaaactctttgatggccgtccttgcgggcgcgagacaggttcacggtaccataaacggaatcggcgagaggacgggaaacgcaaacctctgttcaataatcccgaaccttcaattgaagctcggatttgacgtaatacctcaggaaaatttaaagaagttaacggagcttgcgaacttcgttgcggagataataaacatgccacttcccagaaatatgccctacgtgggtgagagtgccttcgcacacaagggaggtgttcacgcctccgcggttctgaagaacgcgaaaacttacgagcacataaatccggaacttgtcggtaataagagaaagattacagtttctgatcttgcaggaaggagcaacctcgttcacaagttaaaggagttcggtatagagatagatccaaaatctcccgaacttaaaaaattgatagataagattaaggaactcgaaaaggagggttaccacttcgaagccgcggaagcatctttagaactcctcataaagagacactttggacttgtcaaggattacttcgactttgacgcctacagggtgcttatagcaaaaaggagggatgacagtctcccaacttcagaggctacagtaaggctttccgtggagggagtggaagaacacacggcatctctagggaacgggccgataagtgcccttgacagagctctgagaaaagcccttgaggagttttacccgaacctgaaagaactccagctcatagactacaaggtgaggataataaacgaaagtgcgggaacgtctgctaaagtaagggttttaatagaaagtacagacggaaagagaaagtggggaacggtaggggtttctgaaaacgttatagaggcttcgtggatagcccttcgcgacagcatagtttacaaactcatgaaggacgaagaggagggaatactttaa

SEQ ID NO: 108051 - protein, 528 aa, Aquifex aeolicus
MAEKVYIYDTTLRDGSQMEGVSFSLEDKIRIAEKLDDFGIHYIEGGWPYANPKDNLFFQKAKKMNFKNAKLTAFGSTRRPNKKVSEDPQVESLIKAETPVVTIFGKSWDLHVTDALKTTLEENLNMIYETVEYLKRYVDEVIFDAEHFFDGYKSNPEYALQVLEAALKGGADWVVLCDTNGGTLPHEIYEITKKVKERFKDANVGIHAHNDSETAVANSLMAVLAGARQVHGTINGIGERTGNANLCSIIPNLQLKLGFDVIPQENLKKLTELANFVAEIINMPLPRNMPYVGESAFAHKGGVHASAVLKNAKTYEHINPELVGNKRKITVSDLAGRSNLVHKLKEFGIEIDPKSPELKKLIDKIKELEKEGYHFEAAEASLELLIKRHFGLVKDYFDFDAYRVLIAKRRDDSLPTSEATVRLSVEGVEEHTASLGNGPISALDRALRKALEEFYPNLKELQLIDYKVRIINESAGTSAKVRVLIESTDGKRKWGTVGVSENVIEASWIALRDSIVYKLMKDEEEGIL

SEQ ID NO: 108052 - DNA, 1605 bp, Streptomyces coelicolor; identical to SEQ ID NO: 13326
  CDS (1)..(1605): transl_table=11

SEQ ID NO: 108053 - protein, 534 aa, Streptomyces coelicolor; identical to SEQ ID NO: 13327

SEQ ID NO: 108054 - DNA, 1617 bp, Thermotoga maritima
  CDS (1)..(1617): transl_table=11
ttgagtataaaggtctacgatacaacgctcagggacggtgcgcaggcctttggagtttctttctcactcgaagataagatcagaattgccgaggcactcgatgacctcggtgttcactatcttgaagggggttggcctggctccaacccgaaggatatagcgttttttgaagctgtaaaaggtatgaacttcaagaatctgaaagtggcggccttcagttccacaagaaggcccgacgtaaaaatagaagaagacgcgaacattcagaccctcataaaagcggaaacacctgtttacacgatctttggaaagagctgggatcttcacgtggaaaaagccttgcgaacgacactcgaagagaatctgaagatgatatacgacacagtttcatatctcaaaagattcgccgatgaggtgatatacgacgcggaacacttcttcgatgggtacaaggcgaacagagagtacgccctcaaaactctgaaggtggctgaagaagcgggggctgattgtctcgttctcgctgacacgaacggtggaacgcttccacacgagatcgaggagatcatcgaggatgtgaaaaagcacgtgaaagctccgctcggaatacacgctcacaacgattcggatgtggcggtggcgaatacactcgcggctgtgagaaagggagccgtgcacgtccaggggaccataaacggccttggagagagatgtggaaacgcgaatctctgttcggtgattccgaatctcgtcctcaagatgggtcttgaggttataccaaaggaaaatctgaagaaactcttcgatgtggcacacctcgttgcagaactctccggaagaccccacatcgagaacatgccctatgtgggtgattacgccttcgctcacaagggaggagtccatgtttctgccataaaacgcgatccaaggacttacgaacacatcgacccggaactcgtggggaacagaaggatcatatccatctcggaactttccggtaagagcaacgtgctggagaagataaaggaaatgggattcgaaatagatgagtcatcgcccaaggtcagggagatcctcaaaaagatcaaggaattggaagcgcaggggtaccacttcgagggtgcggaggcatctttcgagcttctcgtcagggatatgctcgggaaaagaaagaagtactttgagtttctcggtttcaccgtgatgaccataaagaacagggatgaggagagtttctccgaagcaaccgtgaaggtcagagtcccggacgaagttgcgaagagactgggacacgacgaaccctttgaacacacagcagcggaaggagaaggaccggtagaagccctcgacagagcggtgagaaaagccctcgagaaattctatccatctttgaaagacacgaaactcacggactacaaggtgagaatcctgaacgagcaggcgggcaccaaagcgacaacacgggttctcatagagtccagcgacggaaagagaaggtggggaactgtgggcgtctcaccgaacatcatagaggcttcctggaccgctcttctcgaatccttagagtacaagcttcacaaggatgaagaggagatgagaaacgatgaggagaattaa

SEQ ID NO: 108055 - protein, 538 aa, Thermotoga maritima
MSIKVYDTTLRDGAQAFGVSFSLEDKIRIAEALDDLGVHYLEGGWPGSNPKDIAFFEAVKGMNFKNLKVAAFSSTRRPDVKIEEDANIQTLIKAETPVYTIFGKSWDLHVEKALRTTLEENLKMIYDTVSYLKRFADEVIYDAEHFFDGYKANREYALKTLKVAEEAGADCLVLADTNGGTLPHEIEEIIEDVKKHVKAPLGIHAHNDSDVAVANTLAAVRKGAVHVQGTINGLGERCGNANLCSVIPNLVLKMGLEVIPKENLKKLFDVAHLVAELSGRPHIENMPYVGDYAFAHKGGVHVSAIKRDPRTYEHIDPELVGNRRIISISELSGKSNVLEKIKEMGFEIDESSPKVREILKKIKELEAQGYHFEGAEASFELLVRDMLGKRKKYFEFLGFTVMTIKNRDEESFSEATVKVRVPDEVAKRLGHDEPFEHTAAEGEGPVEALDRAVRKALEKFYPSLKDTKLTDYKVRILNEQAGTKATTRVLIESSDGKRRWGTVGVSPNIIEASWTALLESLEYKLHKDEEEMRNDEEN

SEQ ID NO: 108056 - DNA, 1908 bp, Oryza sativa; identical to SEQ ID NO: 13344
  CDS (1)..(1908)

SEQ ID NO: 108057 - protein, 635 aa, Oryza sativa; identical to SEQ ID NO: 13345

SEQ ID NO: 108058 - DNA, 1908 bp, Oryza sativa; identical to SEQ ID NO: 13346
  CDS (1)..(1908)

SEQ ID NO: 108059 - protein, 635 aa, Oryza sativa; identical to SEQ ID NO: 13347

SEQ ID NO: 108060 - DNA, 1770 bp, Oryza sativa; identical to SEQ ID NO: 13348
  CDS (1)..(1770)

SEQ ID NO: 108061 - protein, 589 aa, Oryza sativa; identical to SEQ ID NO: 13349

SEQ ID NO: 108062 - DNA, 1518 bp, Brassica napus; identical to SEQ ID NO: 13350
  CDS (1)..(1518)

SEQ ID NO: 108063 - protein, 505 aa, Brassica napus; identical to SEQ ID NO: 13351

SEQ ID NO: 108064 - DNA, 1881 bp, Zea mays; identical to SEQ ID NO: 13352
  CDS (1)..(1881)

SEQ ID NO: 108065 - protein, 626 aa, Zea mays; identical to SEQ ID NO: 13353

SEQ ID NO: 108066 - DNA, 1518 bp, Brassica napus; identical to SEQ ID NO: 13354
  CDS (1)..(1518)

SEQ ID NO: 108067 - protein, 505 aa, Brassica napus; identical to SEQ ID NO: 13355

SEQ ID NO: 108068 - DNA, 1875 bp, Glycine max; identical to SEQ ID NO: 13356
  CDS (1)..(1875)

SEQ ID NO: 108069 - protein, 624 aa, Glycine max; identical to SEQ ID NO: 13357

SEQ ID NO: 108070 - DNA, 1875 bp, Glycine max; identical to SEQ ID NO: 13358
  CDS (1)..(1875)

SEQ ID NO: 108071 - protein, 624 aa, Glycine max; identical to SEQ ID NO: 13359

SEQ ID NO: 108072 - DNA, 1674 bp, Glycine max; identical to SEQ ID NO: 13360
  CDS (1)..(1674)

SEQ ID NO: 108073 - protein, 557 aa, Glycine max; identical to SEQ ID NO: 13361

SEQ ID NO: 108074 - DNA, 1881 bp, Zea mays; identical to SEQ ID NO: 13362
  CDS (1)..(1881)

SEQ ID NO: 108075 - protein, 626 aa, Zea mays; identical to SEQ ID NO: 13363

SEQ ID NO: 108076 - DNA, 1881 bp, Zea mays; identical to SEQ ID NO: 13364
  CDS (1)..(1881)

SEQ ID NO: 108077 - protein, 626 aa, Zea mays; identical to SEQ ID NO: 13365

SEQ ID NO: 108078 - DNA, 1926 bp, Zea mays; identical to SEQ ID NO: 13366
  CDS (1)..(1926)

SEQ ID NO: 108079 - protein, 641 aa, Zea mays; identical to SEQ ID NO: 13367

SEQ ID NO: 108080 - DNA, 1881 bp, Zea mays; identical to SEQ ID NO: 13368
  CDS (1)..(1881)

SEQ ID NO: 108081 - protein, 626 aa, Zea mays; identical to SEQ ID NO: 13369

SEQ ID NO: 108082 - DNA, 1866 bp, Zea mays; identical to SEQ ID NO: 13370
  CDS (1)..(1866)

SEQ ID NO: 108083 - protein, 621 aa, Zea mays; identical to SEQ ID NO: 13371

SEQ ID NO: 108084 - DNA, 21 bp, Artificial sequence
  primer
atggagaaggaacggcacatc

SEQ ID NO: 108085 - DNA, 24 bp, Artificial sequence
  primer
ttagaccccacggtggacctcctc

SEQ ID NO: 108086 - protein, 694 aa, Artificial sequence
  consensus sequence
  Variant (8)..(8): Xaa in position 8 is any amino acid
  Variant (10)..(19): Xaa in position 10 to 19 is any amino acid
  Variant (21)..(21): Xaa in position 21 is any amino acid
  Variant (22)..(23): Xaa in position 22 to 23 is any or no amino acid
  Variant (25)..(26): Xaa in position 25 to 26 is any amino acid
  Variant (27)..(27): Xaa in position 27 is any or no amino acid
  Variant (29)..(33): Xaa in position 29 to 33 is any amino acid
  Variant (35)..(36): Xaa in position 35 to 36 is any amino acid
  Variant (38)..(38): Xaa in position 38 is any amino acid
  Variant (42)..(43): Xaa in position 42 to 43 is any amino acid
  Variant (45)..(46): Xaa in position 45 to 46 is any amino acid
  Variant (48)..(66): Xaa in position 48 to 66 is any amino acid
  Variant (67)..(81): Xaa in position 67 to 81 is any or no amino acid
  Variant (83)..(87): Xaa in position 83 to 87 is any amino acid
  Variant (89)..(91): Xaa in position 89 to 91 is any amino acid
  Variant (92)..(99): Xaa in position 92 to 99 is any or no amino acid
  Variant (101)..(104): Xaa in position 101 to 104 is any amino acid
  Variant (105)..(108): Xaa in position 105 to 108 is any or no amino acid
  Variant (110)..(112): Xaa in position 110 to 112 is any amino acid
  Variant (114)..(115): Xaa in position 114 to 115 is any amino acid
  Variant (117)..(120): Xaa in position 117 to 120 is any amino acid
  Variant (121)..(129): Xaa in position 121 to 129 is any or no amino acid
  Variant (131)..(158): Xaa in position 131 to 158 is any amino acid
  Variant (159)..(171): Xaa in position 159 to 171 is any or no amino acid
  Variant (173)..(175): Xaa in position 173 to 175 is any amino acid
  Variant (177)..(178): Xaa in position 177 to 178 is any amino acid
  Variant (180)..(194): Xaa in position 180 to 194 is any amino acid
  Variant (198)..(203): Xaa in position 198 to 203 is any amino acid
  Variant (204)..(210): Xaa in position 204 to 210 is any or no amino acid
  Variant (215)..(217): Xaa in position 215 to 217 is any amino acid
  Variant (219)..(237): Xaa in position 219 to 237 is any amino acid
  Variant (238)..(279): Xaa in position 238 to 279 is any or no amino acid
  Variant (281)..(281): Xaa in position 281 is any amino acid
  Variant (283)..(283): Xaa in position 283 is any amino acid
  Variant (285)..(285): Xaa in position 285 is any amino acid
  Variant (287)..(287): Xaa in position 287 is any amino acid
  Variant (289)..(289): Xaa in position 289 is any amino acid
  Variant (292)..(298): Xaa in position 292 to 298 is any amino acid
  Variant (300)..(300): Xaa in position 300 is any amino acid
  Variant (302)..(302): Xaa in position 302 is any amino acid
  Variant (304)..(304): Xaa in position 304 is any amino acid
  Variant (306)..(306): Xaa in position 306 is any amino acid
  Variant (308)..(308): Xaa in position 308 is any amino acid
  Variant (311)..(311): Xaa in position 311 is any amino acid
  Variant (315)..(315): Xaa in position 315 is any amino acid
  Variant (318)..(319): Xaa in position 318 to 319 is any amino acid
  Variant (321)..(344): Xaa in position 321 to 344 is any amino acid
  Variant (345)..(359): Xaa in position 345 to 359 is any or no amino acid
  Variant (361)..(362): Xaa in position 361 to 362 is any amino acid
  Variant (364)..(377): Xaa in position 364 to 377 is any amino acid
  Variant (380)..(381): Xaa in position 380 to 381 is any amino acid
  Variant (384)..(384): Xaa in position 384 is any amino acid
  Variant (386)..(386): Xaa in position 386 is any amino acid
  Variant (392)..(395): Xaa in position 392 to 395 is any amino acid
  Variant (397)..(399): Xaa in position 397 to 399 is any amino acid
  Variant (403)..(405): Xaa in position 403 to 405 is any amino acid
  Variant (406)..(423): Xaa in position 406 to 423 is any or no amino acid
  Variant (425)..(427): Xaa in position 425 to 427 is any amino acid
  Variant (429)..(438): Xaa in position 429 to 438 is any amino acid
  Variant (439)..(443): Xaa in position 439 to 443 is any or no amino acid
  Variant (446)..(456): Xaa in position 446 to 456 is any amino acid
  Variant (457)..(485): Xaa in position 457 to 485 is any or no amino acid
  Variant (487)..(540): Xaa in position 487 to 540 is any amino acid
  Variant (541)..(598): Xaa in position 541 to 598 is any or no amino acid
  Variant (600)..(600): Xaa in position 600 is any amino acid
  Variant (602)..(604): Xaa in position 602 to 604 is any amino acid
  Variant (606)..(659): Xaa in position 606 to 659 is any amino acid
  Variant (660)..(693): Xaa in position 660 to 693 is any or no amino acid
DTTLRDGXQXXXXXXXXXXKXXXAXXXLXXXXXDXXEXGFPXXSXXDXXXXXXXXXXXXXXXXXXXXXXXXXXXXXXXXXXRXXXXXIXXXXXXXXXXXAXXXXXXXXFXXXSXXHXXXXXXXXXXXXXLXXXXXXXXXXXXXXXXXXXXXXXXXXXXXXXXXXXXXXXXXEXXXDXXRXXXXXXXXXXXXXXXAGAXXXXXXXXXXXXXDTVGXXXPXXXXXXXXXXXXXXXXXXXXXXXXXXXXXXXXXXXXXXXXXXXXXXXXXXXXXXXXXXXXXHXHXDXGXAXANXXXXXXXGXAXQXEXTXNGXGERXGNXXLXXXXXXXXXXXXXXXXXXXXXXXXXXXXXXXXXXXXXXXSXXVXXXXXXXXXXXXXXVGXXAFXHXSGIHQXXXXKXXXTYEXXXXXXXXXXXXXXXXXXXXXPXXXGXXXXXXXXXXXXXXXSGXXXXXXXXXXXXXXXXXXXXXXXXXXXXXXXXXXXXXXXXGXXXXXXXXXXXXXXXXXXXXXXXXXXXXXXXXXXXXXXXXXXXXXXXXXXXXXXXXXXXXXXXXXXXXXXXXXXXXXXXXXXXXXXXXXXXXXXXXXXXXXXXXXXXXXXXXGXGXXXAXXXXXXXXXXXXXXXXXXXXXXXXXXXXXXXXXXXXXXXXXXXXXXXXXXXXXXXXXXXXXXXXXXXXXXXXXXXXXXXXXXXXXXXXA

SEQ ID NO: 108087 - protein, 29 aa, Artificial sequence
  protein pattern
  Variant (2)..(3): Xaa in position 2 to 3 is any amino acid
  Variant (4)..(4): Xaa in position 4 is any or no amino acid
  Variant (6)..(8): Xaa in position 6 to 8 is any amino acid
  Variant (9)..(9): Xaa in position 9 is Ala, Ser, Thr or Val
  Variant (10)..(10): Xaa in position 10 is Ile, Leu, Met or Val
  Variant (13)..(13): Xaa in position 13 is any amino acid
  Variant (17)..(17): Xaa in position 17 is Ala, Cys, Gly, Ser or Thr
  Variant (20)..(20): Xaa in position 20 is Ala, Cys or Thr
  Variant (21)..(21): Xaa in position 21 is Ala, Asp, Asn, Pro or Ser
  Variant (22)..(22): Xaa in position 22 is Leu, Met or Val
  Variant (23)..(23): Xaa in position 23 is any amino acid
  Variant (24)..(24): Xaa in position 24 is Glu, Gln, Ser or Thr
  Variant (25)..(28): Xaa in position 25 to 28 is any amino acid
  Variant (29)..(29): Xaa in position 29 is Phe, Ile, Leu, Met or Val
GXXXQXXXXXNGXGERXGNXXXXXXXXXX

SEQ ID NO: 108088 - protein, 20 aa, Artificial sequence
  protein pattern
  Variant (8)..(8): Xaa in position 8 is Ala, Glu or Thr
  Variant (10)..(11): Xaa in position 10 to 11 is any amino acid
  Variant (12)..(12): Xaa in position 12 is Ala, Asp, Gly, Asn, Gln or Ser
  Variant (13)..(13): Xaa in position 13 is any amino acid
  Variant (14)..(14): Xaa in position 14 is Ala, Asp, Gly, Asn, Ser or Thr
  Variant (15)..(15): Xaa in position 15 is Phe, Ile, Leu, Met or Val
  Variant (16)..(19): Xaa in position 16 to 19 is any amino acid
  Variant (20)..(20): Xaa in position 20 is Lys or Arg
DTTLRDGXQXXXXXXXXXXX

SEQ ID NO: 108089 - protein, 21 aa, Artificial sequence
  protein pattern
  Variant (2)..(2): Xaa in position 2 is any amino acid
  Variant (3)..(7): Xaa in position 3 to 7 is any or no amino acid
  Variant (9)..(9): Xaa in position 9 is Asp or Asn
  Variant (11)..(11): Xaa in position 11 is any amino acid
  Variant (12)..(12): Xaa in position 12 is Asp, Glu or Gly
  Variant (13)..(13): Xaa in position 13 is any amino acid
  Variant (14)..(14): Xaa in position 14 is Ala, Gly or Ser
  Variant (15)..(15): Xaa in position 15 is any amino acid
  Variant (17)..(17): Xaa in position 17 is Ala, Cys or Asn
  Variant (18)..(20): Xaa in position 18 to 20 is any amino acid
  Variant (21)..(21): Xaa in position 21 is Ala, Gly or Thr
HXXXXXXHXDXXXXXAXXXXX

SEQ ID NO: 108090 - protein, 27 aa, Artificial sequence
  protein pattern
  Variant (2)..(2): Xaa in position 2 is any amino acid
  Variant (3)..(3): Xaa in position 3 is any or no amino acid
  Variant (5)..(5): Xaa in position 5 is Ala, Asp or Glu
  Variant (6)..(8): Xaa in position 6 to 8 is any amino acid
  Variant (9)..(9): Xaa in position 9 is Ala, Ile or Val
  Variant (10)..(11): Xaa in position 10 to 11 is any amino acid
  Variant (12)..(12): Xaa in position 12 is Ile, Met or Val
  Variant (14)..(14): Xaa in position 14 is Ala, Gly, Pro, Thr or Val
  Variant (16)..(16): Xaa in position 16 is any amino acid
  Variant (17)..(17): Xaa in position 17 is Ala or Pro
  Variant (18)..(18): Xaa in position 18 is any amino acid
  Variant (19)..(19): Xaa in position 19 is Ala, Ser or Thr
  Variant (20)..(20): Xaa in position 20 is Gly, Asn or Ser
  Variant (21)..(22): Xaa in position 21 to 22 is any amino acid
  Variant (23)..(23): Xaa in position 23 is Asp, Glu, Gln, Ser or Thr
  Variant (24)..(26): Xaa in position 24 to 26 is any amino acid
  Variant (27)..(27): Xaa in position 27 is Phe, Ile, Met or Val
AXXLXXXXXXXXEXGXXXXXXXXXXXX

SEQ ID NO: 108091 - protein, 18 aa, Artificial sequence
  protein pattern
  Variant (2)..(2): Xaa in position 2 is any or no amino acid
  Variant (4)..(4): Xaa in position 4 is Ala or Val
  Variant (5)..(6): Xaa in position 5 to 6 is any amino acid
  Variant (7)..(7): Xaa in position 7 is Ile, Leu or Val
  Variant (8)..(8): Xaa in position 8 is Ala, Gly, Asn or Val
  Variant (9)..(9): Xaa in position 9 is any amino acid
  Variant (10)..(10): Xaa in position 10 is Ala, Cys or Pro
  Variant (13)..(13): Xaa in position 13 is Asn, Thr or Val
  Variant (15)..(17): Xaa in position 15 to 17 is any amino acid
AXGXXXXXXXDTXGXXXP

SEQ ID NO: 108092 - DNA, 1089 bp, Saccharomyces cerevisiae
  CDS (1)..(1089)
atgagtcagcaaacaccacaggaaagtgaacagaccacagcgaaagaacaggaccttgatcaagagagcgtgttgagcaacattgacttcaatacggatttgaatcacaatttgaatttatcggaatactgtatatccagtgacgcaggaacagagaagatggatagcgacgaggagaagtcgttggccaatctgccggagttgaaatacgctcccaagctatccagcctggtgaagcaagagacgctcaccgagagcttgaaaagaccacacgaagatgagaaagaggcgatagatgaggccaagaagatgaaagtgccgggagagaacgaggacgaaagcaaggaagaggaaaagagtcaagaactggaagaggcaattgacagcaaggagaagagcaccgacgccagggacgagcaaggggacgaaggtgataatgaggaggaaaacaacgaggaggataatgaaaacgaaaacgagcatacagcaccgcctgcgctggtgatgccctcccccatcgaaatggaggaacagaggatgactgcgctgaaggaaatcaccgacatcgagtacaagttcgcgcaattgcgccaaaaactatatgacaatcaattggtgcggttgcaaacggagctgcagatgtgtctggaagggtcacacccggaattgcaggtctactactcgaagattgccgcgatccgtgactacaagctacaccgagcgtaccagcgacagaagtacgagctttcatgcatcaacacagaaacaatcgctaccaggacattcattcaccaggacttccacaagaaggtcaccgacctgcgagccaggctgctgaacagaaccacgcagacctggtacgatatcaacaaggagcgccgcgatatggatatagtcatcccagatgtcaattaccacgtccccatcaaacttgataacaagacgctgagctgtatcacgggctacgcagcgcacgacagctgtgctatcccggcgagcccgtggcagaggacctcgcttgcgaaagcatcgagtaccgctacagagccaacccggtggacaaactcgaagtcattgtggaccgaatga

SEQ ID NO: 108093 - protein, 362 aa, Saccharomyces cerevisiae
MSQQTPQESEQTTAKEQDLDQESVLSNIDFNTDLNHNLNLSEYCISSDAGTEKMDSDEEKSLANLPELKYAPKLSSLVKQETLTESLKRPHEDEKEAIDEAKKMKVPGENEDESKEEEKSQELEEAIDSKEKSTDARDEQGDEGDNEEENNEEDNENENEHTAPPALVMPSPIEMEEQRMTALKEITDIEYKFAQLRQKLYDNQLVRLQTELQMCLEGSHPELQVYYSKIAAIRDYKLHRAYQRQKYELSCINTETIATRTFIHQDFHKKVTDLRARLLNRTTQTWYDINKERRDMDIVIPDVNYHVPIKLDNKTLSCITGYAAHDSCAIPASPWQRTSLAKASSTATEPTRWTNSKSLWTE

SEQ ID NO: 108094 - DNA, 1779 bp, Candida glabrata CBS 138
  CDS (1)..(1779)
atggagaatagagaattagagaaggagcccatggaggatagaattcctggaaatgaggcgatagaggaagatcaagagagtgttttgtctaatattgactttaacggacaagacggcgaggtgatcaccatgagaagcgagctgaacttgtctgaatactgtgtgagcagcgatgctgacactgagaagatggatgacgacgatgatgatggtaaacacccgcctttgaaagagttagtagtggatgctgagacactcagtagaaagcgcagtttagatgacgatgcgaccgaagatgtatttgaagacaagaagcccaagttagagcaagttgaagcttccgaagtaaacaatgagaatcaaggtaacgacaaccacacagaaacgaatgattcagttcctgttgaaccaattagtagtccgctgaatacgatggaaggtgtaaaacctccagtaataccctcagagaataccacagagctccggactgctgatcaggcatcaaatgagatcagtgtacctgacaaagagactgaagaatcaacaccaatgggtacggaagaacggttaaatgaagagaaagatacattagaacatcaatccaatgaaaaaccaaaaagtgcagagccggtacctcagccggaagaagtaagtaatgatctggcggacacagataccgtaattggcacagagtcaaagcaatcggaagatcaacttcatgatgttgtgccagaagaaccaacagaccctaactctgctcccgacaatgttgaagctccagttgaagctccagttaaagccgacattacaaaagagaataccgatgcagatgaaaatggccctgaagaaagcgaagttaaagaaggtgagaaagaagaagaaggcaatgatgaagaggcagcgaacaatattgacgaggatgaaggtgctgtgggtgatgctgacgatgatgaggatgaggatgacgacattgatgaggatgaagaagacgaagaggattcacagacggtagacaatgttgagacaagtgattcttcgaagaagaagaagcgcaagaagagttccatcttgcctatggtgctggaggagcgcagacaacaggcgctgaaagatataactgagatagagcacagttttgctgagctgagacagaagctttatgagaacaagctgaggaggctcgaaacagagttacaaatgtgtgttgagggctcacacccggagttgcatgagtactacgagaagatatccaagctgcgtgactttaagctacacaggacgtaccagagacagaagtatgagttgaaatgcatagacatcgagaccagggccacacgtactatgatccaccaaaacttcctgcgctgcgtcaacgagctcagatcgcaactgctgcaggacaccacgactaagtggtacgacatcaacaaggagagacgtgacatggacataattattcccgacatcaactaccacgtccctgtcaagaccgccaacaagacactgagctgcatcactggctacgcgggacccgcacagcccagacgttacctcggcgaacccttatccgaggacctcgaatgcgagaacatctcttaccgctacaacggcaacccagtcgacaagctcgaagttattgtggacagaatgcgcctgaacaacgagctgagcgacctcgaagggctcaagaaatactaccacgccttcccgggggcaccttccctctccacactacgtgactcagagatacaagacgacttcaactacctgagacagtaa

SEQ ID NO: 108095 - protein, 592 aa, Candida glabrata CBS 138
MENRELEKEPMEDRIPGNEAIEEDQESVLSNIDFNGQDGEVITMRSELNLSEYCVSSDADTEKMDDDDDDGKHPPLKELVVDAETLSRKRSLDDDATEDVFEDKKPKLEQVEASEVNNENQGNDNHTETNDSVPVEPISSPLNTMEGVKPPVIPSENTTELRTADQASNEISVPDKETEESTPMGTEERLNEEKDTLEHQSNEKPKSAEPVPQPEEVSNDLADTDTVIGTESKQSEDQLHDVVPEEPTDPNSAPDNVEAPVEAPVKADITKENTDADENGPEESEVKEGEKEEEGNDEEAANNIDEDEGAVGDADDDEDEDDDIDEDEEDEEDSQTVDNVETSDSSKKKKRKKSSILPMVLEERRQQALKDITEIEHSFAELRQKLYENKLRRLETELQMCVEGSHPELHEYYEKISKLRDFKLHRTYQRQKYELKCIDIETRATRTMIHQNFLRCVNELRSQLLQDTTTKWYDINKERRDMDIIIPDINYHVPVKTANKTLSCITGYAGPAQPRRYLGEPLSEDLECENISYRYNGNPVDKLEVIVDRMRLNNELSDLEGLKKYYHAFPGAPSLSTLRDSEIQDDFNYLRQ

SEQ ID NO: 108096 - DNA, 1821 bp, Kluyveromyces lactis NRRL Y-1140
  CDS (1)..(1821)
atggagccagagagaaacaaaaataacagtgtagaggctgcgagtgagattgacgatcataataccagatctgcccccactacgaaacttaccaaagaagttttagagaagattgcttcggattctgattctgttaattttaacgcaaatagttattcaaggaaatcgaaatcagggagtccctcaaaggttggtacattagaatacgacgataacagtaccagtggattatctaaggtcacttctccagaacatccaaactcagtctctctatcggacatatacatctcatcagacgctgagaccgaaaagatggatttagaagaggacgaatcacgtgtcaaactatcggaaatggcatccaattcgattgaaagtaacggtaatgacaaaagtaaacaaaatgatgataatctttcgaagactgtaaaacaagagtacatcaataatggtgtcggtagttatattcaagaatctgcccctaaacttgctactccttcaaaagatgagggaccaatcgttcagcaagataaaccagccgaaacagaacctgaaccagtaccgtatgaagatgacgctgttgctgatacagatcatacaacagagccaaataaacttgcactaagccaaaaccaggacgaagtatctgtacctgccgaaggaggcagtcaagaagaaacaattgcaaacgatgaacaagaacagcatgctccggtagtagaggagcaggcgaatgataacgagatcaaatcgcaagaagaatcagaagtgtctttaaagcataaccgtgaagaagagcaacagtccctagagaacggctcggagcatgtcaagtctgaacaggtgttcaagaaaccgaaattacctactgagtcaaaatcaggtcactatgaagacgagcatgaaacgcatgaaaacggagatcatgatgttgatatcgacgcggatgcagaagctgaggatgatggtactctagaaagtgaggttgaggacaataatgaggatgaagaggaagaattagaacccgaaatggacgcagtagaagaagataatgatgagaaacaacagacagatacacctggcgtcgattctaccgataatggactatcgcccatggagaaggaaaggataagacaagacgctttggcagaactaacaaatattgaagtcgaatttgctcaattgcgacagagtctatatgaaaacaagctgagcaaattacagaatgagctacagatgtgtctagatggatcacatcctcaactacagacttattatcagaagattgcttcgatacgggactttaagctaaagagaatgtaccaaaggcaaaagtatgagctggagtgcatagataccgaaactagggcgacaagaacgtttattcatcaagatttctacagaaaggtctcagatttgaaacataagttattaggaaacacaacccagaagtggtatgacatcaataaagagagacgtgaaatggacgttgttgtacctgaagtaaattatcacgttccaataaaaatttcaaataaatctttgagttgtataaccggatacgcagctcctgccaatctgagacgtccaggcgacttgttatcagaagatttattatgtgaaaatatcaatttcagatatcataacaaccctgtcgataagttagaagtcattgtagacagaatgaggtttaataatgaattgagcgacttagatggtataaggaaattctatggaggattcccaggtgctcctgaacttggtggtttaaaagattctgaaattcatgaggatcttgcaggaatacagcatcaacaatag

SEQ ID NO: 108097 - protein, 606 aa, Kluyveromyces lactis NRRL Y-1140
MEPERNKNNSVEAASEIDDHNTRSAPTTKLTKEVLEKIASDSDSVNFNANSYSRKSKSGSPSKVGTLEYDDNSTSGLSKVTSPEHPNSVSLSDIYISSDAETEKMDLEEDESRVKLSEMASNSIESNGNDKSKQNDDNLSKTVKQEYINNGVGSYIQESAPKLATPSKDEGPIVQQDKPAETEPEPVPYEDDAVADTDHTTEPNKLALSQNQDEVSVPAEGGSQEETIANDEQEQHAPVVEEQANDNEIKSQEESEVSLKHNREEEQQSLENGSEHVKSEQVFKKPKLPTESKSGHYEDEHETHENGDHDVDIDADAEAEDDGTLESEVEDNNEDEEEELEPEMDAVEEDNDEKQQTDTPGVDSTDNGLSPMEKERIRQDALAELTNIEVEFAQLRQSLYENKLSKLQNELQMCLDGSHPQLQTYYQKIASIRDFKLKRMYQRQKYELECIDTETRATRTFIHQDFYRKVSDLKHKLLGNTTQKWYDINKERREMDVVVPEVNYHVPIKISNKSLSCITGYAAPANLRRPGDLLSEDLLCENINFRYHNNPVDKLEVIVDRMRFNNELSDLDGIRKFYGGFPGAPELGGLKDSEIHEDLAGIQHQQ

SEQ ID NO: 108098 - DNA, 1629 bp, Debaryomyces hansenii CBS767
  CDS (1)..(1629)
atggctacggaagaatcaaacaacaaagaatcacctttaacagacatagccacgtcgcctcccccatttgatttgacattggataataaggagttggaaaacgaccaaacgtctaatttcatatcgaataaagctaattctggccaggaatcacaggaaaacaacagtaagacgaatcgagatagctacgagagttcggagctcagtgatttgggagaggacgaatcagaggcagaaacggataaaatggactttttggatgacgatcctaattccagcggtgaaaaagtgctggatttgaatgcgatttcgaagttgactgaattggcacacttgaaggaggtggactcggacaacgaagacgatgaaaatgttgtcaaagaagagcaatcggcaccacatgaggaagacggagagaaactggtgaaggagaccgaggaaacgctggaaaccaacaccaaaatagaggaaagctcgtcggatggtgaaatgtcaataaatccgaaggaaaatgcggaggccaacaaagaaatcatggaagatttggaaagaattagccaaagtgtggaagatggcaccaatagaaggccttctaaacgttctataagcgaacccgatcagacgaataacaagaagccaaagatggagagtgaagaagagccaaatactggaaagaccggtgaagatgtaccagataatgtgctaaatgatgagcacgagaactcagacgtagaggaatcgcaaaaagatgacttgaataacggtaatagtaatagtggtgaggacgaggagaacgatgatgcgaataatggaacaaagacagacgatcaggaggcagacgaggaagatgaagatgccgatgaaatgggagactttgaaagtagtgaaaaagatgtagacattaatgagaaacgcaaacttgctatcgaagagttgattattatcgagtcatcatttgcggaattgagagataaattatatcaggataaattgaatttacttgagcatgaattgcaactatgtctagaagggtcgcatccggaactatccaggatctattacaaaattaatcaatttcaccaagatagtttaaaacaggccaattcaaacctcaactataaattgaaatgcattgacgttagtaccatcgcatctcgaacctcgattcatcagaacttcctcaaaaagcttatggattgcaaaaacgacatgattactgatacgacatcattgtggtacaaaataaacaaagaacgtaaccaactagatcaactagtcccggactataacttcactgccatcccactgataccgaattatacggctactgtgcccatagaagagggtgctaatggtgtagccaatggcatactaaatggtcatgagattgctccgttgagcaaaaaaacaatcaaacaaaatacggtgttcgaattagtagagcaacgaaacaacttgaattgtcaattgggaatattgaatgggttattacagttccatggtctcccttctgctctatactcgaatgtagatgacaattttgtcgggccaagccaagaactattattgagaaaggcaaccgacgatgaaatcaatgaggacttaagggctatgggaatacccatgtag

SEQ ID NO: 108099 - protein, 542 aa, Debaryomyces hansenii CBS767
MATEESNNKESPLTDIATSPPPFDLTLDNKELENDQTSNFISNKANSGQESQENNSKTNRDSYESSELSDLGEDESEAETDKMDFLDDDPNSSGEKVLDLNAISKLTELAHLKEVDSDNEDDENVVKEEQSAPHEEDGEKLVKETEETLETNTKIEESSSDGEMSINPKENAEANKEIMEDLERISQSVEDGTNRRPSKRSISEPDQTNNKKPKMESEEEPNTGKTGEDVPDNVLNDEHENSDVEESQKDDLNNGNSNSGEDEENDDANNGTKTDDQEADEEDEDADEMGDFESSEKDVDINEKRKLAIEELIIIESSFAELRDKLYQDKLNLLEHELQLCLEGSHPELSRIYYKINQFHQDSLKQANSNLNYKLKCIDVSTIASRTSIHQNFLKKLMDCKNDMITDTTSLWYKINKERNQLDQLVPDYNFTAIPLIPNYTATVPIEEGANGVANGILNGHEIAPLSKKTIKQNTVFELVEQRNNLNCQLGILNGLLQFHGLPSALYSNVDDNFVGPSQELLLRKATDDEINEDLRAMGIPM

SEQ ID NO: 108100 - DNA, 1833 bp, Candida albicans SC5314
  CDS (1)..(1833): transl_table=12
atgagtcaagcacaaacagaagtcaataatatcgagctggtcgagaatcccctgtttacaaccccgcttaaaagagattccatctcaaatggtgatggtgaccttgattcaactacaaaccaagtagcaaacactaccttgggcagagaatcgccgttgagtgatattactgcatccccagtttcctttgatttgtcattgcgtgaagcagatggtgaaatccaaagcactattgacaatattgagaagtttttggaagaaagagaaccaattgatgaaaaccgtaacaataccaacaccaaaagcaaagagggaagcgaggaagctgacgatgcagttcaagaggttttgaaagaaatagaaacagagtttgcaaaggagttagaccacgacgataaagtacccaaagattcaaatattaccactggggatgacgtgaaaaacagagacagctatgaaagttcggagttgagtgatttagatgaaaaccaatcagaagctgaaactgataaaatggatttcttggatgaaataggaacagtgcaagacgaagatggctctaatggacaaagcaatggattgtctgacttgcaaaatttatcccaattaacagaactagccagactaaaggatgtggactctgattttggcgatgatgaggacgaagacgaacttaataatctgaacttgcattccaatggaaataaattagcaataaacggtgaatctcataagcgaacacttgaaattgacgatgaacatgaacaaaccaccaagaagcttaaggcagcaacccctgtttcagatctcaaagacaaggcacaagaagaggagcaaaaggacacaccaacagttgaaatagttgaaaacgataaaaagaaaaacaagttggacaatgatcagcaaaaaattgaactcattgtccttaaagatgaccaggaaattagcgcagaggacaatggtgctgaggcagagcctgaagatgaaggtgaagacaatgataatggcaacaatactgatgccccaaatgctgaagaggtggcgaatagtgaggctgtgcaaaaaaacaaagaagatgcagtcgttattgaaaatgaggaacgagacgatgttgatcttaataaacaaagaaatctagctattcaagagttgatcgcgatagaggcgaaatttgcagaagttcgagacaaacttttcaaagacaaattgtcactattggaaaaagaattacaactatgtcttgatggctcacatccagaactatcgaaaatttatggaaaaatcaatgaattttatcaagatggcctcagattagctaatgctaacttgatgtataaattaaaatgtgtcgataaagagaccattgctactagaacttcaatacaccagaacttcttaaggaatttgatggatacaaagaatggaatgataactgatacgacatcattatggtataaaatcaataaagaaaggaaccaattagatcagttagttcccgatttcacatttgcagctattccttcgatacctaatggttctatactgatagaagaatccatagtgaatggaaacattgatggtttggcagaactgtcagtctccaagaaattgcagaaacaaaatacgctaatagagttggtaaaacaacgtaacaatatcaacgaacaattgggaatattgaatggtctagtagaatttcatggatttcctagtgccatttcttcttctttaagtgaggaaatcctggatgatcaatcaaatgagttattattaaagaaagccactgatgaagaaatcaatagcgatttgcgtgccatgggtatttccatatag

SEQ ID NO: 108101 - protein, 610 aa, Candida albicans SC5314
MSQAQTEVNNIESVENPSFTTPLKRDSISNGDGDLDSTTNQVANTTLGRESPLSDITASPVSFDLSLREADGEIQSTIDNIEKFLEEREPIDENRNNTNTKSKEGSEEADDAVQEVLKEIETEFAKELDHDDKVPKDSNITTGDDVKNRDSYESSELSDLDENQSEAETDKMDFLDEIGTVQDEDGSNGQSNGLSDLQNLSQLTELARLKDVDSDFGDDEDEDELNNSNLHSNGNKLAINGESHKRTLEIDDEHEQTTKKLKAATPVSDLKDKAQEEEQKDTPTVEIVENDKKKNKLDNDQQKIELIVLKDDQEISAEDNGAEAEPEDEGEDNDNGNNTDAPNAEEVANSEAVQKNKEDAVVIENEERDDVDLNKQRNLAIQELIAIEAKFAEVRDKLFKDKLSLLEKELQLCLDGSHPELSKIYGKINEFYQDGLRLANANLMYKLKCVDKETIATRTSIHQNFLRNLMDTKNGMITDTTSLWYKINKERNQLDQLVPDFTFAAIPSIPNGSISIEESIVNGNIDGLAESSVSKKLQKQNTLIELVKQRNNINEQLGILNGLVEFHGFPSAISSSLSEEISDDQSNELLLKKATDEEINSDLRAMGISI

SEQ ID NO: 108102 - DNA, 1512 bp, Pichia guilliermondii
  CDS (1)..(1512)
atgcccaaagaagtcaactcagggcaagatgcctccaaaacaaaacacaatacttccaaaaatgaaacaaatggtagcactgtgcctgccggtgtaccaaatggaaatgacgctggcgtcggatctgtggccggagtgcaaaatgccaccgatgaaagttcggaattgagcgatttgggtgacgattccgaggctgaaaccgaccagatggactttttggaggacggcgatgacctgaataagaagctggatctccgggcactttcggatttgacgcaattggcacggttacagggagtagattccgacgaagaagacgtgaaaaagttggaagagccgcatctgggcgacgagcaagcgctctcgttgaaccccaaggacaacgaggaagccaaccgtgagataatgaaggatatagatgcgattcacgaggaattgggacaaccgaccccgctgttgcgtccggaaagtaaggtcgaaagcctgtcggaaagtaccgaaagccggccagagccggccaaaaagagaaaggtttccgacgaagaacgctccagaaagaagcagaagtctgaggtggagcccgatgtgaagaatgaggaaagtgagaatgtggacgaggaaactgaccaaatcgactctaaggttaagcctgaagatgaacctttggattcagttgttcacgaaacggttgaggaaaccgcagaggaagcggaggcggaagcggaggacgacgagggagacgaagaagaagcggatgaagccgacgagcctggggctcgagctgaagaagctaatagcgacgaagaaggagcagaagatgaagaagaagatgaagaagaagacgccgatatgagtgaaaaacgccaagctgcggttgctgagctcattgaaatcgaaaaagcatttgcgtcacttcgagacaaaatgtaccatgataaactcaatcttttagagcatgaactccaactatgtgttgaaggttcacatcccgaactttccaaaatctactacaagatcaacgctttccaccaagatgccctccgccaagcaaactccaacctttcgtaccgtctcaaatgcatcgaccgagaaaccgtcgcatgtcgaaccgcagttcaccaaaactttctcaagcaggtttacgacagcaaaagcgaaatgatcaccaacacaacctccatgtggtacaaaatcaaccgcgagcgcaaccagttggaccagctagttccagattacagttatagtgccagtggaggtgcttttgtatccaacgatggaaatgacgatggttcaacggcacttcctcaaagcgtgctttatgagcttgtgagccagcgaaatgccataaatcaccagttgggtattcttaatgggttggttgaattttctggaattccagcagcagtggggtccagtttgggtgatgagcaacaggttcctgaacttttgcttcggaaggccagtgaggaagaaattgctgatgatttgcgagcaatgggtgttatgtcgtag

SEQ ID NO: 108103 - protein, 503 aa, Pichia guilliermondii
MPKEVNSGQDASKTKHNTSKNETNGSTVPAGVPNGNDAGVGSVAGVQNATDESSELSDLGDDSEAETDQMDFLEDGDDLNKKLDLRALSDLTQLARLQGVDSDEEDVKKLEEPHLGDEQALSLNPKDNEEANREIMKDIDAIHEELGQPTPLLRPESKVESLSESTESRPEPAKKRKVSDEERSRKKQKSEVEPDVKNEESENVDEETDQIDSKVKPEDEPLDSVVHETVEETAEEAEAEAEDDEGDEEEADEADEPGARAEEANSDEEGAEDEEEDEEEDADMSEKRQAAVAELIEIEKAFASLRDKMYHDKLNLLEHELQLCVEGSHPELSKIYYKINAFHQDALRQANSNLSYRLKCIDRETVACRTAVHQNFLKQVYDSKSEMITNTTSMWYKINRERNQLDQLVPDYSYSASGGAFVSNDGNDDGSTALPQSVLYELVSQRNAINHQLGILNGLVEFSGIPAAVGSSLGDEQQVPELLLRKASEEEIADDLRAMGVMS

SEQ ID NO: 108104 - DNA, 1263 bp, Saccharomyces cerevisiae
  CDS (1)..(1263)
atgagtcagcaaacaccacaggaaagtgaacagaccacagcgaaagaacaggaccttgatcaagagagcgtgttgagcaacattgacttcaatacggatttgaatcacaatttgaatttatcggaatactgtatatccagtgacgcaggaacagagaagatggatagcgacgaggagaagtcgttggccaatctgccggagttgaaatacgctcccaagctatccagcctggtgaagcaagagacgctcaccgagagcttgaaaagaccacacgaagatgagaaagaggcgatagatgaggccaagaagatgaaagtgccgggagagaacgaggacgaaagcaaggaagaggaaaagagtcaagaactggaagaggcaattgacagcaaggagaagagcaccgacgccagggacgagcaaggggacgaaggtgataatgaggaggaaaacaacgaggaggataatgaaaacgaaaacgagcatacagcaccgcctgcgctggtgatgccctcccccatcgaaatggaggaacagaggatgactgcgctgaaggaaatcaccgacatcgagtacaagttcgcgcaattgcgccaaaaactatatgacaatcaattggtgcggttgcaaacggagctgcagatgtgtctggaagggtcacacccggaattgcaggtctactactcgaagattgccgcgatccgtgactacaagctacaccgagcgtaccagcgacagaagtacgagctttcatgcatcaacacagaaacaatcgctaccaggacattcattcaccaggacttccacaagaaggtcaccgacctgcgagccaggctgctgaacagaaccacgcagacctggtacgatatcaacaaggagcgccgcgatatggatatagtcatcccagatgtcaattaccacgtccccatcaaacttgataacaagacgctgagctgtatcacgggctacgccagcgcagcacagctgtgctatcccggcgagcccgtggcagaggacctcgcttgcgaaagcatcgagtaccgctacagagccaacccggtggacaaactcgaagtcattgtggaccgaatgaggctcaataacgagattagcgacctcgaaggcctgcgcaaatatttccactccttcccgggtgctcctgagttgaacccgcttagagactccgaaatcaacgacgacttccaccagtgggcccagtgtgaccgccacactggaccccataccacttctttttgttattcttaa

SEQ ID NO: 108105 - protein, 420 aa, Saccharomyces cerevisiae
MSQQTPQESEQTTAKEQDLDQESVLSNIDFNTDLNHNLNLSEYCISSDAGTEKMDSDEEKSLANLPELKYAPKLSSLVKQETLTESLKRPHEDEKEAIDEAKKMKVPGENEDESKEEEKSQELEEAIDSKEKSTDARDEQGDEGDNEEENNEEDNENENEHTAPPALVMPSPIEMEEQRMTALKEITDIEYKFAQLRQKLYDNQLVRLQTELQMCLEGSHPELQVYYSKIAAIRDYKLHRAYQRQKYELSCINTETIATRTFIHQDFHKKVTDLRARLLNRTTQTWYDINKERRDMDIVIPDVNYHVPIKLDNKTLSCITGYASAAQLCYPGEPVAEDLACESIEYRYRANPVDKLEVIVDRMRLNNEISDLEGLRKYFHSFPGAPELNPLRDSEINDDFHQWAQCDRHTGPHTTSFCYS

SEQ ID NO: 108106 - DNA, 24 bp, Artificial sequence
  primer
atgagtcagcaaacaccacaggaa

SEQ ID NO: 108107 - DNA, 24 bp, Artificial sequence
  primer
tcattcggtccacaatgacttcga

SEQ ID NO: 108108 - protein, 560 aa, Artificial sequence
  consensus sequence
  Variant (2)..(4): Xaa in position 2 to 4 is any amino acid
  Variant (5)..(7): Xaa in position 5 to 7 is any or no amino acid
  Variant (9)..(9): Xaa in position 9 is any amino acid
  Variant (11)..(11): Xaa in position 11 is any amino acid
  Variant (13)..(14): Xaa in position 13 to 14 is any amino acid
  Variant (17)..(28): Xaa in position 17 to 28 is any amino acid
  Variant (29)..(111): Xaa in position 29 to 111 is any or no amino acid
  Variant (113)..(165): Xaa in position 113 to 165 is any amino acid
  Variant (166)..(251): Xaa in position 166 to 251 is any or no amino acid
  Variant (253)..(308): Xaa in position 253 to 308 is any amino acid
  Variant (309)..(329): Xaa in position 309 to 329 is any or no amino acid
  Variant (331)..(332): Xaa in position 331 to 332 is any amino acid
  Variant (334)..(335): Xaa in position 334 to 335 is any amino acid
  Variant (337)..(339): Xaa in position 337 to 339 is any amino acid
  Variant (342)..(343): Xaa in position 342 to 343 is any amino acid
  Variant (346)..(346): Xaa in position 346 is any amino acid
  Variant (349)..(349): Xaa in position 349 is any amino acid
  Variant (353)..(355): Xaa in position 353 to 355 is any amino acid
  Variant (357)..(358): Xaa in position 357 to 358 is any amino acid
  Variant (360)..(361): Xaa in position 360 to 361 is any amino acid
  Variant (365)..(365): Xaa in position 365 is any amino acid
  Variant (367)..(368): Xaa in position 367 to 368 is any amino acid
  Variant (375)..(377): Xaa in position 375 to 377 is any amino acid
  Variant (379)..(379): Xaa in position 379 is any amino acid
  Variant (382)..(388): Xaa in position 382 to 388 is any amino acid
  Variant (390)..(397): Xaa in position 390 to 397 is any amino acid
  Variant (399)..(399): Xaa in position 399 is any amino acid
  Variant (401)..(401): Xaa in position 401 is any amino acid
  Variant (404)..(405): Xaa in position 404 to 405 is any amino acid
  Variant (408)..(408): Xaa in position 408 is any amino acid
  Variant (410)..(410): Xaa in position 410 is any amino acid
  Variant (413)..(413): Xaa in position 413 is any amino acid
  Variant (417)..(417): Xaa in position 417 is any amino acid
  Variant (419)..(423): Xaa in position 419 to 423 is any amino acid
  Variant (425)..(432): Xaa in position 425 to 432 is any amino acid
  Variant (435)..(436): Xaa in position 435 to 436 is any amino acid
  Variant (439)..(439): Xaa in position 439 is any amino acid
  Variant (445)..(447): Xaa in position 445 to 447 is any amino acid
  Variant (449)..(451): Xaa in position 449 to 451 is any amino acid
  Variant (454)..(459): Xaa in position 454 to 459 is any amino acid
  Variant (460)..(463): Xaa in position 460 to 463 is any or no amino acid
  Variant (465)..(489): Xaa in position 465 to 489 is any amino acid
  Variant (490)..(504): Xaa in position 490 to 504 is any or no amino acid
  Variant (506)..(518): Xaa in position 506 to 518 is any amino acid
  Variant (520)..(522): Xaa in position 520 to 522 is any amino acid
  Variant (523)..(525): Xaa in position 523 to 525 is any or no amino acid
  Variant (527)..(539): Xaa in position 527 to 539 is any amino acid
  Variant (540)..(548): Xaa in position 540 to 548 is any or no amino acid
  Variant (550)..(555): Xaa in position 550 to 555 is any amino acid
  Variant (558)..(559): Xaa in position 558 to 559 is any amino acid
LXXXXXXSXAXTXXMDXXXXXXXXXXXXXXXXXXXXXXXXXXXXXXXXXXXXXXXXXXXXXXXXXXXXXXXXXXXXXXXXXXXXXXXXXXXXXXXXXXXXXXXXXXXXXXXLXXXXXXXXXXXXXXXXXXXXXXXXXXXXXXXXXXXXXXXXXXXXXXXXXXXXXXXXXXXXXXXXXXXXXXXXXXXXXXXXXXXXXXXXXXXXXXXXXXXXXXXXXXXXXXXXXXXXXXXXXXXXXXXXXXXXXXXXXXXEXXXXXXXXXXXXXXXXXXXXXXXXXXXXXXXXXXXXXXXXXXXXXXXXXXXXXXXXXXXXXXXXXXXXXXXXXXXXXRXXAXXEXXXIEXXFAXLRXKLYXXXLXXLXXELQXCXXGSHPELXXXYXKIXXXXXXXLXXXXXXXXYXLXCIXXETXAXRTXIHQXFXXXXXDXXXXXXXXTTXXWYXINKERXXXDXXXPDXXXXXXXXXXNXXXXXXXXXXXXXXXXXXXXXXXXXXXXXXXXXXXXXXXXVXXXXXXXXXXXXXNXXXXXXGXXXXXXXXXXXXXXXXXXXXXXLXXXXXXEIXXD

SEQ ID NO: 108109 - protein, 61 aa, Artificial sequence
  protein pattern
  Variant (3)..(3): Xaa in position 3 is Leu or Met
  Variant (5)..(5): Xaa in position 5 is Leu or Val
  Variant (6)..(6): Xaa in position 6 is Asp or Glu
  Variant (13)..(14): Xaa in position 13 to 14 is any amino acid
  Variant (15)..(15): Xaa in position 15 is any or no amino acid
  Variant (17)..(17): Xaa in position 17 is any amino acid
  Variant (18)..(18): Xaa in position 18 is any or no amino acid
  Variant (21)..(21): Xaa in position 21 is Ala, Asn or Ser
  Variant (22)..(22): Xaa in position 22 is any amino acid
  Variant (23)..(23): Xaa in position 23 is Phe, Ile or Leu
  Variant (24)..(24): Xaa in position 24 is any amino acid
  Variant (25)..(25): Xaa in position 25 is Asp or Gln
  Variant (26)..(27): Xaa in position 26 to 27 is any amino acid
  Variant (29)..(29): Xaa in position 29 is His, Lys or Arg
  Variant (30)..(30): Xaa in position 30 is any amino acid
  Variant (31)..(31): Xaa in position 31 is Ala or Thr
  Variant (32)..(32): Xaa in position 32 is any amino acid
  Variant (33)..(33): Xaa in position 33 is Ala, Gln or Ser
  Variant (34)..(34): Xaa in position 34 is Asn or Arg
  Variant (35)..(36): Xaa in position 35 to 36 is any amino acid
  Variant (38)..(38): Xaa in position 38 is Glu, Lys or Arg
  Variant (40)..(40): Xaa in position 40 is any amino acid
  Variant (42)..(42): Xaa in position 42 is Ile or Val
  Variant (43)..(43): Xaa in position 43 is Asp or Asn
  Variant (44)..(44): Xaa in position 44 is any amino acid
  Variant (45)..(45): Xaa in position 45 is Glu or Ser
  Variant (47)..(47): Xaa in position 47 is any amino acid
  Variant (49)..(49): Xaa in position 49 is Cys, Ser or Thr
  Variant (52)..(52): Xaa in position 52 is any amino acid
  Variant (53)..(53): Xaa in position 53 is Ile or Val
  Variant (56)..(56): Xaa in position 56 is Asp or Asn
  Variant (58)..(58): Xaa in position 58 is any amino acid
  Variant (59)..(59): Xaa in position 59 is Lys or Arg
  Variant (60)..(60): Xaa in position 60 is any amino acid
  Variant (61)..(61): Xaa in position 61 is Leu or Val
LQXCXXGSHPELXXXYXXKIXXXXXXXLXXXXXXXXYXLXCXXXXTXAXRTXXHQXFXXXX

SEQ ID NO: 108110 - protein, 28 aa, Artificial sequence
  protein pattern
  Variant (2)..(2): Xaa in position 2 is Asp, Asn, Gln or Thr
  Variant (4)..(6): Xaa in position 4 to 6 is any or no amino acid
  Variant (9)..(9): Xaa in position 9 is Asp or Lys
  Variant (12)..(12): Xaa in position 12 is Lys or Arg
  Variant (15)..(15): Xaa in position 15 is Asn or Arg
  Variant (16)..(16): Xaa in position 16 is Asp or Gln
  Variant (17)..(17): Xaa in position 17 is Leu or Met
  Variant (19)..(19): Xaa in position 19 is any amino acid
  Variant (20)..(20): Xaa in position 20 is Ile, Leu or Val
  Variant (21)..(21): Xaa in position 21 is Ile or Val
  Variant (24)..(24): Xaa in position 24 is any amino acid
  Variant (25)..(25): Xaa in position 25 is Asn, Ser or Thr
  Variant (26)..(26): Xaa in position 26 is Phe or Tyr
  Variant (27)..(27): Xaa in position 27 is any amino acid
  Variant (28)..(28): Xaa in position 28 is Ala or Val
TXTXXXWYXINXERXXXDXXXPDXXXXX

SEQ ID NO: 108111 - protein, 25 aa, Artificial sequence
  protein pattern
  Variant (2)..(4): Xaa in position 2 to 4 is any amino acid
  Variant (5)..(5): Xaa in position 5 is any or no amino acid
  Variant (7)..(7): Xaa in position 7 is any amino acid
  Variant (8)..(8): Xaa in position 8 is any or no amino acid
  Variant (11)..(12): Xaa in position 11 to 12 is any amino acid
  Variant (15)..(15): Xaa in position 15 is Glu, Gln or Ser
  Variant (16)..(16): Xaa in position 16 is Leu or Val
  Variant (18)..(18): Xaa in position 18 is Asp or Gln
  Variant (20)..(20): Xaa in position 20 is Leu or Met
  Variant (21)..(21): Xaa in position 21 is Phe or Tyr
  Variant (22)..(22): Xaa in position 22 is any amino acid
  Variant (23)..(23): Xaa in position 23 is Asp or Asn
  Variant (24)..(24): Xaa in position 24 is any amino acid
AXXXXIXXIEXXFAXXRXKXXXXXL

SEQ ID NO: 108112 - protein, 9 aa, Artificial sequence
  protein pattern
  Variant (2)..(2): Xaa in position 2 is Asp or Glu
  Variant (4)..(4): Xaa in position 4 is Asp, Glu or Gly
  Variant (6)..(6): Xaa in position 6 is Asp or Glu
SXAXTXKMD

SEQ ID NO: 108113 - DNA, 1251 bp, Saccharomyces cerevisiae
  CDS (1)..(1251)
atgtctttatcttcaaagttgtctgtccaagatttggacttgaaggacaagcgtgtcttcatcagagttgacttcaacgtcccattggacggtaagaagatcacttctaaccaaagaattgttgctgctttgccaaccatcaagtacgttttggaacaccacccaagatacgttgtcttggcttctcacttgggtagaccaaacggtgaaagaaacgaaaaatactctttggctccagttgctaaggaattgcaatcattgttgggtaaggatgtcaccttcttgaacgactgtgtcggtccagaagttgaagccgctgtcaaggcttctgccccaggttccgttattttgttggaaaacttgcgttaccacatcgaagaagaaggttccagaaaggtcgatggtcaaaaggtcaaggcttccaaggaagatgttcaaaagttcagacacgaattgagctctttggctgatgtttacatcaacgatgccttcggtaccgctcacagagctcactcttctatggtcggtttcgacttgccacaacgtgctgccggtttcttgttggaaaaggaattgaagtacttcggtaaggctttggagaacccaaccagaccattcttggccatcttaggtggtgccaaggttgctgacaagattcaattgattgacaacttgttggacaaggtcgactctatcatcattggtggtggtatggctttcaccttcaagaaggttttggaaaacactgaaatcggtgactccatcttcgacaaggctggtgctgaaatcgttccaaagttgatggaaaaggccaaggccaagggtgtcgaagtcgtcttgccagtcgacttcatcattgctgatgctttctctgctgatgccaacaccaagactgtcactgacaaggaaggtattccagctggctggcaagggttggacaatggtccagaatctagaaagttgtttgctgctactgttgcaaaggctaagaccattgtctggaacggtccaccaggtgttttcgaattcgaaaagttcgctgctggtactaaggctttgttagacgaagttgtcaagagctctgctgctggtaacaccgtcatcattggtggtggtgacactgccactgtcgctaagaagtacggtgtcactgacaagatctcccatgtctctactggtggtggtgcttctttggaattattggaaggtaaggaattgccaggtgttgctttcttatccgaaaagaaataa

SEQ ID NO: 108114 - protein, 416 aa, Saccharomyces cerevisiae
MSLSSKLSVQDLDLKDKRVFIRVDFNVPLDGKKITSNQRIVAALPTIKYVLEHHPRYVVLASHLGRPNGERNEKYSLAPVAKELQSLLGKDVTFLNDCVGPEVEAAVKASAPGSVILLENLRYHIEEEGSRKVDGQKVKASKEDVQKFRHELSSLADVYINDAFGTAHRAHSSMVGFDLPQRAAGFLLEKELKYFGKALENPTRPFLAILGGAKVADKIQLIDNLLDKVDSIIIGGGMAFTFKKVLENTEIGDSIFDKAGAEIVPKLMEKAKAKGVEVVLPVDFIIADAFSADANTKTVTDKEGIPAGWQGLDNGPESRKLFAATVAKAKTIVWNGPPGVFEFEKFAAGTKALLDEVVKSSAAGNTVIIGGGDTATVAKKYGVTDKISHVSTGGGASLELLEGKELPGVAFLSEKK

SEQ ID NO: 108115 - DNA, 1543 bp, Oryza sativa
  CDS (86)..(1294)
gacatcgcaatccaaaccttcgtcttcgtcttcctctcgccgctgattcgattcgatccgatccgatccaaggggaggggaagcaatggcgacgaagaggagcgtggggacgctgggggaggcggatctgagggggaagaaggtgttcgtgcgggccgacctcaacgtgccgctcgacgacgcccagaagatcaccgacgacacccgcatccgcgcgtccgtgcccactgtcaagttcctcctcgagaagggcgccaaggtcatcctcgccagccatctgggccgtccgaagggtgtcacccccaagtacagcttgaagcctcttgttccacgcttgtctgagctacttggagtcgatgttgtgatggccaatgattgcattggtgaggaagttgagaaattggctgctgctttgccggaaggtggtgttctactcctagagaatgttagattctacaaggaggaagaaaagaatgatcctgagtttgccaagaagcttgcagctgtcgctgacctctatgtaaatgatgcttttggcactgcacacagagctcatgcttcaactgagggagtgaccaaatttttgaagcctgctgttgctggcttcctgatgcagaaggaacttgactatcttgttggagctgttgcaaacccaaagaagccatttgcggccatcgttggtggatccaaggtctcaactaagattggggtgattgagtctctgttggcaaaggttgatgtcctcatccttggtggtggtatgatcttcacattctacaaagcccagggatatgctgttggaaaatctcttgtggaggaagacaaacttgagcttgcaacttcacttattgagaaggcgaaggcgaagggtgtttctctcttacttcctaccgatgttgtagtggctgacaagtttgccgcagatgctgaaagcaagactgttgctgcctccgctatccccgatggttggataggtcttgatgttggcccagatgccatcaagacttccagcgaagcattggacacctgcaacactatcatttggaacggacctatgggagtctttgagtttgagaagtttgcagcaggcactgatgcaattgccaagaagttggctgatcttactaccacaaagggcgccacgaccatcatcggtggtggtgactccgttgctgcggtcgagaaggctgggctggccgacaagatgagccacatctccaccggcggtggtgctagcttggagttgctggaaggcaagaccctcccaggtgttcttgcccttgatgaagcgtaagctaattcggcttgtctccatcagcagtctgcacttttgtttcagacctctcggtgtaactttgcaatgtcaatgcttgtatgaagaacttgagataggcttatcgtcaagttttgctagatgagtcgtgaataagcttttcgacttcctcgctgccgcgagtgaagtggttcgaactgacatacatactctcatggatcgatattttgatatgcggttatcacatccctatgatggcatcatctgttg

SEQ ID NO: 108116 - protein, 402 aa, Oryza sativa
MATKRSVGTLGEADLRGKKVFVRADLNVPLDDAQKITDDTRIRASVPTVKFLLEKGAKVILASHLGRPKGVTPKYSLKPLVPRLSELLGVDVVMANDCIGEEVEKLAAALPEGGVLLLENVRFYKEEEKNDPEFAKKLAAVADLYVNDAFGTAHRAHASTEGVTKFLKPAVAGFLMQKELDYLVGAVANPKKPFAAIVGGSKVSTKIGVIESLLAKVDVLILGGGMIFTFYKAQGYAVGKSLVEEDKLELATSLIEKAKAKGVSLLLPTDVVVADKFAADAESKTVAASAIPDGWIGLDVGPDAIKTSSEALDTCNTIIWNGPMGVFEFEKFAAGTDAIAKKLADLTTTKGATTIIGGGDSVAAVEKAGLADKMSHISTGGGASLELLEGKTLPGVLALDEA

SEQ ID NO: 108117 - DNA, 1578 bp, Zea mays subsp. mays
  CDS (104)..(1312)
attcgatcgcctcacccgaagcacatcccgtcgcatcccatcccactaccacccatctcgtcgtccgccgattcgatccggttcttccaacccaggggcagtgatggcgacgaagaggagcgtgggcaccctcggcgaggcggatctgaaggggaagaaggtgttcgtgcgcgccgacctcaacgtcccgctcgacgatgcccagaagatcaccgacgacacccgcatccgcgcctccgtccccaccatcaagttcctcctcgagaagggcgccaaggtcatcctcgccagccacctgggtcgtccaaaaggtgtcaccccaaagtacagcttgaagcctcttgttccacgcttgtctgagctccttggagttgaagtcgtgatggccaatgattgcattggtgaggaagtcgagaagttggctgccgctttgccagaaggtggagttctgctcctagagaatgttagattctacaaggaggaagagaagaacgaacctgagtttgctaagaagcttgcatctgttgctgacctttatgtcaatgatgcttttggcacggcacacagagctcatgcttcaaccgaaggagttaccaagtatttgaagcctgctgttgctggcttcctcatgcagaaggaacttgactaccttgttggagctgttgccaacccaaagaagccatttgccgccattgttggtggatccaaggtctcaactaagattggtgtcattgagtcgttgctggcgaaggtcgatatcctcatccttggtggtggtatgatctacacattttacaaggcacagggatattctgttggaaaatctctcgtggaagaggataaactcgagctcgcaacttctcttattgagaaggcgaaggcaaagggggtttctcttttgcttcccactgatattgtagtagcggacaagtttgcagccgatgctgagagcaagattgtccctgccactgctatccctgatgactggatgggtcttgatgttggccctgatgccaccaaaacattcgacgaagcattggacaccaccaagactgttatttggaacggccccatgggagtgtttgagttccagaagtttgcagctggcaccgaggcgattgccaagaagctagctgagcttacaaccacgaagggtgtcactaccatcatcggcggtggcgactctgtcgctgctgtcgagaaggctgggctggccgacaagatgagccacatttcgaccggcggcggtgcgagcttggaactcttggaaggcaagactctacctggtgtccttgccctcgatgacgcctagatccgctgctgctgctgctactcaggttctgccagctttgcgtgtcatcttgtttcggaccttggtgtagcactgcaaggctaaggtttactcctccacacatggactttcgaggataggcttgccaccgtgttttgctagatgagtcgtgaaataagcttttacttcctcgctgctgtgggtgaagtgactggaattcggaaatttggaactaacaaaaccccccgtggatttgtatgatacgttttgttcgacagtttgcgtcc

SEQ ID NO: 108118 - protein, 402 aa, Zea mays subsp. mays
MATKRSVGTLGEADLKGKKVFVRADLNVPLDDAQKITDDTRIRASVPTIKFLLEKGAKVILASHLGRPKGVTPKYSLKPLVPRLSELLGVEVVMANDCIGEEVEKLAAALPEGGVLLLENVRFYKEEEKNEPEFAKKLASVADLYVNDAFGTAHRAHASTEGVTKYLKPAVAGFLMQKELDYLVGAVANPKKPFAAIVGGSKVSTKIGVIESLLAKVDILILGGGMIYTFYKAQGYSVGKSLVEEDKLELATSLIEKAKAKGVSLLLPTDIVVADKFAADAESKIVPATAIPDDWMGLDVGPDATKTFDEALDTTKTVIWNGPMGVFEFQKFAAGTEAIAKKLAELTTTKGVTTIIGGGDSVAAVEKAGLADKMSHISTGGGASLELLEGKTLPGVLALDDA

SEQ ID NO: 108119 - DNA, 1437 bp, Brassica napus
  CDS (54)..(1259)
tcgtcctctctcttagcatcagtcaactcattgtttacatctgttcatctactatggcgacgaagagaagcgttggaacgttgaaggaagctgatctgaagggaaagagcgtgttcgtgagggttgatctcaacgttcctttggatgataactctaacatcactgatgacaccaggattcgtgccgctgttcctaccgttaagtacttgatggaaaacggatctagagttgttctctgcagtcacttgggtcgtccaaaaggtgttacccctaaattcagcttaaagcctcttgtgccgaggttgtctgagcttcttgggattgaggttgtaatggcaaatgactctattggtgaggaagtccagaaactagtcgcaggactacctgaaggaggtgttctgctattggagaatgtgaggttctacaaggaagaagagaagaacgaccctgaatttgccaagaagctcgctgcccttgctgatgtctatgtcaacgatgctttcggaactgctcacagagcccatgcttccactgagggagttgccaaatacttgaagccttctgtcgctggtttcctcatgcagaaggaacttgattacctcgtcggagctgtggtaaaccccaagaatccttttgccgccattgttggaggttcaaaggtttcgacgaagattggtgtcattgagtcgctcctgtccaccgttgacatccttcttcttggtggaggtatgatttatactttctacaaggcacaaggacactctgtcggatcttctcttttggaagaggacaagcttgacttggccaggtcgctcatggagaaggccaaagccaaaggtgtctctcttttactcccaaccgatgtggttattgctgacaaattcgctcctgatgctaacagcaagatagtgccggccacggcaatcccagatggctggatgggactagatattggtccagactccatcaagacattcagcgaagcgctggacacaaccaagaccatcatctggaatggtcccatgggtgtttttgaatttgaaaagtttgcagctggaactgaggctgtagcaaagcagctggcggagctgagcggaaagggagtgaccacaatcataggaggaggtgactctgtcgctgccgttgaaaaggttggtttggctgacaagatgagtcacatctctacaggaggcggtgcaagtttggagcttctagagggaaagccactcccaggagtcctcgctctcgacgacgcttgagaatattttaagttcctgtccatgttatttattatacatcgtgtaccaagtcgtctggttttcttgtagccagagcaagccattaatattgtcagcttgagagttctctacggctttcttttagtttggagcctatttaataataaagagatgaaactctgagtaaaaaaaaaaaaaa

SEQ ID NO: 108120 - protein, 401 aa, Brassica napus
MATKRSVGTLKEADLKGKSVFVRVDLNVPLDDNSNITDDTRIRAAVPTVKYLMENGSRVVLCSHLGRPKGVTPKFSLKPLVPRLSELLGIEVVMANDSIGEEVQKLVAGLPEGGVLLLENVRFYKEEEKNDPEFAKKLAALADVYVNDAFGTAHRAHASTEGVAKYLKPSVAGFLMQKELDYLVGAVVNPKNPFAAIVGGSKVSTKIGVIESLLSTVDILLLGGGMIYTFYKAQGHSVGSSLLEEDKLDLARSLMEKAKAKGVSLLLPTDVVIADKFAPDANSKIVPATAIPDGWMGLDIGPDSIKTFSEALDTTKTIIWNGPMGVFEFEKFAAGTEAVAKQLAELSGKGVTTIIGGGDSVAAVEKVGLADKMSHISTGGGASLELLEGKPLPGVLALDDA

SEQ ID NO: 108121 - DNA, 1588 bp, Glycine max
  CDS (105)..(1310)
tcagctacgtaccccccccgcctgaacctgatcgatctctttaccagttgccacactacaccgagattccccctaaacccgtttgcgttgttgtttgcgaagaaatggcgactaagaggagcgtgggaacgttgaaggagggtgatttgaaagggaagagggtgttcgtgagggtcgatctgaacgtgcctttggatgacaaccttaacatcaccgatgacactagagtccgtgctgctgttcccaccatcaagtacttaactggtcatggagccaaagtgatcctttctagccacttgggacgtcctaaaggtgtaacacctaaatacagtttgaagcctcttgtgccaaggctgtctcaacttctcggaattgaggttacgatggcaaatgactctattggggaggaagttgagaagttggttgcacaacttccagaaggtggtgttttgcttctagagaatgtgaggttctataaggaggaagagaagaatgaccctgagtttgcaaagaagttggcttctcttgctgatctctacgtgaatgatgctttcggcactgcccacagagctcatgcttctacagaaggagtggccaaatacttgaagccctctgttgcaggattccttatgcagaaggaacttgactatctagttggagctgtgtcaaaccccaagagaccatttgctgctatcgttggtgggtcaaaggtgtcttccaagattggagttattgagtccttgttggagaaagttaacgttctcttgcttggtggaggaatgatctttaccttttacaaggctcagggttattcagttggttcatctcttgtggaggaagacaagcttagccttgcaactacacttctcgaaaaggccaaggctaaaggggtttctttgttgcttccaactgatgtggtcatagcagacaagtttgctgctgatgctaacagcaagactgtgccagcatcaagcatcccagacgggtggatgggattagatattggtcccgattccatcaagacatttggtgaagcattggataagacccagaccgtcatttggaatggaccaatgggtgtttttgagtttgataagtttgccacaggaacagaggccatagccaagaaactggcagagctgagtgggaagggagtaacgaccatcattggaggaggtgactctgttgccgctgtggagaaggttggtcttgcagacaagatgagccacatctccactggtggtggtgccagcttagagcttcttgaggggaagcaactccctggtgtccttgcccttgatgatgcttgagtaaacatcactagttcctctgtaatttgtgctttatattattattatggttggatttcagccaacagtggattgaggtacaatgagagagctcttgttgctcctgtagaggcttaatataggttaggtttcgaaataagagggttttgtggcatccttggtgttgcattgagctttgatctaattgttcttgaacaatgttcatttcaaaaggagttttactttgttagttatgttcctttagttttatcagtgaccaattttcaacttttcgtgtt

SEQ ID NO: 108122 - protein, 401 aa, Glycine max
MATKRSVGTLKEGDLKGKRVFVRVDLNVPLDDNLNITDDTRVRAAVPTIKYLTGHGAKVILSSHLGRPKGVTPKYSLKPLVPRLSQLLGIEVTMANDSIGEEVEKLVAQLPEGGVLLLENVRFYKEEEKNDPEFAKKLASLADLYVNDAFGTAHRAHASTEGVAKYLKPSVAGFLMQKELDYLVGAVSNPKRPFAAIVGGSKVSSKIGVIESLLEKVNVLLLGGGMIFTFYKAQGYSVGSSLVEEDKLSLATTLLEKAKAKGVSLLLPTDVVIADKFAADANSKTVPASSIPDGWMGLDIGPDSIKTFGEALDKTQTVIWNGPMGVFEFDKFATGTEAIAKKLAELSGKGVTTIIGGGDSVAAVEKVGLADKMSHISTGGGASLELLEGKQLPGVLALDDA

SEQ ID NO: 108123 - DNA, 1838 bp, Glycine max
  CDS (167)..(1618)
cgataagagaaatccaaaatcctctcaccacacccaatcgttcccgcgttgtcctccacgtcctcatcctttcatcacctctctcttccaccaaacaataaaaacctccaaacccactccagttaactccatacactctctctctctctctctctctctctctacaatggcctcagccgcagcccccacaactttctctctcctccactccaccaccccggcctcctcctcctccgccacctccgcctccccctcgcgcgtgcagctctcctcctccctccgctcgcgcccgctcgcgcgccgccttggcttcgccgcggcggacccgctgctcgcggcgaatgtcgcagcgcgcgtcgcggcggtgagaggaggaaagggcgcgaggggggtggtgtcgatggcgaagaagagcgtgggggagctgagcgcggcggacctgaaggggaagaaggtcttcgtcagggccgacctcaacgtcccgctcgacgacaaccagaacatcaccgacgacaccagaattcgcgccgccattcccaccatcaaacacctaatccaaaacggcgccaaagttattctctccagccacttggggaggccgaagggtgtcactcccaaatacagcttggcacctcttgtgccccggctttctgagctcattggtatccaggttgtcaaggctgaagacagtattggtccagaagtagaaaagttggtggcttctcttccagatggaggtgttcttcttctagaaaatgtgaggttttacaaggaggaagaaaagaatgatcccgagcatgcaaaaaagcttgcctctctggcagatctgtttgtgaatgatgcatttggtactgctcacagggcacatgcatcaacagagggtgttactaaatacctgaagccatctgttgctggttttcttttgcaaaaggaacttgattaccttgttggggcggtatcaagccccaaaaggccatttgctgccattgttggtggttccaaggtctcatctaaaattggagtgattgagtcacttttggaaaaagttgacattcttcttcttggtggaggaatgatcttcacattttacaaggcacaaggtctttcagtgggttcatcccttgtagaagaagataagttggatcttgctacatcactacttgcaaaagccaaggaaaagggggtgtctctcttgttaccaagtgatgtggtgattgcagacaaatttgcccccgatgcaaacagcaaggtcgtgccagcatctgccatccctgatggctggatgggattggatattggtccagattctgttaaatcattcagtgaagcattggatactacccaaaccatcatatggaatggaccaatgggagtgtttgagtttgacaagtttgctgttggtacagaggctattgcaaagaagctggctgatctcagtggaaagggggtgaccacaattatcggaggaggagattctgttgcagctgtggagaaagtaggagttgctagtgtcatgagccacatatctactggtggtggtgccagtttggagttattggaaggcaaagagcttccaggagtccttgctctcgatgaagccgtcccagttgccgtgtaagacaattttcagcttggaaaatttttccatcctcagatttcggtgttgtcaatcttgtaaaagagcatatgttgtaggacccttcggagtctgttagtgtaaattttatcatgcttgagttattattggcttcacacataaattgcgtgtaactgtaaaccctggctgagagccataaattcgaataaatcttttagttgctgccaaaaaaaaaaaaaaa

SEQ ID NO: 108124 - protein, 483 aa, Glycine max
MASAAAPTTFSLLHSTTPASSSSATSASPSRVQLSSSLRSRPLARRLGFAAADPLLAANVAARVAAVRGGKGARGVVSMAKKSVGELSAADLKGKKVFVRADLNVPLDDNQNITDDTRIRAAIPTIKHLIQNGAKVILSSHLGRPKGVTPKYSLAPLVPRLSELIGIQVVKAEDSIGPEVEKLVASLPDGGVLLLENVRFYKEEEKNDPEHAKKLASLADLFVNDAFGTAHRAHASTEGVTKYLKPSVAGFLLQKELDYLVGAVSSPKRPFAAIVGGSKVSSKIGVIESLLEKVDILLLGGGMIFTFYKAQGLSVGSSLVEEDKLDLATSLLAKAKEKGVSLLLPSDVVIADKFAPDANSKVVPASAIPDGWMGLDIGPDSVKSFSEALDTTQTIIWNGPMGVFEFDKFAVGTEAIAKKLADLSGKGVTTIIGGGDSVAAVEKVGVASVMSHISTGGGASLELLEGKELPGVLALDEAVPVAV

SEQ ID NO: 108125 - DNA, 1251 bp, Saccharomyces cerevisiae
  CDS (1)..(1251)
atgtctttatcttcaaagttgtctgtccaagatttggacttgaaggacaagcgtgtcttcatcagagttgacttcaacgtcccattggacggtaagaagatcacttctaaccaaagaattgttgctgctttgccaaccatcaagtacgttttggaacaccacccaagatacgttgtcttggcttctcacttgggtagaccaaacggtgaaagaaacgaaaaatactctttggctccagttgctaaggaattgcaatcattgttgggtaaggatgtcaccttcttgaacgactgtgtgcgtccagaagttgaagccgctgtcaaggcttctgccccaggttccgttattttgttggaaaacttgcgttaccacatcgaagaagaaggttccagaaaggtcgatggtcaaaaggtcaaggcttccaaggaagatgttcaaaagttcagacacgaattgagctctttggctgatgtttacatcaacgatgccttcggtaccgctcacagagctcactcttctatggtcggtttcgacttgccacaacgtgctgccggtttcttgttggaaaaggaattgaagtacttcggtaaggctttggagaacccaaccagaccattcttggccatcttaggtggtgccaaggttgctgacaagattcaattgattgacaacttgttggacaaggtcgactctatcatcattggtggtggtatggctttcaccttcaagaaggttttggaaaacactgaaatcggtgactccatcttcgacaaggctggtgctgaaatcgttccaaagttgatggaaaaggccaaggccaagggtgtcgaagtcgtcttgccagtcgacttcatcattgctgatgctttctctgctgatgccaacaccaagactgtcactgacaaggaaggtattccagctggctggcaagggttggacaatggtccagaatctagaaagttgtttgctgctactgttgcaaaggctaagaccattgtctggaacggtccaccaggtgttttcgaattcgaaaagttcgctgctggtactaaggctttgttagacgaagttgtcaagagctctgctgctggtaacaccgtcatcattggtggtggtgacactgccactgtcgctaagaagtacggtgtcactgacaagatctcccatgtctctactggtggtggtgcttctttggaattattggaaggtaaggaattgccaggtgttgctttcttatccgaaaagaaataa

SEQ ID NO: 108126 - protein, 416 aa, Saccharomyces cerevisiae
MSLSSKLSVQDLDLKDKRVFIRVDFNVPLDGKKITSNQRIVAALPTIKYVLEHHPRYVVLASHLGRPNGERNEKYSLAPVAKELQSLLGKDVTFLNDCVRPEVEAAVKASAPGSVILLENLRYHIEEEGSRKVDGQKVKASKEDVQKFRHELSSLADVYINDAFGTAHRAHSSMVGFDLPQRAAGFLLEKELKYFGKALENPTRPFLAILGGAKVADKIQLIDNLLDKVDSIIIGGGMAFTFKKVLENTEIGDSIFDKAGAEIVPKLMEKAKAKGVEVVLPVDFIIADAFSADANTKTVTDKEGIPAGWQGLDNGPESRKLFAATVAKAKTIVWNGPPGVFEFEKFAAGTKALLDEVVKSSAAGNTVIIGGGDTATVAKKYGVTDKISHVSTGGGASLELLEGKELPGVAFLSEKK

SEQ ID NO: 108127 - DNA, 1254 bp, Pongo pygmaeus
  CDS (1)..(1254)
atgtcgctttctaacaagctgacgctggacaagctggacgttaaagggaagcgggtcgttatgagagtcgacttcaatgttcctatgaagaacaaccagataacaaacaaccagaggattaaggctgctgtcccaagcatcaaattctgcttggacaatggagccaagtcagtagtccttatgagccacctaggccggcctgatggtgtccctatgcctgacaagtactccttagagccagttgctgtagaactcaaatctctgctgggcaaggatgttctgttcttgaaggactgtgtaggcccagaagtggagaaagcctgtgccaacccagctgctgggtctgtcatcctgctggagaacctccgctttcatgtggaggaagaagggaagggaaaagatgtttctgggaacaaggttaaagccgagccagccaaaatagaagctttccgagcttcactttccaagctaggggatgtctacgtcaatgatgcttttggcactgctcacagagcccacagctccatggtaggagtcaatctgccacagaaggctggtgggtttttgatgaagaaggagctgaactactttgcaaaggccttggagagcccagagcgacccttcctggccatcctgggcggagctaaagttgcagacaagatccagctcatcaataatatgctggacaaagtcaatgagatgattattggtggtggaatggcttttaccttccttaaggtgctcaacaacatggagattggcacttctctgtttgatgaagagggagccaagattgtcaaagacctaatgtccaaagctgagaagaatggtgtgaagattaccttgcctgttgactttgtcactgctgacaagtttgatgagaatgccaagactggccaagccactgtggcttctggcatacctgctggctggatgggcttggactgtggtcctgaaagcagcaagaagtatgctgaggctgtcactcgggctaagcagattgtgtggaatggtcctgtgggggtatttgaatgggaagcttttgcccagggaaccaaagctctcatggatgaggtggtgaaagccacttctaggggctgcatcaccatcataggtggtggagacactgccacttgctgtgccaaatggaacacggaggataaagtcagccatgtgagcactgggggtggtgccagtttggagctcctggaaggtaaagtccttcctggggtggatgctctcagcaatatttag

SEQ ID NO: 108128 - protein, 417 aa, Pongo pygmaeus
MSLSNKLTLDKLDVKGKRVVMRVDFNVPMKNNQITNNQRIKAAVPSIKFCLDNGAKSVVLMSHLGRPDGVPMPDKYSLEPVAVELKSLLGKDVLFLKDCVGPEVEKACANPAAGSVILLENLRFHVEEEGKGKDVSGNKVKAEPAKIEAFRASLSKLGDVYVNDAFGTAHRAHSSMVGVNLPQKAGGFLMKKELNYFAKALESPERPFLAILGGAKVADKIQLINNMLDKVNEMIIGGGMAFTFLKVLNNMEIGTSLFDEEGAKIVKDLMSKAEKNGVKITLPVDFVTADKFDENAKTGQATVASGIPAGWMGLDCGPESSKKYAEAVTRAKQIVWNGPVGVFEWEAFAQGTKALMDEVVKATSRGCITIIGGGDTATCCAKWNTEDKVSHVSTGGGASLELLEGKVLPGVDALSNI

SEQ ID NO: 108129 - DNA, 1248 bp, Toxoptera citricida
  CDS (1)..(1248)
atggcactaaacaaactaagcatcaagagtttagaagtggcaaacaaacgagttttgatcagagttgattttaatgttccattaaaagatggaaaaataaccaataaccaacgtattgttgctgcattagatagcatcaattatgtccttgaaaatggtgccaaatctttagttctcatgtcccatcttggacgtccagatggattaccaaattcaaagtactctatgaaaccagttgcagaggaactccaaaaactccttaataagaatgttacatttttgtctgactgtgttggcccagaagtagaaaatgcttgtgcagatcctgctcctggttcaatatttcttctggagaatcttcgattccatattgaagaagaaggaaaaggtgtaaatgctgctggggaaaaagctaaggctgacaaagaagatgtgaaaaaattcagagagtcattacaaaaattgggagatgtgtatgttaacgatgcttttggtactgcacacagagcccacagttctatgatgggtgaagggtttgaaaagcgtgctgccggcattttgttgaacaaagagctcacttattttgctaaagctttggataatcctgaaaggcctttcttagctatcttaggaggagctaaagttgctgataagattcaacttattgaaaatcttttagataaagttgatgaaatgattattggaggaggtatggcttacactttcttgaaagagtcaaaggggatgaaaattggcgattccttatatgatgaagctggagccaaaattgttggcaaattattagataaagctaatgctcgcaatgttaaaattcatttgccagttgattttgtcactgctgataaatttgatgaaaatgctaataccagttctgcaactgttgaagaaggtattcctgagggttggatgggtttggattgcggaccagaatctaggaaattgttttctgaacctattgctcgtgctaaggtcattgtatggaatgggcctgctggagtttttgagtttgataaatttgcttttggaactaaagcattaatggatgatgttgtacaggccactaaaaatggaactgtcactataattggaggtggtgatactgcaacttgtgctgctaaatgggggactgaaagtcaaataagccatgtgagcactggaggtggtgcaagtcttgaactacttgaaggaaaagtcttaccaggagttgcagctttgactgatgcataa

SEQ ID NO: 108130 - protein, 415 aa, Toxoptera citricida
MALNKLSIKSLEVANKRVLIRVDFNVPLKDGKITNNQRIVAALDSINYVLENGAKSLVLMSHLGRPDGLPNSKYSMKPVAEELQKLLNKNVTFLSDCVGPEVENACADPAPGSIFLLENLRFHIEEEGKGVNAAGEKAKADKEDVKKFRESLQKLGDVYVNDAFGTAHRAHSSMMGEGFEKRAAGILLNKELTYFAKALDNPERPFLAILGGAKVADKIQLIENLLDKVDEMIIGGGMAYTFLKESKGMKIGDSLYDEAGAKIVGKLLDKANARNVKIHLPVDFVTADKFDENANTSSATVEEGIPEGWMGLDCGPESRKLFSEPIARAKVIVWNGPAGVFEFDKFAFGTKALMDDVVQATKNGTVTIIGGGDTATCAAKWGTESQISHVSTGGGASLELLEGKVLPGVAALTDA

SEQ ID NO: 108131 - DNA, 1257 bp, Chondrus crispus
  CDS (1)..(1257)
atgtctttctccaagctctgtatcgacgctctcgatctcgctggcaagcgcgtcttcatccgtgtcgacttcaacgtccccttcgacaaggagaccggcaagaccatcaccaacacccagcgtatcgacgccgccctccccaccatcaaatacgctctggaaaagggcgccaagtccgtcgtcctcgcttcgcatctcggacgcccgtccggccgtgttaaccccaagttctcgctcaagcccgtggcagacgtcgtctcggagaagatcggcaagacggtcaccttcctcgaagatgccgtcggctccgctactgaggaggcttgcaaggaccccgagaccggatccgtcttcttgctcgagaatttgcgcttccacatcgaggaggagggcaagggcgttgatgctgatggcaacaagatcaaggctgatgctgctaaggtgacggagtttcggaagagtctcagcactttggctgatgtttacgttaacgacgcctttggcactgctcaccgcgctcactcgtccatggtcggcgtggatctcccacaaaaggcctctggctttctcatgaagaaggagcttgagtattttggaaaggccctgcaggaaccccaacgcccgtttcttagcattttaggaggatccaaggtgtccgataagatccaactcattgagaacttacttgataaggtcgatgagatgatcattggaggaggtatggcattcacattcaagaaagccgtcgagggaatggccattggacagtcgcttttcgacgaagccggtgcaaagatcgcgcaggaaattgtggacaaagctaaggcgaagaatgtcaagcttcatttccccgtcgacttcacgattgctgacaagtttgccccagtggctaacacaagagttgcgacggactcagagggcattccggatgaatggatgggtctcgatgcaggtccgaagagccaagaggcaatgcgcgaggtcgtgttgcgggcgaagacagtcgtgtggaacggtcctgtcggcgtgtttgagtttgaagcgtttgcaaaaggaacaaaggccgtggtcgatgctgtcgtggaagctacttcatctggagctgtgacgatcattggtggaggtgacacggccactgcagtaaaagagatgggtgcagcggattctgtgtctcacgtttccacgggcggtggtgcgagcctcgaactgctcgaaggaaagactctacccggcgtggccgcattgacagacgcatga

SEQ ID NO: 108132 - protein, 418 aa, Chondrus crispus
MSFSKLCIDALDLAGKRVFIRVDFNVPFDKETGKTITNTQRIDAALPTIKYALEKGAKSVVLASHLGRPSGRVNPKFSLKPVADVVSEKIGKTVTFLEDAVGSATEEACKDPETGSVFLLENLRFHIEEEGKGVDADGNKIKADAAKVTEFRKSLSTLADVYVNDAFGTAHRAHSSMVGVDLPQKASGFLMKKELEYFGKALQEPQRPFLSILGGSKVSDKIQLIENLLDKVDEMIIGGGMAFTFKKAVEGMAIGQSLFDEAGAKIAQEIVDKAKAKNVKLHFPVDFTIADKFAPVANTRVATDSEGIPDEWMGLDAGPKSQEAMREVVLRAKTVVWNGPVGVFEFEAFAKGTKAVVDAVVEATSSGAVTIIGGGDTATAVKEMGAADSVSHVSTGGGASLELLEGKTLPGVAALTDA

SEQ ID NO: 108133 - DNA, 1245 bp, Phytophthora infestans
  CDS (1)..(1245)
atggccaagctcagcatcaagaacgtggacgtcaagggcaagcgcgtgctcatccgcgtggatttcaacgttcctttcgcacaggacggctccatctccaacacgcagcgcatcgacgccgcgctgcccactgtgcagtacgtgctggaccagggtgctaaggctgtggtgctcatgtcccatttgggccgccccgagggcaagcccaaggccaaggactcgctggcccctgtggctgtggctgtggaacagaagctcggtcgtaaggtgacgttcctgaaggactgtgttggccccgaggttgaggctgcctgcgccaacccgactgagggcagcattattctgcttgagaaccttcgttttcacgtcgaagaggagggtaagggcaaggatgccgagggcaacaagaccaaggcgtcgtctgaggctgtggcagctttccgcgcctcgctgagcaagcttggcgacgtgtacgtcaacgacgcgttcggtacggcccaccgcgctcacagctccatggtgggcgtggatctccctattaaggccgctggctttctgctggacaaggagctagtgtacttcgccaaggctctggacgcccctcagcgccccttcgtgtcgattctgggtggtgccaaggttgctgacaagatccagctcatcatgaatatgctggacaaggtggacgagatggtcatcggtggcggcatggcctacacgttcaagaaggtgatcaacaacatggagatcggtggatcgctgtacgacgaggaaggcgccaagatcgtgcctcagatcgtggagaaggccaaggccaagggcgtgacgcttcacctgcctgtggacttcgtcatcgccgacaagttcgccgcggatgctgctacgaagatctcgacggaagaggagggcatccctgctggctggatgggtctggacgtcggccccaagtcgcaggaagcgttcagcgccgctgtggcgaaggccaagaccgtcgtctggaacggacccatgggcgtgttcgagttcgatgcttttgctgacggcacgaaagttgtcatggacgctgtggtcaaggccaccgagtcgggcgccactacgatcattggcggcggcgacacggccacgtgctgcgtcaagttcaacacggaggacaaggtctctcatgtgagcacgggcggcggtgccagtctggagcttctggagggcaagattctgcctggtgtggacgccctgtcctcggcgtga

SEQ ID NO: 108134 - protein, 414 aa, Phytophthora infestans
MAKLSIKNVDVKGKRVLIRVDFNVPFAQDGSISNTQRIDAALPTVQYVLDQGAKAVVLMSHLGRPEGKPKAKDSLAPVAVAVEQKLGRKVTFLKDCVGPEVEAACANPTEGSIILLENLRFHVEEEGKGKDAEGNKTKASSEAVAAFRASLSKLGDVYVNDAFGTAHRAHSSMVGVDLPIKAAGFLLDKELVYFAKALDAPQRPFVSILGGAKVADKIQLIMNMLDKVDEMVIGGGMAYTFKKVINNMEIGGSLYDEEGAKIVPQIVEKAKAKGVTLHLPVDFVIADKFAADAATKISTEEEGIPAGWMGLDVGPKSQEAFSAAVAKAKTVVWNGPMGVFEFDAFADGTKVVMDAVVKATESGATTIIGGGDTATCCVKFNTEDKVSHVSTGGGASLELLEGKILPGVDALSSA

SEQ ID NO: 108135 - DNA, 1254 bp, Caenorhabditis elegans
  CDS (1)..(1254)
atgagctccctcaacaagttggctatcgaccagttgaacctcgccggaaagcgagttttgatccgtgttgacttcaatgtcccactcaaggatggcaaaatcaccaacaatcaacgtattgctgccgctgttccaaccattcagcatgctcttagcaacggagccaaatctgtcgttttaatgtcacatttgggacgtccagatggcagacgccaagacaagtacaccttgaaaccagttgctgaagagttgaaggctctcttgaaaaaagatgttctcttcctcgacgactgtgtcggatcagaagtggaggctgcatgcgccgatccagctcctggatcagtcattctccttgaaaatcttcgttatcatctggaagaggagggcaaaggagtcgatgcatccggtgccaaggttaaggctgattcagcagccgtaaagaaattccgcgagtctctcaccaagcttggcgatatttatgtcaatgatgctttcggaaccgctcacagagcccatagctccatggttggagtcgagcactcacaacgtgcaagtggattcttgctcaagaacgagctctcctactttagcaaggccctcgacaacccagctcgtccattcctggccatccttggaggagctaaggtcgctgacaagattcagttgatcaagaacttgttagacaaggttaatgagatgatcatcggcggaggaatggcctataccttcttgaaagttgcccagggagtcaagatcggaaactctttgtacgacgaagaaggagcgaaaattgtgaacgagcttcttgaggctgccaaggcaaagggagttcaaatccatctcccagtggatttcgtcattgctgacaagttcgccgaggacgcaacctcgaagaccgtcaccgccgaggaaggtgttccagatggccacatgggacttgatgttgggccggaatcttctaagatcttcgccgctgccattcaacgcgccaaaacgattgtctggaacggtccagcaggagtattcgagtttgataaattcgccacaggcaccaagtcattgatggatgaagttgtcaaggccaccgctgccggagccatcacaatcattggaggaggtgacactgcgaccgccgccaagaagtataacacggaagataaggtgtctcacgtctcaactggaggtggagccagtttggaattgctcgaaggaaaagttctgccaggagttgatgctctttcgccagctcaataa

SEQ ID NO: 108136 - protein, 417 aa, Caenorhabditis elegans
MSSLNKLAIDQLNLAGKRVLIRVDFNVPLKDGKITNNQRIAAAVPTIQHALSNGAKSVVLMSHLGRPDGRRQDKYTLKPVAEELKALLKKDVLFLDDCVGSEVEAACADPAPGSVILLENLRYHLEEEGKGVDASGAKVKADSAAVKKFRESLTKLGDIYVNDAFGTAHRAHSSMVGVEHSQRASGFLLKNELSYFSKALDNPARPFLAILGGAKVADKIQLIKNLLDKVNEMIIGGGMAYTFLKVAQGVKIGNSLYDEEGAKIVNELLEAAKAKGVQIHLPVDFVIADKFAEDATSKTVTAEEGVPDGHMGLDVGPESSKIFAAAIQRAKTIVWNGPAGVFEFDKFATGTKSLMDEVVKATAAGAITIIGGGDTATAAKKYNTEDKVSHVSTGGGASLELLEGKVLPGVDALSPAQ

SEQ ID NO: 108137 - DNA, 1254 bp, Aspergillus fumigatus
  CDS (1)..(1254)
atgtctctcaccaacaagcttgctatcaccgatgtcgacctaaaggacaagcgtgtcctgatccgggtcgatttcaacgtccctctcaatgagaagaaggaggtcaccaacccccagcgtatcgttggtgctctgcccaccatcaaatatgccatcgagcaaggtgccaaggccgtcgtcctcatgtcccaccttggccgtcccgatggcaagaagaaccccaagtacagcctgaagcctgttgtccctgagctggagaagctgctcggcaagagcgtcatcttcactgaggactgtgttggcaaggaggtggaggagaccgtcaacaaggcctcgggcggtcaggtcattctgcttgagaacctgcgtttccaccccgaggaggaaggtagctacaaggacgaggagggcaagaaggtcaaggccgacaaggagaaggttgccgagttccgcaagggcctgactgccctgggtgacatctacatcaatgatgcgttcggaactgcccaccgtgcccacagctcgatggtcggtgttgacctgccccagaaggcctctggcttcctcgtgaagaaggagctcgagtacttcgccaaggctcttgagagcccctcgcgcccgttcctggccatccttggtggttccaaggtctccgacaagatccagctgatcgacaacctgctgcccaaggtcaacagcctgatcatcaccggtggcatggccttcaccttcaagaagaccctggagaacgtcaagatcggtaacagtctgttcgacgaggctggcagcaagaccgtcggcgacatcatcgagaaggccaagaagaacaacgtcaagattgtcctgcctgtcgactacatcacggcggataagttctccgccgacgccaagacaggctatgccaccgacgaggagggcattcccgacggctacatgggcctggatgttggcgacaagagtgtcaagctgtacaaggagaccattgccgaggccaagaccatcctctggaacggtcctcctggtgtcttcgagatggaacccttcgccaacggtaccaagcagactctggatgctgctgttgatgccgccaagaacggcgccatcgttatcatcggtggtggtgacacagctactgttgcggccaagtacggcgctgaggagaagcttagccacgtttccaccggtggtggtgcctcgctggagcttctggaaggcaaggagctgcctggtgttgctgccctatcaagtaagtaa

SEQ ID NO: 108138 - protein, 417 aa, Aspergillus fumigatus
MSLTNKLAITDVDLKDKRVLIRVDFNVPLNEKKEVTNPQRIVGALPTIKYAIEQGAKAVVLMSHLGRPDGKKNPKYSLKPVVPELEKLLGKSVIFTEDCVGKEVEETVNKASGGQVILLENLRFHPEEEGSYKDEEGKKVKADKEKVAEFRKGLTALGDIYINDAFGTAHRAHSSMVGVDLPQKASGFLVKKELEYFAKALESPSRPFLAILGGSKVSDKIQLIDNLLPKVNSLIITGGMAFTFKKTLENVKIGNSLFDEAGSKTVGDIIEKAKKNNVKIVLPVDYITADKFSADAKTGYATDEEGIPDGYMGLDVGDKSVKLYKETIAEAKTILWNGPPGVFEMEPFANGTKQTLDAAVDAAKNGAIVIIGGGDTATVAAKYGAEEKLSHVSTGGGASLELLEGKELPGVAALSSK

SEQ ID NO: 108139 - DNA, 1206 bp, Oryza sativa (japonica cultivar-group)
  CDS (1)..(1206)
atggcgagcaagaggagcgtgggcaccctgacggagtcggatctgaaggggaagaaggtgttcctccgcgccgatctgaacgtgccgctggatgacagccagaagatcaccgacgacacccgcatccgcgcgtcggttcccaccatcaagttcttgatggggaagggcgccaaggtcatcctggccagccatctgggtcgcccaaaaggtgtaaccccgaagtacagcttgaagcctcttgttccgcgcttgtctgagcttcttggtgttgatgttgtgatggccaatgactgcatcggtgaggaagtccagaaattggctgccactttaccagatggtggtgttctgcttctagaaaatgttcggttctacaaggaggaagagaaaaatgaccctgaattcgccaataagctggcatctgttgctgacctttatgtaaatgatgcctttggcacagcacacagagctcatgcttcaacagagggagttacgaagtatttgagaccttctgttgctggtttcctcatgcagaaggaacttgactatcttgttggagctgttgccaaccccaaaaaaccatttgctgccattgttggtggatccaaggtgtcaacaaagattggggtgattgagagtcttttggcaaaggttgacatcctcatactgggtggtggtatgatctatacattttacaaggctcagggatacgctgttggaaaatctcttgtggaggaagacaagctcgaattggctacctcgcttattgaaaaagccaagtcaaagggagtctccctattgcttccaactgatattgtagtagctgataagtttgctgcggatgcagagagcaagactgttccagcatctgctatccctgatggttggatgggccttgatattggcccagactccatcaagactttcagtgaaactttggatactaccaagactgtcatctggaatgggcctatgggagtgttcgagtttgagaaattcgctgctggcactgatgcaattgccaagaaattggctgatatcaccgccaaaggtgttacaacgatcattggaggtggcgattctgttgctgctgtcgagaaggccgggttggcggacaagatgagccacatttcaacgggaggtggcgcgagcttggaactgttggaaggcaagaccctcccaggagtccttgctcttaatgacgcataa

SEQ ID NO: 108140 - protein, 401 aa, Oryza sativa (japonica cultivar-group)
MASKRSVGTLTESDLKGKKVFLRADLNVPLDDSQKITDDTRIRASVPTIKFLMGKGAKVILASHLGRPKGVTPKYSLKPLVPRLSELLGVDVVMANDCIGEEVQKLAATLPDGGVLLLENVRFYKEEEKNDPEFANKLASVADLYVNDAFGTAHRAHASTEGVTKYLRPSVAGFLMQKELDYLVGAVANPKKPFAAIVGGSKVSTKIGVIESLLAKVDILILGGGMIYTFYKAQGYAVGKSLVEEDKLELATSLIEKAKSKGVSLLLPTDIVVADKFAADAESKTVPASAIPDGWMGLDIGPDSIKTFSETLDTTKTVIWNGPMGVFEFEKFAAGTDAIAKKLADITAKGVTTIIGGGDSVAAVEKAGLADKMSHISTGGGASLELLEGKTLPGVLALNDA

SEQ ID NO: 108141 - DNA, 1248 bp, Aeropyrum pernix K1
  CDS (1)..(1248): transl_table=11
ttgcctttagagtatatggggggcaggctcgctactctggacgacgttgatgttaggggtaagaaggttatagtccgtttcgaccttaatagccctgtaggtaatggaggcgaaatactggacgactcccgtatagctgaggctgcaggaaccctaagggaactctgcgataggggtgcagcggtggtcgctctcagccaccagggcaggcctcttgaaagcgatttcgtcagcctggagagacatgcatcattactgtcaagatattcgggcgttgaagtgagatttgtgatggatgtaattgggcctgaggctctaaggacagttgcatcgctgagaccgggagaggcagtgctgcttgacaatactaggataattagcgaggactttattgaggctgagggcactgtccatgctagaggtattatggtcaccaggctctccaagctagctaacatgtatgttaacgaggctttctccgcttctcacaggagccaggcaagcattgtcggctttccctacgtcctcccctctgcgggcgggcgagtcttggagaaggagatccgctcgctaaaccgagcagtatcctcgggtgagagacccaaggtcgtcgtgctggggggcgcgaagctgaaggatgccgtcaggatagtggactacctatcctcatctggagttgcagacgaagtgctgaccacgggcctcgttggcctcctcttcctctatgcccgtggctacaggcttccgagagacgtgacaaagctcctggaaaagaaggggggtgaggaggctatagcgaaggctaggagaatcgttgaggaggggagaagggttaggacccctatagacttcgttgtggaggttggcgataagatctacataaagcctgcggacgagctgacagagggtgtgccaaaggacatagggccgtcgacggtagagtattttagagcgaagatgaggggtgccagggtaatagtgatgaggggtcctgccggggttatagaggaccccaggttcaggaggggcactgtcgagctggtcaaggccgccctgtcttcaggcgcctacactgtattcgggggcgggcatttcagggctatacttagagatctccccgaacatcttagtagtaaggtgggccacttgagcaccgggggcggggcactcttgtattatctgtcgggacggcccctccccggggttaaagccttagtagactcggcgaggatatttaatctggtttag

SEQ ID NO: 108142 - protein, 415 aa, Aeropyrum pernix K1
MPLEYMGGRLATLDDVDVRGKKVIVRFDLNSPVGNGGEILDDSRIAEAAGTLRELCDRGAAVVALSHQGRPLESDFVSLERHASLLSRYSGVEVRFVMDVIGPEALRTVASLRPGEAVLLDNTRIISEDFIEAEGTVHARGIMVTRLSKLANMYVNEAFSASHRSQASIVGFPYVLPSAGGRVLEKEIRSLNRAVSSGERPKVVVLGGAKLKDAVRIVDYLSSSGVADEVLTTGLVGLLFLYARGYRLPRDVTKLLEKKGGEEAIAKARRIVEEGRRVRTPIDFVVEVGDKIYIKPADELTEGVPKDIGPSTVEYFRAKMRGARVIVMRGPAGVIEDPRFRRGTVELVKAALSSGAYTVFGGGHFRAILRDLPEHLSSKVGHLSTGGGALLYYLSGRPLPGVKALVDSARIFNLV

SEQ ID NO: 108143 - DNA, 1437 bp, Arabidopsis thaliana
  CDS (1)..(1437)
atggcttccaccgccgcaactgcagctctttcgatcatcaaatccaccggtggcgccgccgttacacgctcctcccgcgcctcctttggacacattccctccacatctgtctccgcacgtcgccttggcttctccgccgtcgttgactctcgtttctcggtccacgtggcgtccaaggtccactccgtgcgcggaaagggcgccaggggagtgattacgatggcgaagaagagtgttggagatctgaattctgtagatttgaaggggaagaaggtgtttgttagagctgatctcaatgtacctctcgatgacaaccagaatatcactgacgacactagaatcagagccgccattcccaccatcaagtttttgattgagaatggtgctaaggtcatcctctccactcatttgggaaggccaaagggtgtcactccaaagttcagcttggctcctcttgttcccagattatcagagctccttggtattgaggtcgtgaaagctgatgattgtattggtccagaagtggaaaccttggtggcttcccttcctgaaggtggagttttgcttcttgagaacgtgaggttttacaaggaggaagagaagaacgaacctgattttgctaagaagcttgcttctctagctgacctttatgtcaacgatgcgttcgggactgctcacagagcccatgcttcaacagagggagtcactaagttcttgaagccatcagttgctggtttccttttgcaaaaggagttggactaccttgttggtgcggtttcaaacccaaagagaccatttgctgccattgtgggaggttccaaggtctcatctaagattggagttatcgaatcgcttcttgagaaatgtgacatccttctgcttggtggtggaatgatctttacattctacaaggcgcaaggtctttccgttggctcctcccttgttgaagaagacaagcttgaattggctacaacactccttgccaaggctaaggccagaggagtctctctgttgttaccaacagatgttgtgattgctgacaagttcgctcctgatgccaacagcaagattgtgccagcatcagccattcctgatgggtggatgggattggacatcggtccagactcggtgaaaacattcaacgaagctctggataccacgcagacagtcatttggaatggaccaatgggagttttcgagtttgaaaagtttgcaaaaggaactgaggcggtagcgaataaactagcagagctaagcaaaaagggagtgacaacgataataggaggaggagactcggtggcagcagtggagaaagtgggagtagcaggagtcatgagtcacatctccacaggtggtggtgccagtttggagctcttggaaggcaaagtgcttcccggtgtcgtcgctcttgatgaagcaacgccagtcactgtttaa

SEQ ID NO: 108144 - protein, 478 aa, Arabidopsis thaliana
MASTAATAALSIIKSTGGAAVTRSSRASFGHIPSTSVSARRLGFSAVVDSRFSVHVASKVHSVRGKGARGVITMAKKSVGDLNSVDLKGKKVFVRADLNVPLDDNQNITDDTRIRAAIPTIKFLIENGAKVILSTHLGRPKGVTPKFSLAPLVPRLSELLGIEVVKADDCIGPEVETLVASLPEGGVLLLENVRFYKEEEKNEPDFAKKLASLADLYVNDAFGTAHRAHASTEGVTKFLKPSVAGFLLQKELDYLVGAVSNPKRPFAAIVGGSKVSSKIGVIESLLEKCDILLLGGGMIFTFYKAQGLSVGSSLVEEDKLELATTLLAKAKARGVSLLLPTDVVIADKFAPDANSKIVPASAIPDGWMGLDIGPDSVKTFNEALDTTQTVIWNGPMGVFEFEKFAKGTEAVANKLAELSKKGVTTIIGGGDSVAAVEKVGVAGVMSHISTGGGASLELLEGKVLPGVVALDEATPVTV

SEQ ID NO: 108145 - DNA, 1446 bp, Arabidopsis thaliana
  CDS (1)..(1446)
atggcttccgctgccgcaagttccgccttttcactccttaagtccaccggcgctgttgcttcctccgccggaactcgcgcacgtgcctcccttctgccaattccctctacctctgtttccgcgcgtcctctaggcttctccgccactctagattcccgtcgtttctctctccacgttgcttccaaagttgaatcggtgcgtgggaagggaagcagaggagtggtttctatggcgaagaagagcgtcggagatctgacctcagctgatttgaaggggaagaaggttttcgtgagagctgatctcaatgtacctctcgatgataatcagactatcactgacgataccagaatccgtgccgccattccaacgatcaagtatttgattgaaaatggtgctaaagttatcctctccactcatctgggaaggccaaagggagtcaccccaaagtttagtttggctcctcttgtccctaggctctccgagcttcttggtattgaggtcacgaaagctgatgattgtattggcccagaagtggaaagcttggtggcttctctacctgaaggtggagttttgcttcttgagaacgtcaggttttacaaggaggaagagaagaacgatcctgagtttgctaagaagcttgcttctctagctgacctttatgtcaatgatgctttcggaactgctcacagagctcatgcttctaccgaaggagtcactaagttcttgaagccttcagttgctggtttccttttgcaaaaggaactggactacctagttggtgctgtttcaaacccaaagagaccatttgcagccatagtgggtggttccaaagtctcatccaagattggagttattgaatcgcttctggagaagtgtgatattcttcttcttggtggtggaatgatcttcacattctacaaggcacagggtctttcagttggttcgtcccttgttgaagaagacaagcttgaattggctacagaactccttgccaaagctaaggccaaaggagtctctcttttgttgccaacagatgttgtagttgctgacaagtttgctcctgatgccaacagcaagattgtgcctgcatcaggcattgaggacggatggatgggactggacattggtccagactctatcaaaactttcaacgaagctctggacacaacacaaacagtcatttggaatggacctatgggagttttcgagatggaaaagtttgcggctggaacagaggcgatagcgaataaactagcagagctaagtgaaaaaggagtgacaacgataataggaggaggagactcagtggctgcagtggagaaagtaggagtagcaggagtcatgagtcacatctccactggtggtggagccagcttggagctgttggaaggaaaagtacttcccggtgtgatcgcccttgatgaagcaatcccagtcactgtttag

SEQ ID NO: 108146 - protein, 481 aa, Arabidopsis thaliana
MASAAASSAFSLLKSTGAVASSAGTRARASLLPIPSTSVSARPLGFSATLDSRRFSLHVASKVESVRGKGSRGVVSMAKKSVGDLTSADLKGKKVFVRADLNVPLDDNQTITDDTRIRAAIPTIKYLIENGAKVILSTHLGRPKGVTPKFSLAPLVPRLSELLGIEVTKADDCIGPEVESLVASLPEGGVLLLENVRFYKEEEKNDPEFAKKLASLADLYVNDAFGTAHRAHASTEGVTKFLKPSVAGFLLQKELDYLVGAVSNPKRPFAAIVGGSKVSSKIGVIESLLEKCDILLLGGGMIFTFYKAQGLSVGSSLVEEDKLELATELLAKAKAKGVSLLLPTDVVVADKFAPDANSKIVPASGIEDGWMGLDIGPDSIKTFNEALDTTQTVIWNGPMGVFEMEKFAAGTEAIANKLAELSEKGVTTIIGGGDSVAAVEKVGVAGVMSHISTGGGASLELLEGKVLPGVIALDEAIPVTV

SEQ ID NO: 108147 - DNA, 1248 bp, Sulfolobus solfataricus P2
  CDS (1)..(1248): transl_table=11
gtggggatctttctgattaaagtgggagacttaactatacccacaatggatgatatagatatccaatcaaaaaaagttctgttacgaatagacataaattcccccgtagatgagaacggcaaaataattgatgattctagaataaaggcacatattggaacaattaaggaattgattaataagggcaattctgttgtgttaatttcacatcaaggtaggcctggagacaaggatttcacaagtttagaggaacatgctaaattaatttcaaagtatttagatcgagaagtaattttcgtagatgatgtaataggcccatatgcaagggaaatgattaaaaaattagaaaataatgggattttactcttagataatataagattaatttcagaggagttaatagaggctccaccacaacaacacgtaaaaagctttttagtaaagaaattagctccgcttttcgacatttatatcaatgatgcgttcgctactgcacacagaagtcagcctagtatcgtaggctttcctttagctttaccatcagcagctggaagagtaatggaaagggaagtttcagcgttagccaagatttttaatgccgaagacacaccaaagatatttacgttaggtggtggtaaggttcacgatactattaggataattgaaaatctagtgagaaaaaggatagctgacagaatacttactgggggtttagttgcagaattattttctgtcgctaaaggaatgaatttaaatccaaagaatatggaaattctggaaaaattaggtatactgagtctaattcctagagctagaaaactacttctaagtggagctcctatcgaaataccagttgactataaggtagaaataaacggaaacgtaatcgaggaaccagctagtaaggtcactggcattataaaggatatcggatccactactgcagaaatatactcatcatttataaaagatgctaaagtagtagttttaaggggaccaatgggagtaatcgaagatgaaagatttaagagtggaagtaaaagcgtcttaaaagcatcattagagggacaaggttacgttataataggaggtggacacatgataagtgctttagatgaggatatgaagatagatagtagtaaagttcatatctctactggtggaggagctctcctcttattcttatctggagaacgattaccagcattagaggcattatcaatgtcggtggtgaatagcggtgattaa

SEQ ID NO: 108148 - protein, 415 aa, Sulfolobus solfataricus P2
MGIFLIKVGDLTIPTMDDIDIQSKKVLLRIDINSPVDENGKIIDDSRIKAHIGTIKELINKGNSVVLISHQGRPGDKDFTSLEEHAKLISKYLDREVIFVDDVIGPYAREMIKKLENNGILLLDNIRLISEELIEAPPQQHVKSFLVKKLAPLFDIYINDAFATAHRSQPSIVGFPLALPSAAGRVMEREVSALAKIFNAEDTPKIFTLGGGKVHDTIRIIENLVRKRIADRILTGGLVAELFSVAKGMNLNPKNMEILEKLGILSLIPRARKLLLSGAPIEIPVDYKVEINGNVIEEPASKVTGIIKDIGSTTAEIYSSFIKDAKVVVLRGPMGVIEDERFKSGSKSVLKASLEGQGYVIIGGGHMISALDEDMKIDSSKVHISTGGGALLLFLSGERLPALEALSMSVVNSGD

SEQ ID NO: 108149 - DNA, 1281 bp, Agrobacterium tumefaciens str. C58
  CDS (1)..(1281): transl_table=11
atgaggcctgaccggcttgcgtcggcaatcaggcatagtatggtccgtcccgaactcgcaacaaatcaggatcgacccatgcccgctttcaagaccatcgacgaccttaacgacattgccggaaagcgcgttctcgtccgcgttgatctcaacgtgccggtcgcggatggcaaggtgacggacgcaacccgtatcgaacgcgttgcgccgaccattctggaactctcttcaaagggcgcaaaagtcattctgctcgcccatttcggccgcccaaagggtgaacccgtcgctgagatgtcgctttcccagattgtccccacggtcgaggacgtgctggatcacgccatttccttcgcaacggactgcatcggtgcccctgcagcggatgcggtcgcaaaaatgaatgatggcgatattctgctgctggaaaacacccgcttccacaagggcgaggaaaagaacgatcccgccttcgtcgaagaactggccgcgaatggcgatatctatgtgaacgacgccttctccgccgctcaccgtgcccacgcctccaccgagggcctggcgcggcatctgcccgcttatgccggccgcaccatgcaggccgagcttgaggcgctggaaaaaggcctcggccagcccgttcgcccggtcgtcgccatcgtcggcggtgccaaggtttcgagcaagatcgatctcttgatgaacctcgtcaagaaggtcgatgccctcgtcattggcggcggcatggccaacaccttcctcgccgcccgcggcaccaatgtcggcaagtcgctctgcgagcacgatctggcagagaccgcaaagcagatcatgatcgaggcagcgacatccggttgcgctatcgtcctgccggaagacggcgtcgtcgcccgcgaattcacggccggcgcggccaatgaaattgtcgatatcaacgccattcccgccgacgccatggttctcgatgtcggtccgaaatcggttgaaagcatcaaggcctggatttcgcgggcggaaacgctggtctggaacggcccgctcggcgccttcgaaatcgaacccttcgatgcggcaaccgtggcggcggcaaaacacgctgcggaatgcaccaaggccggcaagctcgtttccgttgccggtggcggcgacaccgtcgctgcactcaaccatgccggtgtttcggacgatttcacctatatttcgacggcgggcggcgccttccttgaatggatggaaggcaaggaattgccaggcgttgccatcctgaccactgccaagtaa

SEQ ID NO: 108150 - protein, 426 aa, Agrobacterium tumefaciens str. C58
MRPDRLASAIRHSMVRPELATNQDRPMPAFKTIDDLNDIAGKRVLVRVDLNVPVADGKVTDATRIERVAPTILELSSKGAKVILLAHFGRPKGEPVAEMSLSQIVPTVEDVLDHAISFATDCIGAPAADAVAKMNDGDILLLENTRFHKGEEKNDPAFVEELAANGDIYVNDAFSAAHRAHASTEGLARHLPAYAGRTMQAELEALEKGLGQPVRPVVAIVGGAKVSSKIDLLMNLVKKVDALVIGGGMANTFLAARGTNVGKSLCEHDLAETAKQIMIEAATSGCAIVLPEDGVVAREFTAGAANEIVDINAIPADAMVLDVGPKSVESIKAWISRAETLVWNGPLGAFEIEPFDAATVAAAKHAAECTKAGKLVSVAGGGDTVAALNHAGVSDDFTYISTAGGAFLEWMEGKELPGVAILTTAK

SEQ ID NO: 108151 - DNA, 1215 bp, Brucella melitensis 16M
  CDS (1)..(1215): transl_table=11
ttgataaggaccgagagaagaaacatgatgttccgcacccttgacgatgccaatgtccaatccaagcgcgtgctggtccgtgttgacctcaacgtgccgatggcaaacggcgaagtcaccgaccttacccgcatcgaacgcatcgttccgaccatcgcggaactgtcaaggaagggcgcgaaggtcatcctgctcgcccatttcggtcgcccgaagggggttgcctcggatgaaaattcgctgaagcatgtcgtgaagccgctctccaaggttctggatcacagtgttcattttgccgaagactgcatcggcgacaaggcgaaagcggccgtcgatgcgctgaaggacggcgacgtcctgcttctggaaaatacccgtttccacaagggcgaggaaaagaacgatcctgaattcgtgcaggcgctggccgccaatggcgatctctatgtgaacgatgccttttccgccgctcaccgcgcccatgcctcgactgaaggtctggcccatgtcctgcctgccttcgcgggccgcgccatgcaggctgagcttgaagcacttgaaaagggcctcggcaatccggcccgcccggtggtcgccatcgtcggcggtgcaaaggtttcgaccaagctcgacctcctgtccaacctgatcgaaaaggtcgatgcgcttgtcatcggcggcggcatggccaacacgttccttgcagccaagggtcttgatgtcggcaaatcgctctgcgagcatgagctggcctcgaccgcacgcgaaatcatggccaaggccgaaaccaccaaatgcgccatcatcctgccggtggacgcgatcgtgggctggcacttcgccgccgatacgccacaccagacctatggcgtggattcggttccgggcgacgccatgatccttgacgcaggcgagctttcgaccgacctcattgcttcggccatcgatgatgccgcaacattggtctggaacggcccgcttggggctttcgagttgcgcccctttgacacagcaacggtgaaggtcgcaaggcatgtcgcaaagcgcacaaaggaaggcaagcttgtttcggtcggcggcggcggcgatacggtggcagccctcaaccatgcgggcgtggccgacgacttcacctatatctcaaccgctggcggcgctttcctcgaatggatggaaggcaaaccgcttccgggcgtcgatgtattgaagaagtga

SEQ ID NO: 108152 - protein, 404 aa, Brucella melitensis 16M
MIRTERRNMMFRTLDDANVQSKRVLVRVDLNVPMANGEVTDLTRIERIVPTIAELSRKGAKVILLAHFGRPKGVASDENSLKHVVKPLSKVLDHSVHFAEDCIGDKAKAAVDALKDGDVLLLENTRFHKGEEKNDPEFVQALAANGDLYVNDAFSAAHRAHASTEGLAHVLPAFAGRAMQAELEALEKGLGNPARPVVAIVGGAKVSTKLDLLSNLIEKVDALVIGGGMANTFLAAKGLDVGKSLCEHELASTAREIMAKAETTKCAIILPVDAIVGWHFAADTPHQTYGVDSVPGDAMILDAGELSTDLIASAIDDAATLVWNGPLGAFELRPFDTATVKVARHVAKRTKEGKLVSVGGGGDTVAALNHAGVADDFTYISTAGGAFLEWMEGKPLPGVDVLKK

SEQ ID NO: 108153 - DNA, 1167 bp, Encephalitozoon cuniculi GB-M1
  CDS (1)..(1167)
atgaaaacaattagcaatgcggagattgagggaaaacgggtatttctccgggtggacttcaatgtgccgatattggactctgtggttctgaacgacttcaaaataacttctgtgcttccaacaatcagacttcttcattctaggaatcccaggagagtgattattggaagtcaccttggaagacccaaggggaagtattccaaggagctttccctgaggcctgtctactcagtactaaaggcgcgcctctgggaggaacttggcgtagagttggatttctgcgacctgtgggatgttgggaatgtgcaaagtccatggatactcctggagaacctcaggttttattccgcagaggaagacgccggcgacaaggatgctgttgatcagtacagaaatgtattcgtagacaatatggatgttgctgttatagatgcattcggatgtctgcatagagaatgcgggtctatacagagaaccgggcttccttcattctctgggcttctggtccagaaagagttgaactttactaaggaaatcatggaggaaagggtggatcttatgatactgggaggaaagaaagtgtccgacaagatcaagctgctggaatctcttggacagaaaacaggaagcttatttgttaccggaggactggcatttccattcattagatacatattgggaaaggaggttggaaagagcataggagaaagtgtttctgaagaggaagtaaagaggatacataagatctgtgaggagcacaaaacaaggattatccttccatctgacttcacggttgtttgcaacgacagcgtacaaacaactagcaacatcccccctgaggggagtgcaatggacataggcccggaaactatagaaatgctaaggagagaagtttctaaggcaaaggccgtgttttggaatggccctcccggaatgtatgaagaacaaagtttctcgaggggaacggaggctttggtgagtgccttggagagtcttaaaggagaagggaagaagtctttctgcggaggaggggagactgcaggcgcaatcagattgtttggtagctatgatgcctttacttatgtatctaccggaggaggggtgctgatgaagctgctgggtggaaaaaggcttcctgggctagacttcctctccatgcagccctga

SEQ ID NO: 108154 - protein, 388 aa, Encephalitozoon cuniculi GB-M1
MKTISNAEIEGKRVFLRVDFNVPILDSVVLNDFKITSVLPTIRLLHSRNPRRVIIGSHLGRPKGKYSKELSLRPVYSVLKARLWEELGVELDFCDLWDVGNVQSPWILLENLRFYSAEEDAGDKDAVDQYRNVFVDNMDVAVIDAFGCLHRECGSIQRTGLPSFSGLLVQKELNFTKEIMEERVDLMILGGKKVSDKIKLLESLGQKTGSLFVTGGLAFPFIRYILGKEVGKSIGESVSEEEVKRIHKICEEHKTRIILPSDFTVVCNDSVQTTSNIPPEGSAMDIGPETIEMLRREVSKAKAVFWNGPPGMYEEQSFSRGTEALVSALESLKGEGKKSFCGGGETAGAIRLFGSYDAFTYVSTGGGVLMKLLGGKRLPGLDFLSMQP

SEQ ID NO: 108155 - DNA, 1347 bp, Drosophila melanogaster
  CDS (1)..(1347)
atgcttccaattcggcagagtttataccaaagagctcaaactcgatttacaaaattaagatttccaagattttttagcaaagacgattgcaatggaaagcaagtaaagaagttgagcttaaaaaatgtagatgtggctgggaaaagggtttttatgagagtggactttaatgtacccatgaaagatggcaaaataaccaacaaccaacgaattgtttccgcacttcccagtattaaatatgccttggacaagaaatgtaagtccttggttttggcatcccacttggggcgtccggatggcaaaaagaacaaaaagtttagcctggaacccgtggccaaggagctggagagtgtgctgggccagccggttcaattcctggacgactgcgtgggtgatagcaccctgagagctttgaaggatccctccgacggcactgtgttcctgttggagaatcttcgtttctatgccgaggagacgggcagcagcaaggacgataacaagaagaaggtcaaagcagatcccgcgaaggtgaaggaattccgagccaagttggcgcagctgggcgagatctatgtgaacgatgcctttggaacagcacatcgtccgcatagttccatgatgggcgatggctacaaggtgcgagcggctggtttcctgctggacaaggaactggagtactttgccaaggttctccacgatccggccaagccctttttggccattctgggtggcgccaagatagccgataaaattccactgataacgaacctcctgaacaatgtaacggccatgatcatatccggtggcatggccttcacctttctcaaagtgctcaatggcatggagattggaaagtccctcttcgacgagaagggatccgagttggtcaacgacatagtctgcaaggcgaaggagaaggacgtgaatatactatttccgattgactttgtcatagccaataagatcgacaaggagccggataaagtggaacatgtggatgccacacagggcataccggaggacatgatgggtctggaccacggccaggcatccagtcagatgtttgctggcgctatttgtgcatccaaaaccatcgtctggaacggaccgccaggcttgttcgaaaacgagctattctccaaaggcaccgagtccatgctggaggcagtaatcggggccactaaccgaggagccaccacaatcgttggtggtggggatacggccaccgcttgcttgaagttcggaggcgccgacaaggtctcgcatgtgtccaccggtggaggagcttccctggagttgctggagggtaaggttctgcctggagtggctgctctttcggatgcctaa

SEQ ID NO: 108156 - protein, 448 aa, Drosophila melanogaster
MLPIRQSLYQRAQTRFTKLRFPRFFSKDDCNGKQVKKLSLKNVDVAGKRVFMRVDFNVPMKDGKITNNQRIVSALPSIKYALDKKCKSLVLASHLGRPDGKKNKKFSLEPVAKELESVLGQPVQFLDDCVGDSTLRALKDPSDGTVFLLENLRFYAEETGSSKDDNKKKVKADPAKVKEFRAKLAQLGEIYVNDAFGTAHRPHSSMMGDGYKVRAAGFLLDKELEYFAKVLHDPAKPFLAILGGAKIADKIPLITNLLNNVTAMIISGGMAFTFLKVLNGMEIGKSLFDEKGSELVNDIVCKAKEKDVNILFPIDFVIANKIDKEPDKVEHVDATQGIPEDMMGLDHGQASSQMFAGAICASKTIVWNGPPGLFENELFSKGTESMLEAVIGATNRGATTIVGGGDTATACLKFGGADKVSHVSTGGGASLELLEGKVLPGVAALSDA

SEQ ID NO: 108157 - DNA, 1227 bp, Escherichia coli CFT073
  CDS (1)..(1227): transl_table=11
ttgctttcaggtaagacgcaagcagcgtctgcaaaacttttagaatcaacgagaggattcaccatgtctgtaattaagatgaccgatctggatcttgctgggaaacgtgtatttatccgtgcggatctgaacgtaccagtaaaagacgggaaagtaaccagcgacgcgcgtatccgtgcttctctgccgaccatcgaacttgccctgaaacaaggcgcaaaagtgatggtaacttcccacctgggtcgtcctaccgaaggcgagtacaacgaagaattctctctgctgccggttgttaactacctgaaagacaaactgtctaacccggttcgtctggttaaagattacctcgacggcgttgacgttgctgaaggtgaactggttgttctggaaaacgttcgcttcaacaaaggcgagaagaaagatgacgaaactctgtccaaaaaatacgctgcactgtgtgacgtgttcgtaatggacgcattcggtactgctcaccgcgcgcaggcttctactcacggtatcggtaaattcgctgacgttgcgtgcgcaggcccgctgctggcagctgaactggacgcgctgggtaaagcactgaaagaacctgctcgcccgatggtggctatcgttggtggttctaaagtatctactaaactgaccgttctggactccctgtctaaaatcgctgaccagctgatcgttggtggtggtattgctaacacctttatcgcagcacaaggccacgatgtgggtaaatccctgtacgaagctgacctggttgacgaagctaaacgtctgctgaccacctgcaacatcccggttccgtctgatgttcgcgtagcaaccgagttctctgaaactgcaccggctaccctgaaatctgttaacgatgtgaaagctgacgagcagatcctggatatcggtgatgcttccgctcaggaactggctgaaatcctgaagaatgcgaaaaccattttgtggaacggtccggttggcgtgttcgaattcccgaacttccgcaaaggtactgaaatcgtggctaacgctatcgcagacagcgaagcgttctccatcgctggcggcggcgacactctggcagcaatcgacctgttcggcattgctgacaaaatctcctacatctccactggcggcggcgcattcctcgaattcgtggaaggtaaagtactgcctgcagtagcgatgctcgaagagcgcgctaagaagtaa

SEQ ID NO: 108158 - protein, 408 aa, Escherichia coli CFT073
MLSGKTQAASAKLLESTRGFTMSVIKMTDLDLAGKRVFIRADLNVPVKDGKVTSDARIRASLPTIELALKQGAKVMVTSHLGRPTEGEYNEEFSLLPVVNYLKDKLSNPVRLVKDYLDGVDVAEGELVVLENVRFNKGEKKDDETLSKKYAALCDVFVMDAFGTAHRAQASTHGIGKFADVACAGPLLAAELDALGKALKEPARPMVAIVGGSKVSTKLTVLDSLSKIADQLIVGGGIANTFIAAQGHDVGKSLYEADLVDEAKRLLTTCNIPVPSDVRVATEFSETAPATLKSVNDVKADEQILDIGDASAQELAEILKNAKTILWNGPVGVFEFPNFRKGTEIVANAIADSEAFSIAGGGDTLAAIDLFGIADKISYISTGGGAFLEFVEGKVLPAVAMLEERAKK

SEQ ID NO: 108159 - DNA, 1206 bp, Arabidopsis thaliana
  CDS (1)..(1206)
atggcgacgaagagaagcgttggaactttgaaggaagcggatctgaagggaaagagtgtgttcgtgagggttgatctcaacgttcctttggatgataactctaacatcaccgatgacaccaggattcgtgccgctgttcccaccatcaagtacttgatgggtaatggatctagggttgttctctgcagtcacttgggccgcccaaaaggtgttactcctaagtacagcttaaagcctcttgtgcccagattgtctgaacttcttggtgttgaggttgtaatggcaaatgactctattggtgaggaagtccagaagttggttgcaggactacctgaaggtggtgttttgctcttggagaatgtgaggttctacgccgaggaagagaagaatgatcctgaatttgcaaagaagcttgctgctcttgccgatgtttacgttaatgatgccttcggaactgctcacagagctcatgcttccactgagggagttgccaaattcttgaagccttcagttgctggtttcctcatgcagaaggaacttgattaccttgtcggagctgtggcaaaccccaagaagccttttgctgccattgttggaggctcaaaggtttcaacaaagattggtgtcattgagtctctcttgaacacagttgacatcctcctgctcggtggaggtatgatttttactttctacaaggcacaaggactctcagtcggatcttcccttgtggaggaggacaagcttgacttggcaaagtcactcatggagaaagcaaaggccaaaggtgtctctctcttgctcccaaccgatgtggttattgctgacaagtttgctcccgatgctaacagcaagatagtgccagccactgccatccctgatggctggatgggtctagatattggtccagactccatcaagacattcagcgaagctctggacacaaccaaaaccatcatctggaatggtcccatgggtgtgtttgaattcgataagtttgctgctggaactgaggccgtagcaaagcagcttgcagaactaagcggaaagggagtaaccacaatcattggaggaggtgactctgttgctgccgtcgagaaggttggtttggcagacaagatgagccacatctctaccggaggcggtgctagtttggagcttcttgagggtaagccacttccaggagtcctcgctctcgacgaagcttga

SEQ ID NO: 108160 - protein, 401 aa, Arabidopsis thaliana
MATKRSVGTLKEADLKGKSVFVRVDLNVPLDDNSNITDDTRIRAAVPTIKYLMGNGSRVVLCSHLGRPKGVTPKYSLKPLVPRLSELLGVEVVMANDSIGEEVQKLVAGLPEGGVLLLENVRFYAEEEKNDPEFAKKLAALADVYVNDAFGTAHRAHASTEGVAKFLKPSVAGFLMQKELDYLVGAVANPKKPFAAIVGGSKVSTKIGVIESLLNTVDILLLGGGMIFTFYKAQGLSVGSSLVEEDKLDLAKSLMEKAKAKGVSLLLPTDVVIADKFAPDANSKIVPATAIPDGWMGLDIGPDSIKTFSEALDTTKTIIWNGPMGVFEFDKFAAGTEAVAKQLAELSGKGVTTIIGGGDSVAAVEKVGLADKMSHISTGGGASLELLEGKPLPGVLALDEA

SEQ ID NO: 108161 - DNA, 1278 bp, Bordetella parapertussis 12822
  CDS (1)..(1278): transl_table=11
ttggttttcccgtcacggggaaacggatctggcccttttcgcaggcaggccccggacgccatccacacaggaaccgaatacagtatgtccaacgtcaatacgctttccgcgctggccaagagcggcgctctgtccggcaagcgcgttttcatccgcgccgacctcaacgtgccgttcgacgacgccggccgcatcagcgaagacacccgcatccgcgcctcggtgcccggcatccgcctggcgctggacgccggcgaggcggtcatggtcacctcgcacctgggccgccccaaggagggcgcgctgaccgaggcggactcgctggccccggtcgcgcagcgcctgtccgaactgctgggcatgcaggtgcgcctggtgcccgactgggtcgacggcgtttccgtcgagccgggcgaagtcgtgctgctggagaactgccgcggcaacgtgggcgagaaaaaggacgacgaaggcttgtcgcgcaagatggcggcgctgtgcgatgtgtacgtcaacgacgccttcggcaccgcgcaccgcgccgaggccaccacgcacggcatcgcgcgcttcgcgccggtggcctgcgccggcccgctgctggaggccgagctcgaggcgctggggcgcgcgctgcatgatcccaaacggccgctggtggcgatcgtgggcggctccaaggtgtcgaccaagctgtccatcctgcaatcgctggccgacaaggtcgaccagctggtggtcggcggcggcatcgccaacaccttcatgctggccgccggcctgcccatcggcaagtcgctggccgagcccgagcaggtcgagcaggcgcgcgccgtgatcgaaatcatgaagcgccgcggcgccgaggtgccgattcccaccgacgtggtttgcgccaagtcgttcggcgcggacgccgcggccaccgtcaaggcggccgccgacgtggccgaggacgacatgatcctcgacatcggaccgcagaccgcgcagcgcctggccgacatcctcaaggcggccggcaccatcgtctggaacggtccggtcggcgtgttcgagttcgaccagttcgcccacggcaccgaggtggtggcgcgcgccatcgccgactcggcgggcttttcgattgccggcggcggcgatacgctggctgccatcgccaagtacggcatcgccgaccagaccggctatatctcgaccggcggcggcgctttcctggagttcctggaaggcaaggcgctgccggccgtggccgtgctgcaggcgcgcgccgcgtaa

SEQ ID NO: 108162 - protein, 425 aa, Bordetella parapertussis 12822
MVFPSRGNGSGPFRRQAPDAIHTGTEYSMSNVNTLSALAKSGALSGKRVFIRADLNVPFDDAGRISEDTRIRASVPGIRLALDAGEAVMVTSHLGRPKEGALTEADSLAPVAQRLSELLGMQVRLVPDWVDGVSVEPGEVVLLENCRGNVGEKKDDEGLSRKMAALCDVYVNDAFGTAHRAEATTHGIARFAPVACAGPLLEAELEALGRALHDPKRPLVAIVGGSKVSTKLSILQSLADKVDQLVVGGGIANTFMLAAGLPIGKSLAEPEQVEQARAVIEIMKRRGAEVPIPTDVVCAKSFGADAAATVKAAADVAEDDMILDIGPQTAQRLADILKAAGTIVWNGPVGVFEFDQFAHGTEVVARAIADSAGFSIAGGGDTLAAIAKYGIADQTGYISTGGGAFLEFLEGKALPAVAVLQARAA

SEQ ID NO: 108163 - DNA, 1248 bp, Nasonia vitripennis
  CDS (1)..(1248)
atggcgctgaacaagctcagcatcgataaagtcgaccttgccggcaaaagggttctgataagagtggacttcaacgtacccctcaaggatggaaaaatcaccaacaaccagagaattactgcagcccttgacactgtcaaatatgcattggaaaagaaggcaaagtctgttgtcttgatgtcccatctgggcaggcccgatggatcaaaaaatctgaaatacactttgaagccagttgctgatgagttgaaaactctgcttggcaaagacattcaatttttggatgactgtgtgggacctgcagttgaggctgcttgtgctgatccagcacctggatctatcattcttttagagaacttgagattccatgttgaagaggagggcaagggtgttggtcctgacggaagcaaaatcaaagccgataaggacaaagtcacagagttcagagcttctctgaggaagcttggagatgtatacattaatgatgcctttggtactgctcaccgtgcccacagttctatgatgggtgatggttttgacatcagagccagtggtttcttgcttaagaaggaactgcaatactttgccaaagctctggataatccagaaaaaccattccttgccatccttggaggagctaaagttgctgacaaaattcagcttatcaacaacttgttggacaaagtcaatgaaatgatcattggtggtggcatggcttacacattcttgaaagtcactaagaatatgaagattggcaattcgttattcgacgaggaaggagctaaaattattaatgacctcatgagcaaagctgagaagaacaaagttcaaattcacctgccagtggactttgtaacagcagacaagtttgctgaaaatgcggcagttggagctgctgacgtcgaaaatggaattcctgatggatggatgggccttgacgtcggaccgaaatccagagacttgtttgcagagccaatcaaaagggctaaagttattgtttggaatggaccagctggtgtgtttgaatttgacaacttctccaaaggaactaagagtctgatggataacgttgttgaagcgacaaagcgaggtgcgacgacaattatcggaggtggtgataccgctacttgcgctgccaaatggaaaactgaggaccaagttagccacgttagtacaggcggcggtgcaagcttagagcttttagaaggaaaggttttgcctggcgtggctgcactttcgccagcgtaa

SEQ ID NO: 108164 - protein, 415 aa, Nasonia vitripennis
MALNKLSIDKVDLAGKRVLIRVDFNVPLKDGKITNNQRITAALDTVKYALEKKAKSVVLMSHLGRPDGSKNLKYTLKPVADELKTLLGKDIQFLDDCVGPAVEAACADPAPGSIILLENLRFHVEEEGKGVGPDGSKIKADKDKVTEFRASLRKLGDVYINDAFGTAHRAHSSMMGDGFDIRASGFLLKKELQYFAKALDNPEKPFLAILGGAKVADKIQLINNLLDKVNEMIIGGGMAYTFLKVTKNMKIGNSLFDEEGAKIINDLMSKAEKNKVQIHLPVDFVTADKFAENAAVGAADVENGIPDGWMGLDVGPKSRDLFAEPIKRAKVIVWNGPAGVFEFDNFSKGTKSLMDNVVEATKRGATTIIGGGDTATCAAKWKTEDQVSHVSTGGGASLELLEGKVLPGVAALSPA

SEQ ID NO: 108165 - DNA, 1248 bp, Anopheles gambiae str. PEST
  CDS (1)..(1248)
atggctctcaacaagcttagcatcgaaaacgttgatctgaagggcaagcgggtgtttatgcgtgtcgatttcaacgtccccatcaaggagggcaaaattaccagcaatcagcgcattgtggccgcgctcgacagcatcaagtttgcgctcgagaagggagccaagtccgtggtgctggcgtcccatctgggccgcccggacggtaacaaaaacgtcaagtacacgcttgccccggtagcggacgagctgaagaagctgctcgggcgtgatgtaaccttcctgaacgattgcgtcggggcggaggtggaggcggcctgcaaggatccggctccgggttcggtcatcctgctggaaaacgtccgcttctacgtggaggaggaaggcaagggtgtcgatgcgagcggcaataaggttaaggccgacaaagataaggtgaaaacattccgcgaaagcttggccaagctgggcgacgtgtacgtgaacgatgcattcggtacggcccaccgtgcccacagctcgatgatgggcgagggctacagccagcgggcggccggtctgctgctgaacaaggagctgcgctacttctcgcaggcgctcgacaacccgccccgcccgttcctggccatcctgggcggcgcgaaggtggcggacaagatccagctgatcgagaacctgctggacaaggtgaacgagatgatcatcggcggcggtatggcgttcaccttcctgaaggtgctgaacaacatggagatcggcggctcgctgttcgatgccgagggtgccaagatcgtgcagaacctggtggacaaggcgaagaagaacaatgtgcagctgcacctcccggttgactttgtgacgggcgacaagttcgcggaggatgcggcgaccggcgaggccacggttgccagcggcatcccggccggccacatgggcctggacattgggccgaagtcgcgcgaagcgttcgcggccccgatcgcccgctccaagatcatcgtctggaacggaccgcccggtgtgttcgagttccccaactttgccaacggcaccaagtcgctgatggatggggtggtggcggcgaccaaggccggcacggtctcgatcattggcggcggcgatacggcgtcgtgctgcgccaagtggggcaccgagtcgcaggtgtcgcacgtgtcgaccggtggcggtgcgtcgctggagctgctcgagggcaaggtgctgccgggcgtggatgcgctcagcagtgcgtaa

SEQ ID NO: 108166 - protein, 415 aa, Anopheles gambiae str. PEST
MALNKLSIENVDLKGKRVFMRVDFNVPIKEGKITSNQRIVAALDSIKFALEKGAKSVVLASHLGRPDGNKNVKYTLAPVADELKKLLGRDVTFLNDCVGAEVEAACKDPAPGSVILLENVRFYVEEEGKGVDASGNKVKADKDKVKTFRESLAKLGDVYVNDAFGTAHRAHSSMMGEGYSQRAAGLLLNKELRYFSQALDNPPRPFLAILGGAKVADKIQLIENLLDKVNEMIIGGGMAFTFLKVLNNMEIGGSLFDAEGAKIVQNLVDKAKKNNVQLHLPVDFVTGDKFAEDAATGEATVASGIPAGHMGLDIGPKSREAFAAPIARSKIIVWNGPPGVFEFPNFANGTKSLMDGVVAATKAGTVSIIGGGDTASCCAKWGTESQVSHVSTGGGASLELLEGKVLPGVDALSSA

SEQ ID NO: 108167 - DNA, 1257 bp, Magnaporthe grisea 70-15
  CDS (1)..(1257)
atgtctctctctaacaagctctccatcacggacgttgatgtcaaggggaagcgggtgctcatccgtgtcgacttcaacgttcctcttgacgataacaagaacatcaccaacaaccagcgtattgccggcgctgtgccaacaatcaagcatgccctcgacaatggcgccaagacagttatcctgatgtcgcacctcggtcggccaaatggatcgcccaaccccaagtactcgctcaagcctgtcgtgtccgagcttgagaagcttttgggcggcaaaaaggtcaccttcgctcctgactgtgtcggccctgaggtcgaggaaatcgtcaacaaggccggcgagggcgacgtcgtactattggagaacctgcgcttccacatcgaggaggagggcagcgccaaggacaaggagggcaacaagaccaaggctgacaaggccaaggtcgaggagttccgcaagggcctcaccaagttgggagacatttacatcaacgatgctttcggcactgctcaccgtgctcactcttccatggttggcgtcgacctaccccagaaggccgctggtttcctgatgaagaaggagcttgactacttcgcacaggccctcgagtcgcccaagcgccccttcttggccattcttggtggtgccaaggtttcggacaaaatccagctgatcgacaacctgcttgacaaggtcaacacgctcatcgtttgcggtggcatggcctttaccttcaagaaggttctcgacaacatggccattggaaactcgctctttgacgaggcaggatccaagaccgtccctgagctcatgaagaaggcgcaggagaagggcgtcaaggtcgtcctgccggtcgacttcatcactgctgacaagttcgccgcggacgccaagactgggtctgccacggacaaggagggcatccctgagggctggatgggcttggactgcggcgagaagagtgtcgagctgttccagagcgccatcgacgagtcgcagaccgtcctgtggaacggccccgccggtgtctttgagtttgacgctttcgccaagggcaccaaggccactcttgacgctgccgtcagcggctgcggcaagggcaagattgttatcatcggaggtggtgacacagctaccgttgcggccaagtacggagttgaggacaagctgagccacgtctcgaccggcggtggtgccagcttggagctcctcgagggcaaggaactgcctggtgtcaccgcgctcagcagcaagtaa

SEQ ID NO: 108168 - protein, 418 aa, Magnaporthe grisea 70-15
MSLSNKLSITDVDVKGKRVLIRVDFNVPLDDNKNITNNQRIAGAVPTIKHALDNGAKTVILMSHLGRPNGSPNPKYSLKPVVSELEKLLGGKKVTFAPDCVGPEVEEIVNKAGEGDVVLLENLRFHIEEEGSAKDKEGNKTKADKAKVEEFRKGLTKLGDIYINDAFGTAHRAHSSMVGVDLPQKAAGFLMKKELDYFAQALESPKRPFLAILGGAKVSDKIQLIDNLLDKVNTLIVCGGMAFTFKKVLDNMAIGNSLFDEAGSKTVPELMKKAQEKGVKVVLPVDFITADKFAADAKTGSATDKEGIPEGWMGLDCGEKSVELFQSAIDESQTVLWNGPAGVFEFDAFAKGTKATLDAAVSGCGKGKIVIIGGGDTATVAAKYGVEDKLSHVSTGGGASLELLEGKELPGVTALSSK

SEQ ID NO: 108169 - DNA, 1257 bp, Gibberella zeae PH-1
  CDS (1)..(1257)
atgtcgctgtccaacaagctttccatcgccgacgttgacgtcaagggcaagaaggtcctcatccgagtcgacttcaacgtccctctcgacgccgacaagaacatcaccaacaaccagcgaattgtcggtgctctccccaccatcaaatacgccctcgagaatggcgccaagtctgtcatcctcatgtcccacctcggacgccccaacggctcccccaacgagaagtactccctcaagcccgtcgtcgccgagctcgagaagcttctcagcaagaaggtcacctttgcccccgactgtgtcggccccgaggtcgaggagatcgtcaacaaggctgaggatggctctgtcattctcctcgagaacctccgattccacattgaggaggagggctcctccaaagacaaggagggcaacaagaccaaggccgacaaggctcaggttgaggctttccgcaagggtctgaccgctcttggtgacgtctacatcaacgacgctttcggcactgctcaccgtgctcactcttccatggtcggtgtcgatctcccccaaaaggcctccggtttcctcgtcaagaaggagctcgagtacttcgccaaggccctcgagaacccccagcgccccttccttgctattctcggtggtgccaaggtctccgacaagatccagctcatcgacaacctccttgacaaggtcaacaccctcatcatctgcggtggcatggccttcaccttcaagaagacccttgagaacgtctccatcggaaactccctcttcgacgaggccggctccaagaccgtcggtaacctcgttgagaaggccaagcagaagggcgtcaagctcgtcctccccgtcgactacatcaccgccgacaagttcgacaaggatgccaacactggctacgccactgacaaggacggtatccccgacggctggcagggacttgactgcggtgaggagtccgtcaagctctacaaggaggccattgccgatgccaagaccatcctctggaacggtcccgccggtgtctttgagttcgagaagttcgccagcggcaccaaggccactctcgacgccgtcgttgacgctgtccagaaggacggcaagatcgtcatcatcggtggtggtgacactgccaccgttgccaagaagtacggtgttgaggacaagattagccacgtctctaccggcggtggtgccagcttggagctcctcgagggcaaggagcttcccggtgttactgctctgtccagtaagtaa

SEQ ID NO: 108170 - protein, 418 aa, Gibberella zeae PH-1
MSLSNKLSIADVDVKGKKVLIRVDFNVPLDADKNITNNQRIVGALPTIKYALENGAKSVILMSHLGRPNGSPNEKYSLKPVVAELEKLLSKKVTFAPDCVGPEVEEIVNKAEDGSVILLENLRFHIEEEGSSKDKEGNKTKADKAQVEAFRKGLTALGDVYINDAFGTAHRAHSSMVGVDLPQKASGFLVKKELEYFAKALENPQRPFLAILGGAKVSDKIQLIDNLLDKVNTLIICGGMAFTFKKTLENVSIGNSLFDEAGSKTVGNLVEKAKQKGVKLVLPVDYITADKFDKDANTGYATDKDGIPDGWQGLDCGEESVKLYKEAIADAKTILWNGPAGVFEFEKFASGTKATLDAVVDAVQKDGKIVIIGGGDTATVAKKYGVEDKISHVSTGGGASLELLEGKELPGVTALSSK

SEQ ID NO: 108171 - DNA, 1248 bp, Apis mellifera
  CDS (1)..(1248)
atggcactaaataaactcagcattgataaagttgatcttacagataaacgagtgcttatacgggtagattttaatgtacctttaaaagatggtaaaatcaccaataatcaaagaattgttgctgctttggatacaattaaatatgctctttcaaaaaaagctaagtctgttattttaatgtcacatttgggacgtccagatggtaaaaaagatatgaagtatactataaaacctgtagctgatgaattaaagtcccttcttggaaaggaaattctattcttaaatgattgtgttggatcagaggttgaaaatgcatgtgctaatccagaaccaggaagcattatcttacttgaaaatttgaggtttcatatagaagaagaaggtaaaggagtaggagaagatggaaaaaaaataaaagcagataaaacaaaagtagacgaatttaggaaatcattgagaaaattaggagatatttatgttaatgacgcctttggtacagctcatcgtgctcatagttctatgcttggtgaaggatatgagacaagagctagtggttttcttttaaagaaagaattagaatattttgccaaagcattggagaatcctgagagaccatttttagcaatattaggaggtgctaaagttgcagataaaatacagttaattgataatttactagataaagttaatgaaatgataataggtggtggaatggcttatacctttttaaaaatatcgaaaaatatgaagattggtaattcattatttgacgaggaaggagcaaaaatcattaataatttattatcaaaagctgaaaaaaataaagtccaaatacatttgccaattgattttgttacggcagataaatttgcagaaaatgcaactgttggtgcagcagatatagaaagtggtatacctgatggctggatgggacttgatgttggaccaaaatcaagagaattgttcagtcaacctattaaaagagcaaaaacaatcgtatggaatggtcctgctggtgtttttgaatttgaaaattttagtaaaggcactaaaagtctaatggataatgttgttgaagcaacatcaaaaggtgctatttctataattggtggtggtgatacagctacttgcgctgctaaatggaaaacagaagataaagtaagtcatgttagtactggcggtggtgcaagtttggaattacttgaaggaaaagttttaccaggagttgctgctttatcttcgttgtaa

SEQ ID NO: 108172 - protein, 415 aa, Apis mellifera
MALNKLSIDKVDLTDKRVLIRVDFNVPLKDGKITNNQRIVAALDTIKYALSKKAKSVILMSHLGRPDGKKDMKYTIKPVADELKSLLGKEILFLNDCVGSEVENACANPEPGSIILLENLRFHIEEEGKGVGEDGKKIKADKTKVDEFRKSLRKLGDIYVNDAFGTAHRAHSSMLGEGYETRASGFLLKKELEYFAKALENPERPFLAILGGAKVADKIQLIDNLLDKVNEMIIGGGMAYTFLKISKNMKIGNSLFDEEGAKIINNLLSKAEKNKVQIHLPIDFVTADKFAENATVGAADIESGIPDGWMGLDVGPKSRELFSQPIKRAKTIVWNGPAGVFEFENFSKGTKSLMDNVVEATSKGAISIIGGGDTATCAAKWKTEDKVSHVSTGGGASLELLEGKVLPGVAALSSL

SEQ ID NO: 108173 - DNA, 1281 bp, Yarrowia lipolytica CLIB122
  CDS (1)..(1281)
atgagcacatttcacacgcatctcaaaatgtctcttaccaacaagctctccatcaaggatctcgatctcaagaacaagcgagtcttcatccgagtcgactttaacgttcctctcgatggcaccaccatcaccaacaaccagcgaattgttgctgccctgccctccatcaagtatgccattgatcagggtgccaaggctgtgatccttgcttctcatctcggccggcccaacggccagcgagtcgagaagtactctctcaagcccgtccaggccgagctttcaaagctccttggcaagcccgtcaccttccttgacgactgcgtcggccccaaggttgaggaggaggtctccaaggccaaggacggtgaggtcattctcctcgagaacctgcgattccaccccgaggaggagggatcccacaaggacgccgacggcaagaagatcaaggctgaccccgccaaggttgaggagttccgaaagtctctgacttctctcgccgatgtctacgtcaacgacgctttcggaaccgcccaccgagcccactcctccatggtcggcattgagcttccccagcgagccgctggtttccttgtcgccaaggagctcgagttcttcgccaaggctctggagcaccccgagcgacccttccttgccatccttggtggtgccaaggtctccgacaagatccagctcatcgacaacctacttgacaaggtcaacgccctgatcattggtggtggtatggctttcaccttcaagaagacccttgagaacgtcaagattggaaactctctcttcgacgaggatggatccaagattgtcgccggcctcgttgagaaggccaagaagaacaacgtcaagcttgtcttccccgtcgactacgtcaccgccgacaagttctccaaggatgccaaggttggccacgcaaccgacgctgagggtatccccgacggatggcagggtctggactgtggtcccaagtctatcgaggagttccagaaggtcattggcgagtccaagaccatcctctggaacggaccccccggtgtctttgagttcgacaacttcgccaagggtaccaaggctgtgcttgacgcctgtgtcaaggccgttgacaacggtgctaccgtgatcattggtggtggagataccgccactgtcgccaagaagtacggtgccgaggacaagctctcccatgtttccactggaggaggagcttctcttgagcttctcgagggtaagacccttcccggtgtcgctgctctctccgagaagaagtaa

SEQ ID NO: 108174 - protein, 426 aa, Yarrowia lipolytica CLIB122
MSTFHTHLKMSLTNKLSIKDLDLKNKRVFIRVDFNVPLDGTTITNNQRIVAALPSIKYAIDQGAKAVILASHLGRPNGQRVEKYSLKPVQAELSKLLGKPVTFLDDCVGPKVEEEVSKAKDGEVILLENLRFHPEEEGSHKDADGKKIKADPAKVEEFRKSLTSLADVYVNDAFGTAHRAHSSMVGIELPQRAAGFLVAKELEFFAKALEHPERPFLAILGGAKVSDKIQLIDNLLDKVNALIIGGGMAFTFKKTLENVKIGNSLFDEDGSKIVAGLVEKAKKNNVKLVFPVDYVTADKFSKDAKVGHATDAEGIPDGWQGLDCGPKSIEEFQKVIGESKTILWNGPPGVFEFDNFAKGTKAVLDACVKAVDNGATVIIGGGDTATVAKKYGAEDKLSHVSTGGGASLELLEGKTLPGVAALSEKK

SEQ ID NO: 108175 - DNA, 1251 bp, Ustilago maydis 521
  CDS (1)..(1251)
atgtctctttccagcaagcttggtatcaccgatgtcgacctcaaggacaagaaggtcctgatccgtgtcgacttcaacgtccccatggacggcgacaagatcaccaacaaccagcgtattgtcgctgcccttcccactgtcaagtacgccatcgagcagaatgccaaggctgtcgtgctcatgtcgcacatgggtcgtcccgatggaaagcctgtccccaagtactcgctcaagcccgtcgctgccgaggtatccaagctgctcaacaaggatgtcgaattccttgctgactgcgtcggtgctgagacagagaaggctgtcgagtcggctaccggcggcaagatcttcttgctcgagaacctccgctaccacgttgaggaagagggcaagggcaccaatgaagccggagagaaggtcaaggctgaccccaagaaggtcgaggagttccgtgccagtctcaccaagctcggtgacgtctacatcaacgatgcctttggcacagctcaccgcgcccactcatcgatggttggtgtgcagctgccccaacgtgctgccggtttccttatgaagaaggagctcgagttctttgccaaggcgctcgagagccctgagcgccccttccttgctatcctcggtggtgccaaggtgtcggacaagatccagctcatcgacaacatgctggacaaggtcaactcgctcatcatctgcggtggtatggctttcaccttcaaaaagacgctcgacaatgtcaagattggcacctcgctctttgacgaggccggctcgcacaaagtcgctgagctcgttgagaaggccaagaagaacaacgtcgagctcgtcttccccgtcgactacatcaccgccgacaagtttgacaagaacgccaagaccggttcggccaccgatgccgacggtatccccgatgagtggatgggtctcgatgccggtgaggagtcgcgcaagaagttccgcgagaccattcttaaggccaagaccatcctgtggaacggccccgccggagtctttgagtttgacaactttgccggtggttccaaggccatgcttgacgcctgtctcgaggctgagaagaacggctctactgtcatcgttggaggtggtgacactgccacggtggttgccaagtacggcgctgaggacggcatctcgcactgctcgactggtggtggcgcttcgctggagctgctcgagggcaagaccttgcctggtgtcaaggagctttcggagaagtga

SEQ ID NO: 108176 - protein, 416 aa, Ustilago maydis 521
MSLSSKLGITDVDLKDKKVLIRVDFNVPMDGDKITNNQRIVAALPTVKYAIEQNAKAVVLMSHMGRPDGKPVPKYSLKPVAAEVSKLLNKDVEFLADCVGAETEKAVESATGGKIFLLENLRYHVEEEGKGTNEAGEKVKADPKKVEEFRASLTKLGDVYINDAFGTAHRAHSSMVGVQLPQRAAGFLMKKELEFFAKALESPERPFLAILGGAKVSDKIQLIDNMLDKVNSLIICGGMAFTFKKTLDNVKIGTSLFDEAGSHKVAELVEKAKKNNVELVFPVDYITADKFDKNAKTGSATDADGIPDEWMGLDAGEESRKKFRETILKAKTILWNGPAGVFEFDNFAGGSKAMLDACLEAEKNGSTVIVGGGDTATVVAKYGAEDGISHCSTGGGASLELLEGKTLPGVKELSEK

SEQ ID NO: 108177 - DNA, 1323 bp, Tribolium castaneum
  CDS (1)..(1323)
atggcaaaagcagattccccccaagatttgctcgatttgtgtgcccgtgccggttgtccctgtaccgcccccgaaatggctttaaacaaactatcaattgatgctttacaactcgccaacaaacgcgtccttatgagggttgacttcaacgtccccttaaaggacggcaagatcaccaacaaccagcgcatcgtcgccgccctcgacaccatcaaatacgcccttgacaagaacgccaaaagcgtcgtcctcatgtcgcacttgggccgccctgacggcagccccaaccccaaatacaccctcaagccggtggccgccgagctcaaaaccctcctcaacagagacgtcacgttcctcaccgactgcgtcggccccgacgtcgagaaggcgtgcgctgaccccgcccccggctcactcatcctattggaaaacttgcgtttccacgtcgaggaggagggcaaaggggtggacgcctctggcaagaaaatcaaagctgaccccgcccaagtcaccgccttccggcaaagtctgcgcaaattgggcgacgtttacgtcaatgacgccttcgggaccgcccaccgcgcccactcctccatgatgggggaggggtttgagcagcgcgccgccggcttcctcctcaaaaaggagttacaatatttcgcaaaggcgttggacaagcccgaaaaaccgttccttgcgattttgggcggggctaaagttgccgataaaatcaaactcatcgaaaatctactggataaggtccaggaaatgatcatagggggcgggatgagttacaccttccttaaagtaacgaaagacatgaagattgggggttcgttgtacgacgacgagggggcgaagatcgtcaataatttgctcgcgaaagcgaagcaaaacaacgtgcaaattcacttaccttgcgatttcgtcacggcggacaaattcgacgagaaggcgcaagtgggggctgccactctcgaggcggggatccccgacggctggatggggctggacatcgggccgaagtcgatcgaagcgttcaaagcccccattcagagggccaaagtgatagtgtggaacgggccagccggtgttttcgagtttgaaaattttgcaaaagggaccaaagccataatggatgaagtcgtggcggcgactcaaaggggctgtgtcacgattattggtggcggtgacacggccacttgtgccgcaaaatggaagactgaggataaggtttcgcacgtttcgacgggcgggggcgccagtttggagctactggagggcaaggtcctaccaggggtggccgccctctccgacgcttga

SEQ ID NO: 108178 - protein, 440 aa, Tribolium castaneum
MAKADSPQDLLDLCARAGCPCTAPEMALNKLSIDALQLANKRVLMRVDFNVPLKDGKITNNQRIVAALDTIKYALDKNAKSVVLMSHLGRPDGSPNPKYTLKPVAAELKTLLNRDVTFLTDCVGPDVEKACADPAPGSLILLENLRFHVEEEGKGVDASGKKIKADPAQVTAFRQSLRKLGDVYVNDAFGTAHRAHSSMMGEGFEQRAAGFLLKKELQYFAKALDKPEKPFLAILGGAKVADKIKLIENLLDKVQEMIIGGGMSYTFLKVTKDMKIGGSLYDDEGAKIVNNLLAKAKQNNVQIHLPCDFVTADKFDEKAQVGAATLEAGIPDGWMGLDIGPKSIEAFKAPIQRAKVIVWNGPAGVFEFENFAKGTKAIMDEVVAATQRGCVTIIGGGDTATCAAKWKTEDKVSHVSTGGGASLELLEGKVLPGVAALSDA

SEQ ID NO: 108179 - DNA, 1209 bp, Prochlorococcus marinus str. AS9601
  CDS (1)..(1209): transl_table=11
atgtcaaaattatctctttccagtcttgataagacacatttagaaggaaaaaaagttcttgtaagagtagattttaatgttccattaaatgaagacggtcaaataaccgacgatacgcgtattcgtgcagcgatcccaactattgaatatcttattaatcattctgcaaaagtcattttagctgctcattttggtagaccgaagggtcaggtaaatgaaaaaatgagattaactccagtagcagcaagattaagtgaattgttggggcaaaatgttgctcttactaacagttgtattggtgatgaagcagttgcacaatcaaatagcttatctaatggagatgttcttttacttgagaatgttcgtttttttggtgaagaggagaagaacgacctggagtttgctgaaaaattagcatcacatgcagatatgtatgtaaatgatgctttcggtgctgctcatagagcgcatgcttcaactcagggtgttacaaattatttaagtccctcagtagctggattccttttagaaaaagaattgaaatacctacaaggagcagtagattccccaaatcgtccattggcagcaatagttggagggtcaaaggttagtagcaaaataggagtacttgattctttactagataagtgtgacaaaatcatgattggtggaggtatgattttcactttttataaagctagaggtttagatgtcggaaagagccttgtagaagaagataaactcgagcttgctaaagatttagaagcaaaagcaaaagcaaaaggagtagagttattattacccactgatgttgttttggctgatgaattttctcctgacgccaatagtaaaatatctcaaattgatgcaattagtgggaattggatgggtctagatattggtccagattctattaaagtttttcagaatgctcttgcagaatgtaagacaattatttggaatggtccaatgggagtttttgaatttgataaatttgcagatggtacaaatgcaatagctacgactcttgcggacttaagtgctttttctgaagtttgtacaataattggtggtggagattcagttgcagcagttgaaaaagcaggattagctgagaaaatgtctcatatatctaccggaggtggggctagtttggaacttttagaaggtaaaactttaccaggtgtggctgcgttaaacgacgcttag

SEQ ID NO: 108180 - protein, 402 aa, Prochlorococcus marinus str. AS9601
MSKLSLSSLDKTHLEGKKVLVRVDFNVPLNEDGQITDDTRIRAAIPTIEYLINHSAKVILAAHFGRPKGQVNEKMRLTPVAARLSELLGQNVALTNSCIGDEAVAQSNSLSNGDVLLLENVRFFGEEEKNDLEFAEKLASHADMYVNDAFGAAHRAHASTQGVTNYLSPSVAGFLLEKELKYLQGAVDSPNRPLAAIVGGSKVSSKIGVLDSLLDKCDKIMIGGGMIFTFYKARGLDVGKSLVEEDKLELAKDLEAKAKAKGVELLLPTDVVLADEFSPDANSKISQIDAISGNWMGLDIGPDSIKVFQNALAECKTIIWNGPMGVFEFDKFADGTNAIATTLADLSAFSEVCTIIGGGDSVAAVEKAGLAEKMSHISTGGGASLELLEGKTLPGVAALNDA

SEQ ID NO: 108181 - DNA, 1206 bp, Prochlorococcus marinus str. MIT 9303
  CDS (1)..(1206): transl_table=11
atggcgaagcgttcactgtccagcctcagcgcagcggacctacgtagtaagcgtgtgctggttcgggttgacttcaacgtgcctctcaacgagaacggcgccattaccgatgacacccgcatccgcgccgccctgcccaccatcaatgacctgatcgacaaaggtgctcgggtgatcctctcggcccactttggccgaccaaagggtcaaatcaatgaaggaatgcggctcacaccagtagcaaaacgcctcagcgaactgctgggtaaaactgtgataaaaaccgaaagctgtgtcggtagcgacgccgaagccaaggtcaatgccatggccgatggagacgtcgtactgctcgagaatgtgcgctttttctcagaagaagaaaaaaacgacgccaacttcgctcaaaagctcgcagcacttgctgacgcctatgtgaatgatgctttcggtgccgcacaccgtgcccacgcctctacagaaggggtcaccaaattcctcaaccccagtgtggcaggccacctgatggagaaggaacttcaatacctgcaaggtgccatcgacgaccccaagcgaccccttgcagcgatcgtgggtgggtccaaggtcagcagcaagatcggcgtgttggaagccttgatcgacaagtgcgacaaggtgctgatcggcggcggcatgatcttcacgttctacaaagcgcgtggcctttcagtaggcaagagcctggtggaagaggacaagctggaactcgccaaggagctagaggccaaggccaaggccaagggggttcaactgcttctgcccactgatgttgttctagccgatgacttctcccctgatgccaatagtcagaccgtatccatcgacgccattcccgatggttggatgggcctggacattggcccagactcaatcaatctcttccaagacgcactggctgactgccaaacagtgatctggaacggccccatgggcgtgtttgagttcgacaagtttgccgccggcaccaacgccatcgccaccaccttggcggacctcagtggcaagggttgctgcacaatcatcggcggtggtgactccgttgccgctgtcgagaaggccggcctcgccgagaagatgtcccacatctctactggtggtggcgccagccttgagctgctggaaggcaaggtgttgccaggtgtcgccgctctcgacgacgcttaa

SEQ ID NO: 108182 - protein, 401 aa, Prochlorococcus marinus str. MIT 9303
MAKRSLSSLSAADLRSKRVLVRVDFNVPLNENGAITDDTRIRAALPTINDLIDKGARVILSAHFGRPKGQINEGMRLTPVAKRLSELLGKTVIKTESCVGSDAEAKVNAMADGDVVLLENVRFFSEEEKNDANFAQKLAALADAYVNDAFGAAHRAHASTEGVTKFLNPSVAGHLMEKELQYLQGAIDDPKRPLAAIVGGSKVSSKIGVLEALIDKCDKVLIGGGMIFTFYKARGLSVGKSLVEEDKLELAKELEAKAKAKGVQLLLPTDVVLADDFSPDANSQTVSIDAIPDGWMGLDIGPDSINLFQDALADCQTVIWNGPMGVFEFDKFAAGTNAIATTLADLSGKGCCTIIGGGDSVAAVEKAGLAEKMSHISTGGGASLELLEGKVLPGVAALDDA

SEQ ID NO: 108183 - DNA, 1194 bp, Clostridium thermocellum ATCC 27405
  CDS (1)..(1194): transl_table=11
atggcaatgatgaacaagaaaaccattgaggatattgacgtaaaaggtaaaaaggttatagtcagggttgattttaatgtgcctttggacgaaaacagaaagattaccgatgacaagagaatagttggtgcgcttccaaccatcaagtatctggttgaacacggtgcaaaaactatattggtttcacacctgggaagaccaaaagaaggttttgaggaaaagtacagcatggctccgactgccgtaagattgggagaacttcttggaaaagaagtaataatggcgaaagatgttattggtcctgatgcaaaggcaaaagcagcggcattaaaagaaggagaagttttaatgctcgaaaatgtcagattccacaaggaagagactaaaaacgatcctgcttttgcaaaagaattggcaagcatggctgaaatttatgtaaatgatgcgttcggaactgcccacagagcccacgcttcaacggcaggtcttgccgactatctgccggcggtatgcggatacctcatccaaaaggaaattgaggttatgggcaaggctctgtcaaatcctgaaagaccgtttgtggcaatattgggcggtgccaaggtttcagacaaaataggcgttattgagaaccttattgacaaagttgacactcttataatcggcggaggtatggcatataccttctttaaagcaaagggatacagcataggaacatccctgtgtgaagatgataaagttgagcttgcaaagagccttatggataaagcagagaaaaagggagtaaaactcttgcttcctgtggacaatgttgtaggcaaagagttcagcaatgatacagaacgcaagactgttccgtctgaccagattccggacggatggatgggtatggacatcggtgaggaaacaatcaagttgtattctgaggcaatcaagaatgccaaaaccgtggtatggaacggtcctatgggcgtatttgagttctccaactttgccaacggtacaagggaagttgcaagagcggttgccgagtccggagcaatttcaataatcggaggcggagattctgccgcagctatagaacagcttggttttgccgataagattacccacatttcaaccggaggcggcgcgtctttggagtttcttgaaggaaaagtattgccgggaattgatgtattaatggataaataa

SEQ ID NO: 108184 - protein, 397 aa, Clostridium thermocellum ATCC 27405
MAMMNKKTIEDIDVKGKKVIVRVDFNVPLDENRKITDDKRIVGALPTIKYLVEHGAKTILVSHLGRPKEGFEEKYSMAPTAVRLGELLGKEVIMAKDVIGPDAKAKAAALKEGEVLMLENVRFHKEETKNDPAFAKELASMAEIYVNDAFGTAHRAHASTAGLADYLPAVCGYLIQKEIEVMGKALSNPERPFVAILGGAKVSDKIGVIENLIDKVDTLIIGGGMAYTFFKAKGYSIGTSLCEDDKVELAKSLMDKAEKKGVKLLLPVDNVVGKEFSNDTERKTVPSDQIPDGWMGMDIGEETIKLYSEAIKNAKTVVWNGPMGVFEFSNFANGTREVARAVAESGAISIIGGGDSAAAIEQLGFADKITHISTGGGASLEFLEGKVLPGIDVLMDK

SEQ ID NO: 108185 - DNA, 1209 bp, Candidatus Protochlamydia amoebophila UWE25
  CDS (1)..(1209): transl_table=11
gtgagggtgaaggataaattatcgattcgcgatttaaatttgaaagacaagaaagccttaattcgtgtcgattttaacgtccctttagaaaaaggtttgattacagatgatagtcgtattcaagcctctcttcccacaattcaatatgttttagatcaagaaggagccgttattttgatgagccatctcggtcgtcctaaaggtttgtttgattctaaattttcgttggctccttgtgctaaacgtttatcagaattattaaataagcctgtaaaaatggctgcagattgttgtggattagacgttgaacagatggttcgtcagctaaaatcaggagaagttttattgcttgaaaatttacgttttcacaaaggcgaagaaaggcctgatgatgaacctaattttacaagtgctttgtcagagttgggagatgtttatatcaatgatgcttttggaactgctcatcgtgctcatgcttcgacaacaaaaattgcaaaattttttcccaatcgtgcagcagcgggtttgttacttgaaaaggaaatttcttatctaggttgtgctttaacgaatcctaaacgtcctttttgtgcagtgttaggaggtgcaaaaatttccacaaagtttaaagtcatcgaagctttacagtctaaagcagatgttttattaatagggggagcgatggctttcacttttttcaaatctgaaggaatacctattggggattcgctttacgaaagcgaattcgttgctgtcgctcgtgaattgttaggtgttgagacacagtctcgctgccgccttttactacccatagacttggtcattgctaaaaaaatggatgaatccttcactgaaacgagaattatttcagttaaagaaggaattcctgatgggtatcaaggggtagatattgggccagacactattaaactttatcaagaagaattgaacagagcagctacgattttttggaacggccctttaggagtatttgaagttcctgctttttctaaagggactcaaactattgctcaaactcttgctgttgtcaacgcgattactattgttgggggaggggattccttagctgctatagaacaagctggggtttctaaacaaataaaccatctttcaactggagggggtgcctctttagaatatatagaatttgggcaattacctgggattgaagctctatcagataaataa

SEQ ID NO: 108186 - protein, 402 aa, Candidatus Protochlamydia amoebophila UWE25
MRVKDKLSIRDLNLKDKKALIRVDFNVPLEKGLITDDSRIQASLPTIQYVLDQEGAVILMSHLGRPKGLFDSKFSLAPCAKRLSELLNKPVKMAADCCGLDVEQMVRQLKSGEVLLLENLRFHKGEERPDDEPNFTSALSELGDVYINDAFGTAHRAHASTTKIAKFFPNRAAAGLLLEKEISYLGCALTNPKRPFCAVLGGAKISTKFKVIEALQSKADVLLIGGAMAFTFFKSEGIPIGDSLYESEFVAVARELLGVETQSRCRLLLPIDLVIAKKMDESFTETRIISVKEGIPDGYQGVDIGPDTIKLYQEELNRAATIFWNGPLGVFEVPAFSKGTQTIAQTLAVVNAITIVGGGDSLAAIEQAGVSKQINHLSTGGGASLEYIEFGQLPGIEALSDK

SEQ ID NO: 108187 - DNA, 1188 bp, Acinetobacter sp. ADP1
  CDS (1)..(1188): transl_table=11
atgaactttaagcgtatgacggacctcgacttaagcgaaaaacgtgtattaattcgtgaagatttaaatgtaccagtaaaaaatggccagattaccagtgatgctcgtttgcgtgcagcattaccaaccattcaggctgcacttgctcaaggtgctgctgtgatggtttgctctcacttagggcgtcctgttgaaggtgaaccaaaacctgaacagtcacttgcacctgttgcagcttacctttcagatgcattagggcaggaagttaaacttttgactgactaccttgaaggggttgagatagcaccaggtcaagttgttcttcttgaaaatgtacgttttaacctcggcgaaaagaaaaataatgctgaacttgcacaaaaatatgcagcactctgtgatgtattcgtgatggatgcatttggcactgcacatcgtgcagaagcatcaaccgaaggtgctgctcgttatgccaaagttgcagcggcaggcccattgcttgcgactgagctagatgcattaggtcgtgcacttcaaacccctgaaaagccaatggtggcgattgttgcaggttctaaagtttcaacaaaacttgatgttttaacctcactttctgacatttgcggtcaattgattgtgggtggtggaattgccaataccttcttggcagcagctggtttcaatgtaggcaaatcgctttgtgaaaatgatttgattgataccgctaaagcaattgccgctaaagtatctgttccacttcctacggatgtggtggtagctgatgccacagagattgactttgctgacttcttgggttcattagcaaaagcacaagcaattgtgaaaaaagtggaagatattgctgacaatgacatgattctggatgtgggtcctgacacggcgaaagcatttgctgagatcttaaaaacagctaaaacgatactttggaacggcccagttggtgtatttgaagtagatcagtttggtgaaggaaccaaaacgctttcattggcaattgctgaatctaaaggattttctattgcaggtggtggtgatactttggctgcaattgataaatataaagttgctgacaaaattggttatatctcaacaggtggcggcgcattccttgagtttgtagaaggaaaaaccttaccagccgttgctgtattactcgaacgtgcctaa

SEQ ID NO: 108188 - protein, 395 aa, Acinetobacter sp. ADP1
MNFKRMTDLDLSEKRVLIREDLNVPVKNGQITSDARLRAALPTIQAALAQGAAVMVCSHLGRPVEGEPKPEQSLAPVAAYLSDALGQEVKLLTDYLEGVEIAPGQVVLLENVRFNLGEKKNNAELAQKYAALCDVFVMDAFGTAHRAEASTEGAARYAKVAAAGPLLATELDALGRALQTPEKPMVAIVAGSKVSTKLDVLTSLSDICGQLIVGGGIANTFLAAAGFNVGKSLCENDLIDTAKAIAAKVSVPLPTDVVVADATEIDFADFLGSLAKAQAIVKKVEDIADNDMILDVGPDTAKAFAEILKTAKTILWNGPVGVFEVDQFGEGTKTLSLAIAESKGFSIAGGGDTLAAIDKYKVADKIGYISTGGGAFLEFVEGKTLPAVAVLLERA

SEQ ID NO: 108189 - DNA, 1164 bp, Erwinia carotovora subsp. atroseptica SCRI1043
  CDS (1)..(1164): transl_table=11
atgtctgtaattaagatgaccgatctggatctggctggtaaacgtgttcttattcgtgcggatctgaacgtaccagtaaaagaagggaaagtgacgtctgatgcgcgcatccgtgcctctctgccgaccatcgaaatcgctctgaaacaaggcgctcgcgttatggtcacttcccacttgggacgtccgaccgaaggcgagtacaacgaagatttttctctgctgcctgttgttgactacctgaaagagaaactctcttctcccgtacgtctggcgaaagactacctagatggtgttgatgtcgccgaaggcgagctggttgtactggaaaacgtccgctttaacaaaggcgagaagaaagacgacgaagtgctctccaagaaatacgcggcactgtgcgatgtgttcgtgatggacgccttcggtacggcgcaccgtgcacaggcttcaacccacggcgtaggtaaatttgccactatcgcttgtgcgggcccgctgctgtctggtgagctggaagcgctgggtaaagcactgagcaaaccagcccgtccgatggtcgccattgtgggcggttctaaagtttctactaaactgaccgtactggattcactgtctaaaatcgccgatcagctgatcgtgggtggcggtatcgccaatacctttgttgccgcacaaggccacaatgtaggtaagtccctgtatgaagcagacctgatttctgaagcgaaaaagctgctggaaacgtgtgatattcctgttccgagcgatgtgcgtgtagcgtcagaattctctgaaactgctgcagcaacgctgaagtctgttacggaaattaaagacgaagagcagattcttgatctgggagatgtttccgctgagcgtttggctgaaattctgaagaatgccaaaaccatcctgtggaatggcccagttggcgtcttcgaattcccgaatttccgtaaaggaaccgagattatcgctcgtgctatcgcggatagcgacgcattctctatcgcaggtggcggcgatacgctagctgcgatcgatctgtttggtattgcagacaagatctcctacatttctactggtggtggcgcattcctggagttcgttgaagggaaaaaactgccagcagtcgttatgctggaagaacgcgccaagcagtaa

SEQ ID NO: 108190 - protein, 387 aa, Erwinia carotovora subsp. atroseptica SCRI1043
MSVIKMTDLDLAGKRVLIRADLNVPVKEGKVTSDARIRASLPTIEIALKQGARVMVTSHLGRPTEGEYNEDFSLLPVVDYLKEKLSSPVRLAKDYLDGVDVAEGELVVLENVRFNKGEKKDDEVLSKKYAALCDVFVMDAFGTAHRAQASTHGVGKFATIACAGPLLSGELEALGKALSKPARPMVAIVGGSKVSTKLTVLDSLSKIADQLIVGGGIANTFVAAQGHNVGKSLYEADLISEAKKLLETCDIPVPSDVRVASEFSETAAATLKSVTEIKDEEQILDLGDVSAERLAEILKNAKTILWNGPVGVFEFPNFRKGTEIIARAIADSDAFSIAGGGDTLAAIDLFGIADKISYISTGGGAFLEFVEGKKLPAVVMLEERAKQ

SEQ ID NO: 108191 - DNA, 1215 bp, Mesoplasma florum L1
  CDS (1)..(1215): transl_table=4
atgaattacaatttgaaaaaaacattaaaagatattaatgtaaaaggaaaaaaagttttagttcgtgttgactttaatgttccattaaaagatggagttattactgatgacaatcgtattcaagcagcattaccaacaattaaatatttagttgaaaatggcgcaaaagttatcttattttcacacttatcaagaattaaaagtgaagatgacaaaaaaactaaatcattagctccagtagcaaaaagattggaagaagttttagcacaatcagtaaactttgttaaccaaacaagaggaactgaattagaaactgcaattaatgcattaaatgaaaaagaagttttattatttgaaaacactcgtttcgaagatgtaaaagatggtgaagtagttaaagctgaatcaaaaaatgatccagaattaggaaaatactgagcaagccttggagatgtatttattaatgatgcatttggtactgcacaccgtgctcatgcttcaaacgttggtatagcttcaaacatttctgaatcagcattaggtttcttagttcaaaatgaaattgaaatgttaggtaaaggaatagacgcacctgaaagaccttttgttgcaattttaggaggagcaaaagtttctgacaaaattggtgttattgataaccttttaactaaagttgacaaaattttaattggtggaggtatgacttatacattccataaagcaatgggattagaaattggtaactcattattagaagctgataaagttgaattggctaaagaatacttagaaaaagctaatggaaaaataatgttacctgttgatagtttatgtgctcctgaatatgctgatgttgctccaacattatgtggagaaaatgttccagcaggaatgatgggattagatatcggaccaaaaactattgaaatgtatgaaaaagaattagcaaacgcaaaaactgttgtttgaaatggaccaatgggagttagtgaatttgaaaacttcaaagctggtactgttgctgtttgtgaagctgctgcaaaacgtaaagctgatggaggtttcactttaattggtggaggagactcagctgcagctgcaattaaattaggattcaaagatgaattctcatgaatttctacaggtggtggagcttcattagaatatatggaaggtaaagaattacctggaattgctgcaatccaaaacaaataa

SEQ ID NO: 108192 - protein, 404 aa, Mesoplasma florum L1
MNYNLKKTLKDINVKGKKVLVRVDFNVPLKDGVITDDNRIQAALPTIKYLVENGAKVILFSHLSRIKSEDDKKTKSLAPVAKRLEEVLAQSVNFVNQTRGTELETAINALNEKEVLLFENTRFEDVKDGEVVKAESKNDPELGKYWASLGDVFINDAFGTAHRAHASNVGIASNISESALGFLVQNEIEMLGKGIDAPERPFVAILGGAKVSDKIGVIDNLLTKVDKILIGGGMTYTFHKAMGLEIGNSLLEADKVELAKEYLEKANGKIMLPVDSLCAPEYADVAPTLCGENVPAGMMGLDIGPKTIEMYEKELANAKTVVWNGPMGVSEFENFKAGTVAVCEAAAKRKADGGFTLIGGGDSAAAAIKLGFKDEFSWISTGGGASLEYMEGKELPGIAAIQNK

SEQ ID NO: 108193 - DNA, 1179 bp, Desulfotalea psychrophila LSv54
  CDS (1)..(1179): transl_table=11
atgaagtcgttacgtgaattggaactcgccggtaagcgagtcttggtacgggtggattttaatgtgccgatggatgataagcaacgaataaccgacgatattcgtattcgtatggttcttcccaccctacgctatgtgcttgaacagggtggccgcttaattatctgttctcatatgggtaggcccaagggcaagcgagttgaggagtatagtcttgctcccatagcccgtcatcttgcaggtctgctaggcagagatgtcggcattgctccggattgtattggtgctgaggtggaggcgcaggtggcagcccttggcgtaggcgaggtgcttcttttgcaaaaccttcgtttttacggcgaagaaacggaaaatgatgccgtctttgccggtaagcttgcaggacttgccgatgtctatgtaaatgatgcctttgccgtatctcatcgagcccatgcctccgtggttggagttgccgagcgggtagctgaaaaatgtgccggctttctcctgcagacagagatagattattttcataaatcgatgaatgaccccattcgtcccctggtggccctggtgggtggagccaaggtctcctctaagataggtgccctggaaaatatgcttggtaaggtcgataagatgattattggcggtgccatggccaataccttcttaatgagtcagggcgtcgatgttggtgcctcaaaggtggaggatgacctgcttgtcaccgccaggaattttctgcaggcagcaggggagcgggggatgaaggtctatcttcccgttgattttgtggttgcagatcgttttgccgccgatgcggtgcacaagactgtgcccgccgatagtgttccggagggttggatggccctcgatgtcggcccggcaagtagtattctctttcgagaggccctgcagggtgccggtaccatcgtctggaatgggcccatgggcgcttttgagatggatgcctttgccggagggaccatgagtctctgtcgtgatgttgccgcttcgcaggcgctttcgatcactggtggtggggattctaatgccgcagtgaagaaatcaggcgaggcagataatatctcctatatgtccaccggtggaggggccttcttgcagttgatggaggggaaaaccctacctggggtggatgccttggaagcataa

SEQ ID NO: 108194 - protein, 392 aa, Desulfotalea psychrophila LSv54
MKSLRELELAGKRVLVRVDFNVPMDDKQRITDDIRIRMVLPTLRYVLEQGGRLIICSHMGRPKGKRVEEYSLAPIARHLAGLLGRDVGIAPDCIGAEVEAQVAALGVGEVLLLQNLRFYGEETENDAVFAGKLAGLADVYVNDAFAVSHRAHASVVGVAERVAEKCAGFLLQTEIDYFHKSMNDPIRPLVALVGGAKVSSKIGALENMLGKVDKMIIGGAMANTFLMSQGVDVGASKVEDDLLVTARNFLQAAGERGMKVYLPVDFVVADRFAADAVHKTVPADSVPEGWMALDVGPASSILFREALQGAGTIVWNGPMGAFEMDAFAGGTMSLCRDVAASQALSITGGGDSNAAVKKSGEADNISYMSTGGGAFLQLMEGKTLPGVDALEA

SEQ ID NO: 108195 - DNA, 1179 bp, Symbiobacterium thermophilum IAM 14863
  CDS (1)..(1179): transl_table=11
atggcgctgatgaccgtacgcgacatcgatgtcaagggcaagcgcgtgttcgtgcgtgtcgacttcaacgtcccgctggaagatggtcggatcacggatgacacccggatcagggcggccgtgcccaccatccggtacctggtggaggaaggggcggtcgctgtgctggcgtcgcacctgggccggcccaagggccagcggaacgagaagtactccctcgccccctgtgcccggcgcctgtccgagctgctgggccgggaggtcgtgttcgcccccgactgcatcggcgaggaggtcgagcggctggtggccgaacagccgcccgggtccgtggtcctgctcgagaacgtccgtttctacgcggaggaggagaagaacgaccccgagttcgccgcgaagctcgcgcgcctcggcgagatcttcgtcaacgacgcctttggcaccgcgcaccgggcgcacgcctcgacccggggggtggccgaccacatgccggttcgggtggcaggcttcctcatgcagaaagaggtcgacatcatgggcaaggccctgtccgaccccgaccggcccttcgtggcgatcatcggcggcgccaaggtctcggataagattatggtgatcgagaacctgttgaccaaggtcgaccggctcatcatcggcggcggcatggccaacaccttcctgcgggccaggggcttcgccaccggcaagtcgctggtggaggaggaccgggtcgacaccgcccgggagctgctggccaagggcggcgacaagatcctcctgcccaccgatctggtggtcgcctcggagttcaaggccgacgccgagcagaaggtcgttccggtggacgccatccccgagggctggatggccctggacatcgggccggagaccgcccgggcctttgccgacgtgatccgcggggctcacaccgtcgtgtggaacggcccgatgggcgtgtttgagatggagcccttcgcgcgcggcaccttcgcggtcgcccaggcgatggcggactgcgagggcgtgacgatcgtgggcggcggcgactccgtggcggctgtcgaggcggcgggcctggccgatcgcatgacccacgtctccacgggcggcggcgcctcgctggagttcctggaggggaaggaactgcccggcgttgcctgcctcgctgtgaagccgtga

SEQ ID NO: 108196 - protein, 392 aa, Symbiobacterium thermophilum IAM 14863
MALMTVRDIDVKGKRVFVRVDFNVPLEDGRITDDTRIRAAVPTIRYLVEEGAVAVLASHLGRPKGQRNEKYSLAPCARRLSELLGREVVFAPDCIGEEVERLVAEQPPGSVVLLENVRFYAEEEKNDPEFAAKLARLGEIFVNDAFGTAHRAHASTRGVADHMPVRVAGFLMQKEVDIMGKALSDPDRPFVAIIGGAKVSDKIMVIENLLTKVDRLIIGGGMANTFLRARGFATGKSLVEEDRVDTARELLAKGGDKILLPTDLVVASEFKADAEQKVVPVDAIPEGWMALDIGPETARAFADVIRGAHTVVWNGPMGVFEMEPFARGTFAVAQAMADCEGVTIVGGGDSVAAVEAAGLADRMTHVSTGGGASLEFLEGKELPGVACLAVKP

SEQ ID NO: 108197 - DNA, 1170 bp, Mannheimia succiniciproducens MBEL55E
  CDS (1)..(1170): transl_table=11
atgtcagtaatcaaaatgaccgatcttgatttagccggcaaacgtcttttcatccgcgccgatttaaacgtgccggtaaaagacggcaaagtgacttcagatgcgcgtatccgcgcaacaattcctactttaaaattagccttggaaaaaggcgccaaagtgatggtaacttctcacttgggccgtccgactgaaggtgaattcaaacctgaagactcattacaaccggtagttgattacttaaaagatgcaggatttaacgtacgcctagcacaaaactacttagacggcgttgaagtaaacgaaggcgaaatcgttgtattggaaaacgttcgtatcaacaaaggcgaaaagaaaaacgatcctgaattgggtaaaaaatatgccgcactttgcgacgtattcgtaatggatgcttttggtacggctcaccgtgcgcaggcttcaacttacggtgttgccgaatatgcgccggttgcttgcgcaggcccgttattagcggctgaattggatgctttgggtaaagccttaaaagaacctcaacgtcctatgcttgcaattgtaggcggttcaaaagtgtctactaaattaactgttttagacagcctttcaaaaattgccgatcaattaatcgtgggcggcggtattgccaatacctttattgccgctgaaggccataacgtcggtaaatctttatatgaagaagatttaattcctgaagcaaaacgtttagcggcagcaactaatatccctgttcctgtggatgtgcgtgtgggtacggaattctctgaaaatgcgccggcaaccgaaaaatcggtaaccgaagttcaagccgacgaatcaattttcgatatcggcgataaatccgcagaagaattggcgaaaattatcaaatccgctaaaaccattctttggaacggtccggtgggcgtgtttgaattccctaatttccgtaaaggtaccgaagtgatttctaacgcgattgcggaagcgactgcaaacggcgcattttctatcgccggtggcggtgataccttagccgctatcgatttattcggtatcaaagataaaatttcttatatttcaaccggcggcggtgcgttcttagaatttgttgaaggtaaggttttacctgcggtggaaatcttagaaaaacgtgcaaacggctaa

SEQ ID NO: 108198 - protein, 389 aa, Mannheimia succiniciproducens MBEL55E
MSVIKMTDLDLAGKRLFIRADLNVPVKDGKVTSDARIRATIPTLKLALEKGAKVMVTSHLGRPTEGEFKPEDSLQPVVDYLKDAGFNVRLAQNYLDGVEVNEGEIVVLENVRINKGEKKNDPELGKKYAALCDVFVMDAFGTAHRAQASTYGVAEYAPVACAGPLLAAELDALGKALKEPQRPMLAIVGGSKVSTKLTVLDSLSKIADQLIVGGGIANTFIAAEGHNVGKSLYEEDLIPEAKRLAAATNIPVPVDVRVGTEFSENAPATEKSVTEVQADESIFDIGDKSAEELAKIIKSAKTILWNGPVGVFEFPNFRKGTEVISNAIAEATANGAFSIAGGGDTLAAIDLFGIKDKISYISTGGGAFLEFVEGKVLPAVEILEKRANG

SEQ ID NO: 108199 - DNA, 1191 bp, Legionella pneumophila subsp. pneumophila str. Philadelphia 1
  CDS (1)..(1191): transl_table=11
atgaacctgattaaaatgagcgacattgatctgtctggcaaaagagttctgattcgtgaggatttaaatgtcccgatcaaagacggtatgattaccagtgatcaaagattgcaagcggccctgcctacaatcaaatccgctttggacagtggcgcagcagtaatcgtattgtctcatcttgggcgtccggaggaaggcaaatacgaaaaaaaattctctttggagcctgttgctgattatttaagggaaaacctggaatatcctgttcgcttcgtcaaagattacctgagcggcgtgggtgtaaaccctggggaattggtcgtatgcgaaaatgtccgatttaatcccggtgaaaaagccaatgacgaagctttggcaaaaaaactggcaagcctttgtgatgtctttgtcatggatgcttttggcacggcacacagggcacaagcgtctacctatggtgtcgctcaatatgctccagttgccgttgctggtcctctgctaatccgtgaacttgaagcgttaaaccaagtgcttaaagcgcctaaaaaacctatcgtcgctattgttggaggagccaaagtctcatccaagctcagtctattgaaacaattggtgggtatggttgatgttcttatccctggcggcggtattgccaatacttttctgaaagcccaagggtttgaaattggtatttccctttacgaacctgatttattggatgaggctcgccatatccttattctggccaaagagaaaggttgccaaattcctctacccaccgacgttgtagtaggcaaaacatttagtgaaacctgccctgctttcaacaaatctctgtctaatgtggctgcggacgatatgatccttgatattggcccagaaaccataagagattatgtagacctcatccatgacgccaacaccatcatctggaatggtccggttggtgtattcgaattcccgcagtttgcttatggaactagagccattgctatagcgattgccgagagtgatgccttttctattgctggtggtggtgataccttggctgctgttgatctttatgatttgaatcaacaaatttcttatatttccacaggaggtggggcatttctcgaatgtctggaaggaaaaaccttgcctgctgttgctattttgcaggagcgcgcaaaacatgttaagacgaactaa

SEQ ID NO: 108200 - protein, 396 aa, Legionella pneumophila subsp. pneumophila str. Philadelphia 1
MNLIKMSDIDLSGKRVLIREDLNVPIKDGMITSDQRLQAALPTIKSALDSGAAVIVLSHLGRPEEGKYEKKFSLEPVADYLRENLEYPVRFVKDYLSGVGVNPGELVVCENVRFNPGEKANDEALAKKLASLCDVFVMDAFGTAHRAQASTYGVAQYAPVAVAGPLLIRELEALNQVLKAPKKPIVAIVGGAKVSSKLSLLKQLVGMVDVLIPGGGIANTFLKAQGFEIGISLYEPDLLDEARHILILAKEKGCQIPLPTDVVVGKTFSETCPAFNKSLSNVAADDMILDIGPETIRDYVDLIHDANTIIWNGPVGVFEFPQFAYGTRAIAIAIAESDAFSIAGGGDTLAAVDLYDLNQQISYISTGGGAFLECLEGKTLPAVAILQERAKHVKTN

SEQ ID NO: 108201 - DNA, 1176 bp, Methylococcus capsulatus str. Bath
  CDS (1)..(1176): transl_table=11
atggctttcaaacgcatgaccgacatcgatctcgccggcaagcgcgtcctgatccgggaagacttcaacgtccccgtcaaagatggccgggtcaccagcgacgcccgcatccgcgccgccctcccgaccatccgccacgcgctggacgccggcgctgcggtgatgctgatgtcgcatctcggccgccccaccgaaggggaatatgccgaggagttttccatgaaacccgttgccgaccggctgtccgaactattggggcagccggtgacactggtgaaggactacctgggtggcgccgacccggcggtcgggtcggtcgtgctattcgagaacgtgcgtttcaacaagggcgagaagaaggacgacgaggtcttggcgcgccagctcgccgcgctgtgcgacgtctacgtgatggatgccttcggtacggcgcaccgcgccgaggcttcgacgcacggcgtgggcaaatacgctcccaccgcctgtgccggcctgctgctggcgacggaattggatgcactgggcagagcgctccacgacccggcgcgccccttggtcgccatcgtcggcggctcgaaagtatcgaccaaactgacggttctggattccctttcgcaggtggtcgatcagctcatcgtcggtggcggtatcgccaacaccttcatcaaagccgccggcttcaatgtcgggaaatcactgtacgaggaggacctggtggccgaagccaggcgcctgatggaagccgccaaggccaagggcggggagatccccgtaccggtcgacgtggtggtcggcaaacgcttcgatgccgcggaacccgccatggtcaagagcgtcgcagacatcgccgaggacgacatgatcctcgacatcggtccggagaccagccgccgctacgccgagttcatcggccgcgccggcacggtggtctggaatggccccgtaggtgtcttcgaattcgaccagttcggggaaggcacccgccgattgggtctggccatcgccgaaagccatgcattttccatcgccggagggggagacacactggcagccatcgacaaatacggcatcgccgaccgcatctcctacatctcgacggggggcggcgccttcctggaatttctcgaaggcaagcaactgccggcggttgccatgctggagagccgcgcggactga

SEQ ID NO: 108202 - protein, 391 aa, Methylococcus capsulatus str. Bath
MAFKRMTDIDLAGKRVLIREDFNVPVKDGRVTSDARIRAALPTIRHALDAGAAVMLMSHLGRPTEGEYAEEFSMKPVADRLSELLGQPVTLVKDYLGGADPAVGSVVLFENVRFNKGEKKDDEVLARQLAALCDVYVMDAFGTAHRAEASTHGVGKYAPTACAGLLLATELDALGRALHDPARPLVAIVGGSKVSTKLTVLDSLSQVVDQLIVGGGIANTFIKAAGFNVGKSLYEEDLVAEARRLMEAAKAKGGEIPVPVDVVVGKRFDAAEPAMVKSVADIAEDDMILDIGPETSRRYAEFIGRAGTVVWNGPVGVFEFDQFGEGTRRLGLAIAESHAFSIAGGGDTLAAIDKYGIADRISYISTGGGAFLEFLEGKQLPAVAMLESRAD

SEQ ID NO: 108203 - DNA, 1185 bp, Azoarcus sp. EbN1
  CDS (1)..(1185): transl_table=11
atgaacgtcaagaaactcgccgacctcgacgtcgccggcaagcgcgtcttcatccgtgccgacctcaacgtgccgcaggacgaagcgggcaacatcgtcgaggacacccgcatccgcgcgtcgctgccgtcgatccgctactgcctcgaacggagcgccaccgtcatggtcacctcgcacctcggccgaccgaccgaaggcgaatgccgcgccgaagacacgctcgcgccaatcgccgtgcgcctcggcgaactcctcggcaagccggtgcgcctgatccgcgactgggtcgaaggcggcttcgaagtccgggccggtgaagtcgtgctgctcgagaactgccgctgcaacaagggcgagaagaaggacaacgaggaactcgcgaagaagatggccgcactgtgcgacatctacgtcaatgacgcgttcggcaccgcgcaccgcgccgaggccacgacccacggcatcgcgcgcttcgcgccggtcgcgtgcgccggcatgctgatgggtgccgagatcgacgcgctgacgaaagcgaccgagaacccggcccgtccgctcgtcgcgatcgtcggcggcgcgaaagtgtcgacgaagctgacgatcctcaagacgctcgccgagaaggtcgaccagctgatcgtcggcggcggcatcgccaacaccttcctgctcgcgtcgggcaagcgcatcggcgaatcgctcgccgaaccggagctcgtcaaggaagcgcaggcgatcatggacatgatgaaggcgcgcggcgccgaagtgccgctgccggtcgacgtcgtcgtcgccgacgaagtgtcggcgctcgcgcgggcgaaccgcattcccgtcgacgaagtcggcccgcacgaccgcatcctcgacgtcggcccgaagagctcggcaaagctcgccgagatcatcgcgcacgccggcacgatcgtgtggaacggccccgtcggcgtgttcgagcacaaccagttcgcgggcggcacgaaaatgatggcctcggcgattgcgcactccgaggcgttctgcatcgccggcggcggcgacacgctggccgcgatcgccaaattccacatcgcgcaggacatcggctacatttcgaccggcggcggcgccttcctcgagttcctcgaaggcaagaagctgcccgcgatcgctgcgctcgaagcgcgctttgccgactga

SEQ ID NO: 108204 - protein, 394 aa, Azoarcus sp. EbN1
MNVKKLADLDVAGKRVFIRADLNVPQDEAGNIVEDTRIRASLPSIRYCLERSATVMVTSHLGRPTEGECRAEDTLAPIAVRLGELLGKPVRLIRDWVEGGFEVRAGEVVLLENCRCNKGEKKDNEELAKKMAALCDIYVNDAFGTAHRAEATTHGIARFAPVACAGMLMGAEIDALTKATENPARPLVAIVGGAKVSTKLTILKTLAEKVDQLIVGGGIANTFLLASGKRIGESLAEPELVKEAQAIMDMMKARGAEVPLPVDVVVADEVSALARANRIPVDEVGPHDRILDVGPKSSAKLAEIIAHAGTIVWNGPVGVFEHNQFAGGTKMMASAIAHSEAFCIAGGGDTLAAIAKFHIAQDIGYISTGGGAFLEFLEGKKLPAIAALEARFAD

SEQ ID NO: 108205 - DNA, 1209 bp, Synechococcus elongatus PCC 6301
  CDS (1)..(1209): transl_table=11
gtgtccaaaagaactttagcgagcctgaccgccgctgacttagagggcaagcgggtcctcgtgcgtgtcgacttcaatgtccctttggacggcaatgggaaaattacggatgacacccgcatccgtgcggctctgccgacgattcgctacctgtcggaaagtggtgccaaggtgattctggtcagccactttggtcgtcccaaaggcaagcccgtcgagagcatgcgcttaacgccggtggctgagcgcctctcggaattgctgggtcgccctgttgttaagacaaccgatgctgtgggtgccggtgccgaagcgcaagtggcagccaccagcaatggccaagtcgtgttgttggagaacgtgcgtttccacgctgaggaagaagccaacgacgctgaatttgcgaaagcactagctagcttggccgatatctacgtcaatgatgcctttggtgctgctcaccgggctcacgctcccacggctggcgtgactgaatatctttcgccttgcgtggctggttacctgttggagaaagagttgcaatacctacaagccgcgatcgacaatccccaacggcccttggctgcgatcgtcggcggttcgaaagtttccagcaaaattggcgtgatcgaaacgctgctggataagtgcgacaaactgctgattggtggcggcatgatctttaccttctacaaagcccaaggactttcggtcggcggctcactggtagaagaggacaaactcgatctggcgcgatcgctgatggctaaagcgcaagaaaaaggcgtgcaactgttgctgcccgtggatgtagtagtggccgataagtttgcgccggatgctaatgccaaaaccgtggcgatcgatgcgattcccgatggctggatgggcctagatatcggacctgagtcggtcaagcaattcgagggagccttggccgattgccgctcggtcatttggaatggcccgatgggcgtatttgagttcgatcaattcgctgtcggtaccgaagcgatcgctcgtagcttggcaggactgacccgcaagggtgcaaccacgatcattggtggtggtgactcggtcgctgccgttgagaaagtcggtgttgcttcggaaatgagccacatttccaccggtggtggtgccagcttggaactgctggaaggcaaagtcctgccgggtgtggctgcactggatgacgctgcctaa

SEQ ID NO: 108206 - protein, 402 aa, Synechococcus elongatus PCC 6301
MSKRTLASLTAADLEGKRVLVRVDFNVPLDGNGKITDDTRIRAALPTIRYLSESGAKVILVSHFGRPKGKPVESMRLTPVAERLSELLGRPVVKTTDAVGAGAEAQVAATSNGQVVLLENVRFHAEEEANDAEFAKALASLADIYVNDAFGAAHRAHAPTAGVTEYLSPCVAGYLLEKELQYLQAAIDNPQRPLAAIVGGSKVSSKIGVIETLLDKCDKLLIGGGMIFTFYKAQGLSVGGSLVEEDKLDLARSLMAKAQEKGVQLLLPVDVVVADKFAPDANAKTVAIDAIPDGWMGLDIGPESVKQFEGALADCRSVIWNGPMGVFEFDQFAVGTEAIARSLAGLTRKGATTIIGGGDSVAAVEKVGVASEMSHISTGGGASLELLEGKVLPGVAALDDAA

SEQ ID NO: 108207 - DNA, 1185 bp, Bacillus clausii KSM-K16
  CDS (1)..(1185): transl_table=11
atgaacaaaaaaacgctttatgactacgattttgcaggcaaaacggtattttgccgagtcgatttcaatgttccgatgaaagatggaaagattactgatgaaacgcggattcaagcagctttgcctacgattaaatacttaagtgaacaaggggcgcgcgttttgctagcaagccatcttggccgcccgaaaggcgaagtggtagaaagcttgcgcttggcgcctgtcgcgacacgccttagcgagctgttaggaaaagaagtacaagccgtccaggaagcgcacggtccagtagcaaaacaagcagtggaaggtcttgaagacggtggcgtgttgctgcttgaaaatgtccgcttttacccaggggaagaaaagaacgatcctgaattagcgaaagcgtttgctagcctagccgacatttttgtcaatgatgcatttggggcggcacaccgtgcccacgcttcaacggaaggcattgcccactatttgccgtcagcagctggttttctaatggaaaaagaactggatgtactcggcaaagcgttaagcaaccctgaacgtccgtttacagcagtcattggtggcgcaaaagtaaaagacaagattggcgttattgacaacttgctagataaagtcgacaatttaattattggcggcggtctcgcatacacgtttgtcaaagcgcaaggctatgaagttggcaaatcgttgcttgaagaagataagctcgatttagccaagcagtttatggaaaaggctgaacaaaaaggcgttaagttttatatgcctgaagatgtcattgttgccgatgatttttctgacgacgccaacaaaaaagaagtggccattagcggcattccagctgattgggaagcgcttgacattgggccaaaaacacgaaaaacctatgaagctgtattaaaagcttcaaaattagtgatttggaacgggccaatgggtgtgtttgagctcgaatcgtttgcaggtggcacaaaagcagttgcaaatgcgttggcagaggcgtcagatacgtattcagtcattggtggcggcgattcagcggcagccgttgaacaatttggccttgccgacaaaatgagccatatttcaacaggcggaggcgccagccttgaatttatggaaggcaaggaacttccaggcgttgtcgcactatcagaaaaataa

SEQ ID NO: 108208 - protein, 394 aa, Bacillus clausii KSM-K16
MNKKTLYDYDFAGKTVFCRVDFNVPMKDGKITDETRIQAALPTIKYLSEQGARVLLASHLGRPKGEVVESLRLAPVATRLSELLGKEVQAVQEAHGPVAKQAVEGLEDGGVLLLENVRFYPGEEKNDPELAKAFASLADIFVNDAFGAAHRAHASTEGIAHYLPSAAGFLMEKELDVLGKALSNPERPFTAVIGGAKVKDKIGVIDNLLDKVDNLIIGGGLAYTFVKAQGYEVGKSLLEEDKLDLAKQFMEKAEQKGVKFYMPEDVIVADDFSDDANKKEVAISGIPADWEALDIGPKTRKTYEAVLKASKLVIWNGPMGVFELESFAGGTKAVANALAEASDTYSVIGGGDSAAAVEQFGLADKMSHISTGGGASLEFMEGKELPGVVALSEK

SEQ ID NO: 108209 - DNA, 1194 bp, Dehalococcoides ethenogenes 195
  CDS (1)..(1194): transl_table=11
atggaaaacttaacaatcagagatctggatttctctggtaaaaaagctctggtgagagtggacttcaatgttcctataaacgcagagaccggcagtataaatgatgacagccgcatacgggcagctatacctactattgattatctgctggatcaccaggccaaagttattttatgcagccacctgggaaggccggatggcaaggtagtagaaagtatgcgtcttgccccggtggcaaaacgtttgtcagagatactcaggcaggaagtgcttacagcctctgattgtattggagatgaggtaaccgcaaaggtaaacgcgctggaagacggacaggtgctgctgctggaaaacctgcgtttccacccggaagaagaagccaatgaccctgcctttgccagaaaactggcagatttggctgatatatatgtagatgacgcctttggcactgcccaccgcaaacacgcctctattgtaggtgtggccaaatacctgccggcagtggccgggcttctccttgaaaaggagcttaatgctctgggaaaagtgctggaacacccgcccagaccctttatgatactgctggggggtgccaaggtaagtgacaaggtgggcatgctggaaaacgttatggataaggtagatactattcttattggcggaggcatggctgccactttcctgaaggcacaagggctggagataggtgactctcttattgatgacagcttggatactgctaaaatgctgatggataaagcaaagtctaaaaatgttaagattgtcctgccggatgatgtactgataacatttgataaaataggccctgatgccaaagcagaaaacgtaagcgtggaaaacataccccccacagccaaaattgtagatattgggctgcttaccattacccttttcaccaagcagcttgagaagtgcaaaacagtcttctggaacgggcctatgggcatttacgaaataccccagttttcagagggcaccagggcaatggtaaacaccatgacccgcctgcacggtactactattatcggcggcggttctacagctgaaattgtgaccgaactgaatattgccagtaaaatgagtttcgtatctaccggaggcggagcttcactcaagtttctcagcggtgaaaaattgcccggcgtagaggtgcttgcaaaaaaacatgaataa

SEQ ID NO: 108210 - protein, 397 aa, Dehalococcoides ethenogenes 195
MENLTIRDLDFSGKKALVRVDFNVPINAETGSINDDSRIRAAIPTIDYLLDHQAKVILCSHLGRPDGKVVESMRLAPVAKRLSEILRQEVLTASDCIGDEVTAKVNALEDGQVLLLENLRFHPEEEANDPAFARKLADLADIYVDDAFGTAHRKHASIVGVAKYLPAVAGLLLEKELNALGKVLEHPPRPFMILLGGAKVSDKVGMLENVMDKVDTILIGGGMAATFLKAQGLEIGDSLIDDSLDTAKMLMDKAKSKNVKIVLPDDVLITFDKIGPDAKAENVSVENIPPTAKIVDIGLLTITLFTKQLEKCKTVFWNGPMGIYEIPQFSEGTRAMVNTMTRLHGTTIIGGGSTAEIVTELNIASKMSFVSTGGGASLKFLSGEKLPGVEVLAKKHE

SEQ ID NO: 108211 - DNA, 1194 bp, Neisseria gonorrhoeae FA 1090
  CDS (1)..(1194): transl_table=11
atggcatttttaaaactgaccgaacaaaacgtgcggggcaaaaccgtcctcatccgcgccgatatgaacgtgccgttcaaaggcggcaaaatcagcgacgacacccgtatccgcgcctcgctcgcgtccgtcaaatactgcttggacaacggcgcgtccgttattgtgatgacccacttgggccgcccgaccgaaggcgagttccaccccgaagacgacgttgcgcccgttgccgcgcacttgggcggcctgttgggcaaagacgtgaaagtattgaacgactggcgcgaaaacaaaccggctttgaacgcgggcgatgtcgtgatgttgcaaaacgtgcgtatcaacaaaggcgagaagaaaaacgatttagaactgggcaaagcctacgccgccttgtgcgacgtgttcgtcaatgatgcgttcggcaccgcacaccgcgcccaagcttcgaccgaagccgttgcccaagccgcgcccgtcgcctgcgccggcgtattgatggcgggcgaactcgacgctttgggcaaagccctgaaacagcccgcgcgtccgatggtggcgattgttgccggcagcaaagtgtccaccaagctgaccatcctcgaatcgttggcggacaaagtcgatcagcttatcgtcggcggcggcatcgccaacacattcctgttggcggaaggcaaagccatcggtaaatcgctggcggaacatgatttggtggaagaatccaaaaaaattatggcgaaaatggcggccaaaggcggttctgtgccgctgccgaccgatgtcgtcgttgccaaagcctttgccgccgatgccgaagcggtggtaaaagacatcgccgacgttgccgaagacgagatgattttggacatcggcccgaaatccgccgccgcgcttgccgatttgcttaaagccgccggtacggtcgtttggaacgggccggtcggcgtgttcgagttcgatcaattcgcaggcggtacgaaagcccttgccgaagccatcgcccaaagcaaagcgttctcgattgcgggcggcggcgacacgctggcggcgattgccaaattcggcgttaccgaacaaatcggctacatctccaccggcggcggcgcgttccttgagttcttggaaggcaaagagctgcctgccgtagccgctttggaaaaaacgcggcgagtaaacggtttgatataa

SEQ ID NO: 108212 - protein, 397 aa, Neisseria gonorrhoeae FA 1090
MAFLKLTEQNVRGKTVLIRADMNVPFKGGKISDDTRIRASLASVKYCLDNGASVIVMTHLGRPTEGEFHPEDDVAPVAAHLGGLLGKDVKVLNDWRENKPALNAGDVVMLQNVRINKGEKKNDLELGKAYAALCDVFVNDAFGTAHRAQASTEAVAQAAPVACAGVLMAGELDALGKALKQPARPMVAIVAGSKVSTKLTILESLADKVDQLIVGGGIANTFLLAEGKAIGKSLAEHDLVEESKKIMAKMAAKGGSVPLPTDVVVAKAFAADAEAVVKDIADVAEDEMILDIGPKSAAALADLLKAAGTVVWNGPVGVFEFDQFAGGTKALAEAIAQSKAFSIAGGGDTLAAIAKFGVTEQIGYISTGGGAFLEFLEGKELPAVAALEKTRRVNGLI

SEQ ID NO: 108213 - DNA, 1260 bp, Bacteroides fragilis NCTC 9343
  CDS (1)..(1260): transl_table=11
atgcagacaattgacaatttcaattttgccggtaaaaaggcattcgttcgcgtggacttcaatgtacccttggacgaaaacttcaacattacagacgacactcgtatccgtgctgcacttcctaccctgaagaagattctggcagacggtggtagcatcatcatcggttctcacctgggccgtccgaaaggcgttgctgacaaattctctctgaaacacattgttaagcatgtatcagagttactgggcgttgaagttcagtttgccaacgactgtatgggcgaagaagctgctgtaaaagccgctgctctgcaaccgggcgaagtgctgttgcttgaaaaccttcgcttctacgctgaagaagaaggcaaaccaagaggattggctgaagacgcaaccgacgaagaaaaagccgcagccaagaaagccgtaaaagagagccagaaagaatttaccaagaaattggcttcgtatgcagactgctacgtaaacgacgcattcggtacagctcaccgtgctcatgcttctacagcactgatcgctaaatacttcgacaccaacaataagatgtttggctacctgatggaaaaagaagtgaaagccgttgataagatattgaacgacatcaagcgtccgtttactgccatcatgggtggatcaaaagtatcttctaagatcgaaatcatcgaaaacctgctgaacaaggtagacaacctgatcatcacaggcggtatgacttacactttcaccaaagcaatgggtggacagatcggtctgtctatctgcgaagatgacaaactggatctggctcgcgaactgatgcagaaagccaaagacaaaggtgtaaatctggtattagctgttgacgctaagattgctgacgctttctctaacgatgccaatactaaattctgcccggttaacgaaattcctgacggatgggaaggtcttgacatcggtccgaaatctgaagagatctttgccgaagtgatcaagaattctaagacaattctttggaatggtccgacaggtgtattcgaattcgaaaacttcactcacggctctcgttcagtaggcgaagctatcgttgaagctactaagaacggcgctttctcactcgttggcggtggcgactctgtagcttgtgtcaacaagttcggtctggcaaatggtgtatcttatgtttctacaggcggtggagcactgctcgaagcaatcgaaggaaaagttcttccgggtattgccgctatccaggaataa

SEQ ID NO: 108214 - protein, 419 aa, Bacteroides fragilis NCTC 9343
MQTIDNFNFAGKKAFVRVDFNVPLDENFNITDDTRIRAALPTLKKILADGGSIIIGSHLGRPKGVADKFSLKHIVKHVSELLGVEVQFANDCMGEEAAVKAAALQPGEVLLLENLRFYAEEEGKPRGLAEDATDEEKAAAKKAVKESQKEFTKKLASYADCYVNDAFGTAHRAHASTALIAKYFDTNNKMFGYLMEKEVKAVDKILNDIKRPFTAIMGGSKVSSKIEIIENLLNKVDNLIITGGMTYTFTKAMGGQIGLSICEDDKLDLARELMQKAKDKGVNLVLAVDAKIADAFSNDANTKFCPVNEIPDGWEGLDIGPKSEEIFAEVIKNSKTILWNGPTGVFEFENFTHGSRSVGEAIVEATKNGAFSLVGGGDSVACVNKFGLANGVSYVSTGGGALLEAIEGKVLPGIAAIQE

SEQ ID NO: 108215 - DNA, 1203 bp, Psychrobacter arcticus 273-4
  CDS (1)..(1203): transl_table=11
atgaattttttgcgtatgagcgagctgagtttgaccaataaagtagtgttgattcgtgaagacctcaatgtgcctatcaaagaaggtaaggtcgctagtgacgcacgcttacaagccagcctgccgacgattaagatggcgttagagaagggcgcagcggtgattgtttgctcgcatttgggtcgcccgacagaaggaagttctgaagccatttattcattagcgcctgttgctgactatttaagcgataaattatcagcgcctgttacgcttaataatgactacctcgctcaaggcgtagctatcaaagcgggcgaggtcgtattgttagaaaacgtacgttttaatgaaggcgaaaagaaaaataacgcggcgctcgcgcaaaaatatgctgatttgtgcgatgtatttgtgatggacgcttttgggacagcacatcgtgctcaggcgtcgacagaaggcgtgacccaagcgatgcaccaagctggcaagacggcttgtgctggacctttattggcagccgagcttgatgcattgagtttggcgcttgaaacgccagcacagcccatgttagctatcgttggtggctcaaaagtctctaccaaattagaggttttgcatagtttggctgagctctgctcgcagattatcgttggtggcgggattgccaataccttcttagccgcgcaaggtcatagcgttggagcttcactttatgaagcagatctggtcgatacagctcgtgaaataatgggtaaaaccgagattttattacctgaatatgtcgtcgttgctaataaaaatgacattgattttgcagattttacaggctcattgcaaaaggcagttgcgaccatcaagtctgttgataatatcggcgacaatgacatgatattggatatcgcgccagacagtgctataaagttggctgctgctattaccaatgccaaaactatcttatggaatggtccagtaggggtttttgaagtggatgcgtttggtcagggcactcagatagtggcagaagcggtcaaaaatagccaaggtttttctatcgcgggcggcggtgatacgcttgctgcgattgataaatatcaagtggcagatggcgtcagctacatgtcaacgggtggtggtgctttcttagagtttgtagaaggtaaagtcttgccggcggttgctgctttacaaattaatgaataa

SEQ ID NO: 108216 - protein, 400 aa, Psychrobacter arcticus 273-4
MNFLRMSELSLTNKVVLIREDLNVPIKEGKVASDARLQASLPTIKMALEKGAAVIVCSHLGRPTEGSSEAIYSLAPVADYLSDKLSAPVTLNNDYLAQGVAIKAGEVVLLENVRFNEGEKKNNAALAQKYADLCDVFVMDAFGTAHRAQASTEGVTQAMHQAGKTACAGPLLAAELDALSLALETPAQPMLAIVGGSKVSTKLEVLHSLAELCSQIIVGGGIANTFLAAQGHSVGASLYEADLVDTAREIMGKTEILLPEYVVVANKNDIDFADFTGSLQKAVATIKSVDNIGDNDMILDIAPDSAIKLAAAITNAKTILWNGPVGVFEVDAFGQGTQIVAEAVKNSQGFSIAGGGDTLAAIDKYQVADGVSYMSTGGGAFLEFVEGKVLPAVAALQINE

SEQ ID NO: 108217 - DNA, 1176 bp, Colwellia psychrerythraea 34H
  CDS (1)..(1176): transl_table=11
atgtcgattatcaaaatggctgatctaacattagccaaccaacgcgtattaattcgtgaagatttaaatgtacctgtaaccgatggtaaaatcacttcagatgctcgtttacgcgctgcattacctacacttaaacttgcactagaagctggcgcaaaagttatggttatgtctcatttaggtcgtccaactgaaggacaacctgaagagaaattttcacttaaacctgtaactgattatttaagtgcagcattaaactaccctgttcgcttagtcactgattacctagacggtgtagatgttgctgctggtgaattagtcgtatttgaaaacattcgctttaacctgggtgaaaagaaaaatgatgacacgctagctaaaaagttagctgcattatgtgatgttttcgttatggatgcttttggtactgctcatcgtgcccaagccagtactcatggcgtagccaaatttgccgcgactgcttgtgctggtccattgctttctggtgaattagaagcattaggtaaggctttagataatcctgcaagaccacttgtggcaattgttggtggctctaaagtatcaactaaattaactgtgcttgattctttagcaggcattgttgatcaacttgttgttggcggtggtattgctaacacctttattgcagcagatggtcataacgtcggaaaatcattatatgaagctgatttagttgaagaggcaactcgtttaactaaacaagcgaaagcaaacaacggtgatatcccagtacctagtgatgttgttgttgccactgagttttcagcttctgcaactgcaaccttaaaaccggtcaatgaagtcactgctgatgaaatgatttttgacattggtcctgagacagcaaaagcgttaactgaaattatcgctaacgctggtaccatagtttggaatggccctgttggcgtatttgaatttgatcagttcggtgaaggtactaaggtgattgcacaagctattgctgatagttcagccttctcaattgctggtggtggtgatactttagccgctgttgataaatatgaaattgccgataaaatttcttacatctcaacaggtggtggagcgttcttagaattcttagaaggcaagaaattaccagcagtagaaatattagagcaacgcgctaaataa

SEQ ID NO: 108218 - protein, 391 aa, Colwellia psychrerythraea 34H
MSIIKMADLTLANQRVLIREDLNVPVTDGKITSDARLRAALPTLKLALEAGAKVMVMSHLGRPTEGQPEEKFSLKPVTDYLSAALNYPVRLVTDYLDGVDVAAGELVVFENIRFNLGEKKNDDTLAKKLAALCDVFVMDAFGTAHRAQASTHGVAKFAATACAGPLLSGELEALGKALDNPARPLVAIVGGSKVSTKLTVLDSLAGIVDQLVVGGGIANTFIAADGHNVGKSLYEADLVEEATRLTKQAKANNGDIPVPSDVVVATEFSASATATLKPVNEVTADEMIFDIGPETAKALTEIIANAGTIVWNGPVGVFEFDQFGEGTKVIAQAIADSSAFSIAGGGDTLAAVDKYEIADKISYISTGGGAFLEFLEGKKLPAVEILEQRAK

SEQ ID NO: 108219 - DNA, 1188 bp, Thermobifida fusca YX
  CDS (1)..(1188): transl_table=11
atgcggacgatcgaggatctcgacgtcgcgggcaagcgcgtcttcgtccgagccgatctcaacgtgccgctcgacggtgaccgcatcaccgacgacggtcgtatccgggccagcctgcccaccatcactgcactgcgcgagcggaacgcgcgcgtgatcatcggcgcccacttgggccgccccaaaggcaaggtcgaccctgcctactcgctgaagccggtcgccgcccgcctgggtgagctgctgggcaccgaggtgcgcttcgcctccgacaccgcaggcgaatccgcccaggccatcagccgcgagctggccgacggcgaggtcgccctcgtggagaacctgcgttttgagccgggcgagaccagcaaggacgacgccgaacgcggtgagttcgccgatcggctcgccgcactggctgagctgtacgtcggcgacggtttcggcgccgtgcaccgcaagcacgccagcgtctacgacctgccgaagcgtctgccgcacgccgccggcggactggtgctggccgaagtcaacgtgctgcgcaagctgaccgagtccccgcagcgcccctacgtggtcgtactgggcggctccaaggtctccgacaaactcggcgtcatcgacaacctgctcaacaccgccgaccgcatcctcatcggcggcggcatggcctacaccttcctcgccgcgcagggctacgaggtgggcgccagcctgctggagcgggaccagatcgacaccgtcaaggggtacctgcgccgggctgaggagcgcggtgtggaactcgtgctcccggtggacgtggtggccgcagagaagttcgctgcggacgccgcccacgacgtggtcgacgtccgggagatccccgcggaccggatggggctggacatcggaccggcctcggctgagctcttcgcgtcgaaactggcggacgccgcgaccgtgttctggaacggcccgatgggcgtgttcgaaatggagccgtacgcgaagggcacccgctccgtggcgcaggccctagccgactcctcggcgttcaccgtggtcggcgggggcgactcggccgcagccgtccgggcactcggcttcgacgagaaggcgttcagccacatctccaccggtggcggtgccagcctggagtacctcgaaggaaagaccctgcccggcatcgcggcattggaggaatag

SEQ ID NO: 108220 - protein, 395 aa, Thermobifida fusca YX
MRTIEDLDVAGKRVFVRADLNVPLDGDRITDDGRIRASLPTITALRERNARVIIGAHLGRPKGKVDPAYSLKPVAARLGELLGTEVRFASDTAGESAQAISRELADGEVALVENLRFEPGETSKDDAERGEFADRLAALAELYVGDGFGAVHRKHASVYDLPKRLPHAAGGLVLAEVNVLRKLTESPQRPYVVVLGGSKVSDKLGVIDNLLNTADRILIGGGMAYTFLAAQGYEVGASLLERDQIDTVKGYLRRAEERGVELVLPVDVVAAEKFAADAAHDVVDVREIPADRMGLDIGPASAELFASKLADAATVFWNGPMGVFEMEPYAKGTRSVAQALADSSAFTVVGGGDSAAAVRALGFDEKAFSHISTGGGASLEYLEGKTLPGIAALEE

SEQ ID NO: 108221 - DNA, 1197 bp, Ralstonia eutropha JMP134
  CDS (1)..(1197): transl_table=11
atgacctccgtcctgcgtctatccgacctcatctcccaaggcaaaatctccggcaagcgtgtttttatccgcgccgacatgaatgtgccgcaggatgacgccggcaatatcaccgaggacacccgcatccgcgcttcggtgccggccatcgaggcctgcctggctgctggcgccgccgtgatggtcacgtcgcacctgggccgcccgaccgaaggcgagttcaagccggccgattcgctggcgccgattgccacgcgcctgtccgaactgctgggcaagccggtgaagctggtgcagaactgggtcgatggcgtggaggtcgctccgggtcaggtggtgctgctggaaaactgccgcgtgaacaagggcgaaaagaagaacagcgacgaactggcgcagaagatggccaagctgtgcgacgtgtacgtcaatgacgcgttcggcaccgctcaccgcgccgaagcgaccacgcacggcatcgccaagtacgcgccgatcgcctgcgccggcccgctgctggccgccgagatcgacgcgctgggcaaggcgctgggccagccggcgcgtccgctggtcgccatcgtggccggctcgaaggtctcgaccaagctgaccatcctgaagtcgctggccgacaaggtggacaacctgatcgtcggcggcggcatcgccaacaccttcatgctggccgccggcctgaagatcggcaagtcgctggccgaagccgacctggtggccgatgccaagaccatcatcgacatcatggccaagcgcggtgcctcggtacccattccggtcgacgtcgtgtgcgccaaggcgttcagcgccaccgccgccgccaccgtcaaggacgtcaaggacgtggccgacgacgacatgatcctcgacatcgggccgaagaccgccgcgcaattggccgaccagctcaaggctgccggtaccatcgtgtggaacggcccggtgggcgtgttcgagttcgaccagttcggcaacggcaccaaggtgctggccgaagccatcgccgattccaaggcattctcgatcgccggcggcggcgacacgctggccgccatcgccaagtacggcattgccgaccgcgtgggctatatctcgaccggcggcggcgcgttcctggagttcctggaaggcaagaagctgcccgcattcgaagtgctggagcaacgcgcagcaggctga

SEQ ID NO: 108222 - protein, 398 aa, Ralstonia eutropha JMP134
MTSVLRLSDLISQGKISGKRVFIRADMNVPQDDAGNITEDTRIRASVPAIEACLAAGAAVMVTSHLGRPTEGEFKPADSLAPIATRLSELLGKPVKLVQNWVDGVEVAPGQVVLLENCRVNKGEKKNSDELAQKMAKLCDVYVNDAFGTAHRAEATTHGIAKYAPIACAGPLLAAEIDALGKALGQPARPLVAIVAGSKVSTKLTILKSLADKVDNLIVGGGIANTFMLAAGLKIGKSLAEADLVADAKTIIDIMAKRGASVPIPVDVVCAKAFSATAAATVKDVKDVADDDMILDIGPKTAAQLADQLKAAGTIVWNGPVGVFEFDQFGNGTKVLAEAIADSKAFSIAGGGDTLAAIAKYGIADRVGYISTGGGAFLEFLEGKKLPAFEVLEQRAAG

SEQ ID NO: 108223 - DNA, 1242 bp, Methanosarcina barkeri str. Fusaro
  CDS (1)..(1242): transl_table=11
atgtctcagaaaataactggaaaggattatttgacgatgagtgatgtcgtactggacaataaaagagtacttgtaagggtggactttaactcaccaatggatgataatggaaacatcctggacgataagaaaattaagagccatttgcctacgttgcagtccctggagcactcaaaagtggtcctgatgtctcatcagggtcgacctggagatgaagactataccaccctggaagcccatgcaaagctggcaacagagcttttgggtcgagaagtaacctacgaggatgatatattcagctcatgcgcaaggaatgctataaaatcccttgcccagggagagatcctgctccttgagaacacgcgtttcaatgccgaagagatcacgaaccgcccgcctgagaaacaggctaaaagccagatggtcaagaagttgtatccactatttgatctctttataaacgatgctttttcagtttctcacagatctcagtgttctgtggtagggtttacagaagtcttgcctagcgttgctggcatacttatggataaggaaattacaggcttggataaagccttgaaatgtcgtgagcacccagcaatcttcatactgggaggagcgaaagccaacgactccataaaggcgatttctaatattctcaaacgggctggagctgataagatccttaccacaggggtagtagctacaatatttatgatggcaatgggcgtcgatgtaagcgaggtcaacaggaaattcattgaagataagaaatatatggaccagatttcgattgcttccaagctactcaaggattactcaggcaagatcatcgtgcctcaggatgtagcgttaaacagtggtggagaacgtcaagaagtcgaagtggacaagataaaaaaaggaaatcttccaatagctgatattggccgagagaccatcgaaaattattccaaatatcttaaggaagcaaaactatgtgtttttcatggcccaaccggtatttttgaactagataatttcaggcttggtacggatgaacttcttaaggctgcggctcaagcaagctattctgtcgcaggaggagggcataccttagatgccattgatcaactcggtctgggctctaaattttctcatataagcatgggtggaggtgcaagtataacctatatctctggcgagcccttgccaggaatcacagctctgaaaaaaaatgcattcaggtaccatcaaggttaa

SEQ ID NO: 108224 - protein, 413 aa, Methanosarcina barkeri str. Fusaro
MSQKITGKDYLTMSDVVLDNKRVLVRVDFNSPMDDNGNILDDKKIKSHLPTLQSLEHSKVVLMSHQGRPGDEDYTTLEAHAKLATELLGREVTYEDDIFSSCARNAIKSLAQGEILLLENTRFNAEEITNRPPEKQAKSQMVKKLYPLFDLFINDAFSVSHRSQCSVVGFTEVLPSVAGILMDKEITGLDKALKCREHPAIFILGGAKANDSIKAISNILKRAGADKILTTGVVATIFMMAMGVDVSEVNRKFIEDKKYMDQISIASKLLKDYSGKIIVPQDVALNSGGERQEVEVDKIKKGNLPIADIGRETIENYSKYLKEAKLCVFHGPTGIFELDNFRLGTDELLKAAAQASYSVAGGGHTLDAIDQLGLGSKFSHISMGGGASITYISGEPLPGITALKKNAFRYHQG

SEQ ID NO: 108225 - DNA, 1203 bp, Anabaena variabilis ATCC 29413
  CDS (1)..(1203): transl_table=11
gtgtctaaaaaaactgtggctagtttatctgctgctgatatttctggtaaacgcgctttagtgcgtgttgactttaacgtgcctttagacgatcaaggcaacatcacagacgatactcgcattcgtgcggctctgccaaccatccaagatttgacgcaaaagggcgctaaggtcattctagcaagccatttcggtcgtcccaagggtgtagatgagaaattgcgtcttaccccagtagccaagcggctatctgagttgttgggacaagaagttgtcaaaactgatgactcaattggtgatgaagttgcggctaaggtggcggcgctgcaaaatggccaggttcttttattagaaaacgtccgtttttataaagaagaagagaaaaacgatcctgaatttgctaaaaaattagctgctaatgctgatttctacgtaaacgatgcttttggtactgcacaccgcgctcatgcttctactgaaggtgtgactaaattcctcagtccatctgtggctggatatttggttgagaaggaattgcagtatctccaaagtgcgatcgaaaatccccaacgtcctttagcagccattatcggtggttctaaggtttccagcaaaatcggtgtgattgaaaccctactagagaagtgcgacaagctgatcattggtggtgggatgattttcaccttctacaaagctcgtggtttgaatgtgggtaagtcgctggtggaagaagacaagctagaactggcgaagtctttggaagctaaggcgaaggaacgtggcgttagcttgttgttacctacagatgtggtattggcagataactttgcgcctgatgccaattctcaaaccgtcagcattgacaacatccccgatggttggatgggtttggatatcggccctgattctgtcaaagtcttccaagaagcccttgcagataccaaaaccgtaatttggaacgggcctatgggtgtgtttgagtttgataagtttgctgctggtacagaagcgatcgctcatacactagcagagattggcaaaactggcacaactaccatcatcggcggtggtgactcggtagcggctgttgaaaaggttggtttggctgatcaaatgagccacatctccaccggtggcggcgctagcttagagttactcgaaggcaaagtactgcccggtatcgctgctttagatgaagcgtag

SEQ ID NO: 108226 - protein, 400 aa, Anabaena variabilis ATCC 29413
MSKKTVASLSAADISGKRALVRVDFNVPLDDQGNITDDTRIRAALPTIQDLTQKGAKVILASHFGRPKGVDEKLRLTPVAKRLSELLGQEVVKTDDSIGDEVAAKVAALQNGQVLLLENVRFYKEEEKNDPEFAKKLAANADFYVNDAFGTAHRAHASTEGVTKFLSPSVAGYLVEKELQYLQSAIENPQRPLAAIIGGSKVSSKIGVIETLLEKCDKLIIGGGMIFTFYKARGLNVGKSLVEEDKLELAKSLEAKAKERGVSLLLPTDVVLADNFAPDANSQTVSIDNIPDGWMGLDIGPDSVKVFQEALADTKTVIWNGPMGVFEFDKFAAGTEAIAHTLAEIGKTGTTTIIGGGDSVAAVEKVGLADQMSHISTGGGASLELLEGKVLPGIAALDEA

SEQ ID NO: 108227 - DNA, 1194 bp, Rhodobacter sphaeroides 2.4.1
  CDS (1)..(1194): transl_table=11
atgggctggaagacactcgacgacatggatcttgccggcaaggtcgtgctggtgcgcgtggatgtgaacgtgccgatggaaaatggcgaagtcaccgacgccacccggatcgagaagatcgtccccaccgtcgaggatatcctgaagaagggcggcaagcccgtcctgctcgcccatttcggccgtccgaagggcaaggtcgtggacgagatgagcctccgcctcgtgctgcccgcgctgcagaacgcgctgcctggcaccaaggtgagctttgccgccgactgcgtgggccccgagcccgagcaggcggtggccgccatgctcgagggcgaggtgctcctcctcgagaacacccgcttccatgccggcgaggagaagaacgaccccgagctggccgccgcgatggcgaagctggggcaggtctatgtcaacgatgccttctcggccgcgcaccgcgcccatgcctcgaccgagggcctcgcccgtcttctgccctcggccgccggccggctgatggaggccgagctgaaggcgctcgaagccgctctcggccatcccgagcgccccgttgtggccgtggtgggcggggccaaggtctcgaccaagctcgaccttctgggcaatctcgtgggccgggtcgatcatctggtgatcggcggcggcatggccaacaccttcctcgtggcgcaggggatcgaggtcggcaagtcgctggccgagcgcgacatggccgatacggcgcgcgagatcctctccaaggcgaaggccgcgggctgcacgatccatcttccgctcgatgtggtggtggcgcgcgagttcaaggcgggggccgcgaacgagacggtcgagacggcggcctgcccggccgacgcgatgatcctcgatgccggtccgaagaccgtggccgccctctccgaagtgttcgcctcggctaagacgctgatctggaacggcccgctcggcgccttcgagatcgagcccttcgacgccgcgacgaatgcggcggcgcttcaggtggcgcagctcaccaaggcgggccagctcatttcggtcgcgggcggcggcgatacggtggccgccctcaacaaggcgggcgcggccgaaggcttctcctacatctcgacggcgggcggtgccttcctcgaatggatggagggcaaggagctgcccggagtggccgcgctcacggtctga

SEQ ID NO: 108228 - protein, 397 aa, Rhodobacter sphaeroides 2.4.1
MGWKTLDDMDLAGKVVLVRVDVNVPMENGEVTDATRIEKIVPTVEDILKKGGKPVLLAHFGRPKGKVVDEMSLRLVLPALQNALPGTKVSFAADCVGPEPEQAVAAMLEGEVLLLENTRFHAGEEKNDPELAAAMAKLGQVYVNDAFSAAHRAHASTEGLARLLPSAAGRLMEAELKALEAALGHPERPVVAVVGGAKVSTKLDLLGNLVGRVDHLVIGGGMANTFLVAQGIEVGKSLAERDMADTAREILSKAKAAGCTIHLPLDVVVAREFKAGAANETVETAACPADAMILDAGPKTVAALSEVFASAKTLIWNGPLGAFEIEPFDAATNAAALQVAQLTKAGQLISVAGGGDTVAALNKAGAAEGFSYISTAGGAFLEWMEGKELPGVAALTV

SEQ ID NO: 108229 - DNA, 1185 bp, Carboxydothermus hydrogenoformans Z-2901
  CDS (1)..(1185): transl_table=11
atgaacaaaaagtctataagagatgtggaggtaaaaggcaaaaaagtttttgtgcgggttgattttaacgtacctttaaatgagaaccgggaaataaccgatgatactcgcatccgggcagcccttcctaccctccagtacttgagagaacaaggggctaaacttatcgtcgcctctcatttaggccgacccaaaggtcaatttaacgaaaaatacagcttaaaaccggttgctaaaagattggccgagcttcttggtatagaggttaaaatggctcccgatgtagtggggcctgaggtggaaaaaatggccggggaattacggccgggagaagtacttcttttagaaaacgtacgcttttatcccgaagaggaaaaaaatgatccggaatttgcccgaaaactggcgcggcttgccgaaatttttgtcagcgatgcctttggggctgctcaccgggctcatgcttctaccgccggtatagcatcgtatttaccggctgtagccggatttttaatggaaaaagaaattaacttcctttcccgggcattaaataacccggaacggccctttgtggctattattggtggagccaaggtttccgataaaatcggggtgattgaaaatcttctcggcaaagttgacgttcttttaattggcggtggcatggccaacacctttttaaaagctatgggctatgaaaccggaaaatctttggtggaagaggataaagtaaatttagccggggagttaatgaataaagcaaaagaagtaggagttaaacttttgctgccgagtgacgtggtggtggctcccaggattgaagcgggcgtacccagcaaaattgtagcggttgacagcattcctgctgaagaaatggctttggatattggcgaaaaaaccgcaaagcatttccgggaagagattttaaaagctaagaccgttgtctggaacgggccgatgggggtttttgaagtggaaccctttgaccggggtactgttgcggtagccgaagcggtagccgaaagcggcgctctttccgtggtcggcggtggagactcggttgcggcggtagaaaaggccggagttgcggacaaaataacccatatttccaccggcgggggagcatctctggaatttttagaagggaaaaaacttcccggagttgaagttttaaacgataagtaa

SEQ ID NO: 108230 - protein, 394 aa, Carboxydothermus hydrogenoformans Z-2901
MNKKSIRDVEVKGKKVFVRVDFNVPLNENREITDDTRIRAALPTLQYLREQGAKLIVASHLGRPKGQFNEKYSLKPVAKRLAELLGIEVKMAPDVVGPEVEKMAGELRPGEVLLLENVRFYPEEEKNDPEFARKLARLAEIFVSDAFGAAHRAHASTAGIASYLPAVAGFLMEKEINFLSRALNNPERPFVAIIGGAKVSDKIGVIENLLGKVDVLLIGGGMANTFLKAMGYETGKSLVEEDKVNLAGELMNKAKEVGVKLLLPSDVVVAPRIEAGVPSKIVAVDSIPAEEMALDIGEKTAKHFREEILKAKTVVWNGPMGVFEVEPFDRGTVAVAEAVAESGALSVVGGGDSVAAVEKAGVADKITHISTGGGASLEFLEGKKLPGVEVLNDK

SEQ ID NO: 108231 - DNA, 1197 bp, Geobacter metallireducens GS-15
  CDS (1)..(1197): transl_table=11
atggcaatccgctatatcgacgaaatcgaaagtctcaaggggaaaaaggtatttatcagggtcgacttcaacgttcctctggatgaacatcagaatataaccgaagacacccggatccgggccgtccttcccactatcaactttgcccttgatgcgggcgccaaggtaattcttgcatcccacttgggtcgcccaaagggtgagcgaaaaccgaagtattccatggctccggcggccaagcgcctctcgcgcctgctcaacaaggaagtgcaactggctcccgactgcatcggcgatgaagtcaagaagatgatcgacgccatgaaaccgggcgaagtccttctactcgaaaacgtccgtttctacgagggcgaagagaaaaatgacgccgatttcgccaaggccctggccaacgactgtgaaatatacatcaacgacgcctttgccgtctcccacagggcccacgcatccgtcgaagccatcacgaagtttttcccggtcgtcgctgccggtttcctcatgaacaatgagattaattatttcgagaaggcgatgcaaaagcccatcaggcccttggtcgccattctcggcggggccaaggtttccggaaaacttgaggtattggaaagcctggtcaacaaggtagacaagattatcattggcggcggcatggccttcacgttcctcaaagccctcggctataacgtcggcaaatcgctggtggaggaagaactgctggaaatcgccctcactacctacaccaaggcccgtgaaaaaggcgtgaaattctatctaccggtcgactgcgttgcggccgaccgcttcaaccccgaggctgaaaccaaagtgacgaccattcaggaaatccccgaggagtggatggcactcgacatcggaccggcaaccgtgaccctcttcacggaagcgctccagaacgccaaaaccattatctggaatggtcccatgggcgtattcgagatggatgccttctcccgcggaacctttgccatggtttcggccgtggccaactcctatgctctcaccatcgtcggaggaggagacaccgattcagccgtccatcgcgcgggggaatacgcgaagatcagctacatttccacaggcggcggcgcgttcctggaactcctcgaagggaagcatcttcccggcatcaaagtgctggaagaaaacggcaagtag

SEQ ID NO: 108232 - protein, 398 aa, Geobacter metallireducens GS-15
MAIRYIDEIESLKGKKVFIRVDFNVPLDEHQNITEDTRIRAVLPTINFALDAGAKVILASHLGRPKGERKPKYSMAPAAKRLSRLLNKEVQLAPDCIGDEVKKMIDAMKPGEVLLLENVRFYEGEEKNDADFAKALANDCEIYINDAFAVSHRAHASVEAITKFFPVVAAGFLMNNEINYFEKAMQKPIRPLVAILGGAKVSGKLEVLESLVNKVDKIIIGGGMAFTFLKALGYNVGKSLVEEELLEIALTTYTKAREKGVKFYLPVDCVAADRFNPEAETKVTTIQEIPEEWMALDIGPATVTLFTEALQNAKTIIWNGPMGVFEMDAFSRGTFAMVSAVANSYALTIVGGGDTDSAVHRAGEYAKISYISTGGGAFLELLEGKHLPGIKVLEENGK

SEQ ID NO: 108233 - DNA, 1209 bp, Synechococcus elongatus PCC 7942
  CDS (1)..(1209): transl_table=11
gtgtccaaaagaactttagcaagcctgaccgccgctgacttagagggcaagcgggtcctcgtgcgtgtcgacttcaatgtccctttggacggcaatgggaaaattacggatgacacccgcatccgtgcggctctgccgacgattcgctacctgtcggaaagtggtgccaaggtgattctggtcagccactttggtcgtcccaaaggcaagcccgtcgagagcatgcgcttaacgccggtggctgagcgcctctcggaattgctgggtcgccctgttgttaagacaaccgatgctgtgggtgccggtgccgaagcgcaagtggcagccaccagcaatggccaagtcgtgttgttggagaacgtgcgtttccacgctgaggaagaagccaacgacgctgaatttgcgaaagcactagctagcttggccgatatctacgtcaatgatgcctttggtgctgctcaccgggctcacgcttccacggctggcgtgactgaatatctttcgccttgcgtggctggttacctgttggagaaagagttgcaatacctacaagccgcgatcgacaatccccaacggcccttggctgcgatcgtcggcggttcgaaagtttccagcaaaattggcgtgatcgaaacgctgctggataagtgcgacaaactgctgattggtggcggcatgatctttaccttctacaaagcccaaggactttcggtcggcggctcactggtagaagaggacaaactcgatctggcgcgatcgctgatggctaaagcgcaagaaaaaggcgtgcaactgttgctgcccgtggatgtagtagtggccgataagtttgcgccggatgctaatgccaaaaccgtggcgatcgatgcgattcccgatggctggatgggcctagatatcggacctgagtcggtcaagcaattcgaggaagccttggccgattgccgctcggtcatttggaatggcccgatgggcgtatttgagttcgatcaattcgctgtcggtaccgaagcgatcgctcgtagcttggcaggactgacccgcaagggtgcaaccacgatcattggtggtggtgactcggtcgctgccgttgagaaagtcggtgttgcttcggaaatgagccacatttccaccggtggtggtgccagcttggaactgctggaaggcaaagtcctgccgggtgtggctgcactggatgacgctgcctaa

SEQ ID NO: 108234 - protein, 402 aa, Synechococcus elongatus PCC 7942
MSKRTLASLTAADLEGKRVLVRVDFNVPLDGNGKITDDTRIRAALPTIRYLSESGAKVILVSHFGRPKGKPVESMRLTPVAERLSELLGRPVVKTTDAVGAGAEAQVAATSNGQVVLLENVRFHAEEEANDAEFAKALASLADIYVNDAFGAAHRAHASTAGVTEYLSPCVAGYLLEKELQYLQAAIDNPQRPLAAIVGGSKVSSKIGVIETLLDKCDKLLIGGGMIFTFYKAQGLSVGGSLVEEDKLDLARSLMAKAQEKGVQLLLPVDVVVADKFAPDANAKTVAIDAIPDGWMGLDIGPESVKQFEEALADCRSVIWNGPMGVFEFDQFAVGTEAIARSLAGLTRKGATTIIGGGDSVAAVEKVGVASEMSHISTGGGASLELLEGKVLPGVAALDDAA

SEQ ID NO: 108235 - DNA, 1182 bp, Moorella thermoacetica ATCC 39073
  CDS (1)..(1182): transl_table=11
gtggccaagttaaccctcaaagatctggagcttaacaataaacgggtcctggtgcgggtcgatttcaacgtccccctggaggcaggccgggtgactgacaatacccgtatccgggcggccctgcctaccattgaatacctgctggaccacggcgcccgggtgattcttatgtcccacctgggccggcccaagggtaaggtcaaggaagagctgcgcctggacccggtggccagggaactggaaagcctcctgggccggcaggtacataaggtcaacgactgcgtcggtcccgaagttgaggccgcagccgccgccctcaagcccggcgaggttctcctcctggaaaacctgcgcttccatcccgaagaagaaaagaacgaccccggtttcgcccggcagctggccagcctggccgatgtctatgtgaacgacgcctttggcgccgcccatcgcgcccatgcttccaccgagggcgtagcccactacctgccggcggcggccggtttcctgctccaaaaggagatcgagaccctgggcaaggccctggctgatcccgagcggccctttgtggccattattggcggggccaaggtatccgacaagatcagcgttatccgtaacctccttaccaaagtagacaccctgattatcggcggtggcatggccaacaccttcctgaaggcccagggctatgccatgggtaaatccctggtcgaagaagatcaggtacccctggcccaggagttgatccagcttgccgcccagaagggggtaaaaatgctcctgccccgggacctggtagtggcccaggagtttaaggccgatgccccccaccaggtagttgctgtaaatgccgtgcctgacggctggatggccctggatatcggcccggaaacggcccgggcctacgccggcgccctggagggagcccgtaccgtcgtctggaacggccccatgggcgtctttgagatggaggcctttgcccacggcaccgaggctgtagcccgggcagtggccgccgtcgacggcatgaccatcgttggtggcggcgattccgtcgctgccgtggaaaagatgggcgtggccggaaagatcgggcatatctccaccggtggcggcgcctccctggagttcctggaaggcaaagcccttcccggcgttgtcgccctgacggaaaagtaa

SEQ ID NO: 108236 - protein, 393 aa, Moorella thermoacetica ATCC 39073
MAKLTLKDLELNNKRVLVRVDFNVPLEAGRVTDNTRIRAALPTIEYLLDHGARVILMSHLGRPKGKVKEELRLDPVARELESLLGRQVHKVNDCVGPEVEAAAAALKPGEVLLLENLRFHPEEEKNDPGFARQLASLADVYVNDAFGAAHRAHASTEGVAHYLPAAAGFLLQKEIETLGKALADPERPFVAIIGGAKVSDKISVIRNLLTKVDTLIIGGGMANTFLKAQGYAMGKSLVEEDQVPLAQELIQLAAQKGVKMLLPRDLVVAQEFKADAPHQVVAVNAVPDGWMALDIGPETARAYAGALEGARTVVWNGPMGVFEMEAFAHGTEAVARAVAAVDGMTIVGGGDSVAAVEKMGVAGKIGHISTGGGASLEFLEGKALPGVVALTEK

SEQ ID NO: 108237 - DNA, 1272 bp, Syntrophus aciditrophicus SB
  CDS (1)..(1272): transl_table=11
atgatgggaatttccaaaaaaacgattcgtgagatcgaattcgcaggaaaacgtgtgatcatgcgtgttgatttcaatgttccgctcaaggatggcgtcatccaggatgatacacgcattgccgccgcactgccttcaatcaaatatattcttgacagtaaggcaaagagccttgtgttgatgtcgcatcttggcgaccctgaaaaagacgctgccaaggcgcgtgagaaggcggaaaaggatggcaaaccctttgatgaagagaaatacatcgaaggcaaatgcaagatgtcgcctgtcgccgcacacctttcaaagctgcttgggaagccggttgcgctggcgcctgactgcctgagcgacgagacaaagaagatggtgggcggccttaaggacggcgccgtgctgctccttgagaacacacggttccataaggaagagacctcgaaagacctttctgagcgtgaaaaaatggccaagatccttgcgggttacggcgacgtgtatgtcaatgacgcgtttggaaccgcccaccggctgcacgcgtccaccgaaacaatcgcccggtatctgcctgcggtggcgggttttctcatggaaaaagagcttgaattccttcagggaaaagttctgaaagccccggcgaagccttttgtcgcgattatcggcggcgcgaaagtttcttccaaaatagcagtgctcgaaagcctgctctacaaggtagaaaaactgatcataggcggcggcatggcatacacctttctcaaggcccaagggattgctgtcggcaagtcgcttgtcgaggaagatcagatcgaaacggcaaagaagattcttgcgacagcaaaagagcagacggttacgcttctgctcccggctgatcatctcgttgcaaaagagttttcagccgaagccgaattcaggatttcgacaggcgccacgatagaagacgggtggctggggatggacatcggccccgccacactgaaaaattacagggacgctcttgtcggagcaaagaccgtgttctggaacggccccatgggagtttttgagttcccgaattttgcggcaggcacaatcaatatagcagcgatacttgccgaacttccggatgcgattacagtgatcggcggtggagacaccgtttcagcggtcaaaaaggccggtgtcgctgccagaatgtctcatatttcaaccggcggcggtgcatcgcttgagcttgttgaaggcaaggaacttcccggagtcaaggcgttaaatgacaaataa

SEQ ID NO: 108238 - protein, 423 aa, Syntrophus aciditrophicus SB
MMGISKKTIREIEFAGKRVIMRVDFNVPLKDGVIQDDTRIAAALPSIKYILDSKAKSLVLMSHLGDPEKDAAKAREKAEKDGKPFDEEKYIEGKCKMSPVAAHLSKLLGKPVALAPDCLSDETKKMVGGLKDGAVLLLENTRFHKEETSKDLSEREKMAKILAGYGDVYVNDAFGTAHRLHASTETIARYLPAVAGFLMEKELEFLQGKVLKAPAKPFVAIIGGAKVSSKIAVLESLLYKVEKLIIGGGMAYTFLKAQGIAVGKSLVEEDQIETAKKILATAKEQTVTLLLPADHLVAKEFSAEAEFRISTGATIEDGWLGMDIGPATLKNYRDALVGAKTVFWNGPMGVFEFPNFAAGTINIAAILAELPDAITVIGGGDTVSAVKKAGVAARMSHISTGGGASLELVEGKELPGVKALNDK

SEQ ID NO: 108239 - DNA, 1128 bp, Neorickettsia sennetsu str. Miyayama
  CDS (1)..(1128): transl_table=11
atggttgacgtagaagatgtaaaagactgcagagtagttcttcgggtcgattttaatgttccggttaatcaagagggtttaataactgacttttccaggattgcggtagttttaccaactataaatctacttttaaaaaatggttgcgctatattgttgctctctcattttggtaaaccaactgctgctatcaaggagaaattctcatttgagagaatcattggacagatttgtcagttcactggcttagatataagggttgtgtcagatctgagcaatgaacttctactcagacaaggggagattattcttttagaaaacgtgagattctttgctggcgaggtggagaacgattctaaatttgcaatgcttattgcaagacacggtgatgtgtatgtaaatgatgctttttctgtttcgcacagggaacatgcatccgtagtaggaataccacaatttcttccatctgctatgggtttggcatttttacgggaatatcaagagctagatagtgcagctacgaagggtactgttgcagtaatcggtggcagtaaaatttcgacgaagctgccattaatacgaggtcttctaaaaaaagtaaaaatggtcatattgggtggtgctctggtaaatgtgatattgcgttctagaggttataacgtgggcaaatccatgtgtgaggattgtcactgtgatattacattacctgaactttttataccatttgatttcgttacctcacatggggttgaggatcaaaatttccactttaccgatgccaggatgattcctcacaatgaaatgattttggatatagggccagcatcgctcattgcaatgaagggcattctttcaaaagcagagaaaattttgtggaatggtccaattggtgcatttgaatttgaaccgttttgtagtggtacacatgagttagctagatttatttcttttctaacaaagaatgcgaacattaagagcataataggaggaggcgacaccttagccgcaattaaatcactccaggagccatgtttttcctatatctctacatccggtggtgcttttcttaaatttcaggaggagggcacactccctggaatagaagccataaaaaaatgcaaagtataa

SEQ ID NO: 108240 - protein, 375 aa, Neorickettsia sennetsu str. Miyayama
MVDVEDVKDCRVVLRVDFNVPVNQEGLITDFSRIAVVLPTINLLLKNGCAILLLSHFGKPTAAIKEKFSFERIIGQICQFTGLDIRVVSDLSNELLLRQGEIILLENVRFFAGEVENDSKFAMLIARHGDVYVNDAFSVSHREHASVVGIPQFLPSAMGLAFLREYQELDSAATKGTVAVIGGSKISTKLPLIRGLLKKVKMVILGGALVNVILRSRGYNVGKSMCEDCHCDITLPELFIPFDFVTSHGVEDQNFHFTDARMIPHNEMILDIGPASLIAMKGILSKAEKILWNGPIGAFEFEPFCSGTHELARFISFLTKNANIKSIIGGGDTLAAIKSLQEPCFSYISTSGGAFLKFQEEGTLPGIEAIKKCKV

SEQ ID NO: 108241 - DNA, 1179 bp, Francisella tularensis subsp. holarctica
  CDS (1)..(1179): transl_table=11
atgagttttctaacattgaaagatgttgatttaaaagataaaaaagtcttggttcgtgttgacttcaacgtacctgttaaagatggtaaggtaacaagtaaagttagaattgaagcggctattccgactattcaatatattctagatcaaggtggagctgtgattctgatgtcacaccttggtcgtcctacagagggtgagtatgattctcagttctctctagagcctgttgctaaagctttatctgaaattatcaataagccggttaagtttgctaaagactggttagatggtgttgatgttaaagctggtgaaattgtcatgtgtgaaaatgtccgctttaatattggtgagaaaaaatcaacagatgatttatctaaaaagattgcaagcttaggtgatgtgtttgttatggacgcttttgctacagcgcatagagctcaagcttcgacctacggtgttgctaagtatattcctgtagcatgtgcagggatattgttaactaatgaaattcaagcattagaaaaagctttaaaatcgccgaaaaaaccaatggcagcaatagttggagggtctaaggtctctactaaactatcggtgctaaataaccttcttgataaggttgaaattcttattgttggtggtggtattgctaatactttcataaaagcagaaggttttgatgttggtaattcattgtatgaacaagatcttgttgctgaagcaacagagattttagctaaagctaaggctttaggggttaatattcctgtgccagttgatgtaagagttgctaaagagtttagcgaaaatgcccaagcaatcattaaaaaggtttcctatgttgttgcggatgagatgattctagatataggtccagaatctcaaaagataattgctgagctgttaaaatcagcaaatactattttatggaatggacctgttggagtatttgagtttgataactttgcagagggtacaaaagctttatctttagctatagcacaatcgcacgctttttcagtagctggtggtggtgatactattgctgcgatagaaaaatttggcattaaagaccaagtttcttatatatcaacagctggtggagcattcttagagtttcttgaaggcaagaaattaccagctatagagatacttaaagaaaaagcaatcaggtaa

SEQ ID NO: 108242 - protein, 392 aa, Francisella tularensis subsp. holarctica
MSFLTLKDVDLKDKKVLVRVDFNVPVKDGKVTSKVRIEAAIPTIQYILDQGGAVILMSHLGRPTEGEYDSQFSLEPVAKALSEIINKPVKFAKDWLDGVDVKAGEIVMCENVRFNIGEKKSTDDLSKKIASLGDVFVMDAFATAHRAQASTYGVAKYIPVACAGILLTNEIQALEKALKSPKKPMAAIVGGSKVSTKLSVLNNLLDKVEILIVGGGIANTFIKAEGFDVGNSLYEQDLVAEATEILAKAKALGVNIPVPVDVRVAKEFSENAQAIIKKVSYVVADEMILDIGPESQKIIAELLKSANTILWNGPVGVFEFDNFAEGTKALSLAIAQSHAFSVAGGGDTIAAIEKFGIKDQVSYISTAGGAFLEFLEGKKLPAIEILKEKAIR

SEQ ID NO: 108243 - DNA, 1176 bp, Saccharophagus degradans 2-40
  CDS (1)..(1176): transl_table=11
atggctgttattcagatgaaggacctcgatcttaaaggcaaacgcgttcttattcgccaagatctaaacgtacccctacaggatggtgaaatcacctccgatgtacgtatccaagcatcattgcctaccatcaaagccgcagtagacgcgggtgctaaagtgatgttgatgtctcacttgggccgccctaccgaaggcgaatacgctgacgaattttctttaaagcctgttgctgcacgcttaaccaaattgttgggcaaagaagtgggcttggtaaaaaactggcaagaaggcgttgctgttgctgaaggcgaagttgtattgctagaaaacgtgcgctttaacgtgggcgagaaaaaagacgacgaaacattagctaaagcgtacgcagcattgtgcgacgtatttgtgatggatgcattcggtaccgcgcaccgcgcgcaagcatctacccacggcgtcgcgaaatttgcaccggttgcctgcgcaggcccgctattgtctggcgagttgagtgcattagaaaaagccctagccaaccctgcgcgcccaatggttgcggtggtaggtggctctaaagtttctacaaaattaaccgtattagatgcgctttctaaaattgttgatgtaatggttgtgggtggcggtatctccaacactttcgttgctgctgccggtaacgaagtaggcaactctttatacgaaaaagatttaattccagaagcgcaacgcttgtgtgcagaaactgaagttatttacgcgcacgatgtgcgagtaactaaagagggcttcagcgattggaatcacaactctgtaactgaagttaaagtacctgcagatattcaagccgacgaagaaattattgactacggcccagaaactgcgcaaaaagttgccgctattttgaaagatgctaaaaccattatttggaacggcccgtgtggcgttttcgagtttgatgcgtttgctaaaggtaccgaagtggttgcgcgcgcaattgcagaaagcgaaggcttctctattgccggcggcggtgacaccttagcggcaattgataaattcggtttggccgacggcgtttcttacatttctaccggtgggggtgctttcttggaatacgtagaagggaagccgttacccgctgtagtgatgttagaagagagagctaagggttaa

SEQ ID NO: 108244 - protein, 391 aa, Saccharophagus degradans 2-40
MAVIQMKDLDLKGKRVLIRQDLNVPLQDGEITSDVRIQASLPTIKAAVDAGAKVMLMSHLGRPTEGEYADEFSLKPVAARLTKLLGKEVGLVKNWQEGVAVAEGEVVLLENVRFNVGEKKDDETLAKAYAALCDVFVMDAFGTAHRAQASTHGVAKFAPVACAGPLLSGELSALEKALANPARPMVAVVGGSKVSTKLTVLDALSKIVDVMVVGGGISNTFVAAAGNEVGNSLYEKDLIPEAQRLCAETEVIYAHDVRVTKEGFSDWNHNSVTEVKVPADIQADEEIIDYGPETAQKVAAILKDAKTIIWNGPCGVFEFDAFAKGTEVVARAIAESEGFSIAGGGDTLAAIDKFGLADGVSYISTGGGAFLEYVEGKPLPAVVMLEERAKG

SEQ ID NO: 108245 - DNA, 1182 bp, Methylobacillus flagellatus KT
  CDS (1)..(1182): transl_table=11
atgaccgtaatcaacatgacggaccttgacctcgcgggcaagcgcgtcttcattcgcgccgatcttaacgtgccggtcagcgatggcaaagtcacttccgatgcgcgtatcaccgcctccattcccaccatacgccatgccctggatgccaaggcacgcgttatggtgacttcccaccttggtcgcccggaagaaggcgtatattcggaggaaaactccttgcagcccgtggctgacgtgctggccgacaagctgggtcagccggtgcgcctgatcaaggactgggtcgacggtggctttgaagtggcggaaggcgaagtggtcttgctggaaaattgccgcttcaataaaggtgagaaaaaaaacgccgaagaaaccgcgcgcaagtatgccgcgctatgcgatgtattcgtgatggacgctttcggtacagctcaccgcgcagaggcctccacctacggggtggcgcaatatgcaccggtcgcggcggcgggcttgctactggtcggcgagctggatgcactgggcaaggccctgtgcgaacctgcccgccccatggtcgcgattgtcggcggctccaaggtctccaccaagcttaccgtgctggaaagcctggctgaaaaggtcgaccagctcgtggtaggcggcggtattgccaataccttcctcaaggcagctggaaaaccgattggccgctcactgagcgaggacgacctggtacctactgcccaatgcctgatggaaaaaatggcgaagcgtggtgcggccgtgccaatcgcggtggatgtggtctgcggcaagcagttcgacgccaatgagcctgccgtactcaaatcggcggaggacgtggccgacgacgacatgatcttcgacattggccccgagtcggccaagcaactggccgagatcatcctcaatgcaggcaccgtggtctggaacggcccggtcggcgtattcgagttcgaccagttcggcgaaggcaccaagaccatcgccgacgccattgccaagaccaaggccttcaccctggccggcggcggcgacaccattgctgcgatccagaaatacgatatctatgacaaggtgtcttatatctcgacggcgggcggggcatttctggaattccttgaaggcaagaaattgccggcggtggagattttggaacagcgtgctaaaggttga

SEQ ID NO: 108246 - protein, 393 aa, Methylobacillus flagellatus KT
MTVINMTDLDLAGKRVFIRADLNVPVSDGKVTSDARITASIPTIRHALDAKARVMVTSHLGRPEEGVYSEENSLQPVADVLADKLGQPVRLIKDWVDGGFEVAEGEVVLLENCRFNKGEKKNAEETARKYAALCDVFVMDAFGTAHRAEASTYGVAQYAPVAAAGLLLVGELDALGKALCEPARPMVAIVGGSKVSTKLTVLESLAEKVDQLVVGGGIANTFLKAAGKPIGRSLSEDDLVPTAQCLMEKMAKRGAAVPIAVDVVCGKQFDANEPAVLKSAEDVADDDMIFDIGPESAKQLAEIILNAGTVVWNGPVGVFEFDQFGEGTKTIADAIAKTKAFTLAGGGDTIAAIQKYDIYDKVSYISTAGGAFLEFLEGKKLPAVEILEQRAKG

SEQ ID NO: 108247 - DNA, 1194 bp, Burkholderia xenovorans LB400
  CDS (1)..(1194): transl_table=11
atgaacaaggtattgcgtctctccgatctgatcgccgaaggcaagctatccggcaaacgcgtgttcatccgcgccgatctgaacgtgccgcaggacgatcaaggcaacatcaccgaagacacccgtatccgcgcttccgtgccggccatcaaggccgcgctcgacgcgggcgccgccgtgatggtcacgtcgcacctgggccgtcccacagagggtgatttcaagcctgaagactcgcttgcgccggtcgcgaaacgtctggccgaactgctcggccgcgaggtgccgctggtggcgaactgggtcgaaaacggcgtgaacgtcgcgccgggctcggtcgtgctgctggaaaactgccgcgtcaacaagggcgaaaagaaagattccgacgagctcgcgcagaaaatggcgaagctctgcgacatctacgtgaacgacgcattcggcaccgcgcaccgcgccgaagccaccacgcacggtattgccagatacgcgccggtggcgtgcgccggcccgctgctcgcggccgaactcgaagcgctcggcaaggcgctgggcgcgccgaagcgtccgctggtggcgatcgtcgccggctcgaaggtgtcgaccaagctgaccattctgaagtcgctcgccgacaaggtcgatcaactgatcgtgggcggcggcattgccaacacgttcatgctggccgcgggcctgaagatcggcaagtcgctcgccgaagccgatctggtgaacgaagccaaagccatcatcgacgcggcgaaagcccgcggcgcctcggtgccgatcccgaccgacgtggtcacggcgaaagagttttccccgaccgccaaggcagaagtcaaagcagtcgccgacgttcaggacgacgacctgatcctcgacatcgggccggaaacggccaaagtgctcgccgcgcaactggaaaaggccggcacgatcgtgtggaacggtccggtcggcgtgttcgaattcgaccagtttggcaacggcacgaagacgctggcggaggctatcgccaaatcgtcggcgttctcgattgccggcggcggcgatacgcttgctgcgatcgccaagtacggcatccacgacaaggtcagctatatctcgacgggcggcggcgctttcctcgaattcctcgaaggcaagaagctgccggcggtcgaagttctggaatcgcgggcttaa

SEQ ID NO: 108248 - protein, 397 aa, Burkholderia xenovorans LB400
MNKVLRLSDLIAEGKLSGKRVFIRADLNVPQDDQGNITEDTRIRASVPAIKAALDAGAAVMVTSHLGRPTEGDFKPEDSLAPVAKRLAELLGREVPLVANWVENGVNVAPGSVVLLENCRVNKGEKKDSDELAQKMAKLCDIYVNDAFGTAHRAEATTHGIARYAPVACAGPLLAAELEALGKALGAPKRPLVAIVAGSKVSTKLTILKSLADKVDQLIVGGGIANTFMLAAGLKIGKSLAEADLVNEAKAIIDAAKARGASVPIPTDVVTAKEFSPTAKAEVKAVADVQDDDLILDIGPETAKVLAAQLEKAGTIVWNGPVGVFEFDQFGNGTKTLAEAIAKSSAFSIAGGGDTLAAIAKYGIHDKVSYISTGGGAFLEFLEGKKLPAVEVLESRA

SEQ ID NO: 108249 - DNA, 1212 bp, Acidobacteria bacterium Ellin345
  CDS (1)..(1212): transl_table=11
atgtcgaagctctcaattaaagatctacagctatccaataaacgcgtattcatgcgcgtggatttcaacgtccctctcgatgaaaacggccgcgtcaccgacgacacccgcatccgcgaaacgctgcccaccatcgaatacgccctgcgccacggcgcgaagctgatcctctgctcgcacctcggacgcccgaagggcaaacccaatccaaaaatgagcctcaagcccgttgccgagcgcctacgcgtgatgctcgaccacgcgatcagtcccggccagaatgtcggcttctcgcccgattgcatcggtatgcaagcgcaggagatggcgaagcagttggaaaagggccaggcccttctgctggagaatgttcgcttccacgccgaagaggagaagaacgatccggccttcgcgaaggaactcgccagcctctgcgagctctacgtgaacgatgcgttcggctccgcacaccgcgcccacgcctcgacggaaggcattacgcactacgtcgagaaatcggctgcgggcttgctgatgcagaaggaactcgactatctcggcaaggcgacctcgaacccggcgaagccgttcgtggccatcctcggcggcgccaaggtcagcgacaagatcggcgtcatccagaacctcatggccaaagttgacgccatcatcatcggcggcggcatggcttacaccttcctcaaggcgcagggccaggagatcggtaagtccctcttcgaggccgataaactcgacctcgccaagcagatcctggccgacgcgcacaaacgcggattgaagttcctgctgcccgtcgaccacgtcactgccgacaagttcgacatgcacgccaccccccatcagatcggtgaaggccagtccataccagccgagcagatggcgctggatatcggccctaagacggtcgctctcttctcagaggagatcgcgaaggcgcgcacgatcgtgtggaacggtcccatgggcgtcttcgagttcgacaacttcgccaagggcacccgtgccatcgccaaagccgttgccggcaacagcggcgccacctcaatcgtaggcggaggcgacagtgtagcggcggtgcacgatgccggcgttgccgacaagatcacccacatctccactggcggcggcgcttcgctggagttcctggaaggcaagaaactgcccggcgtggaagcgctgaccaacaaatag

SEQ ID NO: 108250 - protein, 403 aa, Acidobacteria bacterium Ellin345
MSKLSIKDLQLSNKRVFMRVDFNVPLDENGRVTDDTRIRETLPTIEYALRHGAKLILCSHLGRPKGKPNPKMSLKPVAERLRVMLDHAISPGQNVGFSPDCIGMQAQEMAKQLEKGQALLLENVRFHAEEEKNDPAFAKELASLCELYVNDAFGSAHRAHASTEGITHYVEKSAAGLLMQKELDYLGKATSNPAKPFVAILGGAKVSDKIGVIQNLMAKVDAIIIGGGMAYTFLKAQGQEIGKSLFEADKLDLAKQILADAHKRGLKFLLPVDHVTADKFDMHATPHQIGEGQSIPAEQMALDIGPKTVALFSEEIAKARTIVWNGPMGVFEFDNFAKGTRAIAKAVAGNSGATSIVGGGDSVAAVHDAGVADKITHISTGGGASLEFLEGKKLPGVEALTNK

SEQ ID NO: 108251 - DNA, 1179 bp, Rubrobacter xylanophilus DSM 9941
  CDS (1)..(1179): transl_table=11
atggacaagcggagcgtgagggacctcgagctgcgcgggaagaaggtgctcgtccgggtggacttcaacgtgccggtaaagggcggcgaggtgaccgacgacacccgcatccggcgggcgctgcccaccatccgctacctgctgcagcggggggcgagggtcgccctgatctcccacctgggccgcccgaagggcgagcccgacccccgctacaggatggaccccgtggcccggcggctcgaggagctgctcggggagccggtcaggaagctggataccgccacgggccctgaggtcggcagggcgctggaggagctggagcggggcgtgatcctgctggagaactcccgcttctaccccggggagacaaagaacgaccccgccttcgccgccgagctggccgggcccttcgacctctacgtcaacgacgccttcggggcggcccacagggcccacgccaccaccgtgggggtcgccgagcggctgcccgccgccgccggcttcctgctggagcaggagctggactacctggatggggtgctgcgcagcccggagcggcccttcgtggccatcctcggcggggccaaggtctcggacaagctgggggtcatcgagagcctgctcggggtggccgaccgcctcctcgtcgggggggcgatgtgcttcaccttcctgaaggccaggggcctcggggtcggagcctcgctggtcgaggacgactacctcggggaggcgcgtcgcctcatggagggggccgccgacaggctcgtgctcccggtggacgtggtcgtcgccgagaggatggaggagggggcccggacccggaccgtcccggtggaggagatcccggagggctggatgggcctggacatcggcccccggacggtcgagctcttccgccggcacatcctgcaggccaggaccatcttctggaacggccccatgggggtcttcgagatcgacgcgttcgccaggggcaccgagggcgtggccagggccgtcgccgagagcggggccacgagcgtcgtggggggcggcgactcggtcgccgccgtcaggaagctcggcctggaggacaggatgagccacatctccaccggcggcggggcctcgctggagtacgtcgagggcagggagctgcccggcgtggccgtgctgcccgagagggaggaggtctag

SEQ ID NO: 108252 - protein, 392 aa, Rubrobacter xylanophilus DSM 9941
MDKRSVRDLELRGKKVLVRVDFNVPVKGGEVTDDTRIRRALPTIRYLLQRGARVALISHLGRPKGEPDPRYRMDPVARRLEELLGEPVRKLDTATGPEVGRALEELERGVILLENSRFYPGETKNDPAFAAELAGPFDLYVNDAFGAAHRAHATTVGVAERLPAAAGFLLEQELDYLDGVLRSPERPFVAILGGAKVSDKLGVIESLLGVADRLLVGGAMCFTFLKARGLGVGASLVEDDYLGEARRLMEGAADRLVLPVDVVVAERMEEGARTRTVPVEEIPEGWMGLDIGPRTVELFRRHILQARTIFWNGPMGVFEIDAFARGTEGVARAVAESGATSVVGGGDSVAAVRKLGLEDRMSHISTGGGASLEYVEGRELPGVAVLPEREEV

SEQ ID NO: 108253 - DNA, 1188 bp, Cytophaga hutchinsonii ATCC 33406
  CDS (1)..(1188): transl_table=11
atgaaaacagtagacagttttaacttttcaggtaaaaaagccctgatacgcgttgattttaacgtccctcttaataagagttttgaaattacagatgatacaagattaaaagcagtattacctactgtttcgaaagtattaaaagatggtggttcagcaattttgatgtcacacttaggtagaccaaaaggtggaccggaagaaaaatattctttaaaacacatccttccttatctgaacaaaatgttcggacaggaagtattgtttgcggcggattgtatcggtgaagatgcaaaagcaaaagcagcagcattaaaaccaggtcaggtattattacttgagaacttacgtttctatccggaagaagaaaaaggcgatgttgaattcgcaaaaaaactttctgtattaggtgatgtatgggtgaatgatgcatttggtaccgcacacagagcacatgcttcaacagcggtaatcggacaattcttcaaagataaagtttgcgggtatgtaatgcaggctgaacttgacaatgcaaataaattattaaagcaaggtgaaaaaccaatcacagctgttatgggaggttctaaaatctctgataaaatcatggtgattgaaaacttattagatacggttgacaacctgataatcggtggcggtatgtcttataccttcacaaaagcattaggcggaaagattggcaaatcaatcaacgaaccagataaattagagcttgcgctttcgttaattgaaaaagctaaagcgaaaaatgttaaattatatttaccgttagataacgttgttgcagatgatttcagcaacgatgcaaacaagcagacagtaaaaacgggtgaaattccggatggctgggaagggctggatatcggacctgaaactgttaagttattcagcgaagtagttgcaaactctaaaactgttttatggaacggaccaatgggcgtgtttgaatttgcaaactttgctactggtacgattgctattgctaaagcagttaaagaagcaacacaaaaaggagctttctcattaatcggtggtggcgactcagctgctgcaatcaacaatttaggtttcggtaacgatgtatcttacgtttctacaggcggcggtgcattacttgaatacttcgaaggcaaaacacttccgggtgtggcggcgttggagaaatag

SEQ ID NO: 108254 - protein, 395 aa, Cytophaga hutchinsonii ATCC 33406
MKTVDSFNFSGKKALIRVDFNVPLNKSFEITDDTRLKAVLPTVSKVLKDGGSAILMSHLGRPKGGPEEKYSLKHILPYLNKMFGQEVLFAADCIGEDAKAKAAALKPGQVLLLENLRFYPEEEKGDVEFAKKLSVLGDVWVNDAFGTAHRAHASTAVIGQFFKDKVCGYVMQAELDNANKLLKQGEKPITAVMGGSKISDKIMVIENLLDTVDNLIIGGGMSYTFTKALGGKIGKSINEPDKLELALSLIEKAKAKNVKLYLPLDNVVADDFSNDANKQTVKTGEIPDGWEGLDIGPETVKLFSEVVANSKTVLWNGPMGVFEFANFATGTIAIAKAVKEATQKGAFSLIGGGDSAAAINNLGFGNDVSYVSTGGGALLEYFEGKTLPGVAALEK

SEQ ID NO: 108255 - DNA, 1212 bp, Rhodococcus sp. RHA1
  CDS (1)..(1212): transl_table=11
gtggcagttcagactctcgacgatctgctgaacgctggggtcgaggggcgcgccgtgctggtgcgctccgacctcaacgttccgctcgacggtgaccggatcaccgatccggggcgcatcatcgcttccgcgccgacgctgaaggcgttggcggaggcgggcgccaaggtcatcgtcaccgcccatctgggtcgccccaagggcgagcccgacccgcagtattccctcgcaccggtggcggtgaagctcgccgaggtgctgggacgcaacgtccagctcgccggcgacgtcgtcgggcaggacgctctcgcacgtgccgaggggctcacggacggcgacgttctcctgctggagaacatccgcttcgatccgcgggagaccagcaaggacgaggccgagcggacgaagctcgccaaggctctggtcgaactcgtcggcgacgacggcgcgttcgtgtccgacggattcggtgtcgtccaccgcgcgcaggcgtcggtgtacgaggtggccaagctgctcccgcattacgcgggcaagctcgtcgaagccgagatcaaggtgctcggcaagctcaccgaggagcccgagcggccgtacgcggtcgtgctgggtgggtccaaggtgtccgacaagctcgcggtgatcgaggcgctggcccccaaggtcgacaccctcgtcatcggtggcggcatgtactacacgttcctggcggcgcagggcgtgtcggtcggcaactcgctgtgcgaggagtcgatgatcgacacgtgcaaggcgctgctcgagcagtacgccgacgtgatccacatcccgcaggacgtggtcatcgccgactcgttctcggcggacgccgagtcgaagatcgtgtcggtgctcgagatcccggacggctggatgggcctcgacatcggaccgcagtcggttcgccggttcgcggcgatcctgaccagcgcgaagaccgtcttctggaacggcccgatgggcgtgttcgagttcgagaagttcgccgcgggcaccaagggtgtcgccgaggcgatcatcgaggccaccgggaagggcgcgtacagcgtcgtcggtggcggtgactccgccgcggcggtccgccagctcggtctgcccgaggacgggttctcgcacatctccaccggcggcggcgcctccctcgagtacctcgagggcaaggaactccccggcatcgcagttctggagggctga

SEQ ID NO: 108256 - protein, 403 aa, Rhodococcus sp. RHA1
MAVQTLDDLLNAGVEGRAVLVRSDLNVPLDGDRITDPGRIIASAPTLKALAEAGAKVIVTAHLGRPKGEPDPQYSLAPVAVKLAEVLGRNVQLAGDVVGQDALARAEGLTDGDVLLLENIRFDPRETSKDEAERTKLAKALVELVGDDGAFVSDGFGVVHRAQASVYEVAKLLPHYAGKLVEAEIKVLGKLTEEPERPYAVVLGGSKVSDKLAVIEALAPKVDTLVIGGGMYYTFLAAQGVSVGNSLCEESMIDTCKALLEQYADVIHIPQDVVIADSFSADAESKIVSVLEIPDGWMGLDIGPQSVRRFAAILTSAKTVFWNGPMGVFEFEKFAAGTKGVAEAIIEATGKGAYSVVGGGDSAAAVRQLGLPEDGFSHISTGGGASLEYLEGKELPGIAVLEG

SEQ ID NO: 108257 - DNA, 1197 bp, Trichodesmium erythraeum IMS101
  CDS (1)..(1197): transl_table=11
gtgacaaaaaaaactgtagcaagtttatcaaaatctgacttatctggcaaaaaggtacttatgcgggctgattttaatgtacctgttgataatggtagtattacagacgatactagaattcgggcagctcttcccacaattcaagatttaactgagaaaggtgcaaaagttatcttgactagtcattttggacggccaaagggaaaggttaatgaaaagatgcgtctgactcttgtgggggagagactctctgaagtattgggtaaagaagttaaaaagtgtgacgactgcattggtgatgaagtaacttctactgtggcggaaatgaaagatggtgatgtagttttgctagaaaatgttcgcttctactctggagaggaggggaatgatccagagtttgccaaacaacttgcttctgtggcagatttatatgtgaatgatgcttttggaactgctcatcgtgctcatgcttcgactgagggcgtgactaaatatttgagtccttctgttgctggttatttaattgaacaggaactaaaattcctccaaggtgcaattgatagtcctcaaaaacctttagctgcaattattggtggttctaaggtttctagtaaaattggtgtaatagaagctttgttggataagtgtgataagttgctcttgggtggtggtatgattttcactttctacaaagctcgtggtttaagtgtgggtaagtctctggttgaggaagataagatagaattggcaaagtctttggaagctaaggcaaaagagaaaggtgtaacaatgttgttacctactgatgtggttgtagctgataagtttgacccagaggcgaatactcaaactgttagtattgaagctattccggatggttggatgggtttggatatcggacctgagtctgcaaaggtttttcaagatgctttagcagactgtaaaactgtaatttggaatggtccgatgggggtatttgagatggagaaatttgctaaaggtactgaagcgatcgctcagactcttgctgataagcaggatgctattactattattggtggtggtgactctgttgctgcggtggagcagttaggtttgggtgaaaaaatgagtcacatttctactggtggtggtgctagtttggaattgttggaaggtaagaagttacctggtattgttgctttagatgatcaataa

SEQ ID NO: 108258 - protein, 398 aa, Trichodesmium erythraeum IMS101
MTKKTVASLSKSDLSGKKVLMRADFNVPVDNGSITDDTRIRAALPTIQDLTEKGAKVILTSHFGRPKGKVNEKMRLTLVGERLSEVLGKEVKKCDDCIGDEVTSTVAEMKDGDVVLLENVRFYSGEEGNDPEFAKQLASVADLYVNDAFGTAHRAHASTEGVTKYLSPSVAGYLIEQELKFLQGAIDSPQKPLAAIIGGSKVSSKIGVIEALLDKCDKLLLGGGMIFTFYKARGLSVGKSLVEEDKIELAKSLEAKAKEKGVTMLLPTDVVVADKFDPEANTQTVSIEAIPDGWMGLDIGPESAKVFQDALADCKTVIWNGPMGVFEMEKFAKGTEAIAQTLADKQDAITIIGGGDSVAAVEQLGLGEKMSHISTGGGASLELLEGKKLPGIVALDDQ

SEQ ID NO: 108259 - DNA, 1179 bp, Alkalilimnicola ehrlichei MLHE-1
  CDS (1)..(1179): transl_table=11
atggccgtcattaagatgaccgacctcgacctgaagggtaagcgcgtcctgatccgcgaggacctcaatgtccccctgaaggagggcaaggtcgccgacgatacccgcatccgcgcctcgctgcccaccatccgtcacgccctggagtcgggtgcccgggtgatgctgctctcgcacctaggccgccccaaggagggcgagcccgacccggccgcctcgctgcggccggtcgccgagcacctggccacactgttgggtcaggaggtaccgctggcagaggactggctggacggcgtggaggtcgccgagggccaggcggtgctgtgcgagaacgtccgcttcaacgtcggcgaaaaggccaacgacgaggccctggcgaaacggatggcggccctctgcgacgtctatgtcatggatgccttcggcaccgcccaccgtgcccaggcctccacccacggcgttgggcagtacgccccggtggcctgcgcgggcccactgctggcggccgagctcgaggccctgggcaaggcgctggaggccccggcccggccgatgaccgccatcgtcggcggctccaaggtctccaccaagctcgacgtgctggagaccctgtccgagaaggtggatcagctgattgtcgggggcggcatcgccaacacctttatcgccgcggccggccacccggtgggcaagtccctgtacgaggcggacctggtggataaggcccgccagctgatggacaccgcccgtgccaacggcggcgagatccccgtccccaccgatgtggtggtgggccgcgagttcagcgccgacacccaggcggtggtcaagcgggtggacgaggtggacgacgaggacatgatcttcgacatcggccccgagaccgcccagcgctacgccgggatgatgcgcgaggcgggcactatcgtctggaacggcccggtgggggtgttcgaattcgatcagttcggcgagggtacccgcaagctgggggaggccatcgccgagagcgacggcttctccatcgccggcggcggtgacacagtggccgcggtggaaaagtacgggctggccgaccggatctcctacatctccaccggcggcggcgccttcctggagttcctggagggcaagaccctgccggccgtggccatgcttgaggcccgcgccagtgactga

SEQ ID NO: 108260 - protein, 392 aa, Alkalilimnicola ehrlichei MLHE-1
MAVIKMTDLDLKGKRVLIREDLNVPLKEGKVADDTRIRASLPTIRHALESGARVMLLSHLGRPKEGEPDPAASLRPVAEHLATLLGQEVPLAEDWLDGVEVAEGQAVLCENVRFNVGEKANDEALAKRMAALCDVYVMDAFGTAHRAQASTHGVGQYAPVACAGPLLAAELEALGKALEAPARPMTAIVGGSKVSTKLDVLETLSEKVDQLIVGGGIANTFIAAAGHPVGKSLYEADLVDKARQLMDTARANGGEIPVPTDVVVGREFSADTQAVVKRVDEVDDEDMIFDIGPETAQRYAGMMREAGTIVWNGPVGVFEFDQFGEGTRKLGEAIAESDGFSIAGGGDTVAAVEKYGLADRISYISTGGGAFLEFLEGKTLPAVAMLEARASD

SEQ ID NO: 108261 - DNA, 1206 bp, Rhizobium leguminosarum bv. viciae 3841
  CDS (1)..(1206): transl_table=11
atgccttctttcaagaccctcgacgatctttccgacatccgcggtaagcgcgttctcgtccgcgtcgacctcaacgtcccggtgaaagacggcaaggtcaccgatgtgacgcgcatcgagcgtgtggcgccgacgattctcgaattgtccgaaaaaggtgccaaggtgatcctgctggcccatttcggccggccgaaggatggcccttcttcggatctgtcgctgtcactgatcgccccttccgtcgaggaagtgcttgatcatgccgtgctgacggcctccgactgcatcggcgaagccgccgcctccgccgtcgccgcgatgaatgacggcgatatcctgcttctggaaaacacccgcttccacaagggcgaggaaaacaacgactccgacttcaccaaggcgcttgccgccaacggcgacatctatgtcaacgatgccttttcggccgcccaccgcgcccatgcttcgaccgaggggcttgcccaccacctgccggcctatgccggccgcaccatgcaggccgagctggaagcactggaaaagggcctcggtgatcccgctcgccctgtcgtcgcgatcgtcggcggcgccaaggtctccaccaagatcgacctgttgatgaacctcgtgaagaaggtcgatgcgctcgtcatcggtggtggcatggccaataccttcatcgccgcccgcggcaccaatgtcggcaagtcgctctgcgaacatgatctcgccgaaaccgccaagcagatcatgatcgaggcggccactgccggctgcgccatcatcctgccggaggatggcgtgatcgcccgggagttcaaggcgggtgccgccaatgagacggtcgatatcaacgccattcccgccgatgccatggtgctcgatgtcggcccgaaatcggtcgaggccatcaacgcctggatcgaacgcgccgcaaccctggtctggaacggcccgctcggcgccttcgagatcggaccttttgatgccgcgacggtcgctgctgcaaaatacgccgctgggcgcactatagccggcaagctcacctccgttgccggcggcggcgataccgtctcggcgctcaaccacgccggcgttgccgatgatttcacctatgtctcgaccgccggcggcgccttcctcgaatggatggaaggcaaggagcttcccggcgtcgccgtcctcaacgccgctgctgcataa

SEQ ID NO: 108262 - protein, 401 aa, Rhizobium leguminosarum bv. viciae 3841
MPSFKTLDDLSDIRGKRVLVRVDLNVPVKDGKVTDVTRIERVAPTILELSEKGAKVILLAHFGRPKDGPSSDLSLSLIAPSVEEVLDHAVLTASDCIGEAAASAVAAMNDGDILLLENTRFHKGEENNDSDFTKALAANGDIYVNDAFSAAHRAHASTEGLAHHLPAYAGRTMQAELEALEKGLGDPARPVVAIVGGAKVSTKIDLLMNLVKKVDALVIGGGMANTFIAARGTNVGKSLCEHDLAETAKQIMIEAATAGCAIILPEDGVIAREFKAGAANETVDINAIPADAMVLDVGPKSVEAINAWIERAATLVWNGPLGAFEIGPFDAATVAAAKYAAGRTIAGKLTSVAGGGDTVSALNHAGVADDFTYVSTAGGAFLEWMEGKELPGVAVLNAAAA

SEQ ID NO: 108263 - DNA, 1218 bp, Leuconostoc mesenteroides subsp. mesenteroides ATCC 8293
  CDS (1)..(1218): transl_table=11
atggctaaattgactgtttcagatttggaactttcaggtaagaaagtattgatgcgcgttgatttcaacgtgcctatcaaggcaggcgttatcggaaacgataaccgtattgtggcagctttgccaacaatcaagtatgttttggaaaacaatggtcgcgcaattttgttctctcatttgggacgtattaagtctgaagacgataagaaagaattgtcattagcaccagttgccgcacgcttgggtgaattattgggtaaggacgttaagttcgtgccacaaactcgcggtgaagaattagaatcagcaatcaacgctttgcaagatggtgaagttttgatggttgaaaacacacgttttgaagacgttgttgatggtgaagtggtcaaaaacgaatcaaagaacaatcctgaattgggtaagtattgggcatcattgggtgatgatttgttcatcaacgatgcctttggtacagctcaccgtgcccacgcttcaaacgtaggtattgcttcaaatgtttcacaagcagctgctggcttcttgatggaaaaagaaatcaagttcttgggtgatgctgttgcgaacccagttcgtcctttcgttgctattatcggtggtgcaaaggtttctgataaaattgaaatcgtaaagtcattattgaacaaggctgataaggttatcgttggtggtggaatggcctatacattcgatgctgctaagggtaacaagattggtaattcattgtttgaagctgataaagttgaattggctaaggaattgatggcagaagctggcgacaagttggttttgccaattgattcaattgctgctgacgcattttcaaatgatgcaaagactgaagttgttgatgctgaagatggtattcctgacggctacatgggtctagatattggtcctaagtctgttaagttgttgcaagacacattgtctgatgcaaagactgttgtttggaacggacctatgggtgtgttcgaaatgtctaattttgcaaagggtactttggcaattggtgaagaattggttaaagtgactgaaaatggtggtacaacaatcgttggtggtggtgattcaactgctgcggtacaacaattgggtgttgccgacaagttgacccacatttcaactggtggtggtgcttcacttgaataccttgaaggtaaggaattgcctggaatcgcttcaatttcggaaaagtaa

SEQ ID NO: 108264 - protein, 405 aa, Leuconostoc mesenteroides subsp. mesenteroides ATCC 8293
MAKLTVSDLELSGKKVLMRVDFNVPIKAGVIGNDNRIVAALPTIKYVLENNGRAILFSHLGRIKSEDDKKELSLAPVAARLGELLGKDVKFVPQTRGEELESAINALQDGEVLMVENTRFEDVVDGEVVKNESKNNPELGKYWASLGDDLFINDAFGTAHRAHASNVGIASNVSQAAAGFLMEKEIKFLGDAVANPVRPFVAIIGGAKVSDKIEIVKSLLNKADKVIVGGGMAYTFDAAKGNKIGNSLFEADKVELAKELMAEAGDKLVLPIDSIAADAFSNDAKTEVVDAEDGIPDGYMGLDIGPKSVKLLQDTLSDAKTVVWNGPMGVFEMSNFAKGTLAIGEELVKVTENGGTTIVGGGDSTAAVQQLGVADKLTHISTGGGASLEYLEGKELPGIASISEK

SEQ ID NO: 108265 - DNA, 1176 bp, Solibacter usitatus Ellin6076
  CDS (1)..(1176): transl_table=11
atgtcctatttatcgattcgtgatctcgacttgaagggcaagcgtgtcttcatccgcgtggatttcaatgtgccgctgcaaaagaacgatcagggcgcaatggaaatcaccagcgacaagcgcatcaaagcgtcgctgcccacgattcaatacgcgctggagcatggcgcggcggtgattctggcgtcgcacctggggcgtcccaaggggaagccgaatacggagatgagcctgaagcccgtggcggcgaggctggagcaggtgctgaaagtcccggtgaagatggctcccgattgcgtgggtcccgaagtgcaggcgatgctgccggcgccgggcgaggtgctgctgctggaaaatttgcgcttccacgccgaggaagagaagaacgaccccgcatttgccgcccagttggcggctctgtgcgagatttatgtcaacgacgcattcgggtcggcgcaccgcgcgcacgcatccaccgaaggcatggtcaagttagtgaagcaggcggcggccggcctgttgatggaaaaggaactgaagtatctggggatggcgaccacgaatccgccgcggccgtgcgtggcgattctgggcggcgcgaaggtctccgacaagatcgaggtcatccagaatttgggcaaggtggtggaccgcctgttgatcggcggcgcgatggcgtacacgttcctcaaggcgcaggggctgccgaccggaaagtcgctggtggaggacgacaaggtcgaactggcgaagagtctgctggcggaattgggagagcgcctgatgctgccggtggaccacgtggtggtctcggagatcgcggcgggcgcgcccttcgaggtggtggataccattcccgagggcaagatcgcggtggatatcggccccaagacggtggaggcattctccaaagtggtggccggcgcgaagacggtgatctggaatggtccgatggggatcttcgagaagccgcccttcgatcagggcacggtggcggtggcgaaagcggtcgccggatcgggcgcgaccagcatagtgggcggcggcgattcggagaaggcgatcaaggcggccggcgtcagcgacaaaatctcgcacgtgtcgacgggcggcggagcatcgctggagttcctggcaggcgacacgctgccgggcgtcgcggcgctggaccggtag

SEQ ID NO: 108266 - protein, 391 aa, Solibacter usitatus Ellin6076
MSYLSIRDLDLKGKRVFIRVDFNVPLQKNDQGAMEITSDKRIKASLPTIQYALEHGAAVILASHLGRPKGKPNTEMSLKPVAARLEQVLKVPVKMAPDCVGPEVQAMLPAPGEVLLLENLRFHAEEEKNDPAFAAQLAALCEIYVNDAFGSAHRAHASTEGMVKLVKQAAAGLLMEKELKYLGMATTNPPRPCVAILGGAKVSDKIEVIQNLGKVVDRLLIGGAMAYTFLKAQGLPTGKSLVEDDKVELAKSLLAELGERLMLPVDHVVVSEIAAGAPFEVVDTIPEGKIAVDIGPKTVEAFSKVVAGAKTVIWNGPMGIFEKPPFDQGTVAVAKAVAGSGATSIVGGGDSEKAIKAAGVSDKISHVSTGGGASLEFLAGDTLPGVAALDR

SEQ ID NO: 108267 - DNA, 1191 bp, Magnetococcus sp. MC-1
  CDS (1)..(1191): transl_table=11
atgaacaagcgtaccatccgtgatattgacatcaaaggtaagcgggttttcatgcgtgtggattttaatgtgcccctcaatgaggatggcacggtccgcagcgataagcgcattcagggtgcgctgcccaccattcgttatgccattgagcagggggctaaagtaattttggcttctcacttggggcgcccctcaggggataagtttgaacccgaattttcactaaagcctgcgggtgaagcgcttgccgcgctgttgggccaaccggtcaagctggccccagattgtgtaggggccgaggtcgaagcaatggtggccgccatgcaggatggtgatgtggtgttgctggagaatgtgcgttttcacaagggtgaaaccaaggcggatgttgagctttccaagggttttgccaagttggccgatgtggtggtaaacgatgcctttggcacggcacaccgggcccattcgtccaatgtgggcattaccgagtttgtgcgccctgcggtggccgggtttttgatggccgatgagatggactattttgataaggtattgggtgcgcccgagcgtccggtcatggccattttggggggggccaagatctcaggcaagattgatgtgatcgaggcgctgctggacaaaatggataagatcattattggcggtggcatgtccttcaccttcttcaaagccatgggttatgaaattggcaactcgttgtgtgaagatgagatgttgccggtggcagaaaaaaccttggctaaagccaaagagaagggggtatccctgatcctgccagtggattgcgtggcggcggacgcctttcgtgaggatgccaatacccagatctgctcggtagaagcactacccgctggctggatggggctggatatcgggcctgagagcgtcaagctgtttgccaaggcgttggagggggttaaaaccgtcatttggaacggccccatgggggtgtttgaaatggccccctttgccagtggcaccaaccatttggcccatttgttggcggagagtgattgtctttcggtgatcgggggtggtgatacggcggcggcggttaaacaagcgggcgtggccaagcaactctcttacatctccactggtggtggggcctcgctggagttgatggagggcaaacagctgcccggtatcacctcgctggatgataaatag

SEQ ID NO: 108268 - protein, 396 aa, Magnetococcus sp. MC-1
MNKRTIRDIDIKGKRVFMRVDFNVPLNEDGTVRSDKRIQGALPTIRYAIEQGAKVILASHLGRPSGDKFEPEFSLKPAGEALAALLGQPVKLAPDCVGAEVEAMVAAMQDGDVVLLENVRFHKGETKADVELSKGFAKLADVVVNDAFGTAHRAHSSNVGITEFVRPAVAGFLMADEMDYFDKVLGAPERPVMAILGGAKISGKIDVIEALLDKMDKIIIGGGMSFTFFKAMGYEIGNSLCEDEMLPVAEKTLAKAKEKGVSLILPVDCVAADAFREDANTQICSVEALPAGWMGLDIGPESVKLFAKALEGVKTVIWNGPMGVFEMAPFASGTNHLAHLLAESDCLSVIGGGDTAAAVKQAGVAKQLSYISTGGGASLELMEGKQLPGITSLDDK

SEQ ID NO: 108269 - DNA, 1227 bp, Mycobacterium smegmatis str. MC2 155
  CDS (1)..(1227): transl_table=11
atgtcggtcaagacactcgacgatctgctcgccgagggcgtgcaaggtcggggcgtactcgtgcgctccgacctcaacgttcccctcgacgacgacggcaacatcaccgatccgggacgcgtcatcgcatcggtcccgacgctgcaggccctcgcggaagcgggtgccaaggtgatcgtcaccgcgcatctcggccgccccaagggcgagccggaccccaagctgtcgctcgcgccggtcgcggcggcactgggggagaagctgggcaggcacgtgcagctcgcgggtgacgtcgtcggcaccgatgcgctcgcgcgcgccgagggcctgaccgacggcgacgtgctgctgctggagaacatccggttcgacgcgcgcgagaccagcaaggacgacagcgagcgcctgtcgctcgccaaggccctcgcggcgctcgtggaaggtcccgacggatcacccggcgtcttcgtctccgacggtttcggtgtggtgcaccgcaagcaggcgtcggtctacgacgtcgcgacgctgctgccgcactacgcgggcacgctggtggccgccgaggtcaaggtgctgcagcagctgaccagctcgacggaccgtccgtacgccgtcgtgctcggcggctcgaaggtgtccgacaagctcgcggtcatcgagaacctcgcgacgaaggccgacagcctgatcatcggtggcggtatgtgcttcacattcctggccgcacaagggttttcggtcggcagctcgctgctgcaggaggagatggtcgacacctgccgccgcctgctcgacgagtacgccgatgtgatccacctgccggtggacatcgtcgtggccgacaagttcgccgccgacgcggaagccgagaccgttgccgccgaccgcatcccggacggcaagatgggcctggacatcggcccgggctcggtggagcggttcaccgcgctgctgagcaacgccaagaccgtgttctggaacggcccgatgggtgtgttcgagttcccggcgttcgcggccggcaccaagggtgtcgccgaggcgatcatcggcgccaccggcaagggcgcgttcagcgtcgttggcggcggcgattccgcggccgcggtacgccggctcggcctgcccgaggacggcttctcgcacatctccaccggtggtggcgcgtcgctcgaatacctcgagggcaaggaattgcccggcatccaagtactggagtcgtga

SEQ ID NO: 108270 - protein, 408 aa, Mycobacterium smegmatis str. MC2 155
MSVKTLDDLLAEGVQGRGVLVRSDLNVPLDDDGNITDPGRVIASVPTLQALAEAGAKVIVTAHLGRPKGEPDPKLSLAPVAAALGEKLGRHVQLAGDVVGTDALARAEGLTDGDVLLLENIRFDARETSKDDSERLSLAKALAALVEGPDGSPGVFVSDGFGVVHRKQASVYDVATLLPHYAGTLVAAEVKVLQQLTSSTDRPYAVVLGGSKVSDKLAVIENLATKADSLIIGGGMCFTFLAAQGFSVGSSLLQEEMVDTCRRLLDEYADVIHLPVDIVVADKFAADAEAETVAADRIPDGKMGLDIGPGSVERFTALLSNAKTVFWNGPMGVFEFPAFAAGTKGVAEAIIGATGKGAFSVVGGGDSAAAVRRLGLPEDGFSHISTGGGASLEYLEGKELPGIQVLES

SEQ ID NO: 108271 - DNA, 1206 bp, Bifidobacterium longum DJO10A
  CDS (1)..(1206): transl_table=11
atgaagacactcaaggaccttggagatctcaagggcaagcgcgttctggttcgcgctgatttcaatgttccgctggacggcaccaccatcaccgatgacggtcgaatcaaggctgctctgccgaccatcaagaccctgcgcgaagaaggcgccaaggtcatcctcatggcccaccttggccgcccgaagggcaaggtcgttcctgagctgagcctggccccggttgccgcccgcctcggcgagctgctcggcgccaacgtgccgctggccaaggacacctacggcgaggacgctcaggccaaggtcgccgccatgaacgatggcgacgttgtgctgcttgagaacgttcgtttcaacccggaggagacctctaaggacgccgacgaacgcgccgcttacgccaagaagatcgccgccctcggcgaggccttcgtttccgatggcttcggcgtggtccaccgcgctcagggctccaactacgacgttgccgccgatctgccggccgccgcaggcctgctggtcgagaaggaagtcaaggccttgtccaaggccaccgagaacccggagcgtccgttcaccgtggtgcttggcggttccaaggtctccgacaagctcggcgtcatcgagaacctgctcgacaaggccaaccgtctggtcatcggcggtggcatggtgttcaccttcctcaaggccaagggctacgaggtcggcacctccctgcttgaagaggaccagcttgagaaggtcaagggctacatcgagaccgccgagaagaacggcgttgagctcgtgctgccgaccgacgtcgtcgtgaacgccggcttcccggccggtgacaccccggttgctccggaagtcgttgccgccgacgccatcccggccgacaagatgggtctggacatcggcccggagtcccagaagctcttccacgacaagatcgtcgactccaagaccgtcgtgtggaacggcccgatgggcgtgttcgaggttcctgagttcgccgccggcaccaaggccgtggcccagggtctggtcgacgccaccgcagccggtgcgttcaccatcgtcggtggcggcgactccgcctccgccgtgcgcaacctcggcttcccggaggacggcttctcccacatctccaccggtggtggcgcttccctcgagttcctcgaaggcaaggagctccctggcctgaaggtgcttgagtaa

SEQ ID NO: 108272 - protein, 401 aa, Bifidobacterium longum DJO10A
MKTLKDLGDLKGKRVLVRADFNVPLDGTTITDDGRIKAALPTIKTLREEGAKVILMAHLGRPKGKVVPELSLAPVAARLGELLGANVPLAKDTYGEDAQAKVAAMNDGDVVLLENVRFNPEETSKDADERAAYAKKIAALGEAFVSDGFGVVHRAQGSNYDVAADLPAAAGLLVEKEVKALSKATENPERPFTVVLGGSKVSDKLGVIENLLDKANRLVIGGGMVFTFLKAKGYEVGTSLLEEDQLEKVKGYIETAEKNGVELVLPTDVVVNAGFPAGDTPVAPEVVAADAIPADKMGLDIGPESQKLFHDKIVDSKTVVWNGPMGVFEVPEFAAGTKAVAQGLVDATAAGAFTIVGGGDSASAVRNLGFPEDGFSHISTGGGASLEFLEGKELPGLKVLE

SEQ ID NO: 108273 - DNA, 1161 bp, Haemophilus influenzae R2866
  CDS (1)..(1161): transl_table=11
atgtcagtaatcaaaatgaccgatttagatttagtgggcaaacgcgtgtttatccgtgcggatcttaatgtgccagtaaaagatggcaaagtgacctcagatgcgcgtattcgtgcgaccattcctactttaaaattagccttagaaaaaggtgcgaaagtgatggtaacttctcacttaggtcgtccaactgaaggagaattcaaaccagaagattctttacagccagttgttgattacttaaaaaacgcaggcttcaatgtgcgtttagaacaagattatttaaacggcgtagaggttaaagaaggcgaaatcgttgttttagaaaacgtacgcgtaaacaaaggcgaaaagaaaaacgatcctgaattaggtaaaaaatatgccgcactttgcgatgtatttgtaatggatgcctttggtacggctcaccgtgctcaagcttccacttacggtgttgcagaatttgcaccaatcgcttgtgcaggcccattattagctgctgaattagatgcattaggtaaagcattaaaagaacctgctcgtccaatggtggctattgtgggtggttctaaagtttcaactaaattagaagtattaaattctctttcaaaaatcgctgaccaaattattgtgggcggtggtattgcaaatactttcattgcggcagcaggccacaatgtaggtaaatctttatatgaagctgatttaatgccagttgcgaaagaattagccgcaaatacagatattccagttccagttgatgtgcgtgtaggtttagagttctctgaaacggcagcagcaacagaaaaagcggtaaatgaagtgaaagatgatgaatctatttttgatattggcgataaatcagcagaacaattggctgaaattatcaaaaatgcaaaaaccgttttatggaatggcccagttggcgtgtttgagttccctcacttccgtaaagggactgaaatcatttctcacgccattgcaaacagcgatgcattctctattgctggcggcggcgataccttagcggctatcgatttatttggtattgctgataagatttcttacatttcaacgggtggtggtgcattcttagaatttgtagaaggcaaagtattacctgcagtagaaattcttgaaaaacgtgcgaaaaactaa

SEQ ID NO: 108274 - protein, 386 aa, Haemophilus influenzae R2866
MSVIKMTDLDLVGKRVFIRADLNVPVKDGKVTSDARIRATIPTLKLALEKGAKVMVTSHLGRPTEGEFKPEDSLQPVVDYLKNAGFNVRLEQDYLNGVEVKEGEIVVLENVRVNKGEKKNDPELGKKYAALCDVFVMDAFGTAHRAQASTYGVAEFAPIACAGPLLAAELDALGKALKEPARPMVAIVGGSKVSTKLEVLNSLSKIADQIIVGGGIANTFIAAAGHNVGKSLYEADLMPVAKELAANTDIPVPVDVRVGLEFSETAAATEKAVNEVKDDESIFDIGDKSAEQLAEIIKNAKTVLWNGPVGVFEFPHFRKGTEIISHAIANSDAFSIAGGGDTLAAIDLFGIADKISYISTGGGAFLEFVEGKVLPAVEILEKRAKN

SEQ ID NO: 108275 - DNA, 1191 bp, Listeria monocytogenes str. 1/2a F6854
  CDS (1)..(1191): transl_table=11
atggctaaaaaagttgtaactgatttagatttaaaagacaaaaaagttttagttcgtgttgactttaacgtgccaatgaaagacggtaaaatcactaacgataaccgtattgtagctgcacttccaacaattgagtacatcttagaacaaaacggtaaagcaattctattttctcaccttggaaaagtaaaaacagaagaagataaagaaggaaaatctcttcgtccagtagccgctcgtttaagcgaattacttggaaaagaagtgaaattcgttcctactactcgtggtccagaacttgaagcagcaattgctgagttaaaagacggcgaagtacttctttttgaaaatacacgttttgaagatattgatggtaaaaaagaaagcaaaaatgatccagaacttggaaaatactgggctagccttggcgacgttttcgtaaatgacgcttttggtactgctcaccgtgcgcacgcgtctaacgttggaatcgcttctaacttagaatcagcggccggatttttgatggaaaaagaaattaaattcatcggcggtgtagttgataatccagcacgtccactagtagcaatcctaggtggtgcaaaagtttctgacaaaatcggtgttatcgaaaacttacttacaaaagcagacaaagtacttgtcggcggcggaatgactttcactttcatggcagctcaaggtcaagaaattggtaaatctcttttagaagcagataaagttgaacttgctaaaggcttacttgaaaaagctggcgataaattagtattaccagttgatgcagttgtatctaaagaattcagtaacgatgctcctttccatacagttagtgcagatagcattccagctgatgaaatgggactagatattggtcaagctacaatcgacttatttacaaaagaacttcaaggcgctaaaacagttgtatggaatggtccaatgggcgtattcgaacttagcaactttgctaaaggtacaattggcgtttgtgaagctattgcaaacttaactgatgcaacaactatcatcggtggtggggattctgcagcagcagctatggacttaggttttgctgataaattcacacatatttctactggtggcggcgcatctttagagtatcttgaaggtaaagagcttcctggtgttgcttctattagcgacaaataa

SEQ ID NO: 108276 - protein, 396 aa, Listeria monocytogenes str. 1/2a F6854
MAKKVVTDLDLKDKKVLVRVDFNVPMKDGKITNDNRIVAALPTIEYILEQNGKAILFSHLGKVKTEEDKEGKSLRPVAARLSELLGKEVKFVPTTRGPELEAAIAELKDGEVLLFENTRFEDIDGKKESKNDPELGKYWASLGDVFVNDAFGTAHRAHASNVGIASNLESAAGFLMEKEIKFIGGVVDNPARPLVAILGGAKVSDKIGVIENLLTKADKVLVGGGMTFTFMAAQGQEIGKSLLEADKVELAKGLLEKAGDKLVLPVDAVVSKEFSNDAPFHTVSADSIPADEMGLDIGQATIDLFTKELQGAKTVVWNGPMGVFELSNFAKGTIGVCEAIANLTDATTIIGGGDSAAAAMDLGFADKFTHISTGGGASLEYLEGKELPGVASISDK

SEQ ID NO: 108277 - DNA, 1197 bp, Wolbachia endosymbiont of Drosophila simulans
  CDS (1)..(1197): transl_table=11
atgaacatacctagtatagaaaattgtgatcttcacaataaagccgtcttacttagagttgacttcaatgttcctataaaagatggagaaattcgtgatgtcactcgtattttgagagcattgcctactattcagtatttagtgaatgcgagtgcaaagattattattatatcacattttggacgcccaaaggccagagacaataatctgtcgctaaaaaatgtaattgacactttatcgcagttactaaataaaaaagtgaaattcattgatgattgcgttggtgaaaaagtgcaaaaagcagtgagtgctatggatgcaggagatataatattactggagaatctaagattttatgaaggggaaaaggagaatgatgcaaactttgccagacaattagcatctctggcggatatatatgtaaatgatgcattttcttgctctcacagagctcacgcttctatttcacgcattacagagtttttaccttcctatgcaggattttgcttgcaagatgagctaaagtatcttgaaaaagctgtatcgtttaaagctaaacctattactgcgatagttgggggagctaaaatatcaactaaaataaaagtgcttatgaagctaacagaaaaggttgattacctagttctaggtggtgcaatagccaacaattttttgtcatttagcaaagtaaatatagggaaatctttctttcaaaatggtgttgacgaccttctacataatattgttgaaacagcaaataaaaacaattgcaaaatagttgtgccagaagacgttctggttgcagtaaactctgattacagcactagtatttcaagaaaaactgagtccattttggacggtgatataattttggatatcggatcacaaactttgagtacaataagcagtataatagcaagcagtaagactctgctgtggaatggacctattggtgtttttgaacattcagcttttgcaagcggtacaataggggtaatgaaaatcgtaagtgacttaacgcacaaaggaaagttaaccagcataatagggggaggtgatagtctatctgcaataagcgctgcaggccttaccgataaggattttacatatgtttccactggtggaggagcatttttagattggttaagtggcgatgaaatgccgggagttgctgctctgcaaaaacgattagattaa

SEQ ID NO: 108278 - protein, 398 aa, Wolbachia endosymbiont of Drosophila simulans
MNIPSIENCDLHNKAVLLRVDFNVPIKDGEIRDVTRILRALPTIQYLVNASAKIIIISHFGRPKARDNNLSLKNVIDTLSQLLNKKVKFIDDCVGEKVQKAVSAMDAGDIILLENLRFYEGEKENDANFARQLASLADIYVNDAFSCSHRAHASISRITEFLPSYAGFCLQDELKYLEKAVSFKAKPITAIVGGAKISTKIKVLMKLTEKVDYLVLGGAIANNFLSFSKVNIGKSFFQNGVDDLLHNIVETANKNNCKIVVPEDVLVAVNSDYSTSISRKTESILDGDIILDIGSQTLSTISSIIASSKTLLWNGPIGVFEHSAFASGTIGVMKIVSDLTHKGKLTSIIGGGDSLSAISAAGLTDKDFTYVSTGGGAFLDWLSGDEMPGVAALQKRLD

SEQ ID NO: 108279 - DNA, 1203 bp, Crocosphaera watsonii WH 8501
  CDS (1)..(1203): transl_table=11
gtgtctaagaaaacgatcgccaatttatcagcagcggatctcgctggaaaacgagtattagtaagggttgattttaacgttcctttcgacaacggaagcatcaccgatgacacccgtattcgtgcagctttacccaccatcaaagaattgatcagcaatggggcaaaagttatcctctgtagccacatgggtcgtcccaagggtaaagtagttgatagcatgagtttaacgccggttgcagcccgtttaggggagttattagggcaaaaagtcaccatgtgtgatgattgtgttggagagtccgttacagccgccattggtgggctagaaaatggtcaagttgctctactggaaaatctccgtttccactcagaagaagaaggtaacgatcccgaatttgccaagcagttagcagctaacgccgatttatacgttaacgatgcctttggaactgctcaccgcgcccacgcttctactgaaggggtgacacactatttaagtcctagtgttgctggttatttgattgagaaagaactgcaatatttacaagctgcgatcgaaaacccccaacgtcctttagtggctattatcggtggttctaaagtttctagtaaaattggtgtaattgaaaccctactggaaaaatgcgataagctcatcattggcggtggcatgattttcaccttttataaagcccgtggcttaaatgttggtaagtctttggtagaagacgataagttagaattagctaagtctctcgaagccaaagccaaagagaaaggtgtggatttcttgttaccttctgatgtagttttagccgataactttgcccctgatgctaatgctaaaactaccagtattgacaacattgaagacggttggatgggcttagatattggccctgattccattaaactgttccaagacgctttatctgattgtaaagcagtcatttggaatggtccgatgggagtatttgaattcgataaatttgctgctgggaccgaagcgatcgcccgtaccttagctgagttaaccggcacaggaaccactactattatcggcggtggtgactctgttgctgctgttgaaaaagttggtgtggctgagaaaatgagccacatttctactggtggtggtgctagtttagaactgttagaaagtaaagttttacctggtattgctgccttagacgaagcgtga

SEQ ID NO: 108280 - protein, 400 aa, Crocosphaera watsonii WH 8501
MSKKTIANLSAADLAGKRVLVRVDFNVPFDNGSITDDTRIRAALPTIKELISNGAKVILCSHMGRPKGKVVDSMSLTPVAARLGELLGQKVTMCDDCVGESVTAAIGGLENGQVALLENLRFHSEEEGNDPEFAKQLAANADLYVNDAFGTAHRAHASTEGVTHYLSPSVAGYLIEKELQYLQAAIENPQRPLVAIIGGSKVSSKIGVIETLLEKCDKLIIGGGMIFTFYKARGLNVGKSLVEDDKLELAKSLEAKAKEKGVDFLLPSDVVLADNFAPDANAKTTSIDNIEDGWMGLDIGPDSIKLFQDALSDCKAVIWNGPMGVFEFDKFAAGTEAIARTLAELTGTGTTTIIGGGDSVAAVEKVGVAEKMSHISTGGGASLELLESKVLPGIAALDEA

SEQ ID NO: 108281 - DNA, 1194 bp, Prosthecochloris aestuarii DSM 271
  CDS (1)..(1194): transl_table=11
atgcagaaaaagaccttgtcagatatatcatgtaaagggaaacggatacttatgcgagtggatttcaacgttccgcttgacctgaatggcacgatcaccaatgacaagcgcataatcgaagcgcttccgtcgatcaggcaggtgctcgaaacaggaggacgtctcatcctcatgtcccatctcggtcgcccgaaaggcaaggtcactccagagctctcactcgcgcccgtagcacgaaggctctcggagctgcttgataccgacgttgtcatggcaaacaactgtataggtaccgaagccatgcagcaggcgctcgcactgcaggacggcgaagtcatgatgctcgaaaacctgaggttccatcccgaagaagaaaaaaacgatcctgaatttgccagagaactggcctcaatgggagagatctacgtcaatgacgcgtttgggacagcccaccgcgcacatgcatccacagaagggatctgccactacgttccgatctcggttgcaggcttccttatcgaaaaagaactcagatatcttggcaacgccctggcaaaccccgaacgcccgttcctggccatcctcggcggtgcaaaaatttccggaaaaatcgatgtgctcgacaaccttttcgacaaggttgataccattctcatcggcggagcgatgatcttcaccttcttcaaagctcagggctaccaggtcggaacctcccttgtcgaagaagacaagatcgaactggcgaagcatctgctggaaaaagctgccgcaaaaaacatcagaatgctccttccagaggatgtgattgccgcatcggcattctccgctgacgcagaaacagcaacagtccctatcgacagcattcccgagacaatgatggggctcgacatcggcccgaaaaccatcgacacctattcccgggaaattctcaaggccagaacaatcgtctggaacggcccgatgggcgtctttgaaatcgatgcgttcgcaactggcaccatcgcaatcgcccatgcgctggccgacgccacagccaaaggcgccatatcgatcataggcggaggagattccgccgcagccgtgatgaaagcaggcctcgaatcaggcatcacccatatttcaaccggtggcggagcaagtctcgagttccttgaaggcaaagaacttccgggtattgccgccttgaacgattaa

SEQ ID NO: 108282 - protein, 397 aa, Prosthecochloris aestuarii DSM 271
MQKKTLSDISCKGKRILMRVDFNVPLDLNGTITNDKRIIEALPSIRQVLETGGRLILMSHLGRPKGKVTPELSLAPVARRLSELLDTDVVMANNCIGTEAMQQALALQDGEVMMLENLRFHPEEEKNDPEFARELASMGEIYVNDAFGTAHRAHASTEGICHYVPISVAGFLIEKELRYLGNALANPERPFLAILGGAKISGKIDVLDNLFDKVDTILIGGAMIFTFFKAQGYQVGTSLVEEDKIELAKHLLEKAAAKNIRMLLPEDVIAASAFSADAETATVPIDSIPETMMGLDIGPKTIDTYSREILKARTIVWNGPMGVFEIDAFATGTIAIAHALADATAKGAISIIGGGDSAAAVMKAGLESGITHISTGGGASLEFLEGKELPGIAALND

SEQ ID NO: 108283 - DNA, 1200 bp, Streptococcus suis 89/1591
  CDS (1)..(1200): transl_table=11
atggcaaaattgactgttaaagatgtagaattgaaaggcaaaaaagttcttgttcgtgtggacttcaacgtgcctttgaaagatggcgttatcactaacgataaccgtattacagcagctcttccaactatcaagtatattcttgagcaaggtggacgtgcaattcttttctctcaccttggtcgtgtgaaagaagaagctgacaaagaaggtaaatcattggctcctgtagcagctgacttggcagctaaattgggtcaagaagttgctttcatcgctggtgctactcgtggtgctgaattggaagcggctatcaatgctttggaagatggacaagttctccttgttgaaaacactcgtttcgaagacgttgatggtaagaaagaatctaaaaacgacgaagaacttggtaaatactgggcttcacttggtgatggtatcttcgttaacgatgcatttggtactgcacaccgtgcacacgcatcaaacgttggtatctcagcaaacgtagaaaaagcagtagctggtttccttttggaaaacgaaattgcatacatccaagaagctgttgaaactccagagcgtccatttgtggcaatccttggtggttcaaaagtatctgataagattggtgttatcgagaaccttcttgaaaaagcagacaaagttcttatcggtggtggtatgacttacacattctacaaagctcaaggtatcgaaattggtaactcacttgtagaagaagataaattggatgtggcaaaggcgcttcttgagaaagcgaatggtaaattgatcttgccagttgactcaaaagaagcaaatgcatttgctggatacactgaagttcgcgacactgaaggtgaagcagtttcagaaggcttccttggtcttgacatcggtcctaagtcaatcgctaagtttgacgaagcgttgactggtgcaaaaacagttgtttggaacggacctatgggtgtatttgaaaacccagacttccaagctggtacaatcggtgtaatggacgctatcgtgaaacaaccaggcgtgaaatcaatcatcggtggtggtgactcagcggcagctgcgatcaaccttggccgtgcagacaagttctcatggatctcaactggtggtggtgcatcaatggaactcctcgaaggtaaagtgcttccaggacttgcagctttgactgaaaaatag

SEQ ID NO: 108284 - protein, 399 aa, Streptococcus suis 89/1591
MAKLTVKDVELKGKKVLVRVDFNVPLKDGVITNDNRITAALPTIKYILEQGGRAILFSHLGRVKEEADKEGKSLAPVAADLAAKLGQEVAFIAGATRGAELEAAINALEDGQVLLVENTRFEDVDGKKESKNDEELGKYWASLGDGIFVNDAFGTAHRAHASNVGISANVEKAVAGFLLENEIAYIQEAVETPERPFVAILGGSKVSDKIGVIENLLEKADKVLIGGGMTYTFYKAQGIEIGNSLVEEDKLDVAKALLEKANGKLILPVDSKEANAFAGYTEVRDTEGEAVSEGFLGLDIGPKSIAKFDEALTGAKTVVWNGPMGVFENPDFQAGTIGVMDAIVKQPGVKSIIGGGDSAAAAINLGRADKFSWISTGGGASMELLEGKVLPGLAALTEK

SEQ ID NO: 108285 - DNA, 1263 bp, Croceibacter atlanticus HTCC2559
  CDS (1)..(1263): transl_table=11
atgagtaatgttaacctcttttacttaacaatggttaaaagagatatttcattacttttgcctttaaactttgtaactatgaaaacccttaacgactataatttcaaaaataaaaaagcattaattagagtagattttaatgtgcctttaaatgatgattttgaagttacagacacaactagaatagaagctgcaaaagacacaattattaaagtcttagaagatggtggttctgctgttttaatgtcacacttagggcgtcctaaaggagagcaagaagaatattctttaaaacacatctgttctaaagtttctgaaattttaggtgtgcaaacaaaatttgcttctaattgtgtaggaccagttgcagaagatgcagtatctaggttagaaaacggtgaagtattactactggaaaaccttagataccatgaagaagaaaagaaaggcgatcagaaatttgcaaagcagctgtctaaattaggtgatgtttatataaatgatgcttttggtacagcacatcgagctcacgcctcaacaacagtagtagcaaattattttgaagacaaatgtgtaggttaccttttacaaaaagaaatagagagcttaaacaaagttcttaataactctaccaaaccagttacagctatccttggaggtgcaaaagtatccactaagattactgttatagaaaatattttagacaagatagatcatcttattataggtggcggaatgacatttactttcattaaagccaaaggtggtaaaataggaagttctttagttgaagaggacaaactagaccttgctctagaaattattgaaaaagctgaagaaaaaaacgtgcaaattcaccttccttctgatgcgattgttgcagacagtttttctgaatttgcaaatacaaatattgaagctgtagataacataagtgatggttggatgggcttagatgttggcccaaaaactcttgaggagtttaaaggcgtagtattacaatctaaaactattttatggaatggtccattaggtgtttttgaaatggagccttttgcaaaaggaactatagagttaggtaattatatagaagaagccacagaaaaaggagcgttctctttagttggtggtggtgatagtgttgctgccgttaagcaatttggttttgagaacaaagtaagttatgtatctactggtggtggtgcaatgttggaaatgctagaaggaaaaaaattaccaggaattgcagcgttggaagattaa

SEQ ID NO: 108286 - protein, 420 aa, Croceibacter atlanticus HTCC2559
MSNVNLFYLTMVKRDISLLLPLNFVTMKTLNDYNFKNKKALIRVDFNVPLNDDFEVTDTTRIEAAKDTIIKVLEDGGSAVLMSHLGRPKGEQEEYSLKHICSKVSEILGVQTKFASNCVGPVAEDAVSRLENGEVLLLENLRYHEEEKKGDQKFAKQLSKLGDVYINDAFGTAHRAHASTTVVANYFEDKCVGYLLQKEIESLNKVLNNSTKPVTAILGGAKVSTKITVIENILDKIDHLIIGGGMTFTFIKAKGGKIGSSLVEEDKLDLALEIIEKAEEKNVQIHLPSDAIVADSFSEFANTNIEAVDNISDGWMGLDVGPKTLEEFKGVVLQSKTILWNGPLGVFEMEPFAKGTIELGNYIEEATEKGAFSLVGGGDSVAAVKQFGFENKVSYVSTGGGAMLEMLEGKKLPGIAALED

SEQ ID NO: 108287 - DNA, 1170 bp, Sulfitobacter sp. EE-36
  CDS (1)..(1170): transl_table=11
atggacctgcgcggcaagcgggttctggtgcgcgtggatatcaacgtgccggttgaaaacggcaaggtaacggacgacacccgcatccagcggatcatccccaccctgcgcgacattctggaacagggtggcacccctgtgctgctggcgcattttggccgccccaagggcaagcgcgtgcaggacctgagcctgcgtgtcgtcctccccgcgctagaggatgccttaggccgcaaagtcgtactggccgaaacgctcgaggccgccgaggcgggcaccgaagagatcaacgccgccgatgtattgctgcttgaaaacatccgtttctatccgggcgagaccgagaacgaccccgattttgccaaacgtctggccggtttgggcgacatctattgcaacgatgccttctctgccgcgcaccgtgcccatgcgtcgaccgaaggggtcgcgcggcttttgccctcttgtgcgggccgtttgatgcaggccgagctttcggcgcttgaggccgcgctggccaccccgaaacgccccgtgggcgcggtggtgggcggtgccaaagtatcgaccaagatcgagctgttggaaaacctcgtgaaccggctggatctgttggtgatcgggggcggcatggccaatacgtttctgggcgcgcagggcgcagatctgggcaagtccctgtctgaacccgatttttacgacaccgccaaggatattctggcacaggcggaaaaggccggctgccgcgtcttgctgcccgtagatgggcttgtcgcgcgggaattcgccgcccatgcggcgcatgaggtcgcagcccttggggccgataccgtactggcggcggaccagatggtactggacgcaggcccaaagacggttgaactggtcaaagacgcgtttaacggcctgaaaacgctgatctggaacggccccatgggcgcgttcgagatcgcccccttcgacaccgcgacagtcgccgcggccaaggcagcggctgcgctgacacgcgacggcgcgctaatctcggtggcgggcggtggcgacaccgtggccgcattgaaccaggcgggtgcggcggatgatttcacctatatctccaccgcgggcggtgccttccttgaatggatggaaggcaagaccctccccggcgttgccgcgctggacgcctga

SEQ ID NO: 108288 - protein, 389 aa, Sulfitobacter sp. EE-36
MDLRGKRVLVRVDINVPVENGKVTDDTRIQRIIPTLRDILEQGGTPVLLAHFGRPKGKRVQDLSLRVVLPALEDALGRKVVLAETLEAAEAGTEEINAADVLLLENIRFYPGETENDPDFAKRLAGLGDIYCNDAFSAAHRAHASTEGVARLLPSCAGRLMQAELSALEAALATPKRPVGAVVGGAKVSTKIELLENLVNRLDLLVIGGGMANTFLGAQGADLGKSLSEPDFYDTAKDILAQAEKAGCRVLLPVDGLVAREFAAHAAHEVAALGADTVLAADQMVLDAGPKTVELVKDAFNGLKTLIWNGPMGAFEIAPFDTATVAAAKAAAALTRDGALISVAGGGDTVAALNQAGAADDFTYISTAGGAFLEWMEGKTLPGVAALDA

SEQ ID NO: 108289 - DNA, 1176 bp, Pseudoalteromonas tunicata D2
  CDS (1)..(1176): transl_table=11
atgtcagtcattaaaatggccgatttagatttagcaggcaaacgcgtgttaattcgtgaagacttaaatgtaccagtgaaaaatggcaaagtgacctcagatgcgcgtattcgtgcttctttaccaacaattaagttagcccttgaaaaaggcgctaaagtgatggtgatgtcacacttaggtcgtccaactgaaggcgaatataatgaagagttttcgcttgctcctgttgttgattatttaaatgatgcgcttgattgtgctgtacgtttagaaaaagattatttaaacggcgtaacagttaatgacaatgaagtcgtggtatttgaaaacgttcgctttaataaaggcgaaggtaaagacgatgaaaccttagcaaaacaactagctgcattatgtgatgtgtatgttatggatgcatttggtacagcgcatcgtgctcaagcatcaacccatggtgttggtgtttttgctccaattgcgtgtgccggtccattacttgctgccgaacttgaagcattaggtaaagcccttgataatccagcacgcccgttagtggccattgttggtggttcaaaagtatcgaccaaactaacggtacttgattcattgtctaaaattgttgaccaattagtaactggtggcggtattgccaatacgtttattgcagcggcaggccatcctgttggcaaatcattatatgaacccgatttaattgctgaagcacaaaagttaactgcggatgcaaaagcaaataatggtgacattccggttccaaccgatgttgttgttgctaaagagttctcagaatcagctgttgctacacttaaagatgtgtctgaggtaactgatgacgacatgatttttgatatcggtccagattcagcgcagcagttagcgactatcattaaaaatgctggcacggtggtttggaatggcccagttggtgtatttgaatttgaccagtttggcaatggcaccgaagcgattgctaaagcaatagctgaatcaaatgcgttttcaattgctggtggtggcgatacattagctgccattgataaatatggtgttgcagaccaaatatcttatatttcaacaggtggtggtgcgttcttagagtttttagaaggcaaagtacttcctgctgttgcgatgttagaagcgcgcgctaaataa

SEQ ID NO: 108290 - protein, 391 aa, Pseudoalteromonas tunicata D2
MSVIKMADLDLAGKRVLIREDLNVPVKNGKVTSDARIRASLPTIKLALEKGAKVMVMSHLGRPTEGEYNEEFSLAPVVDYLNDALDCAVRLEKDYLNGVTVNDNEVVVFENVRFNKGEGKDDETLAKQLAALCDVYVMDAFGTAHRAQASTHGVGVFAPIACAGPLLAAELEALGKALDNPARPLVAIVGGSKVSTKLTVLDSLSKIVDQLVTGGGIANTFIAAAGHPVGKSLYEPDLIAEAQKLTADAKANNGDIPVPTDVVVAKEFSESAVATLKDVSEVTDDDMIFDIGPDSAQQLATIIKNAGTVVWNGPVGVFEFDQFGNGTEAIAKAIAESNAFSIAGGGDTLAAIDKYGVADQISYISTGGGAFLEFLEGKVLPAVAMLEARAK

SEQ ID NO: 108291 - DNA, 1164 bp, Photobacterium sp. SKA34
  CDS (1)..(1164): transl_table=11
atgtctgtaatcaagatgactgatctggatctagctggtaagcgtgtatttattcgtgctgacctaaatgtgccagtaaaagacggtaaagtaacttcagatgcacgtatcattgcatctctacctacaattaagcgttgtctagaagctggcgctaaagtaatggttacttctcacctaggtcgtccaacggaaggcgaatacgcagaagaattctctctacagcctgtagttaactacttaaacgacgcactagattgcgacgttaaactagcaaaagattacctaaatggtcttgagctaaatgctggtgagcttgttgttcttgaaaacgtacgttttaacaagggcgagaagaaaaacgaagacgaactatctaagcaatacgctgcactttgtgacgtattcgtaatggatgcatttggtaccgctcaccgtgcacaagcatcaacttacggtgtgggtatgtttgcgccagttgcatgtgctggccctctactagctggcgagctagaagcactaggcaaagcaatggacaatccagcacgcccaatggttgctattgttggtggttctaaagtatcaactaagctaactgtacttgagtcactatctaaaattgctgaccaaatcgtagtaggtggtggtattgctaacacattcatcgcagctgaaggtaacgatgtaggtaagtctttatacgaagctgacctaatcccaacagctaaagaactaatggcacacactgacattccagtagcaacggatgtggtgtgcgctaaagagttctctgattctgctgaagcaactatcaagcctgcaactgaaattgcagctgacgacatggttcttgacctaggtcctgattcagcacaagcacttgctgacatcatcatgaacgcgaaaacgattctttggaacggccctgtaggcgtgtttgaaatcgagcaatttggtaaaggaactgaagttgttgctaacgcaatcgcggaatctgctggtttctctgttgcgggcggtggtgacacactagcggctatcgataagtacggcatcaaagataaagtatcttacatctcaacaggtggcggtgcgttccttgagttcgttgaaggtaagaaattacctgcagttgaaatgctagagtctcgcgctaaagcataa

SEQ ID NO: 108292 - protein, 387 aa, Photobacterium sp. SKA34
MSVIKMTDLDLAGKRVFIRADLNVPVKDGKVTSDARIIASLPTIKRCLEAGAKVMVTSHLGRPTEGEYAEEFSLQPVVNYLNDALDCDVKLAKDYLNGLELNAGELVVLENVRFNKGEKKNEDELSKQYAALCDVFVMDAFGTAHRAQASTYGVGMFAPVACAGPLLAGELEALGKAMDNPARPMVAIVGGSKVSTKLTVLESLSKIADQIVVGGGIANTFIAAEGNDVGKSLYEADLIPTAKELMAHTDIPVATDVVCAKEFSDSAEATIKPATEIAADDMVLDLGPDSAQALADIIMNAKTILWNGPVGVFEIEQFGKGTEVVANAIAESAGFSVAGGGDTLAAIDKYGIKDKVSYISTGGGAFLEFVEGKKLPAVEMLESRAKA

SEQ ID NO: 108293 - DNA, 1191 bp, Xanthobacter autotrophicus Py2
  CDS (1)..(1191): transl_table=11
atgaccgccttccgaaccctcgacgacgcggaccttgccgacaagcgggtcctcgtgcgcgttgacctcaacgtgcccatggaaagcgggcgggtcaccgacgagacccgcctgaaagccatcctgcccaccatccgcaccatcacggacaagggcggcaaggcggtgctactggcgcatttcgggcggcccaagggccgcgacgagagccagtccctcgccccggtggcgaaggcgctggaaggccagctcggccgcaaggtggcgttcgcctccgattgcgtgggcgaggaagcctccagcgccatctcccggctcgccgccggcgaggtgatcgtgctggaaaacacccgcttccacgccggtgaggagaagaacgcgcctgatttcgtggaggccctcgccagcctcggcgacatctatgtcaacgacgccttctcggccgcccatcgcgcccatgcctccaccgaggggctggcccgcaagctgccggcctatgccggccgctccatggaaagcgagctcgccgcgctcaccaaggcccttgaggccccggtgcgtccggtgctggccgtggtcggtggctccaaggtgtcctccaagctcgagcttctcgggaacctcgtgaagaaggtggacatcctggtgatcgccggcggcatggccaacaccttccttgccgccctcggcaagaaggtgggcaagtcgctgtgcgagcacgacctggccgacaccgcccgcgagattctggagaaggccaaggcggccggctgcgagatcgtgctgccggtggacgcggtggtggctaaggagttcaaggccaatgccgcgaaccgcgtcgtcagcgtggacgaggtgggcgacgacgagatgatcctcgacgccggtcccgaaaccgtggcggtggtggcgcagaagctcgacggcgccaagaccgtggtctggaacggcccgttcggcgccttcgagatgacgcccttcgacgccgcgacggtggcggttgcccgcgacgtgggcaagcgcacccgcgccggcacgctgctgtcggtagccggcggcggcgacacggtggccgcgctcaaccatgcgggggtcgcgggagacttctcctacgtctccaccgccggcggcgccttcctggaatggttggaaggcaaggccctgccgggtgtcgaggcccttcggcgctga

SEQ ID NO: 108294 - protein, 396 aa, Xanthobacter autotrophicus Py2
MTAFRTLDDADLADKRVLVRVDLNVPMESGRVTDETRLKAILPTIRTITDKGGKAVLLAHFGRPKGRDESQSLAPVAKALEGQLGRKVAFASDCVGEEASSAISRLAAGEVIVLENTRFHAGEEKNAPDFVEALASLGDIYVNDAFSAAHRAHASTEGLARKLPAYAGRSMESELAALTKALEAPVRPVLAVVGGSKVSSKLELLGNLVKKVDILVIAGGMANTFLAALGKKVGKSLCEHDLADTAREILEKAKAAGCEIVLPVDAVVAKEFKANAANRVVSVDEVGDDEMILDAGPETVAVVAQKLDGAKTVVWNGPFGAFEMTPFDAATVAVARDVGKRTRAGTLLSVAGGGDTVAALNHAGVAGDFSYVSTAGGAFLEWLEGKALPGVEALRR

SEQ ID NO: 108295 - DNA, 1185 bp, Flavobacteria bacterium BBFL7
  CDS (1)..(1185): transl_table=11
atgaagacgattaacgatatcaattttaaagataaaaaagctttagtaagagtagactttaatgtaccactcaatgatgattttgaggttacagatacgacacgtatccatgctgcaaaggatacgattattaaaatattagaagatgaaggatctgtaatattaatgtcacatctaggtcgtcctaaaggaaatcaagaagaattctctttgaagcatatcgttgccgctgcgactgacattctaggtgttcaagtgaaatttgtagaagatactataggagatgccgctcaacaagcagctgcaaacctacaaccatgcgaggttcttttattagaaaacttaaggtttcatagtgaagaaactgctggtgattccgctttcgcgaaagcgttatctcaattaggaaatgtatacgtaaatgacgcatttggtactgcacatagagcacatgcctcaactgcaattatcgctcaatactttgaagaaaagtgctttggtcacttaatgacacgagaaatagagagtttaaataaagtattagaaactccagatcaacctgttgtagccatattaggtggtgcaaaagtttcatctaagattacagttattgaaaatatattagataaagtagatgatttaatcatcgctggtggtatggcttatacttttattaaagcacaaggtggtaaaataggtgattctctatgtgaggatgataaaatgggactagctttagaaattcttgaaaaagctaaatcaaaaaacacaaatattcatttacctgtagacgctattactgcagacgccttttctgagcatgcaacgatggataacgccgctatagatgagattcctaatggttggatgggattagatataggtgaaaaatctagatcagaatttcataccgtattaatgcaagctaaaactattctatggaatggtcctgctggtgtatttgaactcgaacctttttcacatggtactatatcactagggaaatctgttgctgcttctactgctgctggagcattttctttagtaggtggtggtgactctgtagctgcagtaaaacaatttggttttgataatcaagtaagctatgtatctactggtggtggtgccatgctagaaatgttagaaggtaaaacacttcctggtattgcagccatattggactaa

SEQ ID NO: 108296 - protein, 394 aa, Flavobacteria bacterium BBFL7
MKTINDINFKDKKALVRVDFNVPLNDDFEVTDTTRIHAAKDTIIKILEDEGSVILMSHLGRPKGNQEEFSLKHIVAAATDILGVQVKFVEDTIGDAAQQAAANLQPCEVLLLENLRFHSEETAGDSAFAKALSQLGNVYVNDAFGTAHRAHASTAIIAQYFEEKCFGHLMTREIESLNKVLETPDQPVVAILGGAKVSSKITVIENILDKVDDLIIAGGMAYTFIKAQGGKIGDSLCEDDKMGLALEILEKAKSKNTNIHLPVDAITADAFSEHATMDNAAIDEIPNGWMGLDIGEKSRSEFHTVLMQAKTILWNGPAGVFELEPFSHGTISLGKSVAASTAAGAFSLVGGGDSVAAVKQFGFDNQVSYVSTGGGAMLEMLEGKTLPGIAAILD

SEQ ID NO: 108297 - DNA, 1182 bp, delta proteobacterium MLMS-1
  CDS (1)..(1182): transl_table=11
gtgaaaaacatcagggacattgatattcgtggcaagagggtgttaatccgggtggattttaacgtgcccatcgacgagcagggcaatatcaccgacgatatccggattcgcggggtgctgcccaccatcaaccacgccctggacgaaaacgccgccgtcattatctgctcccatatggggcggcccaaaggagagcggcggccggaattcagcctggccccggcggccagaaggctctcccgcctgctggacaaagaggtcaagctggccccggactgtgtgggcccggaggtggcagagatggccgcggccctggcccccggcgaggtgctgctgctggaaaacctgcgcttccaccccgaagagcaggccaacgacgaaaaattctcccgtgagctggcggccctggccgaggtctatatcaacgacgcctttgccgtggcccaccgcgcccacgcttcggtggtgggaattccccgcttcgcgccggccaagggggctggttttctgctgcaaaaggagatggattacttccaccgctcggtgggcaatcccatgcggccgctggcggcgatcatcggtggttccaaggtatcgagcaaactcggggccctgaccaacctgatggaccgggtcgacaagatgctcatcggcggggccatggccaacaccttcctgcgcagccaggggcttgatgtgggccgctccaaggtggaagatgatctgctggagaccgcccgcgaactgatcgccaaggcccatgagcggggggttaaactctacctgccggtggattgcatcgtcgctccggaacttgacgccaaggccgaaaccaaaagggtcacctgtcaggagatcccggccacctggatggccctggatatcggcccggccaccaccatgctcttcaccgaggccctggatgacgccaagaccatcatctggaacggccccatgggggtgttcgaagtcgacgccttctcccggggtaccatggccatggtccagacccttacccgctcccatgccctgaccattgtcggcggtggtgataccgacgtggcggtgcaccgggccggcgagtccgccaatatatcctatatctccaccggcggcggcgctttcctgatgctgatggaaggcaagacgctaccgggggtggcaatcctggaggaggggtaa

SEQ ID NO: 108298 - protein, 393 aa, delta proteobacterium MLMS-1
MKNIRDIDIRGKRVLIRVDFNVPIDEQGNITDDIRIRGVLPTINHALDENAAVIICSHMGRPKGERRPEFSLAPAARRLSRLLDKEVKLAPDCVGPEVAEMAAALAPGEVLLLENLRFHPEEQANDEKFSRELAALAEVYINDAFAVAHRAHASVVGIPRFAPAKGAGFLLQKEMDYFHRSVGNPMRPLAAIIGGSKVSSKLGALTNLMDRVDKMLIGGAMANTFLRSQGLDVGRSKVEDDLLETARELIAKAHERGVKLYLPVDCIVAPELDAKAETKRVTCQEIPATWMALDIGPATTMLFTEALDDAKTIIWNGPMGVFEVDAFSRGTMAMVQTLTRSHALTIVGGGDTDVAVHRAGESANISYISTGGGAFLMLMEGKTLPGVAILEEG

SEQ ID NO: 108299 - DNA, 1188 bp, Rickettsiella grylli
  CDS (1)..(1188): transl_table=11
atgtattttacacagttagacgatttagggttgaaaaacaaacgggttcttatacgagaagattttaatgtccctttagataatggcaaaattacgagtgatgcacgtatacgagcagcgttacccactattcaatatgccttaaaaaaaggggcagcggtcattttactttcccatttagatagacctcctgaaggtaacatgacgcctgaattttctttagcgcctatcgcagtacggttaggccagcttttgggacaacccgttcgatttatcacccactggctcgatggatttgagattacacctggagaagtagttttatgtgaaaatgtgaggtttcagcgtggcgaaaagaaaaacgatcccattttagccaagaaaattgcacaattaggcgatatttttgttatggatgcatttgcaacagcgcatcgtgttgaagcgtccaccgtgggtgctgcccagttttcaccccaagtttgtgctggatttttgctaacatcggaattaaatgcgttgagtgtagggttggaaaatccttcaaggcccttattagcgattgtcgggggatcaaaagtttcgactaaattaacgctgttatcttctttactcaataaagtaaattttttaatgctgggtggaggaatcgcgaatacttttttagtggctcaaggttattttataggccgatcgctctatgaaccagcgcaggttcatagagcaaaaagacttttagatttatcgaaaacattgcacgtaaaaatcatattacctactgatgtaattgtggcgaatgaaatttcaaatcatgcaaaaaccgcgattagaaaggtaacccacattaaaaatgaagaaatgattttggatattggacctgaatcaatgaagcagtataccgattatgtaaaccggtcagcttctattttatggaatggtccccttggagcttttgaatggacaccctttcagcagggaacgcgttgtgtcagcgaagccattgcgaatagccccgcgttttctatcgccgggggtggcgataccttggcagcgattgaaaaatatggcgttgctcataaactttcttatatctctacaggaggaggcgcttttcttgagtttttggaaggaaaaacgttacctattctcactattttgcacaaacggcagaaggaaaaacaacgatga

SEQ ID NO: 108300 - protein, 395 aa, Rickettsiella grylli
MYFTQLDDLGLKNKRVLIREDFNVPLDNGKITSDARIRAALPTIQYALKKGAAVILLSHLDRPPEGNMTPEFSLAPIAVRLGQLLGQPVRFITHWLDGFEITPGEVVLCENVRFQRGEKKNDPILAKKIAQLGDIFVMDAFATAHRVEASTVGAAQFSPQVCAGFLLTSELNALSVGLENPSRPLLAIVGGSKVSTKLTLLSSLLNKVNFLMLGGGIANTFLVAQGYFIGRSLYEPAQVHRAKRLLDLSKTLHVKIILPTDVIVANEISNHAKTAIRKVTHIKNEEMILDIGPESMKQYTDYVNRSASILWNGPLGAFEWTPFQQGTRCVSEAIANSPAFSIAGGGDTLAAIEKYGVAHKLSYISTGGGAFLEFLEGKTLPILTILHKRQKEKQR

SEQ ID NO: 108301 - DNA, 1161 bp, Oceanobacter sp. RED65
  CDS (1)..(1161): transl_table=11
atgagcgtattacgcatgctagaccaagacctgaagggcaagcgcgttcttattcgcgaagacctaaacgtgccagtaaaagacggtaaggttacatccgatgcgcgactacgtgcttctatgcccactattaagcatgctcttgaagcgggtgccaaagtgattgttatgtcgcaccttggtcgtccgacagaaggtgaatatgccgaagagttttccatgcagcccgtggccaattacttagcggacgcgttaggcaaagacgttcctgtagtgaaagacttccgcgaaggcgttgatgttgctgaaggtgagcttgtattgctagaaaatgtgcgcttcaacaaaggtgaaaagaaagacgaagatgacttagcaaaagcctatgctgagctttgtgatgtgttcgttatggatgcgttcggtacagcacaccgtgcacaagcttctactcatggtgtggccaagtttgcgcctgtggcctgtgcaggtcctttgttggcggctgagctggatgcactgggtaaggcgttagataagccagagcgtccgttggtggcaattgttggtggttcaaaggtatcaacaaaactagaggttttagaaagcctttctgatatctgtgatcagattattgttggcggcggtattgccaataccttcctagctgctgcgggcaagccagtgggtaaatctctgtgtgaagaagatttgatcccaaatgccaaagcgcttatggaaaaagtcagcattccagtaccgaccgatgtggtatgtggtaaagagttctctgagtcagcagaagcgacgttaaaagatgcagctgatgtggccgaagacgatatgatttttgatattggccctgattctgcaaaagcgttagcagagcagttgaaagaagcgaagaccatcatttggaatggccctgtgggtgtattcgaatttgatcaatttggtgaaggtaccaaagcactgtcattggccattgccgaaagccaaggtttctccatcgcaggtggtggcgatacattagcggctgtggataagtatgagatcgccgataaggtatcttatatttcaactggtggcggagcgttccttgagtttgttgaaggtaagacgctacctgcggtagcgatccttgagcaacgcgctaaataa

SEQ ID NO: 108302 - protein, 386 aa, Oceanobacter sp. RED65
MSVLRMLDQDLKGKRVLIREDLNVPVKDGKVTSDARLRASMPTIKHALEAGAKVIVMSHLGRPTEGEYAEEFSMQPVANYLADALGKDVPVVKDFREGVDVAEGELVLLENVRFNKGEKKDEDDLAKAYAELCDVFVMDAFGTAHRAQASTHGVAKFAPVACAGPLLAAELDALGKALDKPERPLVAIVGGSKVSTKLEVLESLSDICDQIIVGGGIANTFLAAAGKPVGKSLCEEDLIPNAKALMEKVSIPVPTDVVCGKEFSESAEATLKDAADVAEDDMIFDIGPDSAKALAEQLKEAKTIIWNGPVGVFEFDQFGEGTKALSLAIAESQGFSIAGGGDTLAAVDKYEIADKVSYISTGGGAFLEFVEGKTLPAVAILEQRAK

SEQ ID NO: 108303 - DNA, 1176 bp, Alteromonadales bacterium TW-7
  CDS (1)..(1176): transl_table=11
atgtcggtcataaaaatggcagatttagatttaaacggcaaacgcgtattaattcgtgaagatttaaatgtaccagttaaagcaggtaaagtgacgtcagatgcgcgtattcgtgctgcactacctactattaaattagcccttgagaaaggcgctaaagtaatggttatgtcacaccttggccgtcctacggaaggggaatacaacgaagaatattcgctcgcccctgtagctgattacctaaacgatgcgctagcgcaaacagtacgtcttgaaaaagactacttaaatggcgtagatgtagctgataacgaagtggttgtatttgaaaacgtgcgctttaataaaggcgagaagaaaaacgatgaagcgttatcaaaacaacttgcagctttatgtgatgtatacgtaatggatgcctttggtacagctcaccgcgcacaagcgtctactcatggtgttggtttatttgctgatgttgcctgtgcaggcccattactatcggctgaacttgaagcattaggaaaagcacttgataatccagctcgcccattagtggctattgtgggtggttcaaaagtttcgactaaactaactgtactagattcactgtctaaaattgttgaccagctagtaactggcggcggtattgctaatacgtttattgcagctgcaggcaatccggtaggtaaatcactttttgaagctgatttaatggatgaagcaaatcgtttatgtgcagcagcgaaggcaaacgatggtgaaattccagttcctacggatgtagtggtaggtaatgaattttcagagtcagcagttgctacgcttaaagatgtaagcgaagtgactagcgacgatatgatttttgatattggcccagataccgccagccaacttgctaaaattattgcaaatgcaggcacggtagtatggaatggtcctgtaggtgtatttgagtttgatcagtttggcaacggcacacgtgctattgctcaagcaattgctaattcaaacgcattttcaattgcgggtggcggtgatactttagctgcaattgataaatacggcatagccgataaagtttcttacatttctaccggtggtggtgcgttcttagagtttttagaaggcaaaaaacttccagcagtagaaatgctagagtcacgcgctaaataa

SEQ ID NO: 108304 - protein, 391 aa, Alteromonadales bacterium TW-7
MSVIKMADLDLNGKRVLIREDLNVPVKAGKVTSDARIRAALPTIKLALEKGAKVMVMSHLGRPTEGEYNEEYSLAPVADYLNDALAQTVRLEKDYLNGVDVADNEVVVFENVRFNKGEKKNDEALSKQLAALCDVYVMDAFGTAHRAQASTHGVGLFADVACAGPLLSAELEALGKALDNPARPLVAIVGGSKVSTKLTVLDSLSKIVDQLVTGGGIANTFIAAAGNPVGKSLFEADLMDEANRLCAAAKANDGEIPVPTDVVVGNEFSESAVATLKDVSEVTSDDMIFDIGPDTASQLAKIIANAGTVVWNGPVGVFEFDQFGNGTRAIAQAIANSNAFSIAGGGDTLAAIDKYGIADKVSYISTGGGAFLEFLEGKKLPAVEMLESRAK

SEQ ID NO: 108305 - DNA, 1149 bp, marine gamma proteobacterium HTCC2143
  CDS (1)..(1149): transl_table=11
atgaccgatctcgatttggccggtaagcgtgttttaattcgtgaagatctcaatgtgccgattaaggatgggcacgttagtagtgatgcacggatccgtgcagcattaccaactattgagcatgcactgcaatgtggagccaaggttatgctgatgtcacatctgggcagacctaccgagggcgactatgagtcgcagttctctctgcagcctgttgcagaccagttgggtcggttattagggcgctcgattcccctgattagtgactggggaaatggcatagagatgtctgatggcgatctaatattgctggaaaatgtacgatttaatgtgggggagaaaaaagataatgaaaatttatctaaagcttatgcggccctctgtgatgtttttgtgatggatgcttttggcactgctcacagggctcaggcatcaacccatggggttgcaaagtttgcgcctgttgcctgcgcaggcccattgctgactaaggagcttgatgcgctgtcaaaagtattggcaaaaccagcaagaccaatggttgctgtcgtcggtggatcgaaagtgtcgaccaagctggcggtgcttgaaacactggctgatattgttgaccagctcattgtcggtggcgggattgccaatacgtttttagctgccagcggtaaacctgtcggtaaatctttgtgtgagcatgatttattaggacaggcgaagagcctgatggccaaaacggaaatccctattccgcaagacgttattacggcaaaagaatttgcggaaactgcagcggcagagttgaaatccgccaacgatgttgctgacgatgacatgatttttgatattggtccgcaagcgtctgaggatattgcaaaaatcctcgaagaagccaaaacgattttgtggaatggtcccgttggcgttttcgagtttgaccagtttggtaatggaacaaaatctttgagtgaggcgattgccaatagcgatgcattttctgtggccggtggcggtgatacgctcgcagctattgataaatatggtattgccgataaagtgtcctatatttcaacgggggggggcgcttttttagaatacgttgaaggtaaggtgttacccgcagttgcgatattggagttgcgagccaaaggataa

SEQ ID NO: 108306 - protein, 382 aa, marine gamma proteobacterium HTCC2143
MTDLDLAGKRVLIREDLNVPIKDGHVSSDARIRAALPTIEHALQCGAKVMLMSHLGRPTEGDYESQFSLQPVADQLGRLLGRSIPLISDWGNGIEMSDGDLILLENVRFNVGEKKDNENLSKAYAALCDVFVMDAFGTAHRAQASTHGVAKFAPVACAGPLLTKELDALSKVLAKPARPMVAVVGGSKVSTKLAVLETLADIVDQLIVGGGIANTFLAASGKPVGKSLCEHDLLGQAKSLMAKTEIPIPQDVITAKEFAETAAAELKSANDVADDDMIFDIGPQASEDIAKILEEAKTILWNGPVGVFEFDQFGNGTKSLSEAIANSDAFSVAGGGDTLAAIDKYGIADKVSYISTGGGAFLEYVEGKVLPAVAILELRAKG

SEQ ID NO: 108307 - DNA, 1167 bp, Marinobacter sp. ELB17
  CDS (1)..(1167): transl_table=11
atggccatcaaaaaaatgaccaacctgaatctggcaggaaagcgcgtactgattcgcgaagacctgaacgtaccgctgaaaaacggccgcattaccagcgacgcccgcatccgcgccgcgttgcccaccattaaagcggccgcaagcgccggcgccaaagtcatgctgatgtcgcacctgggccgtccggaagaaggcgtgtacgaccaagccgcttcccttaagcctgtggctgagcacctgagtgacgccctgggccagaacgtacgcctgatcaaagactacctgaacggcgaagacctacacctggccgacggcgacgtggtgctgttcgagaacgtgcgcttcaacaaaggcgaaaagaaagacgacgaagccctggccaaacaatacgccgcgctttgcgatatttacgtgatggacgccttcggcaccgcccaccgcgcccaggcgtctacccacggcgtcggcaagtttgcccccgaagcctgcgccggcccgctgctggcgggtgagctggaagctttgggtaaagccctggataacccggcccggccggtggttgccattgttggcggttccaaagtctccaccaaactggacgtactcaacgccctggaaaaagtctgtgaccagattatcgtcggtggtggcatagccaacaccttcctggccgctgcaggttatccagtcggcaagtccctgtgcgagcacgacctgctggatgttgcaaaaaacatagcctcccgcgttgaaatcccgctgccggttgacgtagtggttgccagcgagttctctgaaaccgcgactgccaccatccgcaacatttcagacgtgaccgaagatgacatgattctggacgtaggccccgaaaccgccggccagtttgccgagctgctgaaaaacgccaaaaccattttatggaacggcccggtgggtgtgtttgaattcggcccgtttgaaaacggcaccaaagtgctggcccacgccattgccgacagcgcagcattttcactcgccggcggtggtgataccgtggcggccattgacaagtacggtgtaaatgagaagatttcttatatctcaaccggtgggggtgcttttcttgaattcgtagaaggcaaaaccctgcccgcagtcgccatgctggaagagcgtggcgcgtaa

SEQ ID NO: 108308 - protein, 388 aa, Marinobacter sp. ELB17
MAIKKMTNLNLAGKRVLIREDLNVPLKNGRITSDARIRAALPTIKAAASAGAKVMLMSHLGRPEEGVYDQAASLKPVAEHLSDALGQNVRLIKDYLNGEDLHLADGDVVLFENVRFNKGEKKDDEALAKQYAALCDIYVMDAFGTAHRAQASTHGVGKFAPEACAGPLLAGELEALGKALDNPARPVVAIVGGSKVSTKLDVLNALEKVCDQIIVGGGIANTFLAAAGYPVGKSLCEHDLLDVAKNIASRVEIPLPVDVVVASEFSETATATIRNISDVTEDDMILDVGPETAGQFAELLKNAKTILWNGPVGVFEFGPFENGTKVLAHAIADSAAFSLAGGGDTVAAIDKYGVNEKISYISTGGGAFLEFVEGKTLPAVAMLEERGA

SEQ ID NO: 108309 - DNA, 1248 bp, Halocynthia roretzi
  CDS (1)..(1248)
atgtcgttgaataagttagcgatcgattctttggatgtcaaggaaaaaagagttttgataagagttgattttaacgtccctctcaaagatggaaccataacgaataatcaacgcattgtagccgcccttccctcgataaaatattgtctggaaaatggagcgaaatctgttgtgttgatgagtcatctgggaagacccgatggtcgtaaacaggacaagtattccatggccccggtcgcaaaagaattgcaaaagcttctcatgatcaatgtgattgctctgcctgactgtattggcaaggaagttgaggaagcctgtaagaaccccgtgcatggctcggtcatactgcttgaaaacctgcggttccatgtggaagaagaaggaaagggagtcgacgagcatggaaataaggtcaaggcattggaaacaagagttaaagaatttcgagaaagtctttccaaactcggcgatatttatgtcaacgacgcttttggaaccgcgcacagggcgcatagctccatggtcggcataaaccatgagaaaagagctgctgggtttttactaaaaaagggactgtcctacttcagtaaagccctcgaaaatcctgaaaaacctttcttggcaattctaggaggtgcaaaagtcaaggataagatccaattaattaagaacatgctcgataaagttgatgaaatgatcatcggtggagggatggccttcactttccttaaagttattaacggcatggcgataggcggttccttatacgatgaagacggcgcaaaaattgtgcaaaaactaatggatgaagctaaggaaaaaatcgttaagatgcacttgccagtcgattttgtgacgggtgacaaatttagcgacgatgccaaagtcggtgcagccacagtaggaagtggcattccagaaggatggcttggcctggatgttgggccggagagctgcaagcttttcgcagaggttatcaaaagagcaaaggtaattgtttggaatggaccgcccggtgtttttgagattaagagctttgctagcggtacaaaatttgtgatggatgaagttgttgctgtgacaaagaaaggatgcacgacaataatcggtggtggtgacacggcgacttgctgtgccaaatggaacacggaagataaggtcagccatgttagtactggtggaggtgctagcttggagcttttggaagggaaaaacctgcctggcgtggcagctttaactcaatcatga

SEQ ID NO: 108310 - protein, 415 aa, Halocynthia roretzi
MSLNKLAIDSLDVKEKRVLIRVDFNVPLKDGTITNNQRIVAALPSIKYCLENGAKSVVLMSHLGRPDGRKQDKYSMAPVAKELQKLLMINVIALPDCIGKEVEEACKNPVHGSVILLENLRFHVEEEGKGVDEHGNKVKALETRVKEFRESLSKLGDIYVNDAFGTAHRAHSSMVGINHEKRAAGFLLKKGLSYFSKALENPEKPFLAILGGAKVKDKIQLIKNMLDKVDEMIIGGGMAFTFLKVINGMAIGGSLYDEDGAKIVQKLMDEAKEKIVKMHLPVDFVTGDKFSDDAKVGAATVGSGIPEGWLGLDVGPESCKLFAEVIKRAKVIVWNGPPGVFEIKSFASGTKFVMDEVVAVTKKGCTTIIGGGDTATCCAKWNTEDKVSHVSTGGGASLELLEGKNLPGVAALTQS

SEQ ID NO: 108311 - DNA, 1206 bp, Helianthus annuus
  CDS (1)..(1206)
atggccaccaaaaagagtgttagtagcttaacagaaggagatctgaaggggaaacgagtgttcgttagggttgatctgaacgtaccgttggatgataccttcaaaatcaccgatgatactcgcatccgtgctgctgttcctaccatcaagtacttgatgtctcatggcgctagagtcatcctttcttctcatctgggacgtccaaagggtgtaacaccaaagttcagcctgaagccactagtgccaagactctcagagcttcttggaatcgaggtcaagatggcagacgactgcatcggaccagatgttgagaaactggttgctgaaatcccagaggggggtgttctacttctcgaaaacgtaaggttctataaagaagaagagaaaaacgacccagaattcgcaaagaaattagcatccctagccgacctgtacgtcaacgatgcatttggcaccgcacacagagcccatgcgtctaccgagggtgtcgcaaagcatttgaaacccgctgttgctggtttccttgtgcaaaaggagcttgactaccttgttggagctgtatcaaaccctaagaagccatttgccgcgatcgttggcggctcaaaggtgtctagtaaaatcggtgttatcgagtcactattagaaaaggtcgacatccttgttctcggtggaggaatgatatttacgttctacaaagcacaagggctagctgtcggttcttcactagtcgaagaagataaacttgatcttgcaacaacccttcttgaaaaggccaaatctaaaggagtgtctcttttactcccctctgatgttgtcatcgctgacaagttcgctgctgatgcaaacagcaagattgttccagcatctagcattccagacggatggatgggattggatatcggaccagattccatcaagtcgtttagcgaagctttggacaccaccaagactgtcatctggaacggacccatgggtgtgttcgagtttgacaaatttgccgtaggcacagaggctattgcaaagaagctagcagagcttagcgggaagggtgtgacaaccatcattggaggcggtgattctgttgcggcggttgagaaagttggactagctgacaagatgagtcacatatcaaccggtggtggtgctagtttggagcttctagaaggtaagccgcttcccggtgtgcctgcgttggatgaagcttga

SEQ ID NO: 108312 - protein, 401 aa, Helianthus annuus
MATKKSVSSLTEGDLKGKRVFVRVDLNVPLDDTFKITDDTRIRAAVPTIKYLMSHGARVILSSHLGRPKGVTPKFSLKPLVPRLSELLGIEVKMADDCIGPDVEKLVAEIPEGGVLLLENVRFYKEEEKNDPEFAKKLASLADLYVNDAFGTAHRAHASTEGVAKHLKPAVAGFLVQKELDYLVGAVSNPKKPFAAIVGGSKVSSKIGVIESLLEKVDILVLGGGMIFTFYKAQGLAVGSSLVEEDKLDLATTLLEKAKSKGVSLLLPSDVVIADKFAADANSKIVPASSIPDGWMGLDIGPDSIKSFSEALDTTKTVIWNGPMGVFEFDKFAVGTEAIAKKLAELSGKGVTTIIGGGDSVAAVEKVGLADKMSHISTGGGASLELLEGKPLPGVPALDEA

SEQ ID NO: 108313 - DNA, 1449 bp, Solanum tuberosum
  CDS (1)..(1449)
atggcatcagctactgcttcccacactttctgcggcattcccaccacatcatcatcctctaccaccaacaggtctaccacccattcctctgctcgcttcctcctcaaaactcctctccgccgcctcggtttcgccggcgctgtcgctgatcctctcttcaccaaccacgtcgcaacaaagctccgatctctcaaggcctcctccaaccctgttagggccgttgtctccatggccaagaagagcgttggagaccttagctcttccgatttgaagggcaagaaagtcttcgtcagggctgatttgaatgtcccacttgatgatgctcagaacattactgatgacactaggattagagctgccatccctaccatcaaacacttgattgccaatggggctaaagttattctctccagtcacttgggaaggccaaagggagtcactcctaaatacagcttagcaccgcttgtccccaggctatctgaactacttggaatccaggttgtaaaggctgatgattgcattggtccagaagttgagaagttggttgattcacttccagagggcggcgttcttcttcttgagaatgtaagattctacaaggaggaagagaagaacgaacctgagtttgcaaagaaacttgcatcattggcagatctttttgtgaatgatgcctttggtacagctcacagagcacatgcctctacggagggagttactaaatttttgaagccttctgttgcaggtttccttttacaaaaggaattggactatttagttggggcagtttcaactccaaagaggccatttgctgctattgtgggtggttcaaaggtttcatccaagattggagtgattgaatcacttctggagaaatgtgatatattgcttttgggtggaggaatgatctttaccttctacaaggctcagggtctttcagttggttcctccttggttgaggaagacaaactagagcttgcaacatcactcctggaaaaggccaaggcaaaaggagtcagtctcttgttaccatctgatgttgtgattgcagataaatttgctcctgatgccaacagcaagattgtgccggcatctgctatcccagatggttggatggggctagacattggacctgactctatcaagactttcaacgatgctttggataccacaaaaacagtgatctggaatggacctatgggggtgtttgaatttgacaagtttgctactggaacggaggcaattgcaaagaagctagcagacttaagtgggaaaggagtgaccactatcattggaggtggagactctgttgcagcggttgagaaagttggagtggctagcgtgatgagccacatatccactggtggtggtgccagtttggagctacttgaaggaaaggtgctccctggtgtcatagctctagatgaagctgacgcccctgttgcagtgtaa

SEQ ID NO: 108314 - protein, 482 aa, Solanum tuberosum
MASATASHTFCGIPTTSSSSTTNRSTTHSSARFLLKTPLRRLGFAGAVADPLFTNHVATKLRSLKASSNPVRAVVSMAKKSVGDLSSSDLKGKKVFVRADLNVPLDDAQNITDDTRIRAAIPTIKHLIANGAKVILSSHLGRPKGVTPKYSLAPLVPRLSELLGIQVVKADDCIGPEVEKLVDSLPEGGVLLLENVRFYKEEEKNEPEFAKKLASLADLFVNDAFGTAHRAHASTEGVTKFLKPSVAGFLLQKELDYLVGAVSTPKRPFAAIVGGSKVSSKIGVIESLLEKCDILLLGGGMIFTFYKAQGLSVGSSLVEEDKLELATSLLEKAKAKGVSLLLPSDVVIADKFAPDANSKIVPASAIPDGWMGLDIGPDSIKTFNDALDTTKTVIWNGPMGVFEFDKFATGTEAIAKKLADLSGKGVTTIIGGGDSVAAVEKVGVASVMSHISTGGGASLELLEGKVLPGVIALDEADAPVAV

SEQ ID NO: 108315 - DNA, 1394 bp, Populus nigra
  CDS (56)..(1261)
tctcaattgaagcccaactcttgacttctttctcttagcgagatttattgaaaaaatggccactaagaagagtgttagcagtttaaaggaaacagatttgaagggaaagagagtgtttgtgagggtagatctgaatgttcctttggatgataactttaatattactgatgatactaggatccgtgctgccgtacccactgtcaagtacttgatggatcatggtgccagagttattctatgctctcacttgggacgcccaaagggtgttacacctaaatacagcttgaagcctcttgtaccaaggctatccgaacttcttggtgttgaggttaagatagcaaatgattgtattggcgaggaagttgagaaattggtggctgagattccaggaggaggtgttgtgcttcttgaaaatgtaaggttccacaaggaggaagagaagaatgaccctgaatttgcaaagaagcttgcttctctagcagaagtctatgtgaatgatgcatttggcactgctcacagagcccatgcttccaccgagggagtggctaaatacttgaagcccgctgttgctggtttccttatgcagaaggaacttgactatcttgttggagctgtggcaaatcccaagaagccatttgctgctattgttggtggctcaaaggtatcatccaagattggagtgattgaatccctcttagagaaggttgacttcctcttcttgggtggaggaatgatctttactttttacaaagcccaagggtactcagttgggtcatcccttgtggaggaagacaagcttgatcttgcaacttcacttattgagaaggccagggtcaagggggtaaaactactgctgcctaccgatgtggttgttgctgacaagtttgcttcagatgccaacagcaaggtggtaccagcttctgagatagcagatggttggatgggtttggatataggacctgattctatcaagacattcagtgaggcattggatacaaccaaaaccattatttggaatggaccaatgggtgtgtttgagttcgagaagtttgcagcaggaactgaggcaatcgcctggaagcttgctgagctcagtggcaagggagtgactaccatcattggaggaggtgactctgttgctgcagtggagaaggttgggctcgctgataagatgagccacatctcaacaggaggtggtgccagcttagagcttcttgaggggaagccgctgcctggagtcctggctcttgacgacgcttaagctggatttttcttttagtgctggtatatgtttggttttgccaccggagtgggctaaatgatagagctgatcttatggaggctgtagagtgaccgaataaatgctcttccaagtatattcaactatgcaatgg

SEQ ID NO: 108316 - protein, 401 aa, Populus nigra
MATKKSVSSLKETDLKGKRVFVRVDLNVPLDDNFNITDDTRIRAAVPTVKYLMDHGARVILCSHLGRPKGVTPKYSLKPLVPRLSELLGVEVKIANDCIGEEVEKLVAEIPGGGVVLLENVRFHKEEEKNDPEFAKKLASLAEVYVNDAFGTAHRAHASTEGVAKYLKPAVAGFLMQKELDYLVGAVANPKKPFAAIVGGSKVSSKIGVIESLLEKVDFLFLGGGMIFTFYKAQGYSVGSSLVEEDKLDLATSLIEKARVKGVKLLLPTDVVVADKFASDANSKVVPASEIADGWMGLDIGPDSIKTFSEALDTTKTIIWNGPMGVFEFEKFAAGTEAIAWKLAELSGKGVTTIIGGGDSVAAVEKVGLADKMSHISTGGGASLELLEGKPLPGVLALDDA

SEQ ID NO: 108317 - DNA, 1802 bp, Populus nigra
  CDS (205)..(1650)
caaaaaccaacacacaccgcccattcattccctccttcgttcttcccgtccacagcttcccccattattttcatctctcactctcactccaaaagatcagagaaagagagcctcgttttcacatccacataacccctcattacctcctcttttccttttagtccacacaacttctctcacgaaacagtccacaaacaccgccaaatggcctctgccacagcaccaacaactctatctctcctcaaaacagccgccgcctccacctccacttctgcccgtgcctcccttctcccagtctccacctctggcctccgcacaaccagcctccgtggtcttggtttctctgctgcagacccattgtttagttctcatgtggtgtccaaaatccgatcttttaagtcaaatggcagagcaccaagagctgtggtgtctatggcaaagaagagtgtgggtgacttgactgctgctgacttgaaagggaagaaagtgtttgttagagctgatttgaatgtgcctcttgatgagaatcagaaaattactgatgataccagaattagagccgctgttcctactattaaatatttgatttcaaaaggggccaaagttattctttctagtcatttgggacgaccaaaaggtgtaactccaaaattcagcttggcacctcttgttccccggttatctgaactccttggaattcaggttgtgaaagctgatgattgcattggtccagaggtagaaaagttggttgcttcacttcccgagggtggtgttcttcttcttgaaaatgtcaggttttacaaggaagaagagaagaacgaacctgaattcgcaaagaagcttgcttccatggcagatctttatgtaaatgatgcatttggaactgcacatagagcacacgcctcaactgagggagtcacgaaattcttgaaaccatctgttgctggtttcctcttgcagaaggagctggactaccttgttggggcagtttcaaacccaaagaggccatttgctgccattgtgggtggttctaaggtctcatcgaagattggagtcattgagtcactcctggagaagtgtgatatcctccttttgggtggaggtatgattttcacattttacaaggctcaaggcctcgcagtaggttcatccttggttgaggaagataagcttgatttggcgaccacactacttgagaaggccaaggcaaaaggagtgtctcttttgctacctagtgatgtggtaattgcagacaagtttgctcctgatgcaaatagcaagactgtgccagcatcagccatcccagatggttggatgggactggatattggaccagaatctgtgaaaacattcagtgaggctttgggaaccacccaaactgtcatctggaatggacccatgggagtgtttgagtttgagaagtttgcgaatggaacagaggccattgcaaagaagcttgctgagcttagtggcaagggagttacaactattattggaggtggagattctgttgcagctgtagaaaaagtaggagttgctgatgtcatgagccacatatcaactggtggtggtgccagcttggagttgttggaagggaaagagctaccaggtgtccttgctcttgacgaagtcgaacgagttgctgtgtaggataatttgatttccccccaatcccgttcccatttccatgtcctcgcttttactgttacgaaagggagatgcaatgttgtagagaagtacgagtcatgctgtacgttgaggttggttaacaagagtgatccaagactttaaataaatagttg

SEQ ID NO: 108318 - protein, 481 aa, Populus nigra
MASATAPTTLSLLKTAAASTSTSARASLLPVSTSGLRTTSLRGLGFSAADPLFSSHVVSKIRSFKSNGRAPRAVVSMAKKSVGDLTAADLKGKKVFVRADLNVPLDENQKITDDTRIRAAVPTIKYLISKGAKVILSSHLGRPKGVTPKFSLAPLVPRLSELLGIQVVKADDCIGPEVEKLVASLPEGGVLLLENVRFYKEEEKNEPEFAKKLASMADLYVNDAFGTAHRAHASTEGVTKFLKPSVAGFLLQKELDYLVGAVSNPKRPFAAIVGGSKVSSKIGVIESLLEKCDILLLGGGMIFTFYKAQGLAVGSSLVEEDKLDLATTLLEKAKAKGVSLLLPSDVVIADKFAPDANSKTVPASAIPDGWMGLDIGPESVKTFSEALGTTQTVIWNGPMGVFEFEKFANGTEAIAKKLAELSGKGVTTIIGGGDSVAAVEKVGVADVMSHISTGGGASLELLEGKELPGVLALDEVERVAV

SEQ ID NO: 108319 - DNA, 1185 bp, Heliobacillus mobilis
  CDS (1)..(1185): transl_table=11
atgaacaagaaaacgatcaaagacatcgatgtcaaagcgaaacgcgtcctcgtgcgcgttgactttaacgttcccgtgaacgatgcgggcgtgatcactgacgatacccgtattcgtgctgcccttccgaccatccaatatctgatccaagcgggggccaaggtgatcttggcctcccattttggtcgtccgaagggaaaagtaaacgacaagtaccgcctgacgccgatcgctggccatctctctgaactgctcaaccgttccgtgaaaaaactggatgactgcatcggccccgacgtggaagctgccgtcaaagaggctcaaccaggcgatgtcatccttttagaaaacgtccgcttctatccggaagaggagaaaaacgatcccgaattctctcgtaagctggcctcgctggctgatgtctatgtgaatgatgcttttggcacggctcaccgggcacacgcttcgacagcaggcgtagcggcttaccttcccgcagtggctggattcttgatggacaaagagatttcgatcatgggcaaagctctcgcccagcccgaacgtccctttgtagccgtcatgggcggtgccaaagtggccgataaaatcgccgtcatcgaaaacctcttgaacaaggtggatacgctgatcatcggcggcggcatggccaacaccttcttctatgccatgaatctcgaagtcgggaaatcgctctgtgaaaaagacaaagccgatacagcccgggaattgctgcagaaagcagaaaaagccggcgtaaagatgatgctgcctgttgacgtggtcattgccgacacgttggcggcaaacgtaccaacagaagtcgttccagtcaatgctatccctgccgataagtcagccttggacatcgggccggagagcgtcaaacagtttgcccaagccctctccgcttcgaaaatggtcctatggaacgggcccatgggcgcttttgaagtggagcccttcgaccgtggcaccatgggcgtggctcaagcgatggtcaatgtgcaaggcacgaccatcatcggcggcggggactcggtcgctgccgtggaaaaagccgggctggccgaaaagatgacccacgtttccaccggcggtggcgcttcgcttgagtttttagaaggacgtgaactgcccggggtagcggctcttttggacgcttaa

SEQ ID NO: 108320 - protein, 394 aa, Heliobacillus mobilis
MNKKTIKDIDVKAKRVLVRVDFNVPVNDAGVITDDTRIRAALPTIQYLIQAGAKVILASHFGRPKGKVNDKYRLTPIAGHLSELLNRSVKKLDDCIGPDVEAAVKEAQPGDVILLENVRFYPEEEKNDPEFSRKLASLADVYVNDAFGTAHRAHASTAGVAAYLPAVAGFLMDKEISIMGKALAQPERPFVAVMGGAKVADKIAVIENLLNKVDTLIIGGGMANTFFYAMNLEVGKSLCEKDKADTARELLQKAEKAGVKMMLPVDVVIADTLAANVPTEVVPVNAIPADKSALDIGPESVKQFAQALSASKMVLWNGPMGAFEVEPFDRGTMGVAQAMVNVQGTTIIGGGDSVAAVEKAGLAEKMTHVSTGGGASLEFLEGRELPGVAALLDA

SEQ ID NO: 108321 - DNA, 1440 bp, Musa acuminata
  CDS (1)..(1440)
atggcttccaccgccgccacctccttctccctcctcccaacctcctcttcccgccggcgagtggcggcggtggtggcgccgtcccggctgactctccggtcgccgtcccggcggttggggttcgctggggtcgcggctgactcgctgctggcggcccacgtggcggccaagatccggacggtggccgggaggagcgggaaagggccccgcggggtggcggtcatggccaagaagagcgtgggggacctcacggctgcggacctcaaggggaagaaggtcttcgtccgggctgatctgaacgtgcccctcgacgaggaccgcaacatcacggacgacaccaggatccgggcggccgttcctaccatcaagcacttgatcagcaacggggccaaagtcatcctctccagccatctgggacgcccgaagggtgtcacgccaaaattcagcttgagccctttagttcctaggctgtctgaactccttggaatcaaggttgagaaagccgatgattgcatcgggccagaagttgaaaaattggtcaatgcactgccagaaggtggtgttctacttctcgaaaatgtgagattctataaagaggaagagaagaatgaacctgaatttgcaaagaagcttgcagcactagctgacctttacgtcaatgatgcctttggaacagcacacagagcgcatgcttcaacagagggtgtgaccaaattcttgaagccttctgttgctggttttcttttgcaaaaggaacttgattaccttgttggtgctgtttcaaaccccaagagaccatttgcggcaattgttggtggctcaaaggtgtcatctaagattggggtgattgagtcactgttggagaagtgtgatatccttcttttgggcggaggaatgatattcacattttacaaagcacaaggtttcccggtgggttcttcattggtagaggatgacaaacttgagcttgcgacatcacttctcgcaaaagccaaagctaagggcgtgtctcttttgttgccaactgatgttgttattgccgataaatttgcacctgatgcacagagcaaggttgtgccggcatctgaaattcctgatggttggatggggttggatgtcggaccagattcagtaaagacattcaacgatgcactagatacaaccaagaccattatttggaatggtcccatgggagttttcgagtttgataagtttgccactggaactgaggcaatcgcaaagaaattggcggaacttagtgggaagggtgtgacaacaatcatcggaggtggagactctgttgctgcagttgagaaagttggagtagctgatgtaatgagtcacatatcaaccggtggcggagctagcttggagttgttggaaggcaaggagcttcccggcgtcgttgcattggatgaagcagttgttgtagccgtatga

SEQ ID NO: 108322 - protein, 479 aa, Musa acuminata
MASTAATSFSLLPTSSSRRRVAAVVAPSRLTLRSPSRRLGFAGVAADSLLAAHVAAKIRTVAGRSGKGPRGVAVMAKKSVGDLTAADLKGKKVFVRADLNVPLDEDRNITDDTRIRAAVPTIKHLISNGAKVILSSHLGRPKGVTPKFSLSPLVPRLSELLGIKVEKADDCIGPEVEKLVNALPEGGVLLLENVRFYKEEEKNEPEFAKKLAALADLYVNDAFGTAHRAHASTEGVTKFLKPSVAGFLLQKELDYLVGAVSNPKRPFAAIVGGSKVSSKIGVIESLLEKCDILLLGGGMIFTFYKAQGFPVGSSLVEDDKLELATSLLAKAKAKGVSLLLPTDVVIADKFAPDAQSKVVPASEIPDGWMGLDVGPDSVKTFNDALDTTKTIIWNGPMGVFEFDKFATGTEAIAKKLAELSGKGVTTIIGGGDSVAAVEKVGVADVMSHISTGGGASLELLEGKELPGVVALDEAVVVAV

SEQ ID NO: 108323 - DNA, 1440 bp, Medicago truncatula
  CDS (1)..(1440)
atggcttcagctacagcccccacaaccatctcactcctccccaccactaaatcctcttccccatccaccactccatgcccctcccgcatccatctctcctcattcctcggcgcccgcccacttcgccgacttgggttcgctgcagctgaccctctgttggcggtgcaggtggcgtcgaaggtgaggacagtaagcgggagaggagtaagaggagtggtgtcaatggcgaagaagagtgtgggagatttgagtggtgctgaattgaagggaaagaaggtttttgtgagagctgacttgaatgttcctcttgatgataatcagaatattactgatgatactaggatccgtgctgctattccaactattaaatatctaattcagaatggtgctaaagttattctttctagtcatttgggaaggccaaagggtgtcactcccaaatacagcttggcacctcttgttcccaggctctccgaactcattggaattgaggttattaaggccgaagacagtattggtccagaagtagagaagttggtagcttctcttccagacggaggagttctacttctagaaaatgtgaggttttacaaggaggaagaaaagaatgatcctgaacatgcaaaaaagcttgccgcacttgcagatctgtatgtgaatgatgcattcggtactgctcacagggcccatgcttcaacagagggagtcactaaatatttgaagccatctgttgctggttttcttttgcaaaaggaacttgactaccttgttggggcagtatcaagcccaaaaaggccatttgctgcaattgtgggtggttccaaggtctcatctaaaattggagtgattgagtcacttctagaaaaagttgacatccttcttctcggtggaggaatgatcttcacattttacaaggcacaaggtcttgcagttggttcatcccttgtagaggaagataagttggagcttgctacaacactaattgctaaagccaaggcaaagggtgtgtcactcttgctgccaagtgatgtggtgattgcagacaaattcgctcctgatgcaaacagccagatcgtgccagcatctgccatccctgatggttggatgggattggacattggtccagattctattaaaacattcaatgaagcattggataccacccaaaccatcatatggaatggaccaatgggagtgtttgagtttgacaagtttgctgttggaacagagtctattgcaaagaagttggccgacctaagtggaaagggggtgacaactattattggaggaggagattctgttgcagctgtggagaaagtaggagttgccgatgtcatgagccacatatccaccggtggtggtgcaagtttggagctattggaaggcaaagagcttccaggtgtccttgcccttgatgaagccacaccagtcgccgtgtaa

SEQ ID NO: 108324 - protein, 479 aa, Medicago truncatula
MASATAPTTISLLPTTKSSSPSTTPCPSRIHLSSFLGARPLRRLGFAAADPLLAVQVASKVRTVSGRGVRGVVSMAKKSVGDLSGAELKGKKVFVRADLNVPLDDNQNITDDTRIRAAIPTIKYLIQNGAKVILSSHLGRPKGVTPKYSLAPLVPRLSELIGIEVIKAEDSIGPEVEKLVASLPDGGVLLLENVRFYKEEEKNDPEHAKKLAALADLYVNDAFGTAHRAHASTEGVTKYLKPSVAGFLLQKELDYLVGAVSSPKRPFAAIVGGSKVSSKIGVIESLLEKVDILLLGGGMIFTFYKAQGLAVGSSLVEEDKLELATTLIAKAKAKGVSLLLPSDVVIADKFAPDANSQIVPASAIPDGWMGLDIGPDSIKTFNEALDTTQTIIWNGPMGVFEFDKFAVGTESIAKKLADLSGKGVTTIIGGGDSVAAVEKVGVADVMSHISTGGGASLELLEGKELPGVLALDEATPVAV

SEQ ID NO: 108325 - DNA, 1206 bp, Medicago truncatula
  CDS (1)..(1206)
atggcgacaaaaagaagcgtgggaacattgaaggaaggtgaattgaaaggaaagagggttttcgttagggttgatctaaacgttcctttggatgataatttgaatatcactgatgatactagaatccgtgctgctgttcctactatcaaatacttgactggttatggcgctaaagtcatcctttccagtcacctgggacgtccaaagggtgtaacacctaagtacagtttgaagcctcttgtgccaaggttgtctgaacttcttgaaactcaggttaagatttctgatgactgtattggcgaggaagttgagaagttggttgcacaaattccagaaggtggtgttttgcttctagagaatgtgaggttccacaaggaagaagagaagaatgagcctgaattcgcaaagaagttggcttctcttgctgatctttacgtgaatgatgcttttggcactgcccatagagctcatgcttctacagaaggtgtcgctaaatacttgaagccctctgttgcaggattccttatgcagaaggagcttgactatctagttggagccgtgtcgaaccccaagaaaccatttgctgctattgttggtggttcaaaggtgtcttccaagattggagttattgaatccttgttggagaaagttgacattctcttgcttggtggaggaatgatttataccttttacaaggctcagggttattccattgggtcctctcttgtggaggaagacaagcttgatcttgcaacttcactaatggaaaaagccaaggcaaaaggagtttcccttttgcttccaactgatgtggtcatcgctgacaagttttctgccgatgctaacgacaagattgtgccagcatcaagtatccctgacggatggatgggattggatattggacctgattccatcaaaaccttcaatgaagcattggacaagagtcagaccatcatatggaatggaccaatgggtgtttttgaatttgacaagtttgcagcaggaacagaggccattgccaagaaattggccgaggtaagtggcaagggagtaacaaccatcattggaggtggtgactctgtagcagccgtcgagaaggttggactggcagacaagatgagtcacatctcaactggtggaggtgccagcttagagcttcttgaggggaagccactccccggagtccttgctcttgatgatgcttaa

SEQ ID NO: 108326 - protein, 401 aa, Medicago truncatula
MATKRSVGTLKEGELKGKRVFVRVDLNVPLDDNLNITDDTRIRAAVPTIKYLTGYGAKVILSSHLGRPKGVTPKYSLKPLVPRLSELLETQVKISDDCIGEEVEKLVAQIPEGGVLLLENVRFHKEEEKNEPEFAKKLASLADLYVNDAFGTAHRAHASTEGVAKYLKPSVAGFLMQKELDYLVGAVSNPKKPFAAIVGGSKVSSKIGVIESLLEKVDILLLGGGMIYTFYKAQGYSIGSSLVEEDKLDLATSLMEKAKAKGVSLLLPTDVVIADKFSADANDKIVPASSIPDGWMGLDIGPDSIKTFNEALDKSQTIIWNGPMGVFEFDKFAAGTEAIAKKLAEVSGKGVTTIIGGGDSVAAVEKVGLADKMSHISTGGGASLELLEGKPLPGVLALDDA

SEQ ID NO: 108327 - DNA, 1248 bp, Candida boidinii
  CDS (1)..(1248)
atgtctttatcaagcaaattatctgtcaaagatctcgactgtaccggtaagagagtcttcatccgtgttgatttcaacgttccattagatggtgataaaatcacaaacaatcaaagaattgttgctgctttaccaaccattaaatacgttttagaacaaaaaccaaaagctattatcttggcttctcatctcggtagaccaaatggtgaagttaacccaaaattctctttaaaaccagttgctgctgaattagaatctttattaggtgaaaaagttgaattcttaaaggactgtgttggtccagaagttgaatctgctgttaacagtgctgctccaggttccgttattcttttagaaaatttacgtttccatatcgaagaagaaggttctgccaagaaggatggtgttaaagtcaaagctgataaagccgatgttgaaaaattcagaaaacaattaacttcattagctgatgtttacgttaacgatgcctttggtactgcccacagagctcactcttcaatggttggtttcgaattaccacaaagagccgctggtttcttaatggctaaagaattagaatatttcgctaaggccttagaaaacccagtcagaccattcttagccatcttaggtggtgctaaagtttctgataagattcaattaatcgataacttattagataaagttgatatcttaatcattggtggtggtatggctttcaccttcaacaaaattgctcaaaatatggaaattggtaagtctttattcgatgaagctggtgccgctaccgttccagatttattagctaaggctaagaaaaacaatgttaaaatcgttttaccagttgatttcgttactgctgataaattcgatgctgcagctaacaccggttacgctaccgttgaacaaggtatcccagctgaatggcaaggtttagattgtggtgaaaaatctattaaattatttactgaaaccattggtgaagctaaaaccattgtttggaatggtccaccaggtgtctttgaattcgaaaaattcgctaaaggtactcacgccatgttagatgcttgtgttaaatcatgtgctgctggtaataccgttatcattggtggtggtgataccgctaccgtcgcaaagaaattcggtggtgctgataaattatcccatgtttctactggtggtggtgcctcattagagttattagaaggtaaagaacttccaggtgttgttttcttatcaaacaaataa

SEQ ID NO: 108328 - protein, 415 aa, Candida boidinii
MSLSSKLSVKDLDCTGKRVFIRVDFNVPLDGDKITNNQRIVAALPTIKYVLEQKPKAIILASHLGRPNGEVNPKFSLKPVAAELESLLGEKVEFLKDCVGPEVESAVNSAAPGSVILLENLRFHIEEEGSAKKDGVKVKADKADVEKFRKQLTSLADVYVNDAFGTAHRAHSSMVGFELPQRAAGFLMAKELEYFAKALENPVRPFLAILGGAKVSDKIQLIDNLLDKVDILIIGGGMAFTFNKIAQNMEIGKSLFDEAGAATVPDLLAKAKKNNVKIVLPVDFVTADKFDAAANTGYATVEQGIPAEWQGLDCGEKSIKLFTETIGEAKTIVWNGPPGVFEFEKFAKGTHAMLDACVKSCAAGNTVIIGGGDTATVAKKFGGADKLSHVSTGGGASLELLEGKELPGVVFLSNK

SEQ ID NO: 108329 - DNA, 1480 bp, Populus tremuloides
  CDS (63)..(1268)
cacattctcacctaaagcccaagtctttgttctcctctctcgcttcgatttggttttgaaaaatggctactaagaagagtgttagcagtttaaaggaagcagatttgaagggaaaaagagtttttgtaagagtagatctgaatgttcctttggatgataactttaatattaccgatgatactaggatccgtgctgctgtccccactatcaagtacttgatgggtcatggcgccagagttattctttcctctcacttgggacgcccaaagggtgtcacacctaaatacagcttgaagcctcttgtaccaaggctatctgaacttcttggtgttgatgttaagatggcaaatgattgtattggtgtggaggttgagaaaattgtggctgagattccagaagggggtgttttgctccttgaaaatgtaaggttttataaggaggaagagaagaatgaccctgaatttgcaaagaagctcgcttctctagcagaaatctatgtgaatgatgcattcggcactgctcacagagcccatgcttccactgagggcgtggctaaatacttgaagcctgctgttgctggtttccttatgcagaaggaactcgattatcttgttggagctgtggcaaatcccaaaaagccatttgctgcaattgttggtggctcaaaggtatcttctaagattggagttatcgaatcactcttggagaaggttgacctcctcttcttgggtggaggaatgatctatactttttacaaagcacaagggcactcagttgggtcctcccttgttgaggaagacaagcttgatcttgcaacttcacttattgagaaggccaaggtcaagggggtaaaactgctgctgcctgcagatgtggttgttgctgacaagtttgctccagatgccaacagcaaggtggtcgcagcttctgagataccagatggctggatgggtttggacataggacctgattccatcaagacattcaacgaggcattggatacaaccaagaccattatttggaatggaccaatgggtgtctttgagttcgagaagtttgcagcgggaactgaggcaattgccaggaagcttgccgagctcagtggcaagggagtgactaccatcattggaggaggtgactctgtggctgctgtggagaaggctggactcgctgacaagatgagccacatctcaacaggaggtggtgccagcttagagcttctagagggcaaaccattacctggagtcctggctcttgatgatgcttaacccgaaattttcctcgtgttacttcttaagaacatgcgcggtaaatgtttggtattacaatcagagtggactagatgagtgctgatctttgggggctgtagagtgactaaataaatcttctctcaagtatattcaaccatggaatggtttcggattggatcctttccgggttttttttttattattattttgatgatccaaaaaaaaaaaaa

SEQ ID NO: 108330 - protein, 401 aa, Populus tremuloides
MATKKSVSSLKEADLKGKRVFVRVDLNVPLDDNFNITDDTRIRAAVPTIKYLMGHGARVILSSHLGRPKGVTPKYSLKPLVPRLSELLGVDVKMANDCIGVEVEKIVAEIPEGGVLLLENVRFYKEEEKNDPEFAKKLASLAEIYVNDAFGTAHRAHASTEGVAKYLKPAVAGFLMQKELDYLVGAVANPKKPFAAIVGGSKVSSKIGVIESLLEKVDLLFLGGGMIYTFYKAQGHSVGSSLVEEDKLDLATSLIEKAKVKGVKLLLPADVVVADKFAPDANSKVVAASEIPDGWMGLDIGPDSIKTFNEALDTTKTIIWNGPMGVFEFEKFAAGTEAIARKLAELSGKGVTTIIGGGDSVAAVEKAGLADKMSHISTGGGASLELLEGKPLPGVLALDDA

SEQ ID NO: 108331 - DNA, 1206 bp, Arabidopsis thaliana
  CDS (1)..(1206)
atggcgacgaagagaagcgttggaactttgaaggaagcggatctgaagggaaagagtgtgttcgtgagggttgatctcaacgttcctttggatgataactctaacatcaccgatgacaccaggattcgtgccgctgttcccaccatcaagtacttgatgggtaatggatctagggttgttctctgcagtcacttgggccgcccaaaaggtgttactcctaagtacagcttaaagcctcttgtgcccagattgtctgaacttcttggtgttgaggttgtaatggcaaatgactctattggtgaggaagtccagaagttggttgcaggactacctgaaggtggtgttttgctcttggagaatgtgaggttctacgccgaggaagagaagaatgatcctgaatttgcaaagaagcttgctgctcttgccgatgtttacgttaatgatgccttcggaactgctcacagagctcatgcttccactgagggagttgccaaatacttgaagccttcagttgctggtttcctcatgcagaaggaacttgattaccttgtcggagctgtggcaaaccccaagaagccttttgctgccattgttggaggctcaaaggtttcaacaaagattggtgtcattgagtctctcttgaacacagttgacatcctccttctcggtggaggtatgatttttactttctacaaggcacaaggactctcagtcggatcttcccttgtggaggaggacaagcttgacttggcaaagtcactcatggagaaagcaaaggccaaaggtgtctctctcttgctcccaaccgatgtggttattgctgacaagtttgctcccgatgctaacagcaagatagtgccagccactgccatccctgatggctggatgggtctagatattggtccagactccatcaagacattcagcgaagctctggacacaaccaaaaccatcatctggaatggtcccatgggtgtgtttgaattcgataagtttgctgctggaactgaggccgtagcaaagcagcttgcagaactaagcggaaagggagtaaccacaatcattggaggaggtgactctgttgctgccgtcgagaaggttggtttggcagacaagatgagccacatctctaccggaggcggtgctagtttggagcttattgagggtaagccacttccaggagtcctcgctctcgacgaagcttga

SEQ ID NO: 108332 - protein, 401 aa, Arabidopsis thaliana
MATKRSVGTLKEADLKGKSVFVRVDLNVPLDDNSNITDDTRIRAAVPTIKYLMGNGSRVVLCSHLGRPKGVTPKYSLKPLVPRLSELLGVEVVMANDSIGEEVQKLVAGLPEGGVLLLENVRFYAEEEKNDPEFAKKLAALADVYVNDAFGTAHRAHASTEGVAKYLKPSVAGFLMQKELDYLVGAVANPKKPFAAIVGGSKVSTKIGVIESLLNTVDILLLGGGMIFTFYKAQGLSVGSSLVEEDKLDLAKSLMEKAKAKGVSLLLPTDVVIADKFAPDANSKIVPATAIPDGWMGLDIGPDSIKTFSEALDTTKTIIWNGPMGVFEFDKFAAGTEAVAKQLAELSGKGVTTIIGGGDSVAAVEKVGLADKMSHISTGGGASLELIEGKPLPGVLALDEA

SEQ ID NO: 108333 - DNA, 1347 bp, Drosophila melanogaster
  CDS (1)..(1347)
atgcttccaattcggcagagtttataccaaagagctcaaactcgatttacaaaattaagatttccaagattttttagcaaagacgattgcaatggaaagcaagtaaagaagttgagcttaaaaaatgtagatgtggctgggaaaagggtttttatgagagtggactttaatgtacccatgaaagatggcaaaataaccaacaaccaacgaattgtttccgcacttcccagtattaaatatgccttggacaagaaatgtaagtccttggttttggcatcccacttggggcgtccggatggcaaaaagaacaaaaagtttagcctggaacccgtggccaaggagctggagagtgtgctgggccagccggttcaattcctggacgactgcgtgggtgatagcaccctgaaagctttgaaggatccctccgacggcactgtgttcctgttggagaatcttcgtttctatgccgaggagacgggcagcagcaaggacgataacaagaagaaggtcaaagcagatcccgcgaaggtgaaggaattccgagccaagttggcgcagctgggcgagatctatgtgaacgatgcctttggaacagcacatcgtccgcatagttccatgatgggcgatggctacaaggtgcgagcggctggtttcctgctggacaaggaactggagtactttgccaaggttctccacgatccggccaagccctttttggccattctgggtggcgccaagatagccgataaaattccactgataacgaacctcctgaacaatgtaacggccatgatcatatccggtggcatggccttcacctttctcaaagtgctcaatggcatggagattggaaagtccctcttcgacgagaagggatccgagttggtcaacgacatagtctgcaaggcgaaggagaaggacgtgaatatactatttccgattgactttgtcatagccaataagatcgacaaggagccggataaagtggaacatgtggatgccacacagggcataccggaggacatgatgggtctggaccacggccaggcatccagtcagatgtttgctggcgctatttgtgcatccaaaaccatcgtctggaacggaccgccaggcttgttcgaaaacgagctattctccaaaggcaccgagtccatgctggaggcagtaatcggggccactaaccgaggagccaccacaatcgttggtggtggggatacggccaccgcttgcttgaagttcggaggcgccgacaaggtctcgcatgtgtccaccggtggaggagcttccctggagttgctggagggtaaggttctgcctggagtggctgccctttcggatgcctaa

SEQ ID NO: 108334 - protein, 448 aa, Drosophila melanogaster
MLPIRQSLYQRAQTRFTKLRFPRFFSKDDCNGKQVKKLSLKNVDVAGKRVFMRVDFNVPMKDGKITNNQRIVSALPSIKYALDKKCKSLVLASHLGRPDGKKNKKFSLEPVAKELESVLGQPVQFLDDCVGDSTLKALKDPSDGTVFLLENLRFYAEETGSSKDDNKKKVKADPAKVKEFRAKLAQLGEIYVNDAFGTAHRPHSSMMGDGYKVRAAGFLLDKELEYFAKVLHDPAKPFLAILGGAKIADKIPLITNLLNNVTAMIISGGMAFTFLKVLNGMEIGKSLFDEKGSELVNDIVCKAKEKDVNILFPIDFVIANKIDKEPDKVEHVDATQGIPEDMMGLDHGQASSQMFAGAICASKTIVWNGPPGLFENELFSKGTESMLEAVIGATNRGATTIVGGGDTATACLKFGGADKVSHVSTGGGASLELLEGKVLPGVAALSDA

SEQ ID NO: 108335 - DNA, 1248 bp, Aedes aegypti
  CDS (1)..(1248)
atggctctcaataaactcagcatcgagaatgttgatttgaagggcaaacgagtttttatgcgtgtggatttcaatgtccctatcaaagagggaaagatcaccagcaaccagcgtatcgtagctgccctggacagtattaaatatgccttggaaaagggtgccaagtccgttgtccttgcctcccaccttggacgtccggacggcaacaagaatgccaaatacaccctagccccggtggccgaggagatgacgaagctgttgggtcgtgatgtgaccttcctgaacgactgtatcggtgctgaggttgaagccgcatgcaaagaccctgcacccggttcgatcattttgttggagaatgtccgattctacgttgaagaggagggcaagggcgttgacgcctccggcaataaggttaaggctgataaggacaaggtcaaggccttccgcgaaagtcttgctaaattgggagatttgtatgtcaacgatgctttcggaactgctcatcgtgcgcatagttccatgatgggtgagggatacgcccagcgtgctgctggtttgttgttgaacaaggaattgcgttacttctcgcaagctctggataacccgccacgaccattccttgccattctgggtggagctaaggttgctgacaaaatccagctcattgaaaatctcctcgacaaggtgaacgaaatgatcattggaggtggaatggcatttacgttccttaaggtattgaacaatatgcaaattggaggatcattgttcgacgaggagggttcaaagaccgttcagaagctggtggacaaagccaaggccaacaacgtgcaactgcatttaccagtggatttcgtaactggcgataaatttgccgaagatgctgccgttggagctgctaccgtcgagagcggaattcccgctggacacatgggtctcgacgttggaccgaagtctcgtgaggcattcgctgctccgattgcccgctccaagatcattgtttggaacggtccacccggcgtttttgagttccccaatttcgccaacggaacgaaagctcttatggatgccgttgtcgctgcaacaaaggcaggcactgtatctattattggcggtggagataccgcttcgtgtcgcgccaagtggggaacagaatctcaggtatcacacgtttctactggtggtggagcgtctttggaactgttggaaggcaaggttctacctggtgtcgacgccttgagcagcgcttaa

SEQ ID NO: 108336 - protein, 415 aa, Aedes aegypti
MALNKLSIENVDLKGKRVFMRVDFNVPIKEGKITSNQRIVAALDSIKYALEKGAKSVVLASHLGRPDGNKNAKYTLAPVAEEMTKLLGRDVTFLNDCIGAEVEAACKDPAPGSIILLENVRFYVEEEGKGVDASGNKVKADKDKVKAFRESLAKLGDLYVNDAFGTAHRAHSSMMGEGYAQRAAGLLLNKELRYFSQALDNPPRPFLAILGGAKVADKIQLIENLLDKVNEMIIGGGMAFTFLKVLNNMQIGGSLFDEEGSKTVQKLVDKAKANNVQLHLPVDFVTGDKFAEDAAVGAATVESGIPAGHMGLDVGPKSREAFAAPIARSKIIVWNGPPGVFEFPNFANGTKALMDAVVAATKAGTVSIIGGGDTASCRAKWGTESQVSHVSTGGGASLELLEGKVLPGVDALSSA

SEQ ID NO: 108337 - DNA, 1248 bp, Aedes aegypti
  CDS (1)..(1248)
atggctctcaataaactcagcatcgagaatgttgatttgaagggcaaacgagtttttatgcgtgtggatttcaatgtccctatcaaagagggaaagatcactagcaaccagcgtatcgtagctgccctggacagtattaaatatgccttggaaaagggtgccaagtccgttgtccttgcctcccaccttggacgtccggacggcaacaagaatgccaaatacaccctagccccggtggccgaggagatgaagaagctgttgggtcgtgatgtgaccttccttaacgactgtatcggtgctgaggttgaagccgcatgcaaagaccctgcaccgggttcgatcattttgttggagaatgtccgattctacgttgaagaggagggcaagggcgttgacgcctccggcaataaggttaaggctgataaggacaaggtcaaggctttccgcgaaagtcttgccaaattgggagatgtgtatgtcaacgatgctttcggaactgctcatcgtgcgcatagttccatgatgggtgagggatacgcccagcgtgctgctggtttgttgttgaacaaggaattgcgttacttctcgcaagctctggataacccgccacgaccattccttgccattctgggtggagctaaggttgctgacaaaatccagctcattgaaaatctcctggacaaggtgaacgaaatgatcattggaggtggaatggcatttacgttccttaaggtattgaacaatatggaaattggaggatcattgttcgacgaggagggttcaaagatcgttcagaagctggtagacaaagccaaggccaacaacgtgcaactgcatttaccagtggatttcgtaactggtgataaatttgccgaagatgctgccgttggagctgctaccgtcgagagcggaattcccgctggacacatgggtctcgacgttggacccaagtctcgtgaagcattcgctgctccgattgcccgctccaagatcattgtttggaacggtccacccggcgtttttgagttccccaatttcgccaacggaacgaaagctcttatggatgccgttgtcgctgcaacaaaggcaggcactgtatctattattggcggtggagataccgcttcgtgttgcgccaagtggggaacagaatctcaggtatcacacgtttctactggtggtggagcgtctttggaactgttggaaggcaaggttctacctggtgtcgacgccttgagcagcgcttaa

SEQ ID NO: 108338 - protein, 415 aa, Aedes aegypti
MALNKLSIENVDLKGKRVFMRVDFNVPIKEGKITSNQRIVAALDSIKYALEKGAKSVVLASHLGRPDGNKNAKYTLAPVAEEMKKLLGRDVTFLNDCIGAEVEAACKDPAPGSIILLENVRFYVEEEGKGVDASGNKVKADKDKVKAFRESLAKLGDVYVNDAFGTAHRAHSSMMGEGYAQRAAGLLLNKELRYFSQALDNPPRPFLAILGGAKVADKIQLIENLLDKVNEMIIGGGMAFTFLKVLNNMEIGGSLFDEEGSKIVQKLVDKAKANNVQLHLPVDFVTGDKFAEDAAVGAATVESGIPAGHMGLDVGPKSREAFAAPIARSKIIVWNGPPGVFEFPNFANGTKALMDAVVAATKAGTVSIIGGGDTASCCAKWGTESQVSHVSTGGGASLELLEGKVLPGVDALSSA

SEQ ID NO: 108339 - DNA, 1248 bp, Aedes aegypti
  CDS (1)..(1248)
atggctctcaataaactcagcatcgagaatgttgatttgaagggcaaacgagtttttatgcgtgtggatttcaatgtccctatcaaagagggaaagatcaccagcaaccagcgtatcgtagctgccctggacagtattaaatatgccttggaaaagggtgccaagtccgttgtccttgcctcccaccttggacgtccggacggcaacaagaatgccaaatacaccctagccccggtggccgaggagatgaagaagctgttgggtcgtgatgtgaccttcctgaacgactgtatcggtgctgaggttgaagccgcatgcaaagaccctgcacccggttcgatcattttgttggagaatgtccgattctacgttgaagaggagggcaagggcgttgacgcctccggcaataaggttaaggctgataaggacaaggtcaaggccttccgcgaaagtcttgctaaattgggagatttgtatgtcaacgatgctttcggaactgctcatcgtgcgcataggtccatgatgggtgagggatacgcccagcgtgctgctggtttgttgttgaacaaggaattgcgttacttctcggaagctctggataacccgccacgaccatcccttgccattctgggtggagctaaggttgctgacaaaatccagctcattgaaaatctcctcgacaaggtgaacgaaatgatcattggaggtggaatggcatttacgttccttaaggtattgaacaatatggaaattggaagatcattgttcgacgaggagggttcaaagatcgttcagaagctggtagacaaagccaaggccaacaacgtgcaactgcatttaccagtggatttcgtaactggcgataaatttgccgaaaatgctgccgttggacctgctaccgtcgagagcggaattcccgctggacacatgggtctcgacgttggaccgaagtctcgtgaggcattcgctgctccgattgcccgctccaagatcattgtttggaacggtccacccggcgtttttgagttccccaatttcgccaacggaacgaaagctcttatggatgccgttgtcgctgcaacaaaggcaggcactgtatctattattggcggtggagataccgcttcgtgtcgcgccaagtggggaacagaatctcaggtatcacacgtttctactggtggtggagcgtctttggaactgttggaaggcaaggttctacctggtgtcgacgccttgagcagcgcttaa

SEQ ID NO: 108340 - protein, 415 aa, Aedes aegypti
MALNKLSIENVDLKGKRVFMRVDFNVPIKEGKITSNQRIVAALDSIKYALEKGAKSVVLASHLGRPDGNKNAKYTLAPVAEEMKKLLGRDVTFLNDCIGAEVEAACKDPAPGSIILLENVRFYVEEEGKGVDASGNKVKADKDKVKAFRESLAKLGDLYVNDAFGTAHRAHRSMMGEGYAQRAAGLLLNKELRYFSEALDNPPRPSLAILGGAKVADKIQLIENLLDKVNEMIIGGGMAFTFLKVLNNMEIGRSLFDEEGSKIVQKLVDKAKANNVQLHLPVDFVTGDKFAENAAVGPATVESGIPAGHMGLDVGPKSREAFAAPIARSKIIVWNGPPGVFEFPNFANGTKALMDAVVAATKAGTVSIIGGGDTASCRAKWGTESQVSHVSTGGGASLELLEGKVLPGVDALSSA

SEQ ID NO: 108341 - DNA, 1501 bp, Pisum sativum
  CDS (61)..(1266)
acgcggggagtgtccgaactccgatctcaaccatccattatttgtgtaaagttgaagaaaatggcgacaaagagaagcgttggaacattgaaggaagctgatttgaagggaaagagggtttttgttagggttgatctaaacgttcctttggatgataacttgaacatcaccgatgataccagaatccgtgctgctattcctaccatcaagtacttgactggttatggtgctaaagtcatcctctcctcccatctgggacgtccaaagggtgtaacacctaagtacagtttgaagccccttgtaccaaggttgtctgaacttcttggatccgaggttacgattgctggtgacagtattggtgaggaggttgagaagttggttgcacaaattccagaaggtggtgttttgcttttagagaatgtgaggttccacaaggaagaggagaagaatgatcctgaatttgccaagaagttggcttcccttgccgatctttatgtgaatgatgcatttggcactgcccatcgtgctcatgcttctacagaaggtgttgctaaatacttgaagccctctgttgcaggattcctcatgcagaaggagcttgattatctagttggagctgtgtcaaaccccaagaaaccgtttgctgccattgttggtggttctaaggtgtcttccaagattggagttattgaatccttgttggagaaggttgacattctcttgcttggtggaggaatggtgtttaccttttacaaagctcaaggttattcagttgggacctctcttgtggaggaagacaagcttggtcttgcaacttcacttattgagaaagccaaggctaaaggagtttcccttttgcttccaactgatgtggttatagctgacaagttttctgctgatgctaacgacaagattgtaccagcatcaagcatccctgatggttggatgggattggatattggacctgattccatcaaaacatttaacgaagcattggacaagagtcaaaccgtaatttggaatgggccaatgggtgtttttgagtttgataagtttgccgcaggaacagaggccatagccaagaaactggcagaaataagtggcaaaggagtaacaaccatcattggaggaggtgactctgtagccgccgtggagaaggctggactagcagacaagatgagccacatctctaccggcggaggtgcgagcttagagcttcttgaggggaagccactacctggagtccttgctcttgatgatgcttaaacatgttgtattttgtgttatattataatggttgggtttcaaccaatgttggtttaattgaggttgtcactaaagagctgctcttttagaaggcttaatataggatagttttcaaaaataaaaatgtttttgcggcatccatggtgcttgatcaaattgttactggataatgttcatttttaaagagtgcttatttagttgttaaagaaaaaaaaaaaaaaaaaaaaaaaaaaaa

SEQ ID NO: 108342 - protein, 401 aa, Pisum sativum
MATKRSVGTLKEADLKGKRVFVRVDLNVPLDDNLNITDDTRIRAAIPTIKYLTGYGAKVILSSHLGRPKGVTPKYSLKPLVPRLSELLGSEVTIAGDSIGEEVEKLVAQIPEGGVLLLENVRFHKEEEKNDPEFAKKLASLADLYVNDAFGTAHRAHASTEGVAKYLKPSVAGFLMQKELDYLVGAVSNPKKPFAAIVGGSKVSSKIGVIESLLEKVDILLLGGGMVFTFYKAQGYSVGTSLVEEDKLGLATSLIEKAKAKGVSLLLPTDVVIADKFSADANDKIVPASSIPDGWMGLDIGPDSIKTFNEALDKSQTVIWNGPMGVFEFDKFAAGTEAIAKKLAEISGKGVTTIIGGGDSVAAVEKAGLADKMSHISTGGGASLELLEGKPLPGVLALDDA

SEQ ID NO: 108343 - DNA, 1350 bp, Phaeodactylum tricornutum
  CDS (1)..(1350)
atgttgttccgtatgttgacttcaacggctttgcggcgttcaccagtaaccaccagcttgacctgttgctgtaaagcaaatgcttttgcagtccgaattcgtagctttcacgctgccccagtgatccaagccaaaatgacggtcgagcaactggcccagcaagtccatatgaaagggaccaatgttctcgtgcgcgttgatttgaatgcccccctggccacggatgatgtaacggtgacggatgacacacgcctgcgcgccattgttccaaccacgaaattcttgctcgagcagggagccaacgtgattctctgcagccattttggccgacccaagggtgaaattatcgaaactggcaagaatggtcggctcaacccagtggtgaagccgctcgaagtactgctggggcagacgattaccaaacttgatgattgcatgggaccggatgttgaagccgcaacgaaaaatttgggtgagggaaaggttgtcttgttggaaaacacccgtttttacagcggagaaaccaagaacgatccggaactcgcagccgggctcggaaaacttgctgattatttcgtcatggacgcctttggcacggctcaccgagcacattcttcgactgccggtgtgaccacccatatgaagttcaacgctgctggaaaacttatggagaaggaattgcaatacttgcaaggtgccgtggaagagcccaaacgccccatgatggctattgtcggtggtgccaaagtatccaccaaaattccggtcatcgaatcgcttttggacaagtgcgatgtcattttgattggcggcggtatgatctttaccttttacaaggctctcggttacgacattggcgcatcgctcgtggaagacgacattgtggaattggcgagttcattgatgaaaaaggccgaagaaaagggtgtcaaactgattctgcctgttgacgttgtcctggctgataagtttgacaatgatgcaaactcggccgtggcgaaggtcaccgacatttccggagactggatgggactggacattggaccggaaacgatcgatttgtttcgtagcgaaattgccgaagccaatacaattgtttggaacggtccgatgggcgtctttgaatttagcaactttgcggctggcaccaacgatgttgcccagatgctcgcccaagccactgccgaacggggcgccgtcaccataattggtggtggcgactctgtggccgccgtcaacaaagcgggtttgggtgacaaggtttctcacatttcgacgggcggtggcgccagtttggagcttctggagggcaaggtattgcccggcgttgcggctttgacagaagtgtaa

SEQ ID NO: 108344 - protein, 449 aa, Phaeodactylum tricornutum
MLFRMLTSTALRRSPVTTSLTCCCKANAFAVRIRSFHAAPVIQAKMTVEQLAQQVHMKGTNVLVRVDLNAPLATDDVTVTDDTRLRAIVPTTKFLLEQGANVILCSHFGRPKGEIIETGKNGRLNPVVKPLEVLLGQTITKLDDCMGPDVEAATKNLGEGKVVLLENTRFYSGETKNDPELAAGLGKLADYFVMDAFGTAHRAHSSTAGVTTHMKFNAAGKLMEKELQYLQGAVEEPKRPMMAIVGGAKVSTKIPVIESLLDKCDVILIGGGMIFTFYKALGYDIGASLVEDDIVELASSLMKKAEEKGVKLILPVDVVLADKFDNDANSAVAKVTDISGDWMGLDIGPETIDLFRSEIAEANTIVWNGPMGVFEFSNFAAGTNDVAQMLAQATAERGAVTIIGGGDSVAAVNKAGLGDKVSHISTGGGASLELLEGKVLPGVAALTEV

SEQ ID NO: 108345 - DNA, 1778 bp, Chlamydomonas reinhardtii
  CDS (7)..(1392)
ccaatcatggccctctctatgaagatgcgcgccaacgcgcgcgtgtccggtcgccgcgtcgccgctgtggccccccgcgtggtgcccttctcgtcggcctccagctccgtgctgcgctctggcttcgcgctgaggtgtctgtggacatccgccgcgtgggccgctctcgcatccgtcgtcgaggcggtgaagaagtcggttggcgacctgcacaaggctgacctggagggcaagcgcgtgttcgtccgcgcggacctgaacgtgcctcttgacaaggccaccctggccatcaccgacgacacccgcattcgcgcggccgtccccaccctgaagtacctgctggacaacggtgctaaggtcctgctgacctcgcacctgggtcgcccgaagggcggtcccgaggacaagtaccgcctgacccccgtggtggcccgcctgtcggagctgctgggcaagcccgtgaccaaggtcgatgactgcatcggccccgaggtggagaaggcggtgggcgccatgaagaacggcgagctgctgctgctggagaactgccgcttctacaaggaggaggagaagaacgagcccgagttcgccaagaagctggccgccaacgccgacctgtacgtgaacgacgcgttcggcactgcccaccgcgcccacgcctccaccgagggtgtgaccaagttcctgaagccctccgtggccggcttcctgctgcagaaggagctggactaccttgatggcgccgtgtccaaccccaagcgccccttcgtggccattgtgggcggctccaaggtgtcctccaagatcaccgtcattgaggcgctgatggagaagtgcgacaagatcatcatcggcggtggcatgatcttcaccttctacaaggcccgcgcgctgaaggtgggctcctcgctggttgaggacgacaagatcgagctggccaagaagctggaggagatggccaaggccaagggtgtgcagctgctgctgcccaccgacgtggtggtggccgacaagttcgacgccaacgccaacacccagaccgtgcccatcaccgccatccccgatggctggatgggtctggacattggcccggactccgtcaagaccttcaacgacgccctggccgacgccaagaccgttgtgtggaacggccccatgggtgtgttcgagtttccccaagttcgccaacgcaccgtgtcgatcgccaacaccctggccggcctgacgcccaagggctgcatcaccatcattggtggcggtgactccgtggctgccgtcgagcaggccggcgttgccgagaagatgagccacatctccaccggcggcggtgcctccctggagctgctggagggcaaggtcctgcccggcgtggccgccctggacgagaagtaaattgctcgcaattgaataagaacagttgccgtgtagtttacgtgtggacagaggttgagatggctctcgggtctggttgttcgggagttgcggagtgtgtttcgggttgttggttttggtcatgacgacttgagtgattgcagaaaggggagtgttccggatccgggggcctcttgtatggggtcatgatttggtgccgacagcgaaacgctgggagccctgggcgtctgggccccggtgctgaatgcgggctgacgccgggggagtgaaagaactcctttaaccgagcgtatcgtgtacatgagagaagagacaagagctttcgctgaggcactctggctccgtagcagggatttgcgctccctgagttttcacggattgccggg

SEQ ID NO: 108346 - protein, 461 aa, Chlamydomonas reinhardtii
MALSMKMRANARVSGRRVAAVAPRVVPFSSASSSVLRSGFALRCLWTSAAWAALASVVEAVKKSVGDLHKADLEGKRVFVRADLNVPLDKATLAITDDTRIRAAVPTLKYLLDNGAKVLLTSHLGRPKGGPEDKYRLTPVVARLSELLGKPVTKVDDCIGPEVEKAVGAMKNGELLLLENCRFYKEEEKNEPEFAKKLAANADLYVNDAFGTAHRAHASTEGVTKFLKPSVAGFLLQKELDYLDGAVSNPKRPFVAIVGGSKVSSKITVIEALMEKCDKIIIGGGMIFTFYKARALKVGSSLVEDDKIELAKKLEEMAKAKGVQLLLPTDVVVADKFDANANTQTVPITAIPDGWMGLDIGPDSVKTFNDALADAKTVVWNGPMGVFEFPQVRQRTVSIANTLAGLTPKGCITIIGGGDSVAAVEQAGVAEKMSHISTGGGASLELLEGKVLPGVAALDEK

SEQ ID NO: 108347 - DNA, 1722 bp, Nicotiana tabacum
  CDS (52)..(1497)
gcacgaggctttttgccgtaagacagaaccgagaagagaagagtgtaaacaatggcatcagctacagcttcccacactttgtgcggcatccccgccacctcatcctctactaccaacaaggctattgccccttcatccgctcgcttcctcgccaaaactcctctccgccgcctcggcttcgctggcgccgccgctgattctctcttcaccaaccacgtggctaccaagctccgatccctcaagagctcctccaagcctattaggggcgttgcttctatggccaagaagagcgttggagacctcaccgctgccgagttgaagggcaagaaagtcttcgtcagggccgatttgaatgtcccacttgatgataaccagaacattactgatgacactagaattagagctgccgtccctactatcaagcacttgatggccaatggtgctaaagttattctctccagtcacctgggacggccaaaaggagtcactcctaaatacagcttggcaccactggtccccaggctatccgaactgcttggaatccaggttgtgaaggttgaggactgcattggtccagaagttgagaagttggttgcttcacttcccgagggtggtgttcttcttctcgagaacgtgagattctacaaggaggaagagaagaacgaacctgagtttgcaaagaaacttgcatcattggcagatctttatgtgaatgatgcattcggtacagctcacagagcacatgcctctacagagggagttactaaatttttgaagccttctgttgcaggtttcctcttacaaaaggaattggactatttagtcggggcggtttcaaatccaaagaggccatttgctgctattgtgggtggttcaaaggtttcatccaagattggagtgatcgaatcacttttagagaaatgtgatatattgcttttgggtggaggaatgatctttaccttctacaaggctcagggtctttcagttggttcctccttggttgaggaagacaaactagaactcgctacatcactcctagagaaggccaaggcgaaaggagtcagtctcttgttaccatctgatgttgtgattgcagataaatttgctcctgatgcaaacagcaagattgtgcctgcatctgctatcccagacggttggatggggttggacattggaccagactctgttaagactttcaacgatgccttggataccacaaaaacagtgatctggaatggacctatgggggtgtttgaatttgacaagtttgctgttggaacagaggcaattgcaaagaagctcgcggacttaagtgggaaaggagtgacgactatcattggaggtggagattctgttgcagctgttgagaaagttggagttgctagcgtgatgagccacatatccactggtggtggtgccagtttggagctactggaaggcaaggtgctccccggtgtcattgctcttgatgaagcagacgcccccgttgctgtgtaaaacaatttgtactaattcttttttctccggggtcaacataatcagtggtaatttccagttaggaagcattgagtcgatgttgtagatttgtcgggttatattgttatataatgtcctttttttaacccatattatttttgtctaaataaagggcgagtatatcagttatagatagctatccttttgatgtctttcaacaaactctatccttgatttggttcagtt

SEQ ID NO: 108348 - protein, 481 aa, Nicotiana tabacum
MASATASHTLCGIPATSSSTTNKAIAPSSARFLAKTPLRRLGFAGAAADSLFTNHVATKLRSLKSSSKPIRGVASMAKKSVGDLTAAELKGKKVFVRADLNVPLDDNQNITDDTRIRAAVPTIKHLMANGAKVILSSHLGRPKGVTPKYSLAPLVPRLSELLGIQVVKVEDCIGPEVEKLVASLPEGGVLLLENVRFYKEEEKNEPEFAKKLASLADLYVNDAFGTAHRAHASTEGVTKFLKPSVAGFLLQKELDYLVGAVSNPKRPFAAIVGGSKVSSKIGVIESLLEKCDILLLGGGMIFTFYKAQGLSVGSSLVEEDKLELATSLLEKAKAKGVSLLLPSDVVIADKFAPDANSKIVPASAIPDGWMGLDIGPDSVKTFNDALDTTKTVIWNGPMGVFEFDKFAVGTEAIAKKLADLSGKGVTTIIGGGDSVAAVEKVGVASVMSHISTGGGASLELLEGKVLPGVIALDEADAPVAV

SEQ ID NO: 108349 - DNA, 2014 bp, Volvox carteri
  CDS (23)..(1411)
gcagttccacacagtaaatacaatggccctctcgatgaagatgcgcgccaacgcgcgtgtggtctctggccgccgcgttgccgctgttgccccgcgcgttgtgcctttctcgtcggtcgcgcgtccagtcctgcgcagcacctttgcccctgaggtctccattgatattcgccgtgctggtcgcagccgcattgttgtcgaggcggttaagaagtcggtcggcgatctcggcaaggctgatttggagggcaagcgcgtcttcgtccgcgccgatctgaacgtgccgcttgataagaagaccctggccattaccgatgacacccgcatccgcgcggcggtcccaaccttgaagtacctgttggacaatggtgccaaggttctcctgacctcgcacctgggccgcccgaagggaggccccgaggacaagtaccgcctcacccctgtggtggcgcgactgtcggagctgctgggcaaggaggtgaagaaggtcgacgactgcattggcccgtccgttgagcaggctgtggcttccctgaagagcggcgagctcctgctgctcgagaacgtccgcttctacaaggaggaggagaagaacgaccccgagttcgccaagaagcttgcctccaacgctgacttgtacgtcaacgacgccttcggcactgcccaccgcgcccacgcctccactgagggtgtcaccaagttcctgaagccctccgtggcaggcttcctgctgcagaaggagctggactacctagacggcgccgtgtccgcccccaagcgccccttcgtggccattgttggaggctctaaggtgtcctccaagatcaccgtcattgagaagctcatggagaagtgcgacaagattatcattggtggtggcatgatcttcaccttctacaaggctcgcggcctgaaggtcggctcctcgctggtcgaggaggacaagctggagctggccaagaacctggaggccattgctaaggccaagggcgtgcagctcctcctgccgtctgacgtcgtggtggcggacaagttcgacgccaacgccaacacacagaccgtcagcgtggaggccatccccgacggctggatgggtctggacatcggccccgactccatcaagacgttccaggatgccctggctgacgccaagactgtcgtctggaacggccccatgggtgtgttcgagttccccaagttcgccgtcggcactgtggccattgccaacactctgtctgagctgacgccaaagggcgccatcaccatcatcggcggtggtgactcggtggccgccgttgagcaggctggtgtggctgagaagatgagccacatttccactggtggcggtgcctctctggagctgctggagggcaaggtcctgccgggcgttgctgctttggatgagaagtaattgcggcttgagtaaggtgtcgacagtcttttcgcgttggttgctgttctttttggaggcgattcgtctcgaggatgtgccccggggaaccgatcctggcgaaagtggctctccttggcgtgagtgtgcacctatctgctgggaggcactgcatgcgggtcggtgtgtgcgttggcgctatggatgtactgtgcggatctgttctgcgacatgctgcgacatgcctgtgctaaaccagaaatggttgggctctagctgaaaaataacatctgtgcggtgctctgcaacggcaatctacggatagttggttgtttttgaattttcggagtttagtaaccggcgacgctgaggtggtcatcgcatgcatttgctttttcgctgtggcataattcgcggttgcaataggaggttcaggaggagaagtgatgtgctgcacgtgtgcacggctctatttttggttggcaaaagcaaaagttttgttatgtttcgttgctttatcggccttgatgaagacatgaaatgtcggctatatgcccgttgtcgcccacagcgctcacttttctcggacctcgggaggtaaaatgttgtgtaacgccaaaaggc

SEQ ID NO: 108350 - protein, 462 aa, Volvox carteri
MALSMKMRANARVVSGRRVAAVAPRVVPFSSVARPVLRSTFAPEVSIDIRRAGRSRIVVEAVKKSVGDLGKADLEGKRVFVRADLNVPLDKKTLAITDDTRIRAAVPTLKYLLDNGAKVLLTSHLGRPKGGPEDKYRLTPVVARLSELLGKEVKKVDDCIGPSVEQAVASLKSGELLLLENVRFYKEEEKNDPEFAKKLASNADLYVNDAFGTAHRAHASTEGVTKFLKPSVAGFLLQKELDYLDGAVSAPKRPFVAIVGGSKVSSKITVIEKLMEKCDKIIIGGGMIFTFYKARGLKVGSSLVEEDKLELAKNLEAIAKAKGVQLLLPSDVVVADKFDANANTQTVSVEAIPDGWMGLDIGPDSIKTFQDALADAKTVVWNGPMGVFEFPKFAVGTVAIANTLSELTPKGAITIIGGGDSVAAVEQAGVAEKMSHISTGGGASLELLEGKVLPGVAALDEK

SEQ ID NO: 108351 - DNA, 1605 bp, Triticum aestivum
  CDS (19)..(1461)
gggccagccccagccccaatggcgtccaccgccgcgccgcccgccgccctcgtcgcccgccgcgccgcgtccgcgtccgtcgccgcgccgctccggggcgcggggctcgcggccgggtgccagccggcgcgctcgctggcgttcgcggccggcgccgacccgcgcctcgcggtccacgtcgcgtcgcgctgccgggcggcgtccgccgcgcgcgggacacgcgccgtcgccaccatggccaagaagagcgtgggcgacctcaccgccgccgacctcgagggcaagcgcgtgctcgtgcgggccgacctcaacgtgccgctcgacgacaaccagaacatcaccgacgacacccgcatccgcgccgccatccccaccatcaagtacctcctcagcaacggcgccaaggtcatcctcaccagccacctgggtcgtcctaagggtgttactcctaagtttagcttggctccccttgtgccccgattatccgagcttcttggcattgaggtgaaaaaagcagaagatgttatcggcccagaagttgagaaattggtggctgacctggcaaatggtgctgttttgctcctggaaaacgtaagattttacaaggaagaggagaagaatgacccagagtttgcaaagaagcttgcgtcactggcagatctgtttgtaaacgatgcattcggaacagcccacagagcacatgcctcgactgagggagttaccaagttcttgaagccttctgttgctggattccttttgcagaaggaacttgactacctggatggagctgtttcaaaccctaagcgcccatttgctgccattgtgggtggctcaaaggtgtcatccaagattggggttatcgaatccctgttggagaagtgtgacatccttcttttgggtggtggtatgatcttcacattttacaaggcacaaggactctcagttggttcttccttggttgaggaagataaacttgagctggcaacatctctccttgcaaaggcaaaggcaaagggtgtctcccttctgttgccatctgacgttatcattgctgataagtttgctcctgatgctaacagtcagaccgtccctgcatctgcaattcctgatggttggatggggctggacattggcccagattcagtcaaaacatttaatgatgccctggacacaacacagacaatcatttggaacggaccaatgggtgtctttgaatttgacaagtttgcagtaggaactgagtctattgcaaagaagttggccgagcttagcaaaaagggtgtgacaactatcattggaggcggagactccgttgcggctgttgagaaggtgggagtggctgatgttatgagccacatctcaactggtggtggcgccagcttggagttgttggaaggaaaggagcttcctggagtcgttgcacttgatgaaggtgtcatgacgaggtcggtgaccgtatgaggctaagcttcatttgttgcatcttaattcctttcatgtaccgttccaaacctgccatgttgtcctccctcttttgctcgtcttcgaccactcgaaatgtaagagaccaatgttttatagagaaatactgggaactgtttgaat

SEQ ID NO: 108352 - protein, 480 aa, Triticum aestivum
MASTAAPPAALVARRAASASVAAPLRGAGLAAGCQPARSLAFAAGADPRLAVHVASRCRAASAARGTRAVATMAKKSVGDLTAADLEGKRVLVRADLNVPLDDNQNITDDTRIRAAIPTIKYLLSNGAKVILTSHLGRPKGVTPKFSLAPLVPRLSELLGIEVKKAEDVIGPEVEKLVADLANGAVLLLENVRFYKEEEKNDPEFAKKLASLADLFVNDAFGTAHRAHASTEGVTKFLKPSVAGFLLQKELDYLDGAVSNPKRPFAAIVGGSKVSSKIGVIESLLEKCDILLLGGGMIFTFYKAQGLSVGSSLVEEDKLELATSLLAKAKAKGVSLLLPSDVIIADKFAPDANSQTVPASAIPDGWMGLDIGPDSVKTFNDALDTTQTIIWNGPMGVFEFDKFAVGTESIAKKLAELSKKGVTTIIGGGDSVAAVEKVGVADVMSHISTGGGASLELLEGKELPGVVALDEGVMTRSVTV

SEQ ID NO: 108353 - DNA, 1965 bp, Thermotoga maritima
  CDS (1)..(1965): transl_table=11
atggaaaaaatgaccataagagatgttgatctgaaaggcaagagagtcataatgagagtggacttcaacgttccagtgaaggatggggtcgttcaggacgacacgagaataagagccgcccttccaacgataaagtacgctcttgaacagggtgcaaaggtgatactcctgtcccatcttggaaggcccaagggagaaccttcaccagagttcagcctcgcacctgtcgccaaaagactctctgagcttcttggaaaagaagtgaagtttgttcccgctgttgtcggtgatgaggtgaaaaaggccgttgaggagctcaaagagggagaggttctcctccttgaaaacaccagattccacccgggagagaccaagaacgatcctgaactcgcgaagttctgggctagcctcgccgatattcacgtgaacgatgccttcggaacggcgcacagggcacacgcttccaacgttggaatcgcacagtttattcccagcgtagcgggattcctcatggaaaaagagataaagttcctttccaaggtgacttataatccagaaaaaccgtacgttgtggttcttggaggagcaaaggtatctgacaaaatcggcgtcatcacgaacctcatggagaaagccgacagaattctcataggtggagccatgatgttcaccttcctgaaggctcttggcaaagaggttggatcgtccagggttgaagaagacaagatcgacctcgcaaaagaactcctcgaaaaagcgaaagaaaagggtgttgagatcgttcttcccgttgatgccgttatcgctcagaagatcgaacccggtgtggaaaagaaggttgtcagaatcgacgacgggatacccgaaggatggatgggcctcgacataggacccgagacaattgagctcttcaagcagaagctctccgatgcaaaaaccgttgtctggaacgggccaatgggagtcttcgaaatagacgatttcgctgaaggcacgaagcaggtcgcacttgcgatcgcagcgctcacggaaaagggagcgatcaccgttgtgggtggaggagacagcgccgcggcggtgaacaagttcggtctggaagacaaattctcccacgtttcaacgggcggaggggcttctctcgaattccttgaaggaaaagaacttcctggtattgccagcatcgcggataaaaaaaaaataactcgtaaactgatcctcgctgggaactggaagatgcataaaacgatctcggaagcgaaaaagtttgtgtcgctgctcgtgaacgaacttcacgacgtgaaagagttcgaaatagtggtctgtcctccgttcacagctctatctgaagtgggggaaatactctctggtagaaacatcaaattgggagctcaaaacgttttctacgaagaccagggagcgttcaccggggagatttctcctctcatgctgcaagagatcggcgttgaatacgtgatcgtgggacattccgagagaaggcgtattttcaaagaagacgacgagttcataaacaggaaagtgaaagcggtgcttgaaaaaggtatgactcctattctctgcgttggagaaacactcgaggaaagagagaaagggctcactttctgcgttgtggaaaaacaggtgagagaaggtttctacggtctcgacaaagaggaagcaaagagagtggtaatagcttacgagccagtctgggcaatcgggacaggaagggtggcgacaccacagcaggcacaggaagtacacgcgttcataagaaagctgctctcagagatgtacgacgaggaaacagcgggatcgataaggattctctacggtggaagcataaagccggacaatttcctcggtctcatcgttcagaaggatatagatggtggtctcgttggaggagcgagtctcaaagagtctttcatagaacttgcacgaataatgagaggtgtgatttcctga

SEQ ID NO: 108354 - protein, 654 aa, Thermotoga maritima
MEKMTIRDVDLKGKRVIMRVDFNVPVKDGVVQDDTRIRAALPTIKYALEQGAKVILLSHLGRPKGEPSPEFSLAPVAKRLSELLGKEVKFVPAVVGDEVKKAVEELKEGEVLLLENTRFHPGETKNDPELAKFWASLADIHVNDAFGTAHRAHASNVGIAQFIPSVAGFLMEKEIKFLSKVTYNPEKPYVVVLGGAKVSDKIGVITNLMEKADRILIGGAMMFTFLKALGKEVGSSRVEEDKIDLAKELLEKAKEKGVEIVLPVDAVIAQKIEPGVEKKVVRIDDGIPEGWMGLDIGPETIELFKQKLSDAKTVVWNGPMGVFEIDDFAEGTKQVALAIAALTEKGAITVVGGGDSAAAVNKFGLEDKFSHVSTGGGASLEFLEGKELPGIASIADKKKITRKLILAGNWKMHKTISEAKKFVSLLVNELHDVKEFEIVVCPPFTALSEVGEILSGRNIKLGAQNVFYEDQGAFTGEISPLMLQEIGVEYVIVGHSERRRIFKEDDEFINRKVKAVLEKGMTPILCVGETLEEREKGLTFCVVEKQVREGFYGLDKEEAKRVVIAYEPVWAIGTGRVATPQQAQEVHAFIRKLLSEMYDEETAGSIRILYGGSIKPDNFLGLIVQKDIDGGLVGGASLKESFIELARIMRGVIS

SEQ ID NO: 108355 - DNA, 1517 bp, Nicotiana tabacum
  CDS (34)..(1239)
ggcacgagttccgacgtcaaaaactatagagaaatggcggtgaagaagagcgtgggatcactgaaagaagcagatctgaaggggaagagagtattcgtgagagttgatctgaacgttccattggatgaaaactttaacatcactgatgacaccagaatcagagccgctgtacctaccatcaagtacttgatgcaacacggttctcatgtcattcttgcctctcatcttggtcgccctaaaggtgttaccccaaagtacagcttaaagccgcttgtgcctagactttcagaactattgggagttgaggtcaagatagcaaatgattcaattggtccagaagttgagaaattggtcgctgaaataccggaaggaggagttctgctgctagagaatgtcagattctataaagaagaggagaagaatgagcccgaatttgccaagaaattggcatctcttgcagatttgtacgtcaatgatgcatttgggactgctcatagagcccatgcttccacagaaggggttgctaagtacttgaaaccagctgttgctggattccttatgcaaaaggaacttgactatttagttggagctgtggcaaatccccagaagccatttgctgcaattgttggtggttcaaaagtatcatctaagattggtgttatagagtctctcttggagaaggttgacgtgttattacttggcggaggaatgatctttactttctacaaggcgcaagggtacgctgttggatcatcactagtggaggaggacaagcttgatttggcaacatctctcatggagaaggcaaaggcaaaaggggtatctctattgcttcccactgatgtagtgattgccgacaagtttgctgctgatgcgaacagcaaggttgttccagcatctgaaattcctgatggctggatgggattagatattggacccgatgcaatcaagtcatttggcagcgccttggataccaccaagactgtcatttggaatggaccaatgggtgtgtttgagtttgacaagtttgctgctggaacagaggctattgcaaagaaactggcagagcttagtggaaagggagtgacaaccatcatagggggtggtgattctgtagctgcagttgagaaggtaggacttgcagagaagatgagccacatatcaactggagggggtgctagcttggagcttctcgaggggaaaccactccccggagtgcttgccctagatgatgcctgagcaatataatgctcatgcttttctccctttttttttgtgcacattttgttagctcttatgtctggattttagtccagagcggatttggatctatagagtcttgtaggttggtggataaaactgtaataagtattttctgggcctccattatgtgcactgctgcagttggcagggtactgaggcacttcctcttgtgacaagagaatcttccatggttgataacttgaaattactaatgaactatgtataagttatcaaatccttttattggattggag

SEQ ID NO: 108356 - protein, 401 aa, Nicotiana tabacum
MAVKKSVGSLKEADLKGKRVFVRVDLNVPLDENFNITDDTRIRAAVPTIKYLMQHGSHVILASHLGRPKGVTPKYSLKPLVPRLSELLGVEVKIANDSIGPEVEKLVAEIPEGGVLLLENVRFYKEEEKNEPEFAKKLASLADLYVNDAFGTAHRAHASTEGVAKYLKPAVAGFLMQKELDYLVGAVANPQKPFAAIVGGSKVSSKIGVIESLLEKVDVLLLGGGMIFTFYKAQGYAVGSSLVEEDKLDLATSLMEKAKAKGVSLLLPTDVVIADKFAADANSKVVPASEIPDGWMGLDIGPDAIKSFGSALDTTKTVIWNGPMGVFEFDKFAAGTEAIAKKLAELSGKGVTTIIGGGDSVAAVEKVGLAEKMSHISTGGGASLELLEGKPLPGVLALDDA

SEQ ID NO: 108357 - DNA, 1473 bp, Triticum aestivum
  CDS (79)..(1284)
gggccaagcccatcgccactccaatccagcgaccacctcgcccagatcgccgccgattcgatccggttcctcgacgggatggcgaccaagaggagcgtgggcaccctcggggaggcggatctcaaggggaagaaggtgttcgtgcgcgccgacctcaacgtgccgctcgacgacgcccagaagatcaccgacgacacccgcatccgcgcctccatccccaccatcaagtacctcctcgagaagggcgccaaggtcatcctggccagccatctgggccgcccaaaaggtgtcacccccaagttcagcttgaagcctcttgttgcacgcttgtctgagctccttggacttgaagttgtgatggcccctgactgcatcggtgaagaagttgagaaattggctgctgctttgccagatggtggtgttctactcctagagaatgttagattctacaaggaggaagagaagaacgatcctgagtttgctaagaagcttgcgtcagttgctgacctttatgtaaatgacgctttcggcactgcacatagggctcatgcttcaactgagggtgtaaccaagtttttgaggccttctgttgctggcttcctcatgcagaaggaacttgactatcttgtcggagctgttgccaacccaaagaagccatttgctgccattgttggtggatcaaaggtctcatctaagattggtgtgatcgagtctctgctggccaaggttgatatcctcatccttggtggtggtatgatcttcacattctacaaggcccagggattagctgttggaaagtctcttgtggaggaagacaaacttgaactggcaacttcactgattgaaacggcaaagtccaagggtgttaagctcttgcttccgactgatgtcgttgtggctgacaagtttgcagcagatgccgaaagcaagattgttcctgccactgctatccctgatggttggatgggtctggatgttggcccagattccatcaagacttttgcagaagccttggacaccaccaagactgttatctggaacggtcctatgggagtctttgagtttgagaagtttgccgcaggcactgatgcgatcgcgaagcagttggctgagcttactgggaagggtgtcacgaccatcattggtggaggtgactccgttgctgctgttgagaaggctgggctggccgacaagatgagccacatttccaccggcggtggcgcgagcttggagctgctggaaggcaagcccctccctggtgttcttgcccttgacgaggcgtaggttgattcggtttcacctatcagcttgctgcgtgccccttttgtttgggatctcatctcggtgtaacgctggaacgttatatgtcccaaggaaactttgagataggcttgtcgccaatttttgctagtagatgagtcgtgaataattatcaacttcctctgtgcgtgtgaagtgatgtggctggaattt

SEQ ID NO: 108358 - protein, 401 aa, Triticum aestivum
MATKRSVGTLGEADLKGKKVFVRADLNVPLDDAQKITDDTRIRASIPTIKYLLEKGAKVILASHLGRPKGVTPKFSLKPLVARLSELLGLEVVMAPDCIGEEVEKLAAALPDGGVLLLENVRFYKEEEKNDPEFAKKLASVADLYVNDAFGTAHRAHASTEGVTKFLRPSVAGFLMQKELDYLVGAVANPKKPFAAIVGGSKVSSKIGVIESLLAKVDILILGGGMIFTFYKAQGLAVGKSLVEEDKLELATSLIETAKSKGVKLLLPTDVVVADKFAADAESKIVPATAIPDGWMGLDVGPDSIKTFAEALDTTKTVIWNGPMGVFEFEKFAAGTDAIAKQLAELTGKGVTTIIGGGDSVAAVEKAGLADKMSHISTGGGASLELLEGKPLPGVLALDEA

SEQ ID NO: 108359 - DNA, 1587 bp, Agaricus bisporus
  CDS (276)..(1526)
cagagcacgagtgacggatgtgacagtggggtcgacgcctagatcaatctttgcgcgagacttgacgatagactaatgccgcccgggcagcgctggcctgggggtatctgggaaatgcgcgtgcaggtggtctgcacttgtggtctgcagaaaatccgtcatcctggggctggacgcgggacggtggaggctggagacgggcgtgactgtgaccggactagaaagatatcttatctgctatatatactgggctcatactggcttatactgcagccatgtctctctccaacaaactctccatcactgacctcgccctcaccggcaagcgtgtccttatccgcgtcgacttcaactcccccatccaagacggaaagataaccaaccccgcccgtatcaatgccgccctccccactatcaaatatgccctcgacaatggcgcctccaaggtcatcttaatgtcgcatctcggcaggcccgatggcaaggcgatctccaaatactcactcaaacctgtggcctcagagctggaaaagctcttgaagaaaccggtcttcttcttgcatgactgcgtcggccctgacatcgaaaaggcagtcctggaggcacccgagggtgctgtcgttctgctcgagaaccttcgcttccacattgaggaagaaggctctgccaagaacgaggaaggaaaaaaaatcaaagctgatccttccaaggtcacccagttccgcgagcagctcaccaggctcggcgatgtttatgtgaacgatgcctttggtacggctcatcgcgctcactccagcatggttggcatcaagcttcctcgaagggcttctgggtttttggtcaagaaagaactagactactttgcaaaggcactggaaaaccccgaacgacccttccttgctatccttggtggtgccaaagtgtctgacaagatccagctgattgaaaacatgctcgacaaggtcaactgtctcgtcatcggaggtggtatggcattcactttcaagaagacaatgcaaaatgttgcgattggcaactctctctttgacaaaccagggtctgaaaaagtggccgggatcgtcgaaaaggccaagaagaacaatgtcgaaattgtgttccccgtcgactatgttgtcggagacaagtttgatgcaaacgccaaccacaagatagtcacggatgacgaaggcgttccggatggttggatgggtctcgacgttggtccaaagtctaatgagctcttccgtgaagcggtcctgaaagccaagacgattctctggaacggtcctcccggagtgttcgaatttcctgcgtttgccaagggatcaaaggtgcttttggatgccacggtagaggcggtacaaaagggggctactgttatagttggtgggggtgatacagctacggtagttgcgaatcatgacgcagaagagaagctgagccacgtcagcactggtgggggtgcgagtctggagctgctggagggcaagacgctgcctggagtggcagaattgagcaacaaatgacggtgtagctacttgtagatagaattcccacagtaaacatgtgactgggagtgaatgtgtc

SEQ ID NO: 108360 - protein, 416 aa, Agaricus bisporus
MSLSNKLSITDLALTGKRVLIRVDFNSPIQDGKITNPARINAALPTIKYALDNGASKVILMSHLGRPDGKAISKYSLKPVASELEKLLKKPVFFLHDCVGPDIEKAVLEAPEGAVVLLENLRFHIEEEGSAKNEEGKKIKADPSKVTQFREQLTRLGDVYVNDAFGTAHRAHSSMVGIKLPRRASGFLVKKELDYFAKALENPERPFLAILGGAKVSDKIQLIENMLDKVNCLVIGGGMAFTFKKTMQNVAIGNSLFDKPGSEKVAGIVEKAKKNNVEIVFPVDYVVGDKFDANANHKIVTDDEGVPDGWMGLDVGPKSNELFREAVLKAKTILWNGPPGVFEFPAFAKGSKVLLDATVEAVQKGATVIVGGGDTATVVANHDAEEKLSHVSTGGGASLELLEGKTLPGVAELSNK

SEQ ID NO: 108361 - DNA, 1239 bp, Aplysia californica
  CDS (1)..(1239)
atgaacaagctcagtattaacgacgtggatgtgagggacaagagagtcctgatcagagtcgatttcaacgtccccttgaaaaatggacagatctcaaacaaccagagaatcgctgcagccctgcctacgatcaagcttgccttggagaagggtgccaagtcagtggtgctcatgtctcatctcggtcggccagacgggcgcccaatccatgcggccagtatgaagccggtggtggcagagctggagaacctgttgggaaagaaaatcatgtttctggaagactgcgtgggttccaaggtagaggccgcctgtgccaacccggagcccggcagcgtgatcctgctggaaaatctccgcttccacgtggagaaggaggggaagggcaaggacgctcagggcaacaaggctaaggcagatgatgctgctgtggctgccttcagggcctccttgtccaaactgggagacgtctacgtgaacgacgcttttggcacagctcatagagctcacagctccatggtgggtgtggatctgccggtcaaggcctgcggtctgctcatgaagaaagagttggactactttgccaaagccctggagaaccccgctcgtccgttcctggctatcctgggaggagctaaagttgctgacaaaatccagctgattgagaaccttatggacaaagtcaatgagatgatcattggtggtggaatggctttcacattcttgaaagtactcaacaatatggacatcggaggttctctgtttgacgagggggccaagatcgttggccgtctggtggacaaggcgaaggagaagggagtgaagctccacctgccctccgacttcatcaccggcgacaagtttgccgacgtcgccaagtccgccacggcgtctgttgcgtctggcatcccagaaggttggatgggtctggatgttgggaccaaaaccaacgaagtattccagaaggtgattgaaggagcaaagacaattgtgtggaacgggccccccggagtgtttgagtttgagaacttcagcacgggctccaagcagatgatggactctgtggtcagggccaccgaggcaggaaccatcactatcattggtggatgtgacactgccacgtgtgccaagaattcaaacgccacggagaaggtgagccatgtgagcacaggaagcggaaccagcctggagctgttggaaggcaaaatccttcctggcgtggctgccctgtcccagccgtga

SEQ ID NO: 108362 - protein, 412 aa, Aplysia californica
MNKLSINDVDVRDKRVLIRVDFNVPLKNGQISNNQRIAAALPTIKLALEKGAKSVVLMSHLGRPDGRPIHAASMKPVVAELENLLGKKIMFLEDCVGSKVEAACANPEPGSVILLENLRFHVEKEGKGKDAQGNKAKADDAAVAAFRASLSKLGDVYVNDAFGTAHRAHSSMVGVDLPVKACGLLMKKELDYFAKALENPARPFLAILGGAKVADKIQLIENLMDKVNEMIIGGGMAFTFLKVLNNMDIGGSLFDEGAKIVGRLVDKAKEKGVKLHLPSDFITGDKFADVAKSATASVASGIPEGWMGLDVGTKTNEVFQKVIEGAKTIVWNGPPGVFEFENFSTGSKQMMDSVVRATEAGTITIIGGCDTATCAKNSNATEKVSHVSTGSGTSLELLEGKILPGVAALSQP

SEQ ID NO: 108363 - DNA, 1194 bp, Aquifex aeolicus
  CDS (1)..(1194): transl_table=11
atgcttagaaaaaagaccttaagggacgttgacgtaaaggggaagagagttctcgtaagggttgattacaacgttccactagacgaacagggaaacatagtagacgacacgcgtataagggcttcccttcccacagttgagtacctccttgacgcaaacgcaaaggtaattttgatgtcccatctaggaagacctaaaaacagggatccaaagtacagtttggcaccggtagccaaaagactttcaaggtatataaacaaggaggtaaaactcgccccggactgcgtgggagaagaagtaaagcgaattgtaaactccatgaaagagggagacgtagttctccttgaaaaccttaggttccataaagaagaaacggagtgcgatgagaactttgcgagagagcttgcgagtctgggagaagtttacgttgcggacgccttcggaacctgtcacagaaagcacgcaagcgtgtacctcgttcccaagtttttaaaacccgccgtaatgggatttttactggaaaaggaaatcacttactttgaaaaggcgatggtagcaccccagagacccgtggtcgctatcctgggaggtgctaaagtttcctccaaactcgaagtgataaagaacctaataaggagggtagacaaactatttataggcggcgctatggcctttaccttcctcaaagctatgggctacaaggttggaaattccctcgtggaggacgacctacaggacgttgcaagggatttaatagatgttgcaaaaaagctagagattaaactctaccttcccgttgactttgtgatagggcaggaagtctcggaaaacactcccacgaaagtagtaccctggcaggagataccagacgggtggatggggcttgatatcggacccgtttccgttgaactcgtaaaggaaataatttccgatgcccagacaattgtgtggaacgggcccatgggagtgtttgaaatagacaagttcaaacatggaacaatagaggtcgcgaaattactcgcccaatcttcagccctcacgatagcgggcggaggagatacggaccacgccattcacaaggcgggagtttatcacgcctttgacttcgtctccacaggaggaggagctttcctggaacttctcgcggggaaagaactgccctgtctcgttaaccttgacgacaaggaggcttaa

SEQ ID NO: 108364 - protein, 397 aa, Aquifex aeolicus
MLRKKTLRDVDVKGKRVLVRVDYNVPLDEQGNIVDDTRIRASLPTVEYLLDANAKVILMSHLGRPKNRDPKYSLAPVAKRLSRYINKEVKLAPDCVGEEVKRIVNSMKEGDVVLLENLRFHKEETECDENFARELASLGEVYVADAFGTCHRKHASVYLVPKFLKPAVMGFLLEKEITYFEKAMVAPQRPVVAILGGAKVSSKLEVIKNLIRRVDKLFIGGAMAFTFLKAMGYKVGNSLVEDDLQDVARDLIDVAKKLEIKLYLPVDFVIGQEVSENTPTKVVPWQEIPDGWMGLDIGPVSVELVKEIISDAQTIVWNGPMGVFEIDKFKHGTIEVAKLLAQSSALTIAGGGDTDHAIHKAGVYHAFDFVSTGGGAFLELLAGKELPCLVNLDDKEA

SEQ ID NO: 108365 - DNA, 1344 bp, Ashbya gossypii
  CDS (97)..(1344)
atgggccggtcgtggggtctgctctggatggcgtgcttgctgtacggcgtgttcacagagtgtcgcagatcttcacagcacgcacacacaggaaaaatgtcgctatcctctaagctaacagtcaaggacctgagccttgcgggcaaacgcgtgttcatccgcgtggacttcaacgtgccgctagacgggaagacgatcacgtcgaaccagcgcattgtggccgcgctacccacgatcaagtacgtgttggagcagggccccaaggcggtggtgttggcgtcgcacctagggcggcccaacggcgagcgcaacgagaagtactcgttggcgccggtggccgcggagctggagaagctgctgggccagaaggtgaactcctggacactgcgtgggcagcacgtgaccgctgcggtcaacggcgcggctgcggggtccgtgttcctgcttgagaacctgcggttccacatcgaggaggagggctcgcgcaaggtggacggcgagaaggtcaaggcgtctgcggaggacgtgcagaagttccgccagggcctcatgtcgctcgcggacgtctacgtcaacgacgccttcggcaccgcgcacagagcgcactcctcgatggtcggcttcgagctgcctgagagggccggcggcttcttgttgtcgcgcgagctggagtacttcagcaaggcgttggagaaccctacgagacccttcttggcgatcctgggcggtgccaaggttgccgacaagatccagttgatcgacaacttgttggacaaggtcgactcgattgtgatcggcggtggcatggccttcaccttcaagaaggtgcttgagaacatggagatcggtaactccatctacgacaaggcgggtgccgagatcgttcctaagctagcggagaaggccaagaagaacggcgtcaagatcgtgttgcctgtggacttcgtgatcggcgacgacttctcccaggacgccaacaccaagattgtctctgcctccgagggcattccatccggctgggagggtctagactgtggtcctgagtccagaaagctgttcagcgagaccatcgcgagcgcgaagaccatcgtgtggaacggcccaccaggtgtctttgagattccaaagttctccgagggtacccaggccatgcttgcggccgctgtcaaggcctccgaggctggcagcaccgtcatcatcggcggtggtgacaccgctaccgtggccaagaagtacggtgtggtcgagaagatctcccatgtgtccaccggtggtggtgcctccctagagctattggagggtaaggacctaccaggtgtcaccttcttgtccagcaagcagtag

SEQ ID NO: 108366 - protein, 415 aa, Ashbya gossypii
MSLSSKLTVKDLSLAGKRVFIRVDFNVPLDGKTITSNQRIVAALPTIKYVLEQGPKAVVLASHLGRPNGERNEKYSLAPVAAELEKLLGQKVNSWTLRGQHVTAAVNGAAAGSVFLLENLRFHIEEEGSRKVDGEKVKASAEDVQKFRQGLMSLADVYVNDAFGTAHRAHSSMVGFELPERAGGFLLSRELEYFSKALENPTRPFLAILGGAKVADKIQLIDNLLDKVDSIVIGGGMAFTFKKVLENMEIGNSIYDKAGAEIVPKLAEKAKKNGVKIVLPVDFVIGDDFSQDANTKIVSASEGIPSGWEGLDCGPESRKLFSETIASAKTIVWNGPPGVFEIPKFSEGTQAMLAAAVKASEAGSTVIIGGGDTATVAKKYGVVEKISHVSTGGGASLELLEGKDLPGVTFLSSKQ

SEQ ID NO: 108367 - DNA, 1254 bp, Aspergillus oryzae
  CDS (1)..(1254)
atgtctctctccaacaagcttgccatcaccgatgtcgaccttaaggacaagcgcgtcttgatccgtgtcgacttcaacgttcctctcgatgccgacaagaagatcaccaacaatcagcgtatcgtcggtgctctgcctaccatcaagtacgccattgagaatggtgctaaggccgttgtcctcatgtcccacctcggccgtcccgatggcaaggccaatcccaagtacagcctgaagcctgttgctactgagctggagaagctgcttagcaagtctgtcatcttcgccgagaactgcgtcggcaaggagactgaagagattgtgaacaaggccactggtggccagatcatcctccttgagaacctgcgtttccacgccgaggaggagggcagctctaaggatgccgagggcaagaaggtcaaggctgacaaggagaaggtcgaagagttccgcaagggactgactgctcttggtgacgtctacatcaacgacgctttcggaactgcccaccgtgctcacagctcgatggttggtgttgacctgccccagaaggcttccggcttcttggtgaagaaggaacttgagtactttgctaaggctttggaaagcccccagcgccccttcctggccattctgggaggtgccaaggtctctgacaagatccagctgatcgacaacctgttgcccaaggtcaacagcttgatcatcactggtgctatggccttcaccttcaagaagaccctcgagaacgtcaagattggcaacagtttgttcgatgaggccggtagcaagattgtcggcgatatcgttgagaaggccaagaagaacaatgtcaagattgttctgcccgttgactacgtgaccgctgacaagttcgccgccgatgccaagactggctatgccaccgatgctgacggtattcccgatggatacatgggcctggatgtcggtgagaagagtgttgagctgtacaagaagactattgccgaggccaagaccatcctctggaacggtcctcctggtgtcttcgagctggagcccttcgccaacgctaccaagaagacccttgatgctgctgttgcggctgctcagtctggttctattgtcatcatcggcggtggtgacactgcaaccgtcgctgccaagtacggtgctgaggccaagctcagccatgtctccaccggtggtggtgcatccctggagctccttgagggcaaggttctccctggtgttgatgctctgtcaagtaagtaa

SEQ ID NO: 108368 - protein, 417 aa, Aspergillus oryzae
MSLSNKLAITDVDLKDKRVLIRVDFNVPLDADKKITNNQRIVGALPTIKYAIENGAKAVVLMSHLGRPDGKANPKYSLKPVATELEKLLSKSVIFAENCVGKETEEIVNKATGGQIILLENLRFHAEEEGSSKDAEGKKVKADKEKVEEFRKGLTALGDVYINDAFGTAHRAHSSMVGVDLPQKASGFLVKKELEYFAKALESPQRPFLAILGGAKVSDKIQLIDNLLPKVNSLIITGAMAFTFKKTLENVKIGNSLFDEAGSKIVGDIVEKAKKNNVKIVLPVDYVTADKFAADAKTGYATDADGIPDGYMGLDVGEKSVELYKKTIAEAKTILWNGPPGVFELEPFANATKKTLDAAVAAAQSGSIVIIGGGDTATVAAKYGAEAKLSHVSTGGGASLELLEGKVLPGVDALSSK

SEQ ID NO: 108369 - DNA, 1185 bp, Bacillus anthracis
  CDS (1)..(1185): transl_table=11
atgaacaaaaaatcaattcgtgacgtagatttaaaaggtaagcgtgtattttgtcgcgttgacttcaacgtacctatgaaagaaggcaaaattacagatgaaactcgtatccgtgcagctcttcctacaattcaatatttagtagagcaaggtgcgaaggttattttagcaagccacttaggccgtccaaaaggtcaagcagtagaagaattacgtcttactccagtagcagcacgtttaggcgagcttcttggtaaagatgttaaaaaagcagacgaagcattcggaccagttgcacaagaaatggttgcagcaatgaacgaaggcgacgtattagttcttgaaaacgtacgtttctatgcgggcgaagaaaagaacgatgcagaacttgcgaaagaatttgcagctcttgctgacatcttcgtaaacgatgcattcggtgcagctcaccgtgctcatgcttctacagcaggaatcgcagactacctaccagcagtatctggtctattaatggaaaaagagttagaagtattaggtaaagcactttctaacccagaacgtccattcacagctatcatcggtggtgcgaaagtaaaagataaaatcggtttaattcgtcatctattagacaaagtagataacttaatcatcggtggcggacttgcttacacattcgttaaagctttaggtcatgaaattggtctatctctatgtgaagacgacaagattgaactagctaaagaatttatgcaacttgcaaaagaaaaaggcgtaaacttctacatgccagttgatgttgtaatcactgaggaattctctgaaactgcaacaactaaaatcgttggtatcgactctatcccttctaactgggaaggcgtggacatcggtcctaaaacacgtgaaatttatgcagatgtaattaaaaactctaagcttgttgtatggaatggaccaatgggtgtattcgaaatgactccattcgcagaaggtacaaaagcagtaggacaagcattagcagatgcagaaggtacatactctgttatcggcggtggtgactctgcagcagctgttgaaaaattcggtatggctgataaaatgagccacatttctactggcggcggtgcgtcattagaattcatggaaggtaaagagcttccaggtgtagtttgtcttaacgacaaataa

SEQ ID NO: 108370 - protein, 394 aa, Bacillus anthracis
MNKKSIRDVDLKGKRVFCRVDFNVPMKEGKITDETRIRAALPTIQYLVEQGAKVILASHLGRPKGQAVEELRLTPVAARLGELLGKDVKKADEAFGPVAQEMVAAMNEGDVLVLENVRFYAGEEKNDAELAKEFAALADIFVNDAFGAAHRAHASTAGIADYLPAVSGLLMEKELEVLGKALSNPERPFTAIIGGAKVKDKIGLIRHLLDKVDNLIIGGGLAYTFVKALGHEIGLSLCEDDKIELAKEFMQLAKEKGVNFYMPVDVVITEEFSETATTKIVGIDSIPSNWEGVDIGPKTREIYADVIKNSKLVVWNGPMGVFEMTPFAEGTKAVGQALADAEGTYSVIGGGDSAAAVEKFGMADKMSHISTGGGASLEFMEGKELPGVVCLNDK

SEQ ID NO: 108371 - DNA, 1185 bp, Bacillus halodurans
  CDS (1)..(1185): transl_table=11
atgaacaaacaatctgttcgtgatgtggaattacaagggaaaaaagtgttttgtcgcgttgattttaacgtgccgatgaaagatggggtcgtgacagatgatacgagaattcgtgccgcgttaccaacgattcaattgttagcagaaaaaggcgcacgcatcattctcgcaagccatctcggtcgtccgaaaggagaagttgtagaggaacttagactcgatccagttgctgctagactgcaagagcttcttggaaagcctgtagcgaaagtcaatgtcgcccacggaccagaggcagagcaagcggcgaacgaactgaaagatggcgatgtgcttttacttgaaaatgttcgtttttaccctggggaagaaaaaaatgatccagagctagcaaaagcttttgcgtctttagcggatgtctatgtgaacgacgccttcggtgcagcacaccgtgcccacgcgtcaacggaaggtattgcacaccatgttacggctgttgcaggcttgctcatggaaaaggagcttgaggtgcttggcaaggcactttccaaccctgagcgcccatttacagcgatcattggtggagcaaaagtgaaagataaaattggtgtcattgaaaaccttttagataaagttgataacttaattattggcggcggacttgcgtacacattcatcaaagcgcaaggacatgagatcggcaaatctcttttagaagcagacaaaatggatttggctctttccttcatggaaaaggcgaaagaaaaaggagtcaacttctacgtaccacaagatgcgattgtagccgatgatttctcgaatgatgcgaatacgaaagcggtggacattgatcaaatcccagccgattgggaagcgctcgatatcggtccaaaaacgcgcgagacctaccgcaatgtcattcaatcctcaaagctcgtcatttggaacgggccaatgggtgtatttgagctcgatgcttttgctggtggcacgaaagctgttgctgaagcgcttgctgatgcaaacgatacgtattctgtcatcggcggtggagattcggcggccgctgtagaaaagttcggtttagctaaccagatgagccatatctcaacaggtggtggagcatctcttgagtttatggaagggaaagctttacctggcgttgtagcgttaaacgataaataa

SEQ ID NO: 108372 - protein, 394 aa, Bacillus halodurans
MNKQSVRDVELQGKKVFCRVDFNVPMKDGVVTDDTRIRAALPTIQLLAEKGARIILASHLGRPKGEVVEELRLDPVAARLQELLGKPVAKVNVAHGPEAEQAANELKDGDVLLLENVRFYPGEEKNDPELAKAFASLADVYVNDAFGAAHRAHASTEGIAHHVTAVAGLLMEKELEVLGKALSNPERPFTAIIGGAKVKDKIGVIENLLDKVDNLIIGGGLAYTFIKAQGHEIGKSLLEADKMDLALSFMEKAKEKGVNFYVPQDAIVADDFSNDANTKAVDIDQIPADWEALDIGPKTRETYRNVIQSSKLVIWNGPMGVFELDAFAGGTKAVAEALADANDTYSVIGGGDSAAAVEKFGLANQMSHISTGGGASLEFMEGKALPGVVALNDK

SEQ ID NO: 108373 - DNA, 1450 bp, Bacillus megaterium
  CDS (165)..(1349): transl_table=11
tattggcttctacatgaaaaagcgtcataagcagctagctggagtttcactttatatagaaaggcgccaatatataaaatgaaatctacggtggtttgtggattgatgattacatagaagcctacttgcttagtaccataaatacttaaggaggccttttaacgatgaacaaaaaaacgttgaaagacatcgatgtaaaaggaaagcgagtattttgtcgcgtagactttaacgtaccaatgaaagacggaaaagtaacagacgaaactcgtattcgtgcagctattcctactattcaatatttagtagaacaaggtgcaaaagtaattttagctagccatcttggacgtccaaaaggcgaagttgttgaagagttacgtctaaatgctgttgcagaacgtttacaagctcttcttggtaaagacgttgcaaaagctgacgaagcttttggcgaagaagtaaagaaaacaatcgacggcatgagcgaaggcgatgttttagtacttgaaaacgtacgtttttacccaggtgaagagaaaaacgatcctgaattagcaaaagcatttgctgaattagcagacgtgtacgtaaacgatgcattcggtgcagctcaccgtgcgcatgcttcaacagaaggaattgcacaacatattccagcagtagcaggtttcttaatggaaaaagagcttgatgtgctttcaaaagcattatcaaacccagaacgtccatttactgcaatcgttggtggagcaaaagttaaagacaaaatcggtgtaattgaccacttgcttgataaagtagataacttaatcatcggtggaggactttcttacacatttattaaggcactaggccatgaagtaggtaaatcacttcttgaagaagacaagattgaacttgcaaaatctttcatggaaaaagctaagaaaaacggagtaaacttctacatgccagtggacgtggtagtagcagatgacttctcaaatgatgctaatattcaagttgtatcaattgaagatattccaagcgattgggaaggcttagacgcaggaccgaaaacgcgtgaaatctatgctgacgtaatcaaaaactctaagttagttatttggaacggaccaatgggtgtatttgaattagacgcatttgctaacggaacaaaagcagtagctgaagctttagcagaagcaactgacacatattcagtaatcggcggaggagactctgcagcagctgttgaaaaattcaacttagctgataaaatgagccatatttctacaggtggcggtgcgtcactagagtttatggaaggtaaagaacttccaggcgtagttgcattaaacgataagtaagtttatgtttcagtaagacggaggaccggcctgacgactgataatataagaaactatcaagcagcgaagaagggtgaccaagagataaaagggaccgaatc

SEQ ID NO: 108374 - protein, 394 aa, Bacillus megaterium
MNKKTLKDIDVKGKRVFCRVDFNVPMKDGKVTDETRIRAAIPTIQYLVEQGAKVILASHLGRPKGEVVEELRLNAVAERLQALLGKDVAKADEAFGEEVKKTIDGMSEGDVLVLENVRFYPGEEKNDPELAKAFAELADVYVNDAFGAAHRAHASTEGIAQHIPAVAGFLMEKELDVLSKALSNPERPFTAIVGGAKVKDKIGVIDHLLDKVDNLIIGGGLSYTFIKALGHEVGKSLLEEDKIELAKSFMEKAKKNGVNFYMPVDVVVADDFSNDANIQVVSIEDIPSDWEGLDAGPKTREIYADVIKNSKLVIWNGPMGVFELDAFANGTKAVAEALAEATDTYSVIGGGDSAAAVEKFNLADKMSHISTGGGASLEFMEGKELPGVVALNDK

SEQ ID NO: 108375 - DNA, 1431 bp, Bacillus stearothermophilus
  CDS (188)..(1372): transl_table=11
aacgaaacgggctattcgcaccgcgtcgtcgacttagctgcctacatcgcctcgaaagggctgtaaaaccagcttggtgctgagttttccgcctgttcaagtctataataggaaaatggaggggagcggggaaatgatccccactccttttccttgtccaaactgtagccaaaagggggcacgaacgatgaacaagaagacgatccgcgacgttgatgtgaggggaaagcgcgtcttttgccgcgtcgatttcaacgttccgatggagcaaggcgctatcaccgatgacacgcgcattcgcgccgcactcccgacgatccgctatttgatcgagcacggggcgaaagtcattttggcgagccacctcggccgcccgaaaggaaaagtggtcgaagaattgcgtttggatgccgttgcgaagcggctcggcgagctgcttgaacggccggttgccaaaacgaatgaagcggtcggcgatgaggtgaaagcggcggtcgaccgtttgaacgaaggcgatgtgctcttgcttgagaacgtccgtttttaccctggcgaagagaaaaatgatcccgagctcgccaaagcgtttgcggagcttgcggatctatatgtcaacgatgcgttcggcgccgcccatcgcgctcatgcgtcgacggaaggcatcgcccattacttgccggcggtggccggatttttgatggaaaaagaacttgaagtgcttggcaaggcgctttcgaatccggaccgcccgtttacagcgatcatcggcggggcgaaagtgaaagacaaaatcggcgtcatcgacaatttgcttgaaaaagtcgacaacttgatcatcggcggcggactggcgtatacgttcgtcaaagcgctcggccatgacgtcggcaagtcgctgcttgaggaggacaaaatcgaactcgccaaatcgtttatggaaaaggcgaaagaaaaaggcgtccgtttttatatgccggtggacgtggtcgtcgccgaccggtttgcgaacgacgccaacacgaaagtcgtgccgattgacgcgattccagccgattggtcggcgcttgacatcggcccgaaaacgcgcgaattgtaccgcgatgtcattcgcgagtcgaagctcgttgtctggaacggcccgatgggcgtctttgaaatggacgcgttcgcccacgggacaaaagcgatcgccgaagcactggcggaagcgctcgacacctattcggtcatcggcggcggggattcggcggcggcggttgagaaattcggcttggccgacaaaatggatcatatctccaccggcggcggcgcttcgctcgagtttatggaaggaaaacagctgccgggtgtcgtcgcactcgaagacaaatgacccacggcgccggatttggcgcatggcggctgactccgcccattgaaaggaagggtgaa

SEQ ID NO: 108376 - protein, 394 aa, Bacillus stearothermophilus
MNKKTIRDVDVRGKRVFCRVDFNVPMEQGAITDDTRIRAALPTIRYLIEHGAKVILASHLGRPKGKVVEELRLDAVAKRLGELLERPVAKTNEAVGDEVKAAVDRLNEGDVLLLENVRFYPGEEKNDPELAKAFAELADLYVNDAFGAAHRAHASTEGIAHYLPAVAGFLMEKELEVLGKALSNPDRPFTAIIGGAKVKDKIGVIDNLLEKVDNLIIGGGLAYTFVKALGHDVGKSLLEEDKIELAKSFMEKAKEKGVRFYMPVDVVVADRFANDANTKVVPIDAIPADWSALDIGPKTRELYRDVIRESKLVVWNGPMGVFEMDAFAHGTKAIAEALAEALDTYSVIGGGDSAAAVEKFGLADKMDHISTGGGASLEFMEGKQLPGVVALEDK

SEQ ID NO: 108377 - DNA, 1194 bp, Bartonella henselae
  CDS (1)..(1194): transl_table=11
atgggttttcgtacacttgatgatgttgatgtcacaggaaaacgtgttcttgtgcgggtggattttaatgtaccaatggcgcaaggaaaagtttgtgatgatacgcgtcttaaacgacataaagaaacgctccttgaattgcaaaagcgtggtgctaagcttattcttctttcccattgtgggcgccctaaaggacaagtggagccagaattttcactccatcctgttgtgcaagtgctggaaaaaataatcaaccaacccgtgaattttgcatcagattgtattggtgtagctgtacagacagcggttgaagcattgcaaaatggtggtattttactgcttgaaaatgttcgttttcattcaggtgaagaaaagaatgcgggctcttttgctgaggctctagcccataatggagatctctatgtcaatgatgctttttcagtctctcatcgtgcccatgcttcggtagaggggataacacattttttgccttcctatgcggggcgttctttacaatgtgagttgcaagcattggaaaaagggcttggtaagccagagcgtccggtgatcgcaattgttggaggggcgaaggtttccagtaagctttttgtgctcaatcatttggttaaaaaggtcgattatttggtcattggtggtggcatggccaatagttttttagcagcgcaaggtgtgtgtgttggaaagtcattgtgtgaacatgcgctgatcgaaacggtaaaaaaagttattgaaaaagcacgggagtgccaatgtacgcttctgctccctgtggatgcaatcgttggatttcgctttgaaaaagatgcgccacatcgtctctatgatattggagatattcctgaggatgggatgattttggatgttggtacgcgctccattgcgcatatcaatgccgtgatcgataaagccgctacccttgtgtggaatggacctcttggtgtttttgagatgtctccttttgatcaaggaacgattgcagtggcacgccatgcagcagaacttagtttgacagggaaattggtttcaattgctggagggggagatacggtgtttgcacttaatcatgctggtgttgctgatgattttacttatctttcaaccgcgggtggagcctttttggaatggatggaaggcaagatgctgcctggtattctagccctcacgcaggcttga

SEQ ID NO: 108378 - protein, 397 aa, Bartonella henselae
MGFRTLDDVDVTGKRVLVRVDFNVPMAQGKVCDDTRLKRHKETLLELQKRGAKLILLSHCGRPKGQVEPEFSLHPVVQVLEKIINQPVNFASDCIGVAVQTAVEALQNGGILLLENVRFHSGEEKNAGSFAEALAHNGDLYVNDAFSVSHRAHASVEGITHFLPSYAGRSLQCELQALEKGLGKPERPVIAIVGGAKVSSKLFVLNHLVKKVDYLVIGGGMANSFLAAQGVCVGKSLCEHALIETVKKVIEKARECQCTLLLPVDAIVGFRFEKDAPHRLYDIGDIPEDGMILDVGTRSIAHINAVIDKAATLVWNGPLGVFEMSPFDQGTIAVARHAAELSLTGKLVSIAGGGDTVFALNHAGVADDFTYLSTAGGAFLEWMEGKMLPGILALTQA

SEQ ID NO: 108379 - DNA, 1197 bp, Bradyrhizobium japonicum
  CDS (1)..(1197): transl_table=11
atggcgaacaaattccgcaccctcgacgacgtcgacgtgaagggcaaacgcgtgctgctgcgcgtcgacctcaacgtgcccatggagaacgggcgcgtcaccgacgcaacccggctcgagcgcgtcgcgccgaccatcaccgagctcgccgacaagggcggcaaggtgatcctgctcgcgcatttcggccggccgaagggacgcgatgccaaggagtcgctcaagcccgtcaccgaggcgctgtcgaaggtcctgaacaagcccgtcgcgtttgccgacgactgcatcggcgagcccgcggccacggccgtggcggcactcaaggacggcgacatcctgtgcctggaaaacacccgcttccacaaggaagaggaaaagaacgatcccgccttcgtcgcggaattggccaagctcggcgacatctgggtcaatgacgcgttctcggccgcgcaccgcgcccacgcctcgaccgaaggcctcggccacaagctgccggcctatgccggccgcaccatgcaggccgagctcgatgcgctggagaaggcgctgggctcgccgaccaagccggtcatcgcgatcatcggcggcgccaaggtctcgaccaagatcgacctgctcgaaaacctcgtcagcaaggtcgacgcgctggtgatcggcggcggcatggccaacaccttcctgcacgcccagggcgtcggcatcggcaagtcgctggccgagaaggatctcgcgccgaccgcgctgcgcatcatcgagaaggcggaagccgccaactgcgccatcatcctgccggtcgacgccaccgtcgcctatcatttcgcggccaacgcgccgtcccacgcctacggcctcgatgcgatcccggccgacggcatgatcctcgacgtcggcccgcaatcggtcgcgcgcgtgcacgcggcgatcgacgacgcggcgacgctggtctggaacgggccgctcggcgccttcgagatgcagccgttcgaccgcggcacggtcgcggccgccaagcacgccgccgagcgcaccaaggcgaaaaagttgatctcgatcgcgggcggcggcgacaccgtcgcggccctcaaccaggcccacgtggccggtgacttcacctatgtctcgaccgccggtggcgcatttcttgaatggatggaaggcaagccactgcccggcgtcgaggtcctgcgcatcaagtag

SEQ ID NO: 108380 - protein, 398 aa, Bradyrhizobium japonicum
MANKFRTLDDVDVKGKRVLLRVDLNVPMENGRVTDATRLERVAPTITELADKGGKVILLAHFGRPKGRDAKESLKPVTEALSKVLNKPVAFADDCIGEPAATAVAALKDGDILCLENTRFHKEEEKNDPAFVAELAKLGDIWVNDAFSAAHRAHASTEGLGHKLPAYAGRTMQAELDALEKALGSPTKPVIAIIGGAKVSTKIDLLENLVSKVDALVIGGGMANTFLHAQGVGIGKSLAEKDLAPTALRIIEKAEAANCAIILPVDATVAYHFAANAPSHAYGLDAIPADGMILDVGPQSVARVHAAIDDAATLVWNGPLGAFEMQPFDRGTVAAAKHAAERTKAKKLISIAGGGDTVAALNQAHVAGDFTYVSTAGGAFLEWMEGKPLPGVEVLRIK

SEQ ID NO: 108381 - DNA, 1203 bp, Campylobacter jejuni
  CDS (1)..(1203): transl_table=11
atgagtgatattatttctataaaagacattgatttagctaagaaaaaagtttttataagatgtgattttaatgttcctcaagatgattttttaaatatcactgatgatagacgcataagatcagctattcctacgataagatattgtttggataatggttgtagtgtgattttagcctctcatttagggcgtccaaaagaaattagctctaaatattctttagaacctgtggctaagcgtcttgctagacttttagataaagaaattgttatggcaaaagatgttatcggcgaagatgcaaaaaccaaagctatgaatttaaaagcgggtgaaattttacttcttgaaaatttgcgttttgaaaaaggcgaaactaaaaatgatgaaaatttagccaaagaacttgcttctatggttcaagtttatatcaatgatgcttttggagtatgccatagagcacattctagtgtagaggcgattactaaattttttgatgaaaaacacaaaggcgcaggatttttactccaaaaagaaattgattttgcaagcaatcttatcaaacatccagcacgtccttttgtcgctgttgttggaggttcaaaggtaagtggaaaacttcaagcattgacaaatttattaccaaaggtagataaattaatcataggcggaggtatggcatttacttttttaaaagctttaggttatgatataggaaattcacttttagaagaagaacttttagaagaagctaataaaattcttaccaagggtaaaaatttaggagtgaaaatttatcttccagtagatgttgtagccgctcctgcgtgctcacaagatgtgccgatgaaatttgttccagcgcaagaaattccaaatggttggatgggtttagatataggacctgcgagtgtgagactttttaaggaggtgatttctgatgcgcaaacgatttggtggaatggacctatgggtgtttttgaaattgataaattttcaaaaggtagcattaaaatgagtcattatatcagcgaaggacatgcaacttctgttgttggaggcggtgatacggctgatgtggttgcgcgtgcaggtgatgcagatgaaatgacttttatttctactggaggtggtgcttctcttgaacttatagaaggcaaagaacttccaggtgtaaaagctttaagatctaaggaaaatgaatga

SEQ ID NO: 108382 - protein, 400 aa, Campylobacter jejuni
MSDIISIKDIDLAKKKVFIRCDFNVPQDDFLNITDDRRIRSAIPTIRYCLDNGCSVILASHLGRPKEISSKYSLEPVAKRLARLLDKEIVMAKDVIGEDAKTKAMNLKAGEILLLENLRFEKGETKNDENLAKELASMVQVYINDAFGVCHRAHSSVEAITKFFDEKHKGAGFLLQKEIDFASNLIKHPARPFVAVVGGSKVSGKLQALTNLLPKVDKLIIGGGMAFTFLKALGYDIGNSLLEEELLEEANKILTKGKNLGVKIYLPVDVVAAPACSQDVPMKFVPAQEIPNGWMGLDIGPASVRLFKEVISDAQTIWWNGPMGVFEIDKFSKGSIKMSHYISEGHATSVVGGGDTADVVARAGDADEMTFISTGGGASLELIEGKELPGVKALRSKENE

SEQ ID NO: 108383 - DNA, 1254 bp, Candida albicans
  CDS (1)..(1254): transl_table=12
atgtcattatctaacaaattatcagtcaaagacttagacgttgctggaaagagagtctttatcagagttgacttcaacgtcccattggacggtaagactatcaccaacaaccaaagaattgttgctgctttgccaaccatcaaatacgttgaagaacataaaccaaaatacattgtcttggcttcccacttgggtagaccaaacggtgaaagaaacgacaaatactcattagctccagttgctactgaattggaaaaattgttgggtcaaaaagtcaccttcttgaacgattgtgttggtccagaagtcaccaaggctgttgaaaacgccaaagatggtgaaatctttttgttggaaaacttgagataccacattgaagaagaaggttcttccaaagacaaggatggtaagaaagtcaaggctgatccagaagccgttaagaaattcagacaagaattgacttcattggctgatgtctacattaacgatgcctttggtactgctcacagagcccactcctctatggttggtctcgaagttccacaaagagctgctggtttcttaatgtccaaagaattggaatactttgctaaggctttggaaaacccagaaagaccattcttggccattttgggtggtgctaaagtttctgacaagattcaattgattgacaacttgttggacaaggttgatatgttgattgttggtggtggtatggccttcactttcaagaaaatcttgaacaaaatgccaattggtgattctcttttcgatgaagccggtgctaaaaacgttgaacacttggttgaaaaagctaagaaaaacaatgttgaattgatcttgccagttgattttgtcactgctgataaattcgacaaagatgccaaaacttcttctgctactgatgctgaaggtattccagacaactggatgggtttggactgtggtccaaaatctgtcgaattgttccaacaagctgttgccaaagctaagaccattgtttggaacggtccaccaggtgttttcgaatttgaaaaattcgccaacggtactaaatccttattggatgctgctgtcaaatctgctgaaaatggtaacattgttatcattggtggtggtgatactgctactgttgctaagaaatacggtgtcgttgaaaaattatcgcacgtttctactggtggtggtgcttcattggaattattagaaggtaaagacttgccaggtgtagttgctctttccaacaaaaactaa

SEQ ID NO: 108384 - protein, 417 aa, Candida albicans
MSLSNKLSVKDLDVAGKRVFIRVDFNVPLDGKTITNNQRIVAALPTIKYVEEHKPKYIVLASHLGRPNGERNDKYSLAPVATELEKLLGQKVTFLNDCVGPEVTKAVENAKDGEIFLLENLRYHIEEEGSSKDKDGKKVKADPEAVKKFRQELTSLADVYINDAFGTAHRAHSSMVGLEVPQRAAGFLMSKELEYFAKALENPERPFLAILGGAKVSDKIQLIDNLLDKVDMLIVGGGMAFTFKKILNKMPIGDSLFDEAGAKNVEHLVEKAKKNNVELILPVDFVTADKFDKDAKTSSATDAEGIPDNWMGLDCGPKSVELFQQAVAKAKTIVWNGPPGVFEFEKFANGTKSLLDAAVKSAENGNIVIIGGGDTATVAKKYGVVEKLSHVSTGGGASLELLEGKDLPGVVALSNKN

SEQ ID NO: 108385 - DNA, 1251 bp, Candida glabrata
  CDS (1)..(1251)
atgtctctatcctctaagctaactgttcaagaccttgaattgaaggacaagcgtgtcttcatcagagttgacttcaacgtcccattggatggtaagaagatcacttctaaccaaagaattgttgctgctttgccaaccatcaagtatgttttggagcacaacccacgttacgttgtcttggcctcccacttgggtagaccaaacggtgaaagaaacgagaaatactccttggctccagttgctgaagagctacaatccttgttgggtaagccagttactttcttgaacgactgtgtcggtagcgaagttgactccgctgtcaaggcttccgccccaggctccgttatcctattggaaaacttgagataccacatcgaagaagaaggttccagaaaggtcgacggccaaaaggtcaaggcctccgctgaagacgtcgccaagttcagaaaggagctgtgctctctagctgatgtttacatcaacgacgctttcggtaccgcccacagagctcactcctccatggtcggtttcgacttgccacaacgtgctgctggtttccttttgaccaaggaattgcaatacttcggtaaggctttggaaaacccaaccagaccattcttggctatcctaggtggtgctaaggtcgctgacaagatccaattgatcgacaacttgttggacaaggtcgactccatcatcatcggtggtggtatggctttcaccttcaagaaggttttggaaaacgctgaaatcggtgactccatcttcgacaaggctggtgctgaaatcgttccaaagttgatggaaaaggctaaggctaagggtgtcgaagtcgtcctaccagttgacttcgtcattgctgacgctttctccgctgacgctaacaccaagatcgtctccgacaaggaaggtatcccagccggctggcaaggtttggacaatggtccagagtccagaaagttgttcgctgcaactatcgctaaggctaagaccattgtctggaacggtcctccaggtgtcttcgaattcgagaagttcgcttccggtaccaaggctatgttggacgaagttgtcaagtcctccacttccggtaacaccgtcatcatcggtggtggtgacactgctaccgtcgctaagaagtacggtgtcactgacaagatctcccacgtttccactggtggtggtgcctccttggaattgttggaaggtaaggaattgccaggtgtcgctttcctatctgaaaagaactaa

SEQ ID NO: 108386 - protein, 416 aa, Candida glabrata
MSLSSKLTVQDLELKDKRVFIRVDFNVPLDGKKITSNQRIVAALPTIKYVLEHNPRYVVLASHLGRPNGERNEKYSLAPVAEELQSLLGKPVTFLNDCVGSEVDSAVKASAPGSVILLENLRYHIEEEGSRKVDGQKVKASAEDVAKFRKELCSLADVYINDAFGTAHRAHSSMVGFDLPQRAAGFLLTKELQYFGKALENPTRPFLAILGGAKVADKIQLIDNLLDKVDSIIIGGGMAFTFKKVLENAEIGDSIFDKAGAEIVPKLMEKAKAKGVEVVLPVDFVIADAFSADANTKIVSDKEGIPAGWQGLDNGPESRKLFAATIAKAKTIVWNGPPGVFEFEKFASGTKAMLDEVVKSSTSGNTVIIGGGDTATVAKKYGVTDKISHVSTGGGASLELLEGKELPGVAFLSEKN

SEQ ID NO: 108387 - DNA, 1254 bp, Candida maltosa
  CDS (1)..(1254)
atgtcattatccaacaaattatctgtcaaagacttaaacgtcactggtaaaagagtttttatcagagttgatttcaacgttccattggacggtaaaaccatcaccaacaaccaaagaattgttgctgctttaccaactatcaaatatgttgaagaacaaaaaccaaaatgtatcattttagcttctcacttgggtagaccaaacggtgaaagaaatgaaaaatactctttggccccagttgctgctgaattggaaaaattattgggtcaaaaagtcaccttcttggatgactgtgttggtccagaagtcaccaaagctgttgactctgctactgaaggtcaaatcttcttgttggaaaacttgagattccacattgaagaagaaggttctgctaaagacaaggatggtaaaaaaactaaagctgacccagaagctgtcaagaaattcagagaacaattgacttctttagctgatgtttacgtcaatgatgctttcggtactgcccacagagcccactcttctatggttggtttggaagttccagaaagagctgctggtttcttgatgtccaaagaattggaatactttgctaaagctttggaaaacccacaaagaccattcttggctatcttgggtggtgctaaagtttctgacaaaatccaattgattgacaacttgttggacaaagttgatatgttgattgttggtggtggtatggctttcaccttcaaaaaagtcttgaacaacatgccaattggtgactctcttttcgacgaagctggtgctaaaaacgttgaaaacttggttgctaaagccaagaagaacaatgttgaattgatcttgccagttgatttcgtcactgccgacaaattcgacaaagatgctgaagtctctactgccgatgatgttactggtatcccagacaaatggatgggtttagactgtggtccaaaatccagaaaattatttgctgatgccgttgctaaagctaaaaccattgtttggaacggtccaccaggtgttttcgaatttgacaaattcgctgaaggtactaaatctttattggatgacgctgtcaaatccgctgaagttggtaacattgtcatcattggtggtggtgataccgctactgttgctaagaaatacggtgttgttgacaaattatcccacgtttctactggtggtggtgcttctttggaattattagaaggtaaagaattaccaggtgtaactgctctttctaacaaagcctaa

SEQ ID NO: 108388 - protein, 417 aa, Candida maltosa
MSLSNKLSVKDLNVTGKRVFIRVDFNVPLDGKTITNNQRIVAALPTIKYVEEQKPKCIILASHLGRPNGERNEKYSLAPVAAELEKLLGQKVTFLDDCVGPEVTKAVDSATEGQIFLLENLRFHIEEEGSAKDKDGKKTKADPEAVKKFREQLTSLADVYVNDAFGTAHRAHSSMVGLEVPERAAGFLMSKELEYFAKALENPQRPFLAILGGAKVSDKIQLIDNLLDKVDMLIVGGGMAFTFKKVLNNMPIGDSLFDEAGAKNVENLVAKAKKNNVELILPVDFVTADKFDKDAEVSTADDVTGIPDKWMGLDCGPKSRKLFADAVAKAKTIVWNGPPGVFEFDKFAEGTKSLLDDAVKSAEVGNIVIIGGGDTATVAKKYGVVDKLSHVSTGGGASLELLEGKELPGVTALSNKA

SEQ ID NO: 108389 - DNA, 1194 bp, Chlorobium tepidum
  CDS (1)..(1194): transl_table=11
atgcagaaaaagacattgtctgacatatcgttacaaggaaaacgcgtcctgatgcgagtcgatttcaacgtgccgctcgaccaggacaggaacatcactgacgagaaaaggatcgtggaggcactgccttcaatccgcaaggtcatcgacaatggcggcaggctgattctgatgtcgcacctcggaagaccgaaaggcaaggtcaacccggcattctccctttcaccggtcgcaaagcgcctctccgagctgcttgattgcccggtgacgatggctggtgactgcatcggcaccgaggtgatgcagcaggtgctcgccttgcaggacggtgacgtgctcatgctcgaaaacctccgcttccaccccgaagaggaggctaatgatcctgacttcgccagggagctggcttcgctgggcgaaatctacgtcaacgacgcattcggtacggcgcaccgcgcccacgcctcgaccgagggcatcacccacttcatgcagaccgccgttgcgggctacctcatcgaaaaggagctgcgctatctcggtacggcgctcaacgatgcacagcgtccgttcgtggccattctcggcggcgcgaagatttcaggcaagatcgacgtgctcgaaagcctcttcgagaaagtcgataccgttcttgtcggcggcgcgatggtcttcaccttctttaaggctcagggcctcgacgttggcaactcgcttgtcgaagaaaacaagctcgaactggctgtttccctgcttgaaaaagccaaagcgaaaaacgtgcgcttgcttcttccggaagacgtggtcgtggccggagagatttccgccgacgcgccttcgcgtgtcgagccggtcagcgccatctccgcaggcatgattggtctcgacatcggcccggcaaccatcgaaacctaccgcaaggaaattctcgacgcgaaaaccgtgctctggaatggcccgatgggtgtgttcgagatcgaccagttcgccaggggcaccttcgccgtcgcccaggcgcttgccgacgcaaccgcagagggcgcgatcaccatcatcggcggcggcgactcggcggcggccatcgcaaaggctggcctctccgacaaggtgacgcacgtttcgaccggcggtggcgccagcctcgaattcctcgaaggcaaggagctgccgggcatcgcagccctgaacgattag

SEQ ID NO: 108390 - protein, 397 aa, Chlorobium tepidum
MQKKTLSDISLQGKRVLMRVDFNVPLDQDRNITDEKRIVEALPSIRKVIDNGGRLILMSHLGRPKGKVNPAFSLSPVAKRLSELLDCPVTMAGDCIGTEVMQQVLALQDGDVLMLENLRFHPEEEANDPDFARELASLGEIYVNDAFGTAHRAHASTEGITHFMQTAVAGYLIEKELRYLGTALNDAQRPFVAILGGAKISGKIDVLESLFEKVDTVLVGGAMVFTFFKAQGLDVGNSLVEENKLELAVSLLEKAKAKNVRLLLPEDVVVAGEISADAPSRVEPVSAISAGMIGLDIGPATIETYRKEILDAKTVLWNGPMGVFEIDQFARGTFAVAQALADATAEGAITIIGGGDSAAAIAKAGLSDKVTHVSTGGGASLEFLEGKELPGIAALND

SEQ ID NO: 108391 - DNA, 1176 bp, Chromobacterium violaceum
  CDS (1)..(1176): transl_table=11
atgaaattcaacaaactctccgaacagaatctttccggcaagcgcgcgctgatccgcgtggacatgaacgtgccgctgaagaacggcgtgatcggcgacgacacccgcatccgcgccagcctgcccaccatcgaacactgcctgaaggccggcgccgccgtgctgctgatgacccatctcggccgtccgaccgagggcgagcccaagccggaggacagcctggcgccggtggtggcccgcctgtccgagctgctgggcaagccggtgcgcctgatcgccgacttccacgccggcgtcgagcttgcgccgggcgaagtggcgatgctggagaacgtgcgcctgaacaagggcgagaagaagaacaacgacgagctgggccgcgcttacgccgcgctgtgcgacgtcttcgtccacgacgccttcggcaccgcgcaccgcgccgaggcctccacccacgcggtggccaagttcgcgccggtcgcctgcgccggcctgctgctgtcggccgagctcgacgcgctgggcaaagcgctgcaggcgccggcccgcccgctggtggccatcgtcgccggctccaaagtgtcgaccaagctgaccatcctggaagcgctggccgacaaggtggaccagctgatcgtcggcggcggcatcgccaacaccttcctgctggccgagggcaaggccatcggcaaatcgctggccgaggccgatctggtggaagacgcccgccgcgtgatcgccaagatccgcgcccgcggcggcgacgtgccgctgccggccgacgtggtgtgcgccaaggaattcgccgaaaccgccgccgcggccaccaagaacgtggcggaagtggtcgccgacgacatgatcctcgacatcggcccggacgctgccaaacagctggccgccatcatcgcccaggccggcaccgtggtgtggaacggcccggtcggcgtgttcgagttcgaccagttcggcaacggcaccaagacgctggcccaagccatcgcccagtccaaggcgttttcgatcgccggcggcggcgatacgctggcggcgatcgccaagtacggcatcaccgacgacatcagctacatctcgaccggcggcggcgccttcctggagttcctggaaggcaaggagctgccggcggtggccatcctggccgagcgcgcgcagtaa

SEQ ID NO: 108392 - protein, 391 aa, Chromobacterium violaceum
MKFNKLSEQNLSGKRALIRVDMNVPLKNGVIGDDTRIRASLPTIEHCLKAGAAVLLMTHLGRPTEGEPKPEDSLAPVVARLSELLGKPVRLIADFHAGVELAPGEVAMLENVRLNKGEKKNNDELGRAYAALCDVFVHDAFGTAHRAEASTHAVAKFAPVACAGLLLSAELDALGKALQAPARPLVAIVAGSKVSTKLTILEALADKVDQLIVGGGIANTFLLAEGKAIGKSLAEADLVEDARRVIAKIRARGGDVPLPADVVCAKEFAETAAAATKNVAEVVADDMILDIGPDAAKQLAAIIAQAGTVVWNGPVGVFEFDQFGNGTKTLAQAIAQSKAFSIAGGGDTLAAIAKYGITDDISYISTGGGAFLEFLEGKELPAVAILAERAQ

SEQ ID NO: 108393 - DNA, 1194 bp, Clostridium acetobutylicum
  CDS (1)..(1194): transl_table=11
atgaaattcaataaaaagactattgaagatgtagatgttaaaggtaaaagagtattagttagatgcgattttaatgtacctttaaaggacggagtaataactgacgaaaacagacttaatggagcacttccaactataaaatacctttcagagcacggtggaaaagttattctttgttcacatcttggaaaagcaaagggaccagatccttcaaaaactttagctccagttgctaaaagattaagtgaattacttggacgcgaagttaaatttgctgctgatgatacagttgttggcgagaatgctaagaaggctgtagctgaacttaaagaaggagaaatagttcttcttgagaacacaagattcagaccagaagaaggaaaaaatgatgatgcattctcaaaagatttagcttcacttgcagatgtatatgtaaatgatgcatttggaactgctcacagagcacactgctcaacagttggagtaactaaattcgtagatactgctgtatgtggatatttaattcaaaaagaattaaaattcttaggatcagctgttgaaaatccagttagaccttttgttgcaattcttggaggagcaaaagtttctgataaaatcaatgttataaacaatttacttgaaaaagttgatacattaatcatcggaggcggaatggcatacacattcttaaaagctcaaggatatacaataggaacttcacttcttgaagcagacaaagttgattatgcaaaagaaatgatagaaaaagcagaagctaaaggagtaaaattacttcttcctatagataatatagttggagcagaatttaaagcagatacaaaagcagttacaactgaagatgcaaatataccagaaggatacatgggattagatattggaccaaagactcaaaagctttatgctgatgctgttaaagaagctaaaacagttgtttggaatggacctatgggagtatttgaatttgaaaacttcgctaaaggaacaaaagatgttgcaaaagctatggctgaatcagatgcaacaacagttataggtggaggagacagtgctgctgctgttaatcagttaggatttggagacaaaatgactcatatctcaactggaggcggagcttcacttgaattcttagaaggaaaagaacttccaggaatagtagctcttaatgataaataa

SEQ ID NO: 108394 - protein, 397 aa, Clostridium acetobutylicum
MKFNKKTIEDVDVKGKRVLVRCDFNVPLKDGVITDENRLNGALPTIKYLSEHGGKVILCSHLGKAKGPDPSKTLAPVAKRLSELLGREVKFAADDTVVGENAKKAVAELKEGEIVLLENTRFRPEEGKNDDAFSKDLASLADVYVNDAFGTAHRAHCSTVGVTKFVDTAVCGYLIQKELKFLGSAVENPVRPFVAILGGAKVSDKINVINNLLEKVDTLIIGGGMAYTFLKAQGYTIGTSLLEADKVDYAKEMIEKAEAKGVKLLLPIDNIVGAEFKADTKAVTTEDANIPEGYMGLDIGPKTQKLYADAVKEAKTVVWNGPMGVFEFENFAKGTKDVAKAMAESDATTVIGGGDSAAAVNQLGFGDKMTHISTGGGASLEFLEGKELPGIVALNDK

SEQ ID NO: 108395 - DNA, 1218 bp, Corynebacterium diphtheriae
  CDS (1)..(1218): transl_table=11
atggctattaaaactcttaaagatctcttggcagaaggcgttgaaggacgccacgtgcttgttcgttcagatttcaatgtaccgctgaacgatgatcgtgaaattactgatgctggacgtattaccgcctcgctcccaacgatcaaagcattagttgacaacggtgctcgagtaatcttgatggctcacttgggccgccccaagggagaagtaaatgaaaaattctcactggctcctgtagcggaggcattgtctgaagcccttggacagtatgtcgcactcgcaggcgacgtcgttggtgaagatgctcatgaacgcgcgaacggtctcaatgacggtgacgttctgctccttgaaaacgttcgctttgatccacgcgagacctcgaaggaagaagctgagcgtggcgaatttgcggatcagcttgtcgcactcaccgctgaaaatggtgctttcgtatccgatggctttggcgttgttcaccgagctcaggcatcagtatttgatgttgcgcagagattgccgcattatgcgggaacactcgtggaaaaagagctagaagttcttggaaacaaggttgcctctgctccagaacgtccttatgcggtcattctaggtggcgcaaaggtgtctgacaagcttggcgtgatcgaagcgctagcaacaaaggctgacaaacttattattggtggcggaatgtgctacaccttcttggcagccaaaggtatcaacgtgcaaaagtcgctgttgcaagaagaacaaatcaacaagtgcaaagaacttctagaagcatacgctgataagatcgttcttccagttgatctggtagcagctgcagagttcgccagcgatgcagaaaataagatcgttgcaattgacgaaatccccgaaggctggatgtctcttgatgtcgggcctaagactgttgagaagtttgctgaggttctagcgacatcaaagaccgtattctggaatgggcctatgggcgtttttgagtttgaaaacttctcagccggtacccgtggcgtagcagaagctattatcgcagctacggctaatggtgcattctctgttgtcggcggtggcgattcggctgctgctgttcgacttcttggtctagacgaggatggattcagccatatctctactggtggcggagcatcacttgaactcctcgaaggcaaaaaccttcctggcgtttcggtgctcgaaagctaa

SEQ ID NO: 108396 - protein, 405 aa, Corynebacterium diphtheriae
MAIKTLKDLLAEGVEGRHVLVRSDFNVPLNDDREITDAGRITASLPTIKALVDNGARVILMAHLGRPKGEVNEKFSLAPVAEALSEALGQYVALAGDVVGEDAHERANGLNDGDVLLLENVRFDPRETSKEEAERGEFADQLVALTAENGAFVSDGFGVVHRAQASVFDVAQRLPHYAGTLVEKELEVLGNKVASAPERPYAVILGGAKVSDKLGVIEALATKADKLIIGGGMCYTFLAAKGINVQKSLLQEEQINKCKELLEAYADKIVLPVDLVAAAEFASDAENKIVAIDEIPEGWMSLDVGPKTVEKFAEVLATSKTVFWNGPMGVFEFENFSAGTRGVAEAIIAATANGAFSVVGGGDSAAAVRLLGLDEDGFSHISTGGGASLELLEGKNLPGVSVLES

SEQ ID NO: 108397 - DNA, 1176 bp, Coxiella burnetii
  CDS (1)..(1176): transl_table=11
atgtccaatctcaatcttcacaacaaacgcgtgatgattcgtgaagacctgaacgtgccaatgaaaaatggaaaaattacgaatgatgaacggatcgtgcgcgcattgccgacgattcaaaaagccatagaacaaaaagcacgagtgatgattttatcgcatttgggaagacccgaagaagggaaattcgaaaaagaattttctttagccccggtagcgcgattgctgagtaaaaaattaaatcaaaaagtgccgctaatcaatgattggctcaaaggagtcgcggttgaaccgggtcaggccattctttgtgaaaatgtgcggtttaataaaggtgaaaacgaaaataataccgaactcgctaaacggatggcggagttgtgcgatatttttgttatggatgcttttgcaacggcacatcgtgcccaggcatccacggctggcgtcgctgcatacgcaaaattagcctgcgccggtcctttgctcatttccgaagtcgaagctttatcgcgcgccttagaaaatcctcaaaaaccattggtcgctgtggtaggcggctcaaaagtttcaaccaaaattcatttgttagaaaatttattagataaagtcgatcaattaatcgtaggcggtggtattgcaaatacctttttaaaagcgcagggctattcaattggaaaatcgctctgtgaaaatgaatggttggacgcggctcagcaattttgggaaaaagccgccgaaaaaaacgtttctctccccttgccggtggatgttattgtggcggatgaattgtcagaagatgcgaaagcaacggtgaaaaatatcgatgccgtaaccagtaacgaatctattttcgatgtagggccaaacacttcggcaacctacgccaagttaatggcgcaagcgggcacgatcgtttggaacgggcccatcggcgttttcgaaatagaagcatttagtcaaggaacacgcgcgttggcacaagccgttgcaaaaagtaccgcttattctatagtggggggtggagacaccctggctgctttggataaattcaatctgaccgatcaaatgtcttacgtcagtacagccggaggcgcatttttagagtttttggaaggaaaaatactacctgctattaaaattttaacgcaacgagcaaaagagtatgagcaaaaataa

SEQ ID NO: 108398 - protein, 391 aa, Coxiella burnetii
MSNLNLHNKRVMIREDLNVPMKNGKITNDERIVRALPTIQKAIEQKARVMILSHLGRPEEGKFEKEFSLAPVARLLSKKLNQKVPLINDWLKGVAVEPGQAILCENVRFNKGENENNTELAKRMAELCDIFVMDAFATAHRAQASTAGVAAYAKLACAGPLLISEVEALSRALENPQKPLVAVVGGSKVSTKIHLLENLLDKVDQLIVGGGIANTFLKAQGYSIGKSLCENEWLDAAQQFWEKAAEKNVSLPLPVDVIVADELSEDAKATVKNIDAVTSNESIFDVGPNTSATYAKLMAQAGTIVWNGPIGVFEIEAFSQGTRALAQAVAKSTAYSIVGGGDTLAALDKFNLTDQMSYVSTAGGAFLEFLEGKILPAIKILTQRAKEYEQK

SEQ ID NO: 108399 - DNA, 1251 bp, Debaryomyces hansenii
  CDS (1)..(1251)
atgtctttatctaacaagttatctgtcaaggacttagatgtctccggtaagagagttttcatcagagtggatttcaatgttccattagatggtaaaaccatcaccaacaaccaaagaattgttgctgctttaccaactatcaagtatgtgttagaaaacaagcctaaggctgttatcttggcttctcacttaggaagaccaaacggtgaaaaagttgacaagttctctttagctccagttgccagtgaattggaaaagttgttgggtaagaaggttaacttcttagacgactgtgttggtgacaatgttgaaaaagctgtgaacggtggtagtgacggtgaagttttcttattagaaaacttgagattccacatcgaagaagaaggttcgcaaaagaaggacggtgaaaaggtcaaggcttccggcgaagatgtcaagaaattcagacaacaattgaccaacttggccgatgtctacgttaatgatgctttcggtactgcccacagagcccactcttctatggttggtttagaattaccacaaaaagctgctggtttcttaatggccaaggaattagaatactttgctaaggccttagaaaacccagtcagaccattcttagccatcttaggtggtgccaaggtttctgacaagatccaattgatcgacaacttgttagacaaggtcgatttattgattgttggtggtggtatgtctttcaccttcaagaaggtcttagacaacatgccaattggtgactccttgttcgacgaagctggtgctaagaacgtcgaaaacttagttgctaaggctaagaagaacaacgtcaagattgtcttgccggttgatttcattactgccgacaaattcgacaaggatgctaagacctccactgccactgaagacgaaggtatcccagacaattggatgggtttagatgctggtccaaagtccaacgaattgtttgctaagactgttgctgaagctaagactattgtctggaatggtccaccaggtgttttcgaattcgacaacttcgctaaaggtactaagtctttattagatgctgctgtcaagtctgctgaatctggtaacactgttatcatcggtggtggtgacactgctactgttgctaagaagtacggtgttgttgacaagttgtcccatgtctctaccggtggtggtgcttctttagaattattggaaggtaaggaattgccaggtgttgttgctatttccgataagaaataa

SEQ ID NO: 108400 - protein, 416 aa, Debaryomyces hansenii
MSLSNKLSVKDLDVSGKRVFIRVDFNVPLDGKTITNNQRIVAALPTIKYVLENKPKAVILASHLGRPNGEKVDKFSLAPVASELEKLLGKKVNFLDDCVGDNVEKAVNGGSDGEVFLLENLRFHIEEEGSQKKDGEKVKASGEDVKKFRQQLTNLADVYVNDAFGTAHRAHSSMVGLELPQKAAGFLMAKELEYFAKALENPVRPFLAILGGAKVSDKIQLIDNLLDKVDLLIVGGGMSFTFKKVLDNMPIGDSLFDEAGAKNVENLVAKAKKNNVKIVLPVDFITADKFDKDAKTSTATEDEGIPDNWMGLDAGPKSNELFAKTVAEAKTIVWNGPPGVFEFDNFAKGTKSLLDAAVKSAESGNTVIIGGGDTATVAKKYGVVDKLSHVSTGGGASLELLEGKELPGVVAISDKK

SEQ ID NO: 108401 - DNA, 1164 bp, Escherichia coli O157
  CDS (1)..(1164): transl_table=11
atgtctgtaattaagatgaccgatctggatcttgctgggaaacgtgtatttatccgtgcggatctgaacgtaccagtaaaagacgggaaagtaaccagcgacgcgcgtatccgtgcttctctgccgaccatcgaactggccctgaaacaaggcgcaaaagtgatggtaacttcccacctgggtcgtcctaccgaaggcgagtacaacgaagaattctctctgctgccggttgttaactacctgaaagacaaactgtctaacccggttcgtctggttaaagattacctcgacggcgttgacgttgctgaaggtgaactggttgttctggaaaacgttcgcttcaacaaaggcgagaagaaagacgacgaaatcctgtccaaaaaatacgctgcactgtgtgacgtgttcgtaatggacgcattcggtactgctcaccgcgcgcaggcttctactcacggtatcggtaaattcgctgacgttgcgtgcgcaggcccgctgctggcagctgaactggacgcgctgggtaaggcactgaaagaacctgctcgcccgatggtggctatcgttggtggttctaaagtatctaccaaactgaccgttctggactccctgtctaaaatcgctgaccagctgattgttggtggtggtatcgctaacacctttatcgcggcacaaggccacgatgtgggtaaatccctgtacgaagctgacctggttgacgaagcaaaacgtctgctgaccacctgcaacatcccggttccgtctgatgttcgcgtagcaaccgagttctctgaaaccgctccggctaccctgaaatctgttaacgacgtgaaagctgacgagcagatcctggatatcggtgatgcttccgctcaggaactggctgaaatcctgaagaatgcgaaaaccattctgtggaacggtccggttggcgtgttcgaattcccgaacttccgcaaaggtactgaaatcgtggctaacgctatcgcagacagcgaagcgttctccatcgctggcggcggcgacactctggcagcaatcgacctgttcggcattgctgacaaaatctcctacatctccactggcggcggcgcattcctcgaattcgtggaaggtaaagtactgcctgcagtagcgatgctcgaagagcgcgctaagaagtaa

SEQ ID NO: 108402 - protein, 387 aa, Escherichia coli O157
MSVIKMTDLDLAGKRVFIRADLNVPVKDGKVTSDARIRASLPTIELALKQGAKVMVTSHLGRPTEGEYNEEFSLLPVVNYLKDKLSNPVRLVKDYLDGVDVAEGELVVLENVRFNKGEKKDDEILSKKYAALCDVFVMDAFGTAHRAQASTHGIGKFADVACAGPLLAAELDALGKALKEPARPMVAIVGGSKVSTKLTVLDSLSKIADQLIVGGGIANTFIAAQGHDVGKSLYEADLVDEAKRLLTTCNIPVPSDVRVATEFSETAPATLKSVNDVKADEQILDIGDASAQELAEILKNAKTILWNGPVGVFEFPNFRKGTEIVANAIADSEAFSIAGGGDTLAAIDLFGIADKISYISTGGGAFLEFVEGKVLPAVAMLEERAKK

SEQ ID NO: 108403 - DNA, 1266 bp, Emericella nidulans
  CDS (1)..(1266)
atgtctctcaccagcaagctttccatcacagatgtggatctcaaggacaagcgtgtcctgatccgagttgacttcaatgtgcccctcgacaagaacgacaacaccacaatcaccaaccctcagcgtatcgtcggtgctctgcctaccatcaagtatgccatcgataacggcgccaaggccgtcatcctcatgtcccaccttggccgtcctgatggcaagaagaaccccaagtacagcttgaagcccgttgtgcccaagctcaaggaactgctcggccgcgacgtcatctttactgaggactgcgttggcccagaggtcgaggagactgttaacaaggcctccggtggccaggtcatccttcttgagaacctgcgcttccacgccgaggaggaaggaagctctaaggatgcagacggcaacaaggtcaaggccgacaaggacgcggttgcgcagttccgtaagggattgactgctttgggtgacatttacatcaacgatgcctttggtaccgcccaccgtgctcacagctccatggtcggtgtcgaccttccccagaaggcctccggattcctcgtcaagaaggagctcgaatacttcgcgaaggccctcgaggagccccagcggcccttcctcgccatccttggtggctctaaggtttccgacaagatccagctaattgacaacctccttcccaaggtcaacagcctcatcattaccggaggcatggctttcaccttcaagaagactctcgagaacgtcaagattggaagcagtctcttcgatgaggccggcagcaagatcgtcggtaacatcatcgaaaaggccaagaagcacaacgtcaaggttgttcttcccgtcgactacgtcactgccgataagtttgccgccgatgcgaagactggctacgccactgatgagcagggtatccctgatggttacatgggcttagacgttggcgagaagagtgtcgagtcctacaagcagaccattgccgagtccaagactattctgtggaacggaccccccggtgtctttgagatggagcccttcgctaaggctaccaaggctactcttgacgctgctgtggcggctgttcagaacggtgctaccgtcattattggtggtggtgacactgctaccgttgccgccaagtacggcgctgaggacaagattagccacgtttctaccggtggtggtgcctcgctggagctcctggagggcaaggaactgcctggtgttgctgctctctctgagaaaagtaagtaa

SEQ ID NO: 108404 - protein, 421 aa, Emericella nidulans
MSLTSKLSITDVDLKDKRVLIRVDFNVPLDKNDNTTITNPQRIVGALPTIKYAIDNGAKAVILMSHLGRPDGKKNPKYSLKPVVPKLKELLGRDVIFTEDCVGPEVEETVNKASGGQVILLENLRFHAEEEGSSKDADGNKVKADKDAVAQFRKGLTALGDIYINDAFGTAHRAHSSMVGVDLPQKASGFLVKKELEYFAKALEEPQRPFLAILGGSKVSDKIQLIDNLLPKVNSLIITGGMAFTFKKTLENVKIGSSLFDEAGSKIVGNIIEKAKKHNVKVVLPVDYVTADKFAADAKTGYATDEQGIPDGYMGLDVGEKSVESYKQTIAESKTILWNGPPGVFEMEPFAKATKATLDAAVAAVQNGATVIIGGGDTATVAAKYGAEDKISHVSTGGGASLELLEGKELPGVAALSEKSK

SEQ ID NO: 108405 - DNA, 1194 bp, Enterococcus faecalis
  CDS (1)..(1194): transl_table=11
atggctaaaaagacaattaaagatgtagatttaaaagacaaaaaagtccttgtccgtgttgactttaacgttccgttaaaagatggcgtgatcacaaacgataatcgtatcgtagcggctttaccaacaatcaaatacgtgattgaaaatggcggaaaagcaattcttttctctcatttaggtcgtgtaaaaacagaagaagacaaagctggcaaatcattaaaaccagtggctgaacgtttaagcgaattactaggtcaaccagttacttttgttccagaaacacgtggtaaagaattagaagacgctgttaacaatatgaaagatggcgacgttttagtatttgaaaacactcgttttgaagatgttgacggcaaaaaagaaagcggcaatgacgctgaattgggtaaatactgggcttctttaggcgatgtatttgtcaatgatgcttttggtactgcacaccgtgcacatgcctcaaacgttggaattgcttcaactggtatcccaacagttgctggtttcttaatggaaaaagaaattaaattcatcggcgaagctgttgaaaatccaaaacgtccattcgtagcaatcttgggtggcgcaaaagtttctgacaaaatcgctgtcattgaaaacctaattgaaaaagccgataaaattttaatcggtggcggtatggcttacacattcatgaaagcacaaggctatagtgttggtttatctttacttgaagaagataaagtggacttagcgaaaagcttaatggaaaaagctggcgacaaattagttttaccggttgatacagttgtctctaaagagttcagcaatgacgctcctttccacacggttccttcaactgaaatcccagatgatgaagaaggcttggatattggtgaaaaaacaattgaattattcgctaacgaattacaaggtgcgaaaacagttgtttggaatggaccaatgggcgtatttgaaatgagtaactttgccaaaggaacaattggtgtttgtgaagcgattgctaatttagaagacgcaacaacaatcatcggtggcggggactctgctgctgcagcaattcaattaggctacgaaaacaaattctctcacatctcaacaggtggcggagcaagtttagaattattagaaggcaaaactttaccaggtttagcttctattaacgataaataa

SEQ ID NO: 108406 - protein, 397 aa, Enterococcus faecalis
MAKKTIKDVDLKDKKVLVRVDFNVPLKDGVITNDNRIVAALPTIKYVIENGGKAILFSHLGRVKTEEDKAGKSLKPVAERLSELLGQPVTFVPETRGKELEDAVNNMKDGDVLVFENTRFEDVDGKKESGNDAELGKYWASLGDVFVNDAFGTAHRAHASNVGIASTGIPTVAGFLMEKEIKFIGEAVENPKRPFVAILGGAKVSDKIAVIENLIEKADKILIGGGMAYTFMKAQGYSVGLSLLEEDKVDLAKSLMEKAGDKLVLPVDTVVSKEFSNDAPFHTVPSTEIPDDEEGLDIGEKTIELFANELQGAKTVVWNGPMGVFEMSNFAKGTIGVCEAIANLEDATTIIGGGDSAAAAIQLGYENKFSHISTGGGASLELLEGKTLPGLASINDK

SEQ ID NO: 108407 - DNA, 1262 bp, Glomus mosseae
  CDS (1)..(1251)
atgtcactttcaaacaaattatcaatacgagacttaaacgtcaaagacaaacgagtcttaatacgagtcgacttcaacgtccccctcgatggcacaaccataaccaacaaccaacgcatcgtcgcagcccttccaacaatcaagtatgcactagaacagaaagccaaaaccgtcgtgttaatgtcacatcttggccgtcctgacggaaagaaggtcgacaagtattcacttgcgccagtggcgaaggaggtcgagagactgcttgggaagaaggtgacgtttttggaggattgcgttggggagggtgtggagaattatgtgaagaatgcctgtgatggggaggttattctcttggagaatttgaggtttcacgctgaggaggaggggagctccaaggggcctgatggcaagaaagttaaggcggatctggaaaaagttaaggagtttagaaggtctttgacggctcttggtgatgtttacatcaatgatgcttttggaaccgcacatcgagcacacagttccatggttggcgtcgaattacctcaaaaagcagccggtttcctcgtcaagaaagaattagagtactttgccaaagcgctcgaatcccccgaacgacctttcctagctattctcggcggtgcaaaggtgtccgataagatccagctcattgataacttgatcgccaaggtagatagtttgatcatttgtggtggtatggcgttcacgttcaagaagacgcttgagaacgtcaagattgggaactcgctatttgacgcggacggcgcgaagaccgttggagaggtcatggagaaggcgaagaagcatgacgttgaggtcgtcttgcctgttgactacattaccgcggataagtttgccaaggacgcgcaagttgggtatgctactgatcaagagggaattcctgatgggtggatgggattggactgcggcgagaagtctgttgagttgtataagcagactattgctaaggcgaagactatcctttggaatgggcctgctggggttttcgagtttgataactttgctaaggggacgaaggctactttggactgcgcagttgaggcagcacaatctggaaagattgtcatcatcggtggtggtgataccgcaactgttgctgcgaaatatggcgttgaggacaagctgagccatgtctcgactggcggtggagcttctttggagttgctcgaaggcaaggatcttcctggtgtctctgctctctcgagtaagtaaacgagattcac

SEQ ID NO: 108408 - protein, 416 aa, Glomus mosseae
MSLSNKLSIRDLNVKDKRVLIRVDFNVPLDGTTITNNQRIVAALPTIKYALEQKAKTVVLMSHLGRPDGKKVDKYSLAPVAKEVERLLGKKVTFLEDCVGEGVENYVKNACDGEVILLENLRFHAEEEGSSKGPDGKKVKADLEKVKEFRRSLTALGDVYINDAFGTAHRAHSSMVGVELPQKAAGFLVKKELEYFAKALESPERPFLAILGGAKVSDKIQLIDNLIAKVDSLIICGGMAFTFKKTLENVKIGNSLFDADGAKTVGEVMEKAKKHDVEVVLPVDYITADKFAKDAQVGYATDQEGIPDGWMGLDCGEKSVELYKQTIAKAKTILWNGPAGVFEFDNFAKGTKATLDCAVEAAQSGKIVIIGGGDTATVAAKYGVEDKLSHVSTGGGASLELLEGKDLPGVSALSSK

SEQ ID NO: 108409 - DNA, 1209 bp, Helicobacter hepaticus
  CDS (1)..(1209): transl_table=11
atgaaggaaactggaatcgaattaatgaaaaatacaaaaagtgtgcgtgatattgacgtcaaagacaaaagagtgcttattcgcgtggattttaatgtgccaatggacgaggattttgatatttcagatgatacgcgtatccgcgaagcactacccactattaattattgcattgataatcacgcacaaaatatagtgcttgtcagccatttagggcgtcccaaaggacgcaatgcagagttttcactcaaacacgtgcttaaacgtgtagagcgacttttaggacgcgatatagctttcgcagagacaatagaaaatgtagaaaatcttcaacaacaaagcaagagtggaagtgtgattttacttgaaaatattagattctatgagggagaggaaaaaaatgatgaggaactctctactaaactcgcctctatttgtgatgtgtatatcaatgatgcctttggcacaagccatcgcgcacattcaagcacctgtggcattgctaaatatgccaaagagtgtgtagcaggattattgctcaaaaaagaaattgattcatttgctaaagcaatggcaaatccacttaaaccggtgttacttatcgttggcggaagcaaggtaagctctaaactcgcactcttatataatatccttgatgtggtggataaaatcatcattggtggtgcgatgagcaatactttccttaaagcacgaggttttgatatgcaaaaatcccttgtggaagatgatttagtgagtgaagcacgtaagattttggataaagcaaaagaaaaaaaagtcaaaatctaccttcctgtagatgttgtaagcactgatgatattaaagaacatcgccatatcaaaatcacgcctgcacaagatataccagagggctttatggcagtagatatgggacctgcaacaagtaagctctttagtgaagtggtaagggattctcaaacaattatttggaatggaccgcttggcatttatgaaatacaagctttttcacgcggcacttttaaccttgcccacgctgtgagcgatacttatgcctttagtcttattggtggtggcgatactgctgatgcaatagacaaggcaggagagcgagacaatatgagctttatttccacgggtggtggagcaagtttggagctacttgaagggaaaattcttcctgcatttgaggtgcttgagcgcaaataa

SEQ ID NO: 108410 - protein, 402 aa, Helicobacter hepaticus
MKETGIELMKNTKSVRDIDVKDKRVLIRVDFNVPMDEDFDISDDTRIREALPTINYCIDNHAQNIVLVSHLGRPKGRNAEFSLKHVLKRVERLLGRDIAFAETIENVENLQQQSKSGSVILLENIRFYEGEEKNDEELSTKLASICDVYINDAFGTSHRAHSSTCGIAKYAKECVAGLLLKKEIDSFAKAMANPLKPVLLIVGGSKVSSKLALLYNILDVVDKIIIGGAMSNTFLKARGFDMQKSLVEDDLVSEARKILDKAKEKKVKIYLPVDVVSTDDIKEHRHIKITPAQDIPEGFMAVDMGPATSKLFSEVVRDSQTIIWNGPLGIYEIQAFSRGTFNLAHAVSDTYAFSLIGGGDTADAIDKAGERDNMSFISTGGGASLELLEGKILPAFEVLERK

SEQ ID NO: 108411 - DNA, 1251 bp, Kluyveromyces lactis
  CDS (1)..(1251)
atgtctttgagttcaaaattgactgtcaaggatttggatgtcactggtaaaagagtgttcatcagagttgatttcaacgtcccattggacggtaagaagatcacttccaaccaaagaattgtagcagctctgcctactattcaatacgttttggaaaagaagccaaaggccattgtcttggcctctcatttgggtagaccaaacggtgaagttaacgacaaatactcattggctccagttgccgatgaattgtctagactattgcaaaagccagttactttcttgcatgactgtgttggtgaagaagtcaccaatgccgttaacaacgctaaggacggtgaagttttcctattggaaaacttgagattccacatcgaagaagaaggttccagaaaggtggatggtaacaaggttaaggctgacaaggctgctgttaccaaattcagagaacaattgagttctttggccgatgtttacgttaacgatgccttcggtaccgctcacagagctcactcttccattgtcggtttcgacttgccaaacagagctgccggtttcttgttgtccaaggaattgcaatactttgctaaggctttggaaaacccaaccagaccattcttggctatcttgggtggtgctaaggttgcagacaagattcaattgatcgacaatttgttggacaaggtcgattctttgatcattggtggtggtatggctttcaccttcaagaaggtcttggaaaacactgaaatcggtgactccatctacgatgctgctggtgccgaattggttccaaagttggtcgaaaaggctaagaagaacaacgtcaagatcgtcttgccaactgacttcgtcattggtgacaagttctctgctgatgctaacacaaaggttgtcaccgacaaggaaggtattccaagcggctggcaagggttggacaacggtccagaatctagaaaggctttcgctgccactgttgctgaagctaagactatcgtctggaacggtccaccaggtgtcttcgaatttgctcctttcgctaagggtaccgaagctctattggacgccgttgtcgcctcctctcaagctggtaacaccgtcatcatcggtggtggtgacaccgctaccgtcgccaagaagtacggtgtcgtcgacaagatctctcacgtctccactggtggtggtgcttctttggaattgttggaaggtaaagaattgcctggtgtcactttcttgtccaacaagcaataa

SEQ ID NO: 108412 - protein, 416 aa, Kluyveromyces lactis
MSLSSKLTVKDLDVTGKRVFIRVDFNVPLDGKKITSNQRIVAALPTIQYVLEKKPKAIVLASHLGRPNGEVNDKYSLAPVADELSRLLQKPVTFLHDCVGEEVTNAVNNAKDGEVFLLENLRFHIEEEGSRKVDGNKVKADKAAVTKFREQLSSLADVYVNDAFGTAHRAHSSIVGFDLPNRAAGFLLSKELQYFAKALENPTRPFLAILGGAKVADKIQLIDNLLDKVDSLIIGGGMAFTFKKVLENTEIGDSIYDAAGAELVPKLVEKAKKNNVKIVLPTDFVIGDKFSADANTKVVTDKEGIPSGWQGLDNGPESRKAFAATVAEAKTIVWNGPPGVFEFAPFAKGTEALLDAVVASSQAGNTVIIGGGDTATVAKKYGVVDKISHVSTGGGASLELLEGKELPGVTFLSNKQ

SEQ ID NO: 108413 - DNA, 1254 bp, Methanococcus jannaschii
  CDS (1)..(1254): transl_table=11
atgattatgtttttgacgttggatgactttaattttgaagataagagggtagttttgagagtagatataaactgtccaatagacccaaacactggagagattttagatgataagaggattagagaaataaaaagcacaattacagagcttataaacaaaggtgctaaggttgttatcttagctcaccaaagtaggccagggaagaaagattttactacattaaaaaaccatgcaaaggttttatcagatgttattggtaaagaagtagagtatattgatgaagttataggctctacagcaagagaggcaataatcaatatgaaatgtggagatgtcattttattggagaatgttaggttttattctgaggaggttttaagtgattggaaaaaatgggaaaatataactccaaaaaaacaggcagagacaaatttaattaaaagattagccccattatttgactattttgttaatgatgcctttgcagctgcacacagggctcagccatcattagttggtttctcttactatatgccaatgattgctggaagattgatggagagagaggttggggttttatcaaaggttttagaaaatccagaaaagccctgtgtttatgttttgggaggagctaaggcagatgattcaataagagttatgaaaaacgtcttagaaaatggaactgctgataaggttttaacttcaggaattgttgctaacatcttccttgtagctatgggatatgatttaggcgtaaatatggatattattgaaaatcttggattaaaaagccaaatagagattgctaaagagttgttaaataaatttgaagataaaatcgttgtccctgttgatgtagccctaaatattaatgaagagagggttgaagctgatttaaataaggatgaaaaagtagaacatttaattaatgatattggggagaaaactatcgaactttacagtgaaataattaatgaagcaaaaaccattgttgccaatggtccagcgggagtgtttgaaaaagaggcatttgcaaaaggaactgaagagctgttgaaagcgatagctaactcaaaagggttttcagttattggaggagggcatttatctgcagctgctgaattatttggaattgctgataagattgaccatgttagtacgggaggtggagcaaccttagatttcttagctggagaaaaattgccagtaatagagatgcttaaggaatcatataagaaatataagggacaataa

SEQ ID NO: 108414 - protein, 417 aa, Methanococcus jannaschii
MIMFLTLDDFNFEDKRVVLRVDINCPIDPNTGEILDDKRIREIKSTITELINKGAKVVILAHQSRPGKKDFTTLKNHAKVLSDVIGKEVEYIDEVIGSTAREAIINMKCGDVILLENVRFYSEEVLSDWKKWENITPKKQAETNLIKRLAPLFDYFVNDAFAAAHRAQPSLVGFSYYMPMIAGRLMEREVGVLSKVLENPEKPCVYVLGGAKADDSIRVMKNVLENGTADKVLTSGIVANIFLVAMGYDLGVNMDIIENLGLKSQIEIAKELLNKFEDKIVVPVDVALNINEERVEADLNKDEKVEHLINDIGEKTIELYSEIINEAKTIVANGPAGVFEKEAFAKGTEELLKAIANSKGFSVIGGGHLSAAAELFGIADKIDHVSTGGGATLDFLAGEKLPVIEMLKESYKKYKGQ

SEQ ID NO: 108415 - DNA, 1197 bp, Onion yellows phytoplasma
  CDS (1)..(1197): transl_table=11
atgacaaaatccttaactaatatgaatattacaaataaaaaagttttattgcgagcagacctaaatgttcctttagaaaacagcgttatcacagatgacaacagaattaaggctattttacctactttaaaatatttagttcagcaaaaagctaaagttattattttttctcatttgggacgcgttaaaactgaagctgataaagcccattttagcttgcaagtggtagctgaaaaaattgctttttatttgcaacaaaaattaaagtttgttccagaaacccaaggcaacaccttaaatcaagctgttggccagatgcttccaggggatgttttagtagtccaaaatactcgttttgaagatgttcctttcaaaaaagaaagtaaaaacgaccccgaattaggcaaatattgggcatctttaggtgatgtttttgtcaatgatgcttttggtacatgccatcgcacccacgcttctaatgtaggcattgcaacatatatcaaagaaaaatgctttggttttttggtcgaaaaagaaatatcttttctcaaaaaaattgtccaaactcctcaaagacctttggttgctgttttgggtggctccaaagtatctgacaaaattggagttattcgtagtcttttgcaaaaagttgatgttcttttgataggtggaggaatgagctatacttgtcttaaagccaaatgttttaacataggaactagcttgttagaagcagacaaaatccctttagtaaaagaattattagcttctccagaaggcaaaaaaatcgttttacctaaagattttgtttgtggcaaagaattttcgccaacaacacaagcagctgtttatagttatgataatatttctgatgatgtaatgggacttgatatcggacctcaaacaattgaacttttcaaaacgtatttacaaacggctcaaacagttgtttggaatggtcctgtaggagtgtttgaatttgaacaattttctaaaggaaccaaagctttagccgaaacaataagcaatctttcgcccaatacaactaccattattggtggtggcgatagcgctgctgcagtctttaaattcggtctagatcaaaatttcagccatatttctacgggtggaggcgcttttttagaatttttagaaggaaaaccaatgccagggcttgcatgtatggagaaactgtaa

SEQ ID NO: 108416 - protein, 398 aa, Onion yellows phytoplasma
MTKSLTNMNITNKKVLLRADLNVPLENSVITDDNRIKAILPTLKYLVQQKAKVIIFSHLGRVKTEADKAHFSLQVVAEKIAFYLQQKLKFVPETQGNTLNQAVGQMLPGDVLVVQNTRFEDVPFKKESKNDPELGKYWASLGDVFVNDAFGTCHRTHASNVGIATYIKEKCFGFLVEKEISFLKKIVQTPQRPLVAVLGGSKVSDKIGVIRSLLQKVDVLLIGGGMSYTCLKAKCFNIGTSLLEADKIPLVKELLASPEGKKIVLPKDFVCGKEFSPTTQAAVYSYDNISDDVMGLDIGPQTIELFKTYLQTAQTVVWNGPVGVFEFEQFSKGTKALAETISNLSPNTTTIIGGGDSAAAVFKFGLDQNFSHISTGGGAFLEFLEGKPMPGLACMEKL

SEQ ID NO: 108417 - DNA, 1164 bp, Pasteurella multocida
  CDS (1)..(1164): transl_table=11
atgtcagtaatcaaaatgacagacttggatttgagcggcaaacgtgtgtttattcgtgctgatttaaatgtgccagtcaaagatggcaaagtgacttctgatgcacgtatccgtgcgaccatccctaccttgaaacttgcgcttgaaaaaggcgcaaaagtgatggtgacttcacacttaggtcgcccaacagaaggcgaatttgatgaagcaaactcactgaaacctgtagttgattacttaaatgcaaatttagatgtgcctgttcgtttagtacgcgattatttagacggtgtggacgttaaccaaggcgaaatcgtggtattagaaaacgtgcgcattaacaaaggtgagaagaaaaacgatcctgaattaggcaaaaaatatgccgcactttgcgatgtctttgtgatggatgcctttggtactgcacaccgtgcgcaagcctcgacttacggtgtggctgaatatgcgccagtggcttgtgcaggtccattattagcggctgaattagatgctttaggcaaagccttaaaagaacctgcgcgtccaatggtggcgattgtaggggggtcgaaagtctcaaccaaattagaagtgttaaattccttatctaaaattgcggaccaaattattgtgggcgggggtatcgccaataccttcattgctgcagcaggtcataacgtcggtaaatccttatatgaagaagatttaattcctgtggcgaaaaacttagcagcaagcacagatattcctgtacccgttgatgttcgcgttgggttagaattctctgaaactgcagcagcaacagaaaaagccgtcaatgaagtgaaagatgatgaatccatttttgatattggtgataaatcagcagaacaactcgcggaaatcatcaaaaatgcgaaaacgattctttggaatggtccagtgggcgtgtttgagttcccgaatttccgtaaagggactgaaatcatttctcacgcaatcgctaatagcgaaggtttctcaattgcaggtggtggtgacacattagcggcgattgacctattcggtatcaaagataaaatttcttatatttcaacaggtggtggtgcattcttagaattcgttgaaggtaaagtattaccagcagtagaaatcttagaaaaacgtgcaaatggttaa

SEQ ID NO: 108418 - protein, 387 aa, Pasteurella multocida
MSVIKMTDLDLSGKRVFIRADLNVPVKDGKVTSDARIRATIPTLKLALEKGAKVMVTSHLGRPTEGEFDEANSLKPVVDYLNANLDVPVRLVRDYLDGVDVNQGEIVVLENVRINKGEKKNDPELGKKYAALCDVFVMDAFGTAHRAQASTYGVAEYAPVACAGPLLAAELDALGKALKEPARPMVAIVGGSKVSTKLEVLNSLSKIADQIIVGGGIANTFIAAAGHNVGKSLYEEDLIPVAKNLAASTDIPVPVDVRVGLEFSETAAATEKAVNEVKDDESIFDIGDKSAEQLAEIIKNAKTILWNGPVGVFEFPNFRKGTEIISHAIANSEGFSIAGGGDTLAAIDLFGIKDKISYISTGGGAFLEFVEGKVLPAVEILEKRANG

SEQ ID NO: 108419 - DNA, 1164 bp, Photorhabdus luminescens
  CDS (1)..(1164): transl_table=11
atgtctgtaattaagatgaccgatttagatctggcgggtaagcgagttttaatccgcgctgacctgaacgttccggtaaaagatggcaaagtcacctctgatgcgcgtatccgtgcctccttgccaaccatcgaagcagcattgaaacagggcgccaaggtcatgatcacttctcaccttggccgcccgattgaaggcgaatacaacgaagaattctcgctgaaaccagtagtagactatctaaaagagaaattatcctcctccgttcgactggaaaaagagtatctggaaggcgtggaagtatcagaaggtgagctggtcgtgctggagaacgttcgctttaataaaggtgagaagaaagacgacgaaagcttggctaaaaaatacgcttccctgtgtgatatttatgtcatggatgcattcggtaccgctcatcgtgctcaggcttcgactcacggcgtggctaagtttgctcctgttgcttgtgccggtcctttattgttcggggaattagaggcattaggtaaagcgttggataatccggctcgcccaatggtggctattgtcggtggttctaaagtttcaaccaagctgaccgttctggatacgctgtctaaaattgccgaccaactgattgttggtggtggtattgcgaatacgtttgttgccgcggaaggtcacaatgttggccgttctctctatgaagatgatttgatcccggaagcgaaaaaattgctgataagctgtgatattccggtgccaaccgatgttcgtgtagcaacagaattctctgaaacggccgaagcaaccttgaaatcctccagtgatattaaagatgatgagcagatcctcgatttgggagatgaatccgctcaacggctggctgatatcctgaaaaacgctaaaacgatcctatggaatggcccggttggtgtatttgaattccctaatttccgtcaagggactgaaattgtcgcgcgcgccattgctgatagtgatgccttctctatcgccggcggcggcgatacgctggcagcgatcgacctgttcggtattgctgacaaaatttcttatatctctacgggtggtggcgctttcctcgagttcgtggaagggaaaaaactgcctgcggttgtgatgttggaagaacgtgcaaaacagtaa

SEQ ID NO: 108420 - protein, 387 aa, Photorhabdus luminescens
MSVIKMTDLDLAGKRVLIRADLNVPVKDGKVTSDARIRASLPTIEAALKQGAKVMITSHLGRPIEGEYNEEFSLKPVVDYLKEKLSSSVRLEKEYLEGVEVSEGELVVLENVRFNKGEKKDDESLAKKYASLCDIYVMDAFGTAHRAQASTHGVAKFAPVACAGPLLFGELEALGKALDNPARPMVAIVGGSKVSTKLTVLDTLSKIADQLIVGGGIANTFVAAEGHNVGRSLYEDDLIPEAKKLLISCDIPVPTDVRVATEFSETAEATLKSSSDIKDDEQILDLGDESAQRLADILKNAKTILWNGPVGVFEFPNFRQGTEIVARAIADSDAFSIAGGGDTLAAIDLFGIADKISYISTGGGAFLEFVEGKKLPAVVMLEERAKQ

SEQ ID NO: 108421 - DNA, 1251 bp, Pichia pastoris
  CDS (1)..(1251)
atgtctctttcaaataaactttcagtcaaagatctcgatgttgccggaaagcgtgtcttcatccgtgtcgacttcaacgttcctctggatggtgacaagatcaccaacaaccagcgtatcgttgctgctttgccaactatccaatatgttttggatcacaagccaaaggtcgtcgttctggcttctcatttaggccgtccaaacggagaggtcaacccaaaattctctttaaaaccagttgctgctgaattgtcctccctactaggtaagaaggtgactttcttgaacgatagtgttggaccagaggttgagaaggctgtcaactctgcctccaatggagaggttattcttttggagaacttgcgtttccacattgaagaagaaggatctcaaaagaaagatggtcaaaagatcaaggccgacaaggaggctgttgccaggttcagaaagcaattgaccgcattggccgatgtctacgttaacgacgccttcggtaccgctcacagagcccactcttccatggttggatttgaattggagcaaagagctgctggtttcttgatggctaaggagttgacatacttcgctaaggccctggaaaaccctgtcagaccattcttggccatccttggtggtgctaaggtttctgacaagattcaattgattgacaatttgctggacaaggtcgattccatcatcattggtggaggaatggctttcacttttatcaaggttttggataacgttgccattggtaactctttgttcgacgaggctggtgccaagttagttcccggcttagttgagaaagccaagaagaacaatgtcaaactggttcttccagtcgacttcgtcactgccgacgccttctccaaggatgcaaaggtcggtgaagccacggttgagtctggtattccagacggattgcaaggattggacgctggtccaaaatccagagaattgttcgcagctaccatcgctgaggctaagacaatcgtctggaacggtcctccaggtgttttcgagtttgacaagtttgctgaaggtaccaagtctatgttggcagctgccatcaagaacgctcagaacggtggaactgtcatcgttggtggtggtgacacggctaccgttgctaagaagttcggtggtgctgacaagctatcccacgtttccactggaggaggagcttctttggaattattggagggaaaggagcttccaggtgtagtttacttgtccaaaaaggcttaa

SEQ ID NO: 108422 - protein, 416 aa, Pichia pastoris
MSLSNKLSVKDLDVAGKRVFIRVDFNVPLDGDKITNNQRIVAALPTIQYVLDHKPKVVVLASHLGRPNGEVNPKFSLKPVAAELSSLLGKKVTFLNDSVGPEVEKAVNSASNGEVILLENLRFHIEEEGSQKKDGQKIKADKEAVARFRKQLTALADVYVNDAFGTAHRAHSSMVGFELEQRAAGFLMAKELTYFAKALENPVRPFLAILGGAKVSDKIQLIDNLLDKVDSIIIGGGMAFTFIKVLDNVAIGNSLFDEAGAKLVPGLVEKAKKNNVKLVLPVDFVTADAFSKDAKVGEATVESGIPDGLQGLDAGPKSRELFAATIAEAKTIVWNGPPGVFEFDKFAEGTKSMLAAAIKNAQNGGTVIVGGGDTATVAKKFGGADKLSHVSTGGGASLELLEGKELPGVVYLSKKA

SEQ ID NO: 108423 - DNA, 1164 bp, Pseudomonas putida
  CDS (1)..(1164): transl_table=11
atgaccgtgttgaagatgaccgacctcgacctgcaaggtaagcgcgtactgatccgcgaagacctcaacgtgcctgtgaaggacggtgtggtagccagcgatgcgcgtatcctggcagcgctgccgaccatcaagctggccctggagaagggcgcagcggtaatggtctgctcgcacttgggccgcccgaccgaaggcgaattctctgccgagaacagcctcaagccggtcgccgattacctgagcaaggccctgggccgcgacgtgccgctggttgccgactacctggacggtgtcgcggtacaggccggtgaactggtgctgttcgagaacgtgcgcttcaacaagggcgagaaaaagaacgccgacgagctggcgcagaaatacgcagccctgtgcgacgtattcgtcatggacgctttcggcaccgcacaccgcgccgaaggctcgacccatggcgtcgccaagttcgccaaggtggccgctgccggcccactgctggcagccgaactggatgccttgggcaaggccctgaaagccccggccaagccaatggcggccatcgttgccggctccaaggtttccaccaagctggacgtgctgaacagcctcagcagtgtttgcgaccagctgatcgtcggtggcggtattgccaacactttcctggccgctgccggccacccggtgggcaagtcgctgtacgagcctgacctggtggacaccgccaaggccattgccgccaaggtcagcgtgccgctgccagtcgacgtggtggttgccaaggagtttgccgagagcgccgaagccaccgtcaaggccattgccgacgtagctgccgacgacatgatcctggacatcggcccgcaaaccgcggccaatttcgccgagctgctgaaatcgtcgaaaaccattctttggaatggcccggttggcgtgttcgaattcgatcagttcggcaacggcaccaaggtactggccaaggccatcgccgacagcgccgcgttctccatcgccggtggcggtgacaccctggcagccatcgacaaatatggcgtcagcaaggaaatctcctacatttctaccggtggtggcgccttcctcgagttcgtcgagggcaaggtcctgccagctgtggcaattctggaagagcgggccaaggcctga

SEQ ID NO: 108424 - protein, 387 aa, Pseudomonas putida
MTVLKMTDLDLQGKRVLIREDLNVPVKDGVVASDARILAALPTIKLALEKGAAVMVCSHLGRPTEGEFSAENSLKPVADYLSKALGRDVPLVADYLDGVAVQAGELVLFENVRFNKGEKKNADELAQKYAALCDVFVMDAFGTAHRAEGSTHGVAKFAKVAAAGPLLAAELDALGKALKAPAKPMAAIVAGSKVSTKLDVLNSLSSVCDQLIVGGGIANTFLAAAGHPVGKSLYEPDLVDTAKAIAAKVSVPLPVDVVVAKEFAESAEATVKAIADVAADDMILDIGPQTAANFAELLKSSKTILWNGPVGVFEFDQFGNGTKVLAKAIADSAAFSIAGGGDTLAAIDKYGVSKEISYISTGGGAFLEFVEGKVLPAVAILEERAKA

SEQ ID NO: 108425 - DNA, 1227 bp, Pyrobaculum aerophilum
  CDS (1)..(1227): transl_table=11
atgttacttaatgaaattattgacttaataccaaatataaataagtgcctaaaaaagggaaaaacgttaattataagaattgatataaattcgcccattgtaaatggtaaaataattgatgattttagaataagggctcactcgtacaccttgcgcctggcttctgacgcgggggccagggctgtggtgttggcccatcaagggagacctggacaagacgattttacctcacttgagatccataagccgtatatagaaaaatacctagagaggcctataaaatttgtagacgatataataggcccggaggcgaggcgccagataaaagagttgaaagacggcgaaatactgttgctggaaaacgtgaggattctctccgaggaggtaatagaaaaggtgccggaggctcaggcagaaactcttctagtccgcaaactagcccctctagccgactactacgtattcgacggtttcgcggtggctcacagatcgcagccaagcgtagtgggctttccaattgttttgccctcttgcgccggccccgtctttgagagggagctaagggcgttgggagcggtgtttgaaaaacgcggcagaggcgtgacgttaatagcgggaggcgccaaaatgccggacactcttaaggcagtagagcagttgttaaaaaacggctttgtggaaaaagtggccgttggaggcctcgtgggctttgtgtttgccttgggcaaatatggcgtgttaaacagcgcgttaaaacaagaggtagagaagggcggcttcctcccatatatagagagagcccgccaattattggctaaatacggcgcgcagatatacacgcctgtggacttcgcagttaatcaaaacgggaggctagacgttgatatatattcactggcgcaacctccgctagatattgggagatctacgacaattgcgtttaaagaagtgattgaacagagcgagattgtaattttcagcgggcccatgggctatatcgaggacgagagattcgcgacaggaacaatagaactgttaaaagcggcgtcaaacagacggttaatactaggcggggggcacacgattatggccgcggagaaggccggcgtgcttgataaagcataccacgtgtcgactggcgggcgcgcttttattcagacaataggcggcgaggaaatgccggcagtgaaagcgttattaacctctgctaaaaaatttagcctatga

SEQ ID NO: 108426 - protein, 408 aa, Pyrobaculum aerophilum
MLLNEIIDLIPNINKCLKKGKTLIIRIDINSPIVNGKIIDDFRIRAHSYTLRLASDAGARAVVLAHQGRPGQDDFTSLEIHKPYIEKYLERPIKFVDDIIGPEARRQIKELKDGEILLLENVRILSEEVIEKVPEAQAETLLVRKLAPLADYYVFDGFAVAHRSQPSVVGFPIVLPSCAGPVFERELRALGAVFEKRGRGVTLIAGGAKMPDTLKAVEQLLKNGFVEKVAVGGLVGFVFALGKYGVLNSALKQEVEKGGFLPYIERARQLLAKYGAQIYTPVDFAVNQNGRLDVDIYSLAQPPLDIGRSTTIAFKEVIEQSEIVIFSGPMGYIEDERFATGTIELLKAASNRRLILGGGHTIMAAEKAGVLDKAYHVSTGGRAFIQTIGGEEMPAVKALLTSAKKFSL

SEQ ID NO: 108427 - DNA, 1233 bp, Pyrococcus furiosus
  CDS (1)..(1233): transl_table=11
atgttcaggttgagagattttgaatactacaacagaaccgtgtttcttcgagttgacttaaactcaccaatgagtaatggaaaaataataagtgacgcgagatttcgagcagtccttccaacgataaagtacctaatagagagtggagcaaaagtagttgttggcactcatcaaggaaaaccctacagcgaagagtattcgactactgaagagcatgcgagaattctctctgagctcctaaatatgcatgttgaatacgttgaagacatttttggaaagtatgcaagggagagaataaaggctatgaaacctggggaagttatagtcctcgaaaacctcaggttctctgcagaagaagtaaaaaacgcaactattgaggaatgcgaaaagacgttttttgttaggaagctctcccaggtaatagacctcgttgttaacgatgcctttgctgccgctcatagaagtcagccatctctcgttggttttgcaagaataaagcctatgataatgggattccttatggaaaaagaagttgatgctttaacaaaagcttatgaaagtgaagaaaagccgagagtttatgttcttggtggtgcaaaagttgatgactcattaaaagttgccgaaaacgttcttaggaaagaaaaggctgatctcatactgacagggggattggttggccaattattcactctagctaagggctttgacctgggaagagaaaacattaaattcttagaaaagaagggaattttaaaatacgtagactgggcagaaaagattcttgacgaattttatccctacgttagaactcccgtagactttgccattgacttcaagggagaaagagtagagatagatttgctcagcgacgagaaaaggctctttgacgaatatccaatccttgacatcggttctagaacagttgaaaagtatagggagatactcttaaaggccaggataatagtagccaacggtcctatgggagtgttcgaaagggaagaatttgccgtgggaacaattggggtattcaaggccatcggagagagtccagcctttagcgtcattggtggtggtcattcaatagcaagcatatacaagtacaacataactgggataagccatatctctaccggtgggggagctatgctaacattttttgctggagaaaagttgccagttcttgaagcgctaaagattagttacgaaaagttctctaacttactttcttaa

SEQ ID NO: 108428 - protein, 410 aa, Pyrococcus furiosus
MFRLRDFEYYNRTVFLRVDLNSPMSNGKIISDARFRAVLPTIKYLIESGAKVVVGTHQGKPYSEEYSTTEEHARILSELLNMHVEYVEDIFGKYARERIKAMKPGEVIVLENLRFSAEEVKNATIEECEKTFFVRKLSQVIDLVVNDAFAAAHRSQPSLVGFARIKPMIMGFLMEKEVDALTKAYESEEKPRVYVLGGAKVDDSLKVAENVLRKEKADLILTGGLVGQLFTLAKGFDLGRENIKFLEKKGILKYVDWAEKILDEFYPYVRTPVDFAIDFKGERVEIDLLSDEKRLFDEYPILDIGSRTVEKYREILLKARIIVANGPMGVFEREEFAVGTIGVFKAIGESPAFSVIGGGHSIASIYKYNITGISHISTGGGAMLTFFAGEKLPVLEALKISYEKFSNLLS

SEQ ID NO: 108429 - DNA, 1197 bp, Rhizobium loti
  CDS (1)..(1197): transl_table=11
atggccgccttcaagacactggacgatatcggcaacatcagcggcaagcgcgtgctggtgcgcgtcgacctcaacgttcccgtcgccgacggcaaggtcaccgacgccacccgcatcgaacgcatcgcgccgaccatcgccgaactgtcgggcaagggcgccaaggtcatcctgctcgcccatttcggccggcccaaggatgggccatccccggaattctcgctggagccgatcgccagggcgacggccgaggtgctcggccgtcccgtcggctttgcctcggattgcgtcggcgacatggcgggaagtgctgtcgcggccatgaacaagggtgacgtgctgctcttcgaaaatacccgtttctacaaggccgaggagaagaacgacccggccttcagcgagcggctcgccgccaatggcgacattttcgtcaacgacgccttttccgcggcgcaccgcgcccactcttccacagaggggctggcgcgtctgttgccttcctttgctggccgcaccatgcaggccgagctcgaagcgctggagaagggcctgggcaacccggtccgcccggtcgtggcgatcgtcggcggcgccaaggtctcgaccaagatcgacctgctgatgaacctggtgaagaaggtcgacgcgctggtcatcggcggcggcatggccaacaccttccttgccgcgcgcggcaccgatgtcggcaagtcgctgtgcgagcatgatcttgcccccaccgccaagcagatcatgatcgaggccgccgaggccggctgcgccatcatcctgccggtcgacggtgtcgtcgccaaggaattcaaggcgggcgccgcctgcgagaccgtcgccatctccgacgtgccggccgatggcatgatcctggatgtcggcgaaaagaccgtgaagacgatcggcgaatggatcgaccgcgccgcgacactggtctggaacggcccgcttggcgccttcgagatcgagccgttcgatcacgccacggtggcggcggcaaaacacgcggccgcgcgcaccaaggccggcaagctggtctccgttgcgggtggcggcgacacggtggcggcgctcaaccacgccggcgtcgccgacgacttcacctatgtctctaccgccggcggcgccttcctggaatggatggaaggcaagcctctgccaggcgtcgacgtgctgaagcgctga

SEQ ID NO: 108430 - protein, 398 aa, Rhizobium loti
MAAFKTLDDIGNISGKRVLVRVDLNVPVADGKVTDATRIERIAPTIAELSGKGAKVILLAHFGRPKDGPSPEFSLEPIARATAEVLGRPVGFASDCVGDMAGSAVAAMNKGDVLLFENTRFYKAEEKNDPAFSERLAANGDIFVNDAFSAAHRAHSSTEGLARLLPSFAGRTMQAELEALEKGLGNPVRPVVAIVGGAKVSTKIDLLMNLVKKVDALVIGGGMANTFLAARGTDVGKSLCEHDLAPTAKQIMIEAAEAGCAIILPVDGVVAKEFKAGAACETVAISDVPADGMILDVGEKTVKTIGEWIDRAATLVWNGPLGAFEIEPFDHATVAAAKHAAARTKAGKLVSVAGGGDTVAALNHAGVADDFTYVSTAGGAFLEWMEGKPLPGVDVLKR

SEQ ID NO: 108431 - DNA, 1200 bp, Rhizobium meliloti
  CDS (1)..(1200): transl_table=11
atgactttcaagactctcgacgatctgaccgacatcgccggcaagcgcgttctcgtgcgcgtcgatctgaacgtgcctgtcaaggacggccaggtgaccgacaccacccgcatcgagcgcgtggcgccgaccattcgcgaactctccgagaagggcgcgaaagtcgttctgctcgcgcatttcggccggccgaagggcgagcccgtcgccgacatgtcgctgaaggcgatcgcctccgccgtcgaggagatcctcgaccagcgcgtctatttcgctgccgactgcatcggcgacaaggccgccaacgccattgccgaattgaacgacggcgaagtgctgctgctcgagaatacccgcttccacaagggcgaggagaagaacgattcggacttcgtgacggcgctcgccgccaatggcgacatctatgtcaacgacgccttctccgccgcccatcgcgcccacgcctcgaccgaggggcttgcccatcaccttcccgcctatgccggccgcaccatgcaggcggagctcgaagcgcttgaaaaggggctcggcaatccgaagcgcccggtcgtcgcgatcgtcggcggcgccaaggtctcgaccaagatcgaccttctgcagaacctcgtgaagaaggtcgacgcgctggtcatcggcggcggcatggccaacaccttcctcgcggcgcaaggcgtcgatgtcggaaagtcgctctgcgagcacgatcttgcggagaccgccaaggccatcctcgcggccgcctcggaagcgggatgcgcaatcgtgcttccggtcgacggcgtcgttgcccgtgagttcaaggccggtgccgacaacgaggtcgtcgatatcaaggccatccctgccgacgccatggtgcttgacgtcgggccgaaatcgatcgaggccatcaacgaatggatctcgcgcgccgaaaccctcgtgtggaatggcccgctcggcgcgttcgagatcgcgcccttcgacagggcgaccgtggcggcggcgaaacacgcggcagcccgcacccgcgccggctcgctcgtctccgtcgccggcggcggcgacacggtcgcagcactcaaccatgccgaggtcgcggacgatttcacctatgtctcgaccgccggcggcgccttcctcgaatggatggaaggcaagcccttgccgggcgtagatgttctccggcagcggaactga

SEQ ID NO: 108432 - protein, 399 aa, Rhizobium meliloti
MTFKTLDDLTDIAGKRVLVRVDLNVPVKDGQVTDTTRIERVAPTIRELSEKGAKVVLLAHFGRPKGEPVADMSLKAIASAVEEILDQRVYFAADCIGDKAANAIAELNDGEVLLLENTRFHKGEEKNDSDFVTALAANGDIYVNDAFSAAHRAHASTEGLAHHLPAYAGRTMQAELEALEKGLGNPKRPVVAIVGGAKVSTKIDLLQNLVKKVDALVIGGGMANTFLAAQGVDVGKSLCEHDLAETAKAILAAASEAGCAIVLPVDGVVAREFKAGADNEVVDIKAIPADAMVLDVGPKSIEAINEWISRAETLVWNGPLGAFEIAPFDRATVAAAKHAAARTRAGSLVSVAGGGDTVAALNHAEVADDFTYVSTAGGAFLEWMEGKPLPGVDVLRQRN

SEQ ID NO: 108433 - DNA, 1197 bp, Rhodopseudomonas palustris
  CDS (1)..(1197): transl_table=11
atgacaaagacattccgcaccctcgacgacgtcgatgtgaagggcaagcgcgtgctgctgcgcgtcgatctcaacgtgccgatggacgccggcaaggtgaccgacaccacccggctcgaacgcgtgatgccgaccatcaccgagctgtcgggcaagggcgccaaggtgatcctgctggcgcatttcggccggccgaagggccgcgacgacaagaactcgctcaagccggtcgctgctgcgctggccgacgtcatcaagaagccggtcggcttcgccgacgactgcatcggcgagcccgccgccaaggcgatcgccgcgatggccgacggcgacatcctgtgcctggaaaacacccgcttccatcccgaggaagagaagaacgatccggcgttcgtcgccaagctcgccgagctcggcgacatctgggtcaacgacgcgttctcggccgcgcaccgcgcccacgccaccaccgaaggcctcggccacaagctgccggcttacgcgggccgcaccatgcaggccgagctcgtcgcgctgaacaaggcgctggaagcgccggtgaagccggtgatcgcgatcgtcggcggcgccaaggtgtcgaccaagatcgacctgctcgaaaacctggtcaccaaggtgcaggcgctggtgatcggcggcggcatggccaacaccttcctgcacgcccagggcgtcaaggtcggaaagtctctgtgcgagaaggacctggctccgactgcgctgcgcatcctcgataaggccgaagctgccaactgcgccatcatcctgccggtcgacgccaccgtggcctatcacttcgaggccaacgcgccgtcgttcgcctacgggctcgacgccatcccggacgatgccatgatcctcgacgtcggcccgcgctcgatcgagcgcattcacgccgcgatcgacgatgccgcgaccctggtgtggaacggcccggtcggcgcgttcgagctgacgccgttcgacaagggcacggtcgaagccgccaagcacgccgccaagcgcaccaaggccggcaagctggtgtcggtcgccggcggcggcgacaccgtcgcggcgctcaaccatgccggcgtggccgacgacttcacctacatctcgaccgccggcggcgccttcctggaatggatggaaggcaagccgctgccgggcgtcgaagtgctccaggtcaagtga

SEQ ID NO: 108434 - protein, 398 aa, Rhodopseudomonas palustris
MTKTFRTLDDVDVKGKRVLLRVDLNVPMDAGKVTDTTRLERVMPTITELSGKGAKVILLAHFGRPKGRDDKNSLKPVAAALADVIKKPVGFADDCIGEPAAKAIAAMADGDILCLENTRFHPEEEKNDPAFVAKLAELGDIWVNDAFSAAHRAHATTEGLGHKLPAYAGRTMQAELVALNKALEAPVKPVIAIVGGAKVSTKIDLLENLVTKVQALVIGGGMANTFLHAQGVKVGKSLCEKDLAPTALRILDKAEAANCAIILPVDATVAYHFEANAPSFAYGLDAIPDDAMILDVGPRSIERIHAAIDDAATLVWNGPVGAFELTPFDKGTVEAAKHAAKRTKAGKLVSVAGGGDTVAALNHAGVADDFTYISTAGGAFLEWMEGKPLPGVEVLQVK

SEQ ID NO: 108435 - DNA, 1245 bp, Schizosaccharomyces pombe
  CDS (1)..(1245)
atgtctttgtctactaagctcgctatcaccgacgtcgacttgaagggcaagaacgtcttgatccgtgtcgacttcaacgtccctttggacggtgaccgtatcaccaacaatgcccgtatcgttggtgctctccccaccatcaagtacgctcttgagcaacaacccaaggctgtcatcttgatgtctcacttgggccgtcccaacggtgctcgtgttgccaagtactccttgaagcctgttgctgctgagctcagcaagcttttgggcaagcccgtcaagttccttgacgactgtgttggccctgaggtcgaaaaggcctgcaaggaagccaagggtggtgaggtcatccttttggagaacttgcgtttccacatcgaggaggagggttccgccaaggttgacggtaagaaggttaaggctgacgcttctgccgtcgaggctttccgtaagtctttgacttctctcggtgacatctttgtcaacgatgctttcggtaccgctcaccgtgctcactcctctatggtcggtgtcgatctcccccgtgtctccggtttccttatgaagaaggagctcgactacttctccaaggctttggagaaccccgctcgtcccttccttgccatcttgggtggtgccaaggttgctgacaagatccaacttattgacaaccttcttgacaaggtcaaccgccttatcatctgcggtggtatggctttcaccttcttgaaggtccttaacggtatgaagattggtgactctcttttcgatgaggctggttccaagaacgtcgaatccatgatggccaaggccaagaagaacaacgtcgaggtcttcctccccgttgacttcgtcactgccgacaagttcgacaaggacgccaaggttggctctgccaccgccgaggagggtatccccgacggatggatgggtttggactgtggacccaagtcctctgctaagtttgccgaggttatcaccacctccaagaccattgtctggaatggtcccgctggtgtctttgagtttgacaactttgccaagggtaccaagtctatgcttgatgcttgtgtcaagacctgtgaagctggtaacgttgttattgttggtggtggtgacactgctactgttgccaagaagtacggtaaggaggatgctctttcccacgtctctaccggtggtggtgcttctcttgaactcttggagggtaaggctcttcccggtgtcgttgctctttcttccaagtaa

SEQ ID NO: 108436 - protein, 414 aa, Schizosaccharomyces pombe
MSLSTKLAITDVDLKGKNVLIRVDFNVPLDGDRITNNARIVGALPTIKYALEQQPKAVILMSHLGRPNGARVAKYSLKPVAAELSKLLGKPVKFLDDCVGPEVEKACKEAKGGEVILLENLRFHIEEEGSAKVDGKKVKADASAVEAFRKSLTSLGDIFVNDAFGTAHRAHSSMVGVDLPRVSGFLMKKELDYFSKALENPARPFLAILGGAKVADKIQLIDNLLDKVNRLIICGGMAFTFLKVLNGMKIGDSLFDEAGSKNVESMMAKAKKNNVEVFLPVDFVTADKFDKDAKVGSATAEEGIPDGWMGLDCGPKSSAKFAEVITTSKTIVWNGPAGVFEFDNFAKGTKSMLDACVKTCEAGNVVIVGGGDTATVAKKYGKEDALSHVSTGGGASLELLEGKALPGVVALSSK

SEQ ID NO: 108437 - DNA, 1176 bp, Shewanella oneidensis
  CDS (1)..(1176): transl_table=11
atggcaattatcaatatgtcagatttagatctccaaggtaagcgagtgcttattcgtgaagatctcaatgtgcctgtcagcaatggcgtcgtcaccagtgatgcgcgccttagagcctctctccccactatcgagttagcccttgccaaaggcgcggcggtaatggtgatgtctcacttgggtcgtccaaccgaaggtgagtacaacagcgaattttccatgcaacctgtggtcgattacttggccaaagccctgtcttgtcctgtgcgcttagcgaccgactacttagacggcgttgaagtggctgtaggtgaagtggtggtgtttgaaaacgttcgcttcaataaaggcgagaagaaaaacgacgaagcgttatctaagaagatggcagcgttatgtgatgtgtatgtgatggatgctttcggcacggctcaccgcgcagaagcctcaacgaatggcgttggtttatacgcgccaattgcttgtgctggtccattactggcgcaagagttagatgctttaggtaaggcgttagataatccagcgcgtccattagtggcaatcgttggtggctctaaagtgtcgactaagctcaccgtattagaaagcttatcaggcattgtggatcaattagtggttggtggtggtatcgctaacacctttatcgctgcggcgggccacaacgtgggtaaatccttatacgaagcggatttaattgatgaagctaagcgcttagtggcgaacgcgcaaagccgcggtggcgatattcccgtacctaccgatgtggttgtggcgggtgagtttagcccaacggcagctgctaccttaaaagcagtgagtgatgttggcgatagcgatatgattttcgacatcggccccgacagtgccgaagcgttagcgaaaatcattgagtctgctggcactatcgtatggaacggcccagttggtgtgttcgagtttgaccaattcggtgaaggcactaagcgcatcgctcacgcgattgcggattccaaagccttctctatcgctggcggtggtgacaccttggcggcggtcgataaatacggtatcgccgataaagtttcttatatctctacgggcggtggcgctttcctcgagttcctcgaaggtaaagagttacctgctgtagctatgctaaaaaaacgtggtgcttaa

SEQ ID NO: 108438 - protein, 391 aa, Shewanella oneidensis
MAIINMSDLDLQGKRVLIREDLNVPVSNGVVTSDARLRASLPTIELALAKGAAVMVMSHLGRPTEGEYNSEFSMQPVVDYLAKALSCPVRLATDYLDGVEVAVGEVVVFENVRFNKGEKKNDEALSKKMAALCDVYVMDAFGTAHRAEASTNGVGLYAPIACAGPLLAQELDALGKALDNPARPLVAIVGGSKVSTKLTVLESLSGIVDQLVVGGGIANTFIAAAGHNVGKSLYEADLIDEAKRLVANAQSRGGDIPVPTDVVVAGEFSPTAAATLKAVSDVGDSDMIFDIGPDSAEALAKIIESAGTIVWNGPVGVFEFDQFGEGTKRIAHAIADSKAFSIAGGGDTLAAVDKYGIADKVSYISTGGGAFLEFLEGKELPAVAMLKKRGA

SEQ ID NO: 108439 - DNA, 1212 bp, Streptomyces avermitilis
  CDS (1)..(1212): transl_table=11
atgaagacgatcgacgaacttctcgccgaaggcgtggacggcaagcgggtcttcgtccgcgccgacctgaacgtgccgctggccgacggcctcatcaccgacgacggccgcatccgcgccgtcctgccgacggtcaaggcgctggccgaggccggtgccaaggtggtcgtcgcctcgcacctgggccgccccaagggcgccccggacccggccttctccctgctgcccgcggcggagcggctcggtgaactcctcggcgcgcccgtcgcgttcgcccaggacaccgtgggccccgccgcccacgacgccgtgaacggcctccagcccggccaggtagcggtcatcgagaacctgcgcttcaacgcgggcgagacgtccaaggacgacgccgagcgcggcgcgttcgccgaccggctggcggccctggccgacatctacgtgggcgacggtttcggcgccgtgcaccgcaagcacgcctccgtgtacgacctcccggcacgcctgccgcactacgcgggctacctcatcgccaccgaggtcaacgtcctgaagaagctcaccgaggacgtcaagcgcccctacgtggtcgcactcggcggcgccaaggtctccgacaagctcgccgtcatcgaccagctgctcggcaaggccgaccgcctgctgatcggcggcggcatggcctacaccttcctcaaggccaagggctacgaggtcggcatctccctcctccaggaggaccagatcccgaccgtcaaggagtacatggagcgcgcggagaagaacggcgtcgagctggtcctccccgtcgacgtgctggtctccacggagttcccggacctcaagacgaaggccccggccaaccccaccaccgtcgccgcggacgccatcccggccgaccaggagggtctcgacatcggtcctgagacccgcaagctgtacgcatcgaagctcgccgacgcggccaccgtcttctggaacggccccatgggcgtcttcgagcaccccgactacgccgagggcaccaaggcggtcgcccaggccctcgtcgactcccaggccttcacggtcgtcggcggtggcgactccgccgcggccgtccgcatcctgggcttcgacgagacggcattcggccacatctcgaccggcggcggcgcctccctcgaatacctcgagggcaagacgctccccggccttgccgcactggaggactga

SEQ ID NO: 108440 - protein, 403 aa, Streptomyces avermitilis
MKTIDELLAEGVDGKRVFVRADLNVPLADGLITDDGRIRAVLPTVKALAEAGAKVVVASHLGRPKGAPDPAFSLLPAAERLGELLGAPVAFAQDTVGPAAHDAVNGLQPGQVAVIENLRFNAGETSKDDAERGAFADRLAALADIYVGDGFGAVHRKHASVYDLPARLPHYAGYLIATEVNVLKKLTEDVKRPYVVALGGAKVSDKLAVIDQLLGKADRLLIGGGMAYTFLKAKGYEVGISLLQEDQIPTVKEYMERAEKNGVELVLPVDVLVSTEFPDLKTKAPANPTTVAADAIPADQEGLDIGPETRKLYASKLADAATVFWNGPMGVFEHPDYAEGTKAVAQALVDSQAFTVVGGGDSAAAVRILGFDETAFGHISTGGGASLEYLEGKTLPGLAALED

SEQ ID NO: 108441 - DNA, 1260 bp, Treponema denticola
  CDS (1)..(1260): transl_table=11
atgattaagactgtaaaagatgtaaatttaaaggataaacgcataataatgcgtgtagattttaacgttcctatgaaggacggagtagtgcaggatgatacgcggattagggcggctcttcctacaataaaatatatattggaacaaggagcaagaagccttgttttgatgagccatttgggtgatccttcaaaagatgcaaaaaaagccaaggaaaaggccgaaaaagacggaaaaccctttgatgaggaagcttatattaacggaaagcataggatgaaacctgttgcagaatacttatccggccttcttaaacttcctgttgattttgctccctcctgcatgggacagcttgaaagggtaaaagctcttccacagggcggaattctaatgcttgaaaacacccgcttccacaaagaagaaacttcaaaggaaaaggccgagcagcaaatcttggcaaaagaactcagcttgtacggtgatatctatgtaaatgatgcttttggaacggctcaccgctctcatgcttctacagccgaaattgccaactttgtcaatacaagggtagccggctttcttatggaaaaggaaattaaataccttgagccaatgttaaataatcctgcaaagccaatgacggcaattataggaggagcaaaggtttcttccaaaattgcagttttggaaagtcttttaaaaaatgcatcttctttaattataggaggaggaatggcctacaccttcttaaaggttcaaggaaaaaagatcggtaaatccttatttgaagaagattttatggatactgctaaaaatcttttggataaggctgaaaaacagggtgtaaagataatccttcctgttgatcatatctgttccgaaaccttttctcccaatgccgaagccgttttagttgaaagcacagatattcccgataatcttatgggaatggatgtaggccctaagaccttggctctttataaagagattattttgtcgtcaaagtccattgtctggaacggccccgtaggcgtttttgagtttgaggctttttcaaagggaacggaagaaactgcccgccttgtagcagctgcaacggaaaaaggtgcacttacaatcgtaggcggaggtgattcggttgctgccgtaaataagttcaatcttgccgataagatgagtcatgtttctaccggcggcggagcttccctcgaattccttgaaggaaaagttctccccggcattgcctgtcttgatactatttaa

SEQ ID NO: 108442 - protein, 419 aa, Treponema denticola
MIKTVKDVNLKDKRIIMRVDFNVPMKDGVVQDDTRIRAALPTIKYILEQGARSLVLMSHLGDPSKDAKKAKEKAEKDGKPFDEEAYINGKHRMKPVAEYLSGLLKLPVDFAPSCMGQLERVKALPQGGILMLENTRFHKEETSKEKAEQQILAKELSLYGDIYVNDAFGTAHRSHASTAEIANFVNTRVAGFLMEKEIKYLEPMLNNPAKPMTAIIGGAKVSSKIAVLESLLKNASSLIIGGGMAYTFLKVQGKKIGKSLFEEDFMDTAKNLLDKAEKQGVKIILPVDHICSETFSPNAEAVLVESTDIPDNLMGMDVGPKTLALYKEIILSSKSIVWNGPVGVFEFEAFSKGTEETARLVAAATEKGALTIVGGGDSVAAVNKFNLADKMSHVSTGGGASLEFLEGKVLPGIACLDTI

SEQ ID NO: 108443 - DNA, 1161 bp, Vibrio vulnificus
  CDS (1)..(1161): transl_table=11
atgtctgtaatcaagatgactgacctggatctagcaggtaaacgtgtattcatccgtgctgacctaaacgtgccagtaaaagacggtaaagtaacttctgatgcacgtatcatcgcatctcttcctactatcaagctatgtctagaagctggcgcgaaagtaatggtcacttctcacctaggtcgtcctactgaaggtgaatacgcagaagagttctctctacaaccagttgttaactacctaaacgacgcgctagattgcgaagtgaaactggctaaagattacctagatggtcttgagctaaacgctggtgaacttgttgttcttgaaaacgttcgctttaacaaaggcgagaagaaaaacgacgaagaactttctaagaaatacgcggcactatgtgacgtattcgtaatggatgcattcggtacggctcaccgtgcacaagcgtcaactcacggtgtgggtatgtttgctgaagtagcgtgtgctggtcctctacttgctgctgaactagaagcactaggcaaagcaatgagcaacccagagcgcccgctagttgctatcgttggtggttcaaaagtgtctactaaactaacggttcttgagtcactatctaaaatcgctgaccaacttgttgttggtggtggtatcgcgaacacattcatcgcagctgaaggtcacaatgtaggtaagtctctatacgaagcggatcttgttgaaactgcacaaaaactgatgaaagagtgtgcaattcctgtcgcgactgacgtagcgtgtgcaaaagcattcgacgagaatgcagaagcggaaattaaacatgtttctgaagtacaagacgatgacatgatcttcgaccttggtccagactcaacggctgcactagctgaaatcatcgcaaatgcgaaaactatcctgtggaatggccctgttggtgtattcgagttcaaaaacttcgaagcgggtactaaaggtatttctgaagcgatcgctcagtctccagcattctctgtagcaggcggcggtgacactctagcggctatcgacaagttcggtatcaaagcagacgtatcttacatctctactggcggtggtgcgttccttgagtttgtagaaggtaaagtacttccagcagttgaaatgctagaagcacgcgctaagtaa

SEQ ID NO: 108444 - protein, 386 aa, Vibrio vulnificus
MSVIKMTDLDLAGKRVFIRADLNVPVKDGKVTSDARIIASLPTIKLCLEAGAKVMVTSHLGRPTEGEYAEEFSLQPVVNYLNDALDCEVKLAKDYLDGLELNAGELVVLENVRFNKGEKKNDEELSKKYAALCDVFVMDAFGTAHRAQASTHGVGMFAEVACAGPLLAAELEALGKAMSNPERPLVAIVGGSKVSTKLTVLESLSKIADQLVVGGGIANTFIAAEGHNVGKSLYEADLVETAQKLMKECAIPVATDVACAKAFDENAEAEIKHVSEVQDDDMIFDLGPDSTAALAEIIANAKTILWNGPVGVFEFKNFEAGTKGISEAIAQSPAFSVAGGGDTLAAIDKFGIKADVSYISTGGGAFLEFVEGKVLPAVEMLEARAK

SEQ ID NO: 108445 - DNA, 1176 bp, Xylella fastidiosa
  CDS (1)..(1176): transl_table=11
atgtccatcgtccgcatgactgatctcgctttatccggtaaacgcgtactgattcgtcaggacttgaatgtaccgattgatcagggtcgtattacttccgagcagcgcattattgcttcgcttccgacgatccgtgtagcgctggagcgtggtgcggcggtcatggtgacttcgcatctgggccgtccgaaggagggcgtgtggagtgaggaggattcattggcacccgtggcgaagcgcttgtctcaattgttggggattgaggttccgttgcgtcgcgattgggtggatggcgtgcaggttgcgccagggcagttggtgttattggaaaactgccgaatgaatgtcggcgaagctgagaatgacgaggcgttggcaaggaagtatgcggcgttatgtgatgtgttcgtgatggatgcgtttggcactgcgcaccgtgcccaggcatcaacgcatggggtgatctgttgtgctgcgattgctgccggcggtccgttgttgatggctgagttggatgctttgagccggggattggagcatccggtgaagccgctgctggcgattgtggggggcagtaaggtatcgacgaaactggagttgctttccaatttggtgaataacgttgagcaattgattacggggggaggcattgccaatacgttccttgccgcagccggttactccatcggtaagtcactgtatgagggggatttgatcgagactgctcgggagattattactgcggcgaaagcgcgtggcgctgagattccgttacccacggatgtggttgttgccaagcagtttttgcctggagtcacggcaacggtgaagacggtggatgcaatcgttgcggatgatcttattttggacattggtccgcagacggcacggcactatgctgccttgattgaaacggcggcgacggtggtctggaatggtccagtgggtgtgtttgagttcgatgccttcagcaaggggaccgaggtgttagcgcgggccgttgctgcctcgtctgcgttttcgattgctggtggcggcgataccttggctgccattgataagtatggtgttgcggaccagatcagctacatctccacaggcggcggtgcttttctggagtttttggaaggtaagacgttgccggcggtggctgccttgcaggcgcgcagcggataa

SEQ ID NO: 108446 - protein, 391 aa, Xylella fastidiosa
MSIVRMTDLALSGKRVLIRQDLNVPIDQGRITSEQRIIASLPTIRVALERGAAVMVTSHLGRPKEGVWSEEDSLAPVAKRLSQLLGIEVPLRRDWVDGVQVAPGQLVLLENCRMNVGEAENDEALARKYAALCDVFVMDAFGTAHRAQASTHGVICCAAIAAGGPLLMAELDALSRGLEHPVKPLLAIVGGSKVSTKLELLSNLVNNVEQLITGGGIANTFLAAAGYSIGKSLYEGDLIETAREIITAAKARGAEIPLPTDVVVAKQFLPGVTATVKTVDAIVADDLILDIGPQTARHYAALIETAATVVWNGPVGVFEFDAFSKGTEVLARAVAASSAFSIAGGGDTLAAIDKYGVADQISYISTGGGAFLEFLEGKTLPAVAALQARSG

SEQ ID NO: 108447 - DNA, 1281 bp, Yarrowia lipolytica; identical to SEQ ID NO: 108173
  CDS (28)..(1281)

SEQ ID NO: 108448 - protein, 417 aa, Yarrowia lipolytica
MSLTNKLSIKDLDLKNKRVFIRVDFNVPLDGTTITNNQRIVAALPSIKYAIDQGAKAVILASHLGRPNGQRVEKYSLKPVQAELSKLLGKPVTFLDDCVGPKVEEEVSKAKDGEVILLENLRFHPEEEGSHKDADGKKIKADPAKVEEFRKSLTSLADVYVNDAFGTAHRAHSSMVGIELPQRAAGFLVAKELEFFAKALEHPERPFLAILGGAKVSDKIQLIDNLLDKVNALIIGGGMAFTFKKTLENVKIGNSLFDEDGSKIVAGLVEKAKKNNVKLVFPVDYVTADKFSKDAKVGHATDAEGIPDGWQGLDCGPKSIEEFQKVIGESKTILWNGPPGVFEFDNFAKGTKAVLDACVKAVDNGATVIIGGGDTATVAKKYGAEDKLSHVSTGGGASLELLEGKTLPGVAALSEKK

SEQ ID NO: 108449 - DNA, 1164 bp, Yersinia pestis
  CDS (1)..(1164): transl_table=11
atgtctgtaattaagatgaccgatctggatctggctggcaaacgtgttttgatccgtgcggacctcaatgttccggtaaaagaaggcaaagtgacttctgatgcgcgtatccgtgcctctctgccaactatcgaagcggcattgaagcaaggcgctaaagtaatggttacctctcacttgggtcgcccgaccgaaggcgagtacaacgaagagttctccttactgcccgtcgttaactacctgaaagagaagttatcttctccggtacgtctggcgaaggactatctggacggcgttgaaattgcagctggcgagttggttgttctggaaaacgttcgctttaacaaaggcgagaaaaaagacgacgaagccctgtccaagaaatatgccgcactgtgcgatgtttatgtgatggatgcttttggtaccgctcaccgcgctcaggcatcgactcacggtgtgggtaaatttgcccctatcgcttgcgccggcccgctgttgtcagcagagctggaagcattgggtaaagcgctgggtaacccagcgcgtccaatggttgctatcgttggtggctctaaagtttcaactaaactgaccgtgctgggcgcgttgtctaaaatcgcggataaactgattgttggcggtggtatcgctaataccttcgttgcggctcaaggccacaatgtcggtaaatctctgtacgaagctgatctgatcccagaagcgaaaagactgctagagacctgtgatatccctgttcctactgatgttcgtgttgccactgagttctctgaaacggcagccgcgacgctgaaacccgcgaacgaaattaaagatgacgaacaaattttggatctgggcgacgaatctgcggagcgtctggctgagatcctgaaaaatgccaaaaccattctgtggaatggtccggttggtgtgttcgagttccctaacttccgtaaagggaccgagatcgtggctcgcgccattgcagaaagcgaagcattttctatcgcaggcggtggtgatactttggcagcaatcgatctcttcggtattgctgaccaaatctcctacatttctactggcggtggtgctttcctggagttcgtcgaagggaaaaaactgcctgccgtagtgatgctggaagagcgcgctaagcagtaa

SEQ ID NO: 108450 - protein, 387 aa, Yersinia pestis
MSVIKMTDLDLAGKRVLIRADLNVPVKEGKVTSDARIRASLPTIEAALKQGAKVMVTSHLGRPTEGEYNEEFSLLPVVNYLKEKLSSPVRLAKDYLDGVEIAAGELVVLENVRFNKGEKKDDEALSKKYAALCDVYVMDAFGTAHRAQASTHGVGKFAPIACAGPLLSAELEALGKALGNPARPMVAIVGGSKVSTKLTVLGALSKIADKLIVGGGIANTFVAAQGHNVGKSLYEADLIPEAKRLLETCDIPVPTDVRVATEFSETAAATLKPANEIKDDEQILDLGDESAERLAEILKNAKTILWNGPVGVFEFPNFRKGTEIVARAIAESEAFSIAGGGDTLAAIDLFGIADQISYISTGGGAFLEFVEGKKLPAVVMLEERAKQ

SEQ ID NO: 108451 - DNA, 1449 bp, Zymomonas mobilis
  CDS (148)..(1341): transl_table=11
ctgcagttagttattaagctgattgcagcattaacctcctgatacaggcccgttatgggatatatccgttatagctgggtctcgtaaggaggctgtctccgttatcagatccgctttatgatataaggcggccaaaaggaggatataatggcttttcgtacattagatgatattggtgacgtcaaaggtaagcgcgttcttgttcgcgaagatctgaacgttcctatggatggcgatcgcgttacggatgatactcgtctgcgcgctgcaatcccgaccgttaatgaattggctgaaaagggcgccaaagtccttattctggctcacttcggtcgtccaaaaggtcagccgaatcctgaaatgtccttggctcgcatcaaagatgcgctggctggcgttctgggtcgtccggttcacttcatcaatgacatcaaaggtgaagctgcagcaaaagccgttgatgccctgaatcctggtgccgttgctcttcttgaaaacacccgcttttatgctggtgaagaaaagaatgatccggctctggcagcagaagtagctaagctcggcgatttctatgtcaatgatgctttctcggctgctcaccgcgcccatgtttcgaccgaaggtctggctcacaagctgcctgctttcgctggtcgtgccatgcagaaagaattagaagctcttgaagctgcccttggtaagccgacccacccggtcgcagccgttgtcggtggtgctaaagtttctaccaagctcgacgttctgaccaaccttgtttccaaggttgaccatctgatcatcggtggtggtatggctaataccttcctcgctgctcagggtgttgatgttggtaaatcgctttgtgagcatgagctgaaagataccgttaaaggtattttcgctgctgctgaaaaaacgggctgcaaaatccatcttccgagcgatgtcgttgtcgccaaggaattcaaagccaatccgccgatccgtaccattccggtcagcgacgttgctgctgacgaaatgatccttgacgttggcccgaaagccgtcgctgctttgaccgaagttctgaaagcttccaagaccttggtctggaatggcccgttgggcgctttcgaaattgaacctttcgataaagctacggttgctctcgctaaggaagccgctgctttgaccaaagccggttctttgatctctgttgctggtggtggtgacacggttgccgctcttaaccatgctggtgtggcaaaagactttagctttgtctcaacggctggtggtgctttcctcgaatggatggaaggtaaagagctgccgggtgttaaagccctcgaagcttaattttccagaagaagggggcggcttttttaagtcgccctttttttgtctttatttagataaaagaggctttttaggcttgcctcttctttttaaaaaattaacctgcga

SEQ ID NO: 108452 - protein, 397 aa, Zymomonas mobilis
MAFRTLDDIGDVKGKRVLVREDLNVPMDGDRVTDDTRLRAAIPTVNELAEKGAKVLILAHFGRPKGQPNPEMSLARIKDALAGVLGRPVHFINDIKGEAAAKAVDALNPGAVALLENTRFYAGEEKNDPALAAEVAKLGDFYVNDAFSAAHRAHVSTEGLAHKLPAFAGRAMQKELEALEAALGKPTHPVAAVVGGAKVSTKLDVLTNLVSKVDHLIIGGGMANTFLAAQGVDVGKSLCEHELKDTVKGIFAAAEKTGCKIHLPSDVVVAKEFKANPPIRTIPVSDVAADEMILDVGPKAVAALTEVLKASKTLVWNGPLGAFEIEPFDKATVALAKEAAALTKAGSLISVAGGGDTVAALNHAGVAKDFSFVSTAGGAFLEWMEGKELPGVKALEA

SEQ ID NO: 108453 - DNA, 1209 bp, Oryza sativa
  CDS (1)..(1209)
atggcgacgaagaggagcgtggggacgctgggggaggcggatctgagggggaagaaggtgttcgtgcgggccgacctcaacgtgccgctcgacgacgcccagaagatcaccgacgacacccgcatccgcgcgtccgtgcccactgtcaagttcctcctcgagaagggcgccaaggtcatcctcgccagccatctgggccgtccgaagggtgtcacccccaagtacagcttgaagcctcttgttccacgcttgtctgagctacttggagtcgatgttgtgatggccaatgattgcattggtgaggaagttgagaaattggctgctgctttgccggaaggtggtgttctactcctagagaatgttagattctacaaggaggaagaaaagaatgatcctgagtttgccaagaagcttgcagctgtcgctgacctctatgtaaatgatgcttttggcactgcacacagagctcatgcttcaactgagggagtgaccaaatttttgaagcctgctgttgctggcttcctgatgcagaaggaacttgactatcttgttggagctgttgcaaacccaaagaagccatttgcggccatcgttggtggatccaaggtctcaactaagattggggtgattgagtctctgttggcaaaggttgatgtcctcatccttggtggtggtatgatcttcacattctacaaagcccagggatatgctgttggaaaatctcttgtggaggaagacaaacttgagcttgcaacttcacttattgagaaggcgaaggcgaagggtgtttctctcttacttcctaccgatgttgtagtggctgacaagtttgccgcagatgctgaaagcaagactgttgctgcctccgctatccccgatggttggatgggtcttgatgttggcccagatgccatcaagacttccagcgaagcattggacacctgcaacactatcatttggaacggacctatgggagtctttgagtttgagaagtttgcagcaggcactgatgcaattgccaagaagttggctgatcttactaccacaaagggcgccacgaccatcatcggtggtggtgactccgttgctgcggtcgagaaggctgggctggccgacaagatgagccacatctccaccggcggtggtgctagcttggagttgctggaaggcaagaccctcccaggtgttcttgcccttgatgaagcgtaa

SEQ ID NO: 108454 - protein, 402 aa, Oryza sativa
MATKRSVGTLGEADLRGKKVFVRADLNVPLDDAQKITDDTRIRASVPTVKFLLEKGAKVILASHLGRPKGVTPKYSLKPLVPRLSELLGVDVVMANDCIGEEVEKLAAALPEGGVLLLENVRFYKEEEKNDPEFAKKLAAVADLYVNDAFGTAHRAHASTEGVTKFLKPAVAGFLMQKELDYLVGAVANPKKPFAAIVGGSKVSTKIGVIESLLAKVDVLILGGGMIFTFYKAQGYAVGKSLVEEDKLELATSLIEKAKAKGVSLLLPTDVVVADKFAADAESKTVAASAIPDGWMGLDVGPDAIKTSSEALDTCNTIIWNGPMGVFEFEKFAAGTDAIAKKLADLTTTKGATTIIGGGDSVAAVEKAGLADKMSHISTGGGASLELLEGKTLPGVLALDEA

SEQ ID NO: 108455 - DNA, 1464 bp, Oryza sativa
  CDS (1)..(1464)
atggcgtccgcggccgcgccgaccacgtcctcgctctccctcgccgccaggcgcgccgcggcggtggggcccgccgccgcgtcgccgctacggcgcggggggctggcggccgggtgccagccggcgcggtcgctggcgttcgcggcggccgcggacccgcggctggcgacccacgtcgcgtcgcggtgccggcaggcggcgtcgtcgtcctcgcgcgggacgcgcgccgtcgccaccatggcgaagaagagcgtcggggacctcaccgccgccgacctcgaggggaagcgcgtgttcgtgcgcgccgacctcaacgtcccgctcgacgacaaccagaacatcaccgacgacacccgtgtccgcgccgccatccccaccatccagtaccttatcaagaacggtgccaaggtcatcctctccagccacctgggtcgcccaaagggtgttactcccaagtttagcttggctccccttgtaccgcgattgtctgaacttctcggcatacaggtgactaaggcagaagatgttattggaccagatgttgagaaattggtatctgaattgccaaatggtagtgttttgctccttgaaaatgttagattttacaaggaagaggagaagaatgacccagagtttgccaagaagcttgcctccttagcagatctctatgtcaatgatgcattcggaacagcccacagagcacatgcatcaactgagggagttaccaagtttttaaagccttctgtcgcaggattccttttgcagaaggagcttgactaccttgttggagctgtttcaagccctaaacgcccatttgctgccatcgtgggtggttcaaaggtgtcatccaagattggggttatcgaatcccttttggagaaatgtgatatccttcttctaggtggtggtatgatcttcacattttacaaggcacaaggactctctgttggttcttccttggttgaggaagacaaacttgagcttgcaacatctctccttgcaaaggcaaaagaaaagggtgtctcccttctgttgccatctgacgttatcattgctgataagtttgctcctgatgctaacagccaggttgttccagcatctgctattcctgatggttggatgggtctggatattggtccagattcagtcgcgtcattcagctctaccctggaaacaacacagacagtcatttggaatggacctatgggtgtcttcgaatttgacaagtttgcagtaggaactgaggctattgcaaagaagttggcagaccttagcggcaagggtgttacaaccattattggaggaggtgattctgttgccgctgttgagaaggtgggagttgcagatgttatgagccacatttcaacgggaggtggtgctagcttggagctgttggaaggaaaggaacttcctggagtcattgcacttgatgaagctgtcactgtggccagaagcaaactttag

SEQ ID NO: 108456 - protein, 487 aa, Oryza sativa
MASAAAPTTSSLSLAARRAAAVGPAAASPLRRGGLAAGCQPARSLAFAAAADPRLATHVASRCRQAASSSSRGTRAVATMAKKSVGDLTAADLEGKRVFVRADLNVPLDDNQNITDDTRVRAAIPTIQYLIKNGAKVILSSHLGRPKGVTPKFSLAPLVPRLSELLGIQVTKAEDVIGPDVEKLVSELPNGSVLLLENVRFYKEEEKNDPEFAKKLASLADLYVNDAFGTAHRAHASTEGVTKFLKPSVAGFLLQKELDYLVGAVSSPKRPFAAIVGGSKVSSKIGVIESLLEKCDILLLGGGMIFTFYKAQGLSVGSSLVEEDKLELATSLLAKAKEKGVSLLLPSDVIIADKFAPDANSQVVPASAIPDGWMGLDIGPDSVASFSSTLETTQTVIWNGPMGVFEFDKFAVGTEAIAKKLADLSGKGVTTIIGGGDSVAAVEKVGVADVMSHISTGGGASLELLEGKELPGVIALDEAVTVARSKL

SEQ ID NO: 108457 - DNA, 1452 bp, Brassica napus
  CDS (1)..(1452)
atggcttccgtcgccgcaagtcccgccttctccctcctcaaatccaccggagccactgcttcctccgccgcaactcgcgcgcgcgcctcacttctacccatcaccccctcctccaaatccatctccgcgcgtcctctcggcttctccgccgtcctcgactcgcaccgtttctccctccacgtcgcctcgaaagttcagtcggtgcgcgggagagggaccagaggagtcgtttccatggcgaagaagagcgtcggtgacttgacctctgctgatttgaaagggaagaaggttttcgtgagagctgatctcaatgtgcctctcgatgataatcagacgatcactgacgatacgaggatacgtgccgccattcccacgatcaagtacttgattgacaatggtgctaaagtcatcctctccactcatctgggaagaccaaagggagtcacaccaaagttcagtttagctcctcttgtccctagactctctgaacttcttggtattgaggtcaagaaagctgacgactgtatcggtccggaagttgaaagcttggtggcttctctccccgaaggtggagttctacttcttgagaacgtcagattctacaaggaggaagagaagaacgatcctgagttcgccaagaagctcgcttcactagctgacctttacgtcaacgatgctttcggaactgctcacagagctcatgcttccaccgagggagtaacaaagttcttgaagccctcagttgctggtttccttcttcaaaaggagcttgattaccttgtgggagctgtttcgaacccaaagagaccgtttgcagccatcgtgggtggttccaaggtctcgtccaagattggagttattgagtctcttctcgagaagtgtgatatccttctccttggtggtggaatgatctttacgttctacaaggcgcaaggtctctccgttggctcgtcacttgttgaagaagataaacttgagttggctacgtctctcctcgccaaagctaaggctaagggagtctctcttttgctgccgaccgatgttgtggttgctgataagttcgctcctgatgccaacagcaaggttgtgcctgcatcaggcattgaggacggttggatgggactggacatcggtccagactcgattaaaacattcaacgaggctctagacacaacacagacagttatttggaatggacctatgggagttttcgagatggagaagtttgcagctgggacagaggcggttgcgaataaactagcagagctaagtgagaaaggagtgacgactatcataggaggaggagactcagtggctgcagtggagaaagttggagttgcaggtgtcatgagtcacatctccactggtggtggagccagcttggagcttttggaaggtaaggtacttcccggtgtgatcgctcttgatgaagccatcacagtcaccgtttag

SEQ ID NO: 108458 - protein, 483 aa, Brassica napus
MASVAASPAFSLLKSTGATASSAATRARASLLPITPSSKSISARPLGFSAVLDSHRFSLHVASKVQSVRGRGTRGVVSMAKKSVGDLTSADLKGKKVFVRADLNVPLDDNQTITDDTRIRAAIPTIKYLIDNGAKVILSTHLGRPKGVTPKFSLAPLVPRLSELLGIEVKKADDCIGPEVESLVASLPEGGVLLLENVRFYKEEEKNDPEFAKKLASLADLYVNDAFGTAHRAHASTEGVTKFLKPSVAGFLLQKELDYLVGAVSNPKRPFAAIVGGSKVSSKIGVIESLLEKCDILLLGGGMIFTFYKAQGLSVGSSLVEEDKLELATSLLAKAKAKGVSLLLPTDVVVADKFAPDANSKVVPASGIEDGWMGLDIGPDSIKTFNEALDTTQTVIWNGPMGVFEMEKFAAGTEAVANKLAELSEKGVTTIIGGGDSVAAVEKVGVAGVMSHISTGGGASLELLEGKVLPGVIALDEAITVTV

SEQ ID NO: 108459 - DNA, 1206 bp, Brassica napus
  CDS (1)..(1206)
atggcgacgaagagaaacgttggaacgttgaaggaagctgatctgaagggaaagagcgtgttcgtgagagttgatctcaacgtccctttggatgataactctaacatcactgatgacaccaggattcgcgccgctgttcccaccatcaagtacttgatggaaaacggatctagagttgttctctgcagtcacttgggtcgcccaaaaggtgttacccctaaattcagcttaaagcctcttgtgccgaggttgtctgagcttcttgggattgaggttgtaatggcaaatgactctattggtgaggaagtccagaaactagtcgcagcactacctgaaggaggtgttctgctattggagaatgtgaggttctacaaggaagaagagaagaacgaccctgaatttgccaagaagctcgctgcccttgctgatgtctatgtcaacgatgctttcggaactgctcacagagcccatgcttccactgagggagttgccaaatacttgaagccttctgtcgctggtttcctcatgcagaaggaacttgattaccttgtcggagctgtggcaaaccccaagaagccttttgccgccattgttggaggctcaaaggtttcgaccaagattggtgtcattgagtccctcttgtccaccgttgacatcctcttgctcggtggaggtatgattttcactttctacaaggcgcaaggtcactcggtgggatcttcccttgtggaagaggacaagcttgacttggccaagtcactcatggagaaggccaaagccaaaggtgtctctcttttactcccaaccgatgtggtcattgctgacaagttcgctcccgatgctaacagcaagatagtggcagccacggcaatccctgatggctggatgggactcgatattggtccagactccatcaagacattcagcgacgccctggacacaaccaagaccatcatctggaatggtcccatgggtgtatttgaattcgataagtttgcagctggaactgaggccgtagcaaagcagcttgcggagctgagcggaaagggagtgaccacgatcataggaggaggtgactctgtggctgccgtggagaaggttggtttggcagacaagatgagccacatctctaccggaggcggtgcaagtttggagcttctggagggaaagccacttccaggagtcctcgctctcgacgacgcttga

SEQ ID NO: 108460 - protein, 401 aa, Brassica napus
MATKRNVGTLKEADLKGKSVFVRVDLNVPLDDNSNITDDTRIRAAVPTIKYLMENGSRVVLCSHLGRPKGVTPKFSLKPLVPRLSELLGIEVVMANDSIGEEVQKLVAALPEGGVLLLENVRFYKEEEKNDPEFAKKLAALADVYVNDAFGTAHRAHASTEGVAKYLKPSVAGFLMQKELDYLVGAVANPKKPFAAIVGGSKVSTKIGVIESLLSTVDILLLGGGMIFTFYKAQGHSVGSSLVEEDKLDLAKSLMEKAKAKGVSLLLPTDVVIADKFAPDANSKIVAATAIPDGWMGLDIGPDSIKTFSDALDTTKTIIWNGPMGVFEFDKFAAGTEAVAKQLAELSGKGVTTIIGGGDSVAAVEKVGLADKMSHISTGGGASLELLEGKPLPGVLALDDA

SEQ ID NO: 108461 - DNA, 1443 bp, Brassica napus
  CDS (1)..(1443)
atggcatccgtcgccgcaagtcccgccttctcactccgtaagtcaaccaccggagccacttactccgccgcaactcgcgcacgcgcctcccttttgcccgttccatccaaatccatctccacccgtcctctcggcttctccgccgtcctagactctcgtttcaccgtccatgtcgcctcgaaggttcagtctttccgcgggaaagggaccagaggagttgtctccatggcgaagaagagtgtcggagatctcacctctgctgatttgaaagggaagaaggttttcgtgagagctgatctcaatgtacctctcgatgacaatcagacaatcactgacgatacgaggatccgtgcagctattccgacgatcaagtacttgatcgagaatggtgctaaagtcatcctgtccactcatctgggaaggccaaagggagtgacaccgaagtttagtttggctcctcttgtccctaggctatctgagcttcttggtattgaggtcaagaaagctgacgactgtatcggtccggaagttgagagcttggtggcttcactacctgaaggtggagttttgcttcttgagaacgtgaggttctacaaggaagaagagaagaacgatcctgagttcgctaagaagcttgcttccttagctgacctttatgtcaacgatgcttttggaactgctcacagagctcatgcttccactgagggagtcacaaagttcttgaagccttctgttgctggtttccttctccaaaaggagcttgattaccttgtgggagctgtttcaagcccaaagagaccatttgcagccatagttggtggttccaaggtctcgtccaagattggagttattgaatcgcttcttgagaagtgtgatatacttcttcttggtggtggaatgatctttacattctacaaggcacaaggtctttctgttggatcgtcccttgttgaagaagacaaacttgagttggctacttctctccttgccaaagctaaagccaaaggagtctctcttttgttgccaaccgatgttgtggttgctgacaagttcgctcctgatgccaacagcaaggttgtgtctgcatcaggcattgaggacggatggatgggactggacattggtccagactcgataaaaacattcaacgaagctctggacacaacacagacagtcatttggaatggacctatgggagttttcgagatggagaagtttgctgctggaacagaggcgattgctaataaactagcagagctaagtgagaaaggagtgacaactataataggaggaggagactcagtggctgcagtggagaaagtgggagttgcaggagtcatgagtcacatctccactggtggtggagctagtttggagctcttggaaggcaaagtacttcctggtgtgatcgctcttgatgaagccatcgcagtcaccgtttag

SEQ ID NO: 108462 - protein, 480 aa, Brassica napus
MASVAASPAFSLRKSTTGATYSAATRARASLLPVPSKSISTRPLGFSAVLDSRFTVHVASKVQSFRGKGTRGVVSMAKKSVGDLTSADLKGKKVFVRADLNVPLDDNQTITDDTRIRAAIPTIKYLIENGAKVILSTHLGRPKGVTPKFSLAPLVPRLSELLGIEVKKADDCIGPEVESLVASLPEGGVLLLENVRFYKEEEKNDPEFAKKLASLADLYVNDAFGTAHRAHASTEGVTKFLKPSVAGFLLQKELDYLVGAVSSPKRPFAAIVGGSKVSSKIGVIESLLEKCDILLLGGGMIFTFYKAQGLSVGSSLVEEDKLELATSLLAKAKAKGVSLLLPTDVVVADKFAPDANSKVVSASGIEDGWMGLDIGPDSIKTFNEALDTTQTVIWNGPMGVFEMEKFAAGTEAIANKLAELSEKGVTTIIGGGDSVAAVEKVGVAGVMSHISTGGGASLELLEGKVLPGVIALDEAIAVTV

SEQ ID NO: 108463 - DNA, 1206 bp, Brassica napus
  CDS (1)..(1206)
atggcgacgaagagaagcgttggaactttgaaagaagcagatctgaagggaaagagcgtgttcgtgagggttgatctcaacgttcctttggatgataactccaacatcaccgatgacaccaggattcgcgccgctgttcccaccatcaagtacttgatgggtaacggatctagggttgttctctgcagccacttgggccgcccgaaaggtgttacccctaaattcagcttaaagcctcttgtgccgagattgtctgagcttcttggtgtcgaggttgtgatggccaatgactctattggtgaggaagtccagaaactggttgcaggactacctgaaggtggtgttcttctcttggagaacgtgaggttctacaaggaagaagagaagaacgaccctgaatttgcaaagaagcttgctgcccttgctgatgtctacgtcaacgatgctttcggaactgctcacagagctcatgcttccaccgagggagttgccaaatacttgaagccttccgttgctggtttcctcatgcagaaggagcttgattaccttgtcggagctgtggcaaaccccaagaagccttttgctgccattgtcggaggctcaaaggtttcgacaaagattggtgtcattgagtccctcttgtccaccgttgacatcctcttgctcggtggaggtatgattttcactttctacaaggcgcaaggacattcggttggatcttcccttgtggaagaggacaagcttgacttggccaagtcactcatggagaaggcgaaagccaaaggtgtctctctgttgctcccaaccgatgtggttattgctgataagttcgctcccgatgctaacagcaagatagtgccagccacggcaatcccagatggctggatgggactcgatgttgggccagactctatcaagacattcagcgaggctctggacacaacccagaccatcatctggaatggtcccatgggtgtttttgaattcgaaaagtttgcagctggaactgaggccgtagcaaagcagctagcggagctgagcggaaagggagtgaccacaatcataggaggaggtgactctgtggctgccgtggagaaggttggtttggctgacaagatgagtcacatctctaccgggggaggtgcaagtttggagcttctagagggaaagccacttccaggagtcctagctcttgacgacgcttga

SEQ ID NO: 108464 - protein, 401 aa, Brassica napus
MATKRSVGTLKEADLKGKSVFVRVDLNVPLDDNSNITDDTRIRAAVPTIKYLMGNGSRVVLCSHLGRPKGVTPKFSLKPLVPRLSELLGVEVVMANDSIGEEVQKLVAGLPEGGVLLLENVRFYKEEEKNDPEFAKKLAALADVYVNDAFGTAHRAHASTEGVAKYLKPSVAGFLMQKELDYLVGAVANPKKPFAAIVGGSKVSTKIGVIESLLSTVDILLLGGGMIFTFYKAQGHSVGSSLVEEDKLDLAKSLMEKAKAKGVSLLLPTDVVIADKFAPDANSKIVPATAIPDGWMGLDVGPDSIKTFSEALDTTQTIIWNGPMGVFEFEKFAAGTEAVAKQLAELSGKGVTTIIGGGDSVAAVEKVGLADKMSHISTGGGASLELLEGKPLPGVLALDDA

SEQ ID NO: 108465 - DNA, 1206 bp, Brassica napus
  CDS (1)..(1206)
atggcgacgaagagaagcgttggaacgttgaaggaagctgatctgaagggaaagagcgtgttcgtgagggttgatctcaacgttcctttggatgataactctaacatcactgatgacaccaggattcgtgccgctgttcctaccgttaagtacttgatggaaaacggatctagagttgttctctgcagtcacttgggtcgtccaaaaggtgttacccctaaattcagcttaaagcctcttgtgccgaggttgtctgagcttcttgggattgaggttgtaatggcaaatgactctattggtgaggaagtccagaaactagtcgcaggactacctgaaggaggtgttctgctattggagaatgtgaggttctacaaggaagaagagaagaacgaccctgaatttgccaagaagctcgctgcccttgctgatgtctatgtcaacgatgctttcggaactgctcacagagcccatgcttccactgagggagttgccaaatacttgaagccttctgtcgctggtttcctcatgcagaaggagcttgattaccttgtcggagctgtagcaaaccccaagaagccttttgccgccattgttggaggttcaaaggtttcaacgaagattggtgtcattgagtcgctcttgtccaccgttgacattctcctgctcggtggaggtatgatttatactttctataaggcgcaaggacacgcggtcggatcttcccttttggaagaggacaagcttgacttggccaggtcactcatggagaaggcccaagacaaaggtgtctctcttttactcccaaccgatgtggttattgctgacaagttcgctcctgatgctaacagcaagatagtgccggccacggcaatcccagatggctggatgggactcgatattggtccagactccatcaagacattcagcgaagccctggacacaaccaagaccatcatctggaatggtcccatgggtgtatttgaattcgataagtttgcagctggaactgaggccgtagcaaagcagcttgcggagctgagcggaaagggagtgaccacaatcataggaggaggtgactctgtggctgccgtggagaaggttggtttggcagacaagatgagccacatctctaccggaggcggtgcaagtttggagcttctggagggaaagccacttccaggagtcctcgctctcgacgacgcttga

SEQ ID NO: 108466 - protein, 401 aa, Brassica napus
MATKRSVGTLKEADLKGKSVFVRVDLNVPLDDNSNITDDTRIRAAVPTVKYLMENGSRVVLCSHLGRPKGVTPKFSLKPLVPRLSELLGIEVVMANDSIGEEVQKLVAGLPEGGVLLLENVRFYKEEEKNDPEFAKKLAALADVYVNDAFGTAHRAHASTEGVAKYLKPSVAGFLMQKELDYLVGAVANPKKPFAAIVGGSKVSTKIGVIESLLSTVDILLLGGGMIYTFYKAQGHAVGSSLLEEDKLDLARSLMEKAQDKGVSLLLPTDVVIADKFAPDANSKIVPATAIPDGWMGLDIGPDSIKTFSEALDTTKTIIWNGPMGVFEFDKFAAGTEAVAKQLAELSGKGVTTIIGGGDSVAAVEKVGLADKMSHISTGGGASLELLEGKPLPGVLALDDA

SEQ ID NO: 108467 - DNA, 1449 bp, Brassica napus
  CDS (1)..(1449)
atggcttccgtcgccgcaagtcccgccttctccctcctcaaatccaccggagccactgcttcctccgccgcaactcgcgcgcgcgcctcacttctacccatcccctcctccaaatccatctccgcgcgtcctctcggcttctccgccgtcctcgactcgcgccgtttctccctccacgtctcctcgaaagttcagtcggtgcgcgggagagggagcagaggagtcgtttccatggcgaagaagagcgtcggtgacttgacctctgccgatttgaaagggaagaaggttttcgtgagagctgatctcaatgtgcctctcgatgataatcagacgatcactgacgatacgaggattcgcgccgccgttccgacgatcaagtatttgattgagaatggtgctaaagtcatcctctctactcatctgggaaggccaaagggagtcacaccaaagttcagtttggctcctcttgtccctaggctgtctgaacttcttggtattgaggtcaagaaagctgacgactgtatcggtccggaagtggaaagcttggtggcttctctccctgaaggtggagttctgctccttgagaacgtcaggttctacaaggaggaagagaagaacgaccctgagttcgccaagaagctcgcttcactagctgacctctacgtcaacgatgcttttggaactgctcacagagctcacgcttccaccgagggagtcacaaagttcttgaaaccctcagttgctggtttccttctgcaaaaggagcttgattaccttgtgggcgctgtttcaagcccaaagagaccgtttgcagccatcgtgggtggttccaaggtgtcgtccaagattggagttattgagtctcttctcgagaagtgtgatatccttcttcttggtggtggaatgatctttacgttctacaaggcgcaaggtctttccgttggctcgtcacttgttgaagaagacaagcttgagttggctacgtctctccttgctaaagctaaggctaaaggagtctctcttttgttgccgactgatgttgtggttgctgataagttcgctcctgatgccaacagcaaggttgtgcctgcatcaggcattgaggacggttggatgggactagacatcggtccagactcgattaaaacattcaacgaggctctggacacaacgcagacagttatttggaatggacctatgggagttttcgagatggagaagtttgctgctggaacagaggcggttgcgaataaactagcagagctaagtgagaaaggagtgacaactataataggaggaggagactcagtggctgcagtggagaaagttggagttgcaggagtcatgagtcacatctccactggtggtggagccagcttggagctcttggaaggaaaggtacttcccggtgtgatcgctcttgatgaagccatcacagtcaccgtttag

SEQ ID NO: 108468 - protein, 482 aa, Brassica napus
MASVAASPAFSLLKSTGATASSAATRARASLLPIPSSKSISARPLGFSAVLDSRRFSLHVSSKVQSVRGRGSRGVVSMAKKSVGDLTSADLKGKKVFVRADLNVPLDDNQTITDDTRIRAAVPTIKYLIENGAKVILSTHLGRPKGVTPKFSLAPLVPRLSELLGIEVKKADDCIGPEVESLVASLPEGGVLLLENVRFYKEEEKNDPEFAKKLASLADLYVNDAFGTAHRAHASTEGVTKFLKPSVAGFLLQKELDYLVGAVSSPKRPFAAIVGGSKVSSKIGVIESLLEKCDILLLGGGMIFTFYKAQGLSVGSSLVEEDKLELATSLLAKAKAKGVSLLLPTDVVVADKFAPDANSKVVPASGIEDGWMGLDIGPDSIKTFNEALDTTQTVIWNGPMGVFEMEKFAAGTEAVANKLAELSEKGVTTIIGGGDSVAAVEKVGVAGVMSHISTGGGASLELLEGKVLPGVIALDEAITVTV

SEQ ID NO: 108469 - DNA, 1446 bp, Brassica napus
  CDS (1)..(1446)
atggcatccgtcgccgcaagtccagctttctcactcctcaagtcaaccaccggagccactgcttcctccgccgcaactcgcgcacgcgcctcccttttgcccgtcccaaccaaatccatctccacccgtcctctcggcttctccgccgtcctcgactctcgtttcaccgtccatgtcgcctcgaaggtccagtctttccgcgggaaggggaccagaggagttgtctccatggcgaagaagagcgtcggagatctcacctctgctgatctgaaagggaagaaggttttcgtcagagctgatctcaatgtacctctcgatgacaatcagacgatcactgacgatactaggatccgtgcagctattccgacgatcaagtacttgatcgagaatggtgctaaagtcatcctctccactcatctgggaaggccaaagggagtcacaccgaagtttagtttggctcctcttgtccctaggctatctgagcttcttggtattgaggtcaagaaagctgacgactgtattggtccggaagttgagagcttggtggcttcactacctgaaggtggagttttgcttcttgagaacgtgaggttctacaaggaagaagagaagaacgatcctgacttcgctaagaagcttgcttccttagctgacctttatgtcaacgatgcttttggaactgctcacagagctcatgcttccactgagggtgtcactaagttcttgaagccttctgttgctggtttccttctccaaaaggagcttgattaccttgtgggagctgtttcaagcccaaagagaccatttgcagccattgttggtggttccaaggtctcgtccaagattggagttattgaatcgcttcttgagaagtgtgatattcttcttcttggtggtggaatgatctttacattctacaaggcacaaggtctttctgttggctcgtcccttgttgaagaagacaaacttgagttggctacatctctccttgccaaagctaaggccaaaggagtctctcttttgttgcctaccgatgttgtggttgctgacaagttcgctcctgatgccaacagtaaggtcgtgtctgcatcagggattgaggatggatggatgggactggacattggtccagactcgataaaaacattcaacgaagctctggacacaacacagacagtcatttggaatggacctatgggagttttcgagatggagaagtttgctgctggaacagaggcaattgctaataaactagcagagctaagtgagaaaggagtgacaactataataggaggaggagactcagtggctgcagtggagaaagtgggagttgcaggagtcatgagtcacatctccactggtggtggagctagtttggagctcttggaaggcaaagtacttcctggtgtgatcgctcttgatgaagccatcgcagtcaccgtttag

SEQ ID NO: 108470 - protein, 481 aa, Brassica napus
MASVAASPAFSLLKSTTGATASSAATRARASLLPVPTKSISTRPLGFSAVLDSRFTVHVASKVQSFRGKGTRGVVSMAKKSVGDLTSADLKGKKVFVRADLNVPLDDNQTITDDTRIRAAIPTIKYLIENGAKVILSTHLGRPKGVTPKFSLAPLVPRLSELLGIEVKKADDCIGPEVESLVASLPEGGVLLLENVRFYKEEEKNDPDFAKKLASLADLYVNDAFGTAHRAHASTEGVTKFLKPSVAGFLLQKELDYLVGAVSSPKRPFAAIVGGSKVSSKIGVIESLLEKCDILLLGGGMIFTFYKAQGLSVGSSLVEEDKLELATSLLAKAKAKGVSLLLPTDVVVADKFAPDANSKVVSASGIEDGWMGLDIGPDSIKTFNEALDTTQTVIWNGPMGVFEMEKFAAGTEAIANKLAELSEKGVTTIIGGGDSVAAVEKVGVAGVMSHISTGGGASLELLEGKVLPGVIALDEAIAVTV

SEQ ID NO: 108471 - DNA, 1452 bp, Glycine max
  CDS (1)..(1452)
atggcctcagccgcatcccccacaactttctctctcctccactccaccaccccggcctcctcctcctccgccacctccgcctccccctcgcgcgtgcagctctcctcctccctccgctcgcgcccgctcgcgcgccgccttggcttcgccgcggcggacccgctgctcgcggcgaatgtcgcagcgcgcgtcgcggcggtgagaggaggaaagggcgcgaggggggtggtgtcgatggcgaagaagagcgtgggggagctgagcgcggcggacctgaaggggaagaaggtcttcgtcagggccgacctcaacgtcccgctcgacgacaaccagaacatcaccgacgacaccagaattcgcgccgccattcccaccatcaaacacctaatccaaaacggcgccaaagttattctctccagccacttggggaggccgaagggtgtcactcccaaatacagcttggcacctcttgtgccccggctttctgagctcattggtatccaggttgtcaaggctgaagacagtattggtccagaagtagaaaagttggtggcttctcttccagatggaggtgttcttcttctagaaaatgtgaggttttacaaggaggaagaaaagaatgatcccgagcatgcaaaaaagcttgcctctctggcagatctgtttgtgaatgatgcatttggtactgctcacagggcacatgcatcaacagagggtgttactaaatacctgaagccatctgttgctggttttcttttgcaaaaggaacttgattaccttgttggggcagtatcaaaccccaaaaggccatttgctgccattgttggtggttccaaagtctcatctaaaattggagtgattgagtcacttttagaaaaagttgacatccttcttcttggtggaggaatgatcttcacattttacaaggcacaaggtctttcagtgggttcatcccttgtagaagaagataagttggatcttgctacatcactacttgcaaaagccaaggaaaagggggtgtctctcttgttaccaagtgatgtggtgattgcagacaaatttgctcctgatgctaatagcaaggtcgtgccagcatctgccatccctgatggctggatgggattggatattggtccagattctgttaaatcattcagtgaagcattggatactacccaaaccatcatatggaatggaccaatgggagtgtttgagtttgacaagtttgctgttggtacagaggctattgcaaagaagctggctgatctcagtggaaagggggtgaccacaattatcggaggaggagattctgttgcagctgtggagaaagtaggagttgctagtgtcatgagccacatatctactggtggtggtgccagtttggagttattggaaggcaaagagcttccaggagtccttgctctcgatgaagccgtcccagttgccgtgtaa

SEQ ID NO: 108472 - protein, 483 aa, Glycine max
MASAASPTTFSLLHSTTPASSSSATSASPSRVQLSSSLRSRPLARRLGFAAADPLLAANVAARVAAVRGGKGARGVVSMAKKSVGELSAADLKGKKVFVRADLNVPLDDNQNITDDTRIRAAIPTIKHLIQNGAKVILSSHLGRPKGVTPKYSLAPLVPRLSELIGIQVVKAEDSIGPEVEKLVASLPDGGVLLLENVRFYKEEEKNDPEHAKKLASLADLFVNDAFGTAHRAHASTEGVTKYLKPSVAGFLLQKELDYLVGAVSNPKRPFAAIVGGSKVSSKIGVIESLLEKVDILLLGGGMIFTFYKAQGLSVGSSLVEEDKLDLATSLLAKAKEKGVSLLLPSDVVIADKFAPDANSKVVPASAIPDGWMGLDIGPDSVKSFSEALDTTQTIIWNGPMGVFEFDKFAVGTEAIAKKLADLSGKGVTTIIGGGDSVAAVEKVGVASVMSHISTGGGASLELLEGKELPGVLALDEAVPVAV

SEQ ID NO: 108473 - DNA, 1206 bp, Glycine max
  CDS (1)..(1206)
atggcaactaagaggagcgtgggaacgttgaaggagggtgatttgaaggggaagagggtattcgtgagggtcgatctgaacgtgcctttggatgacaaccttaacatcaccgatgacactagagtccgtgctgctgttcccaccatcaagtacttgactggttatggtgctaaagtgatcctttctagccatttgggacgtccaaaaggtgtaacacctaaatacagtttgaagcctcttgtgccaaggctgtctcaacttcttggaattgaggttacgatggccaatgactctattggggaggaagttgaaaagttggttacacaacttccagaaggtggtgttttgcttctagagaatgtgaggttctacaaggaggaagagaagaatgatcctgaatttgcaaagaagttggcttctctagctgatctctatgtgaatgatgcatttggcactgcccacagagctcatgcttctacagaaggagttgccaaatacttgaagccctctgttgcaggattcctaatgcagaaggagcttgattatctagttggggctgtgtcaaaccccaagagaccatttgctgctattgtcggtggatcgaaggtgtcttccaagattggagttattgaatccttgttggagaaagttaatgttctcttgcttggtggaggaatgatctttaccttttacaaggctcagggttattcagttgggtcatctcttgtggaggaagacaagcttagccttgcaactacacttcttgaaaaggccaaggctaaaggggtttctttgttgcttccaactgatgttgtcatagcagacaagtttgctgctgatgctaacagcaagactgtgccggcatcaagcatcccagatgggtggatggggttggatattggtcctgattccatcaagacatttggtgaagcattggatacgactcagaccattatttggaatggaccaatgggtgtttttgagtttgataagtttgccacaggaacagaggctatagccaagaaactggcagagctgagtgggaagggagtgacaaccatcattggaggaggtgactccgttgccgctgtggagaaggttggacttgcagacaagatgagccacatctccactggtggtggtgccagcttagagcttcttgagggaaagcaactccctggtgtccttgctcttgatgatgcttga

SEQ ID NO: 108474 - protein, 401 aa, Glycine max
MATKRSVGTLKEGDLKGKRVFVRVDLNVPLDDNLNITDDTRVRAAVPTIKYLTGYGAKVILSSHLGRPKGVTPKYSLKPLVPRLSQLLGIEVTMANDSIGEEVEKLVTQLPEGGVLLLENVRFYKEEEKNDPEFAKKLASLADLYVNDAFGTAHRAHASTEGVAKYLKPSVAGFLMQKELDYLVGAVSNPKRPFAAIVGGSKVSSKIGVIESLLEKVNVLLLGGGMIFTFYKAQGYSVGSSLVEEDKLSLATTLLEKAKAKGVSLLLPTDVVIADKFAADANSKTVPASSIPDGWMGLDIGPDSIKTFGEALDTTQTIIWNGPMGVFEFDKFATGTEAIAKKLAELSGKGVTTIIGGGDSVAAVEKVGLADKMSHISTGGGASLELLEGKQLPGVLALDDA

SEQ ID NO: 108475 - DNA, 1209 bp, Zea mays
  CDS (1)..(1209)
atggcgacgaagaggagcgtgggcaccctcggcgaggcggatctgaaggggaagaaggtgttcgtgcgcgccgacctcaacgtcccgctcgacgacgcccagaagatcaccgacgacacccgcatccgcgcctccgtccccaccatcaagttcctcctcgagaagggcgccaaggtcatcctcgccagccacctgggtcgtccaaaaggtgtcaccccaaagtacagcttgaagcctcttgttccacgcttgtctgagctccttggagttgaagtcgtgatggccaatgattgcattggtgaggaagttgagaagttggctgccgctttgccagaaggtggagttctgctcctagagaatgttagattctacaaggaggaagagaagaacgaacctgagtttgctaagaagctagcatctgttgctgacctttatgtcaatgatgcttttggcacggcacacagagctcatgcttcaaccgaaggagttaccaagtatttgaagcctgctgttgctggcttcctcatgcagaaggaacttgactaccttgttggagctgttgccaacccaaagaagccatttgccgctattgttggtggatccaaggtctcaagtaagattggtgtcattgagtcgttgctggcgaaggtcgatatcctcatccttggtggtggtatgatctacacattttacaaggcacaaggatattctgttggaaaatctctcgtggaagaggataaacttgagctcgcaacttctcttattgagaaggcgaaggcaaagggggtttctcttttgcttcccactgatattgtagtagcggacaagtttgcagccgatgctgagagcaagattgtccctgccactgctatccctgatgactggatgggtcttgatgttggccctgatgccaccaaaacattcaacgaagcattggacaccaccaagactgttatttggaacggccccatgggagtgtttgagttcgagaagtttgcagctggcactgaggcgattgccaagaagctagctgagcttacaaccacgaagggtgtcactaccatcatcggcggcggcgactctgtcgctgctgtcgagaaggctgggctggccgacaagatgagccacatttcgaccggcggcggtgcgagcttggaactcttggaaggcaagactctacctggtgtccttgccctcgatgacgcctag

SEQ ID NO: 108476 - protein, 402 aa, Zea mays
MATKRSVGTLGEADLKGKKVFVRADLNVPLDDAQKITDDTRIRASVPTIKFLLEKGAKVILASHLGRPKGVTPKYSLKPLVPRLSELLGVEVVMANDCIGEEVEKLAAALPEGGVLLLENVRFYKEEEKNEPEFAKKLASVADLYVNDAFGTAHRAHASTEGVTKYLKPAVAGFLMQKELDYLVGAVANPKKPFAAIVGGSKVSSKIGVIESLLAKVDILILGGGMIYTFYKAQGYSVGKSLVEEDKLELATSLIEKAKAKGVSLLLPTDIVVADKFAADAESKIVPATAIPDDWMGLDVGPDATKTFNEALDTTKTVIWNGPMGVFEFEKFAAGTEAIAKKLAELTTTKGVTTIIGGGDSVAAVEKAGLADKMSHISTGGGASLELLEGKTLPGVLALDDA

SEQ ID NO: 108477 - DNA, 26 bp, Artificial sequence
  primer
atgtctttatcttcaaagttgtctgt

SEQ ID NO: 108478 - DNA, 27 bp, Artificial sequence
  primer
ttatttcttttcggataagaaagcaac

SEQ ID NO: 108479 - protein, 476 aa, Artificial sequence
  consensus sequence
  Variant (2)..(2): Xaa in position 2 is any amino acid
  Variant (4)..(5): Xaa in position 4 to 5 is any amino acid
  Variant (7)..(7): Xaa in position 7 is any amino acid
  Variant (9)..(9): Xaa in position 9 is any amino acid
  Variant (13)..(18): Xaa in position 13 to 18 is any amino acid
  Variant (19)..(23): Xaa in position 19 to 23 is any or no amino acid
  Variant (25)..(27): Xaa in position 25 to 27 is any amino acid
  Variant (30)..(30): Xaa in position 30 is any amino acid
  Variant (32)..(33): Xaa in position 32 to 33 is any amino acid
  Variant (37)..(42): Xaa in position 37 to 42 is any amino acid
  Variant (44)..(45): Xaa in position 44 to 45 is any amino acid
  Variant (46)..(46): Xaa in position 46 is any or no amino acid
  Variant (48)..(50): Xaa in position 48 to 50 is any amino acid
  Variant (57)..(62): Xaa in position 57 to 62 is any amino acid
  Variant (63)..(84): Xaa in position 63 to 84 is any or no amino acid
  Variant (87)..(87): Xaa in position 87 is any amino acid
  Variant (89)..(92): Xaa in position 89 to 92 is any amino acid
  Variant (94)..(95): Xaa in position 94 to 95 is any amino acid
  Variant (96)..(102): Xaa in position 96 to 102 is any or no amino acid
  Variant (104)..(104): Xaa in position 104 is any amino acid
  Variant (105)..(107): Xaa in position 105 to 107 is any or no amino acid
  Variant (109)..(122): Xaa in position 109 to 122 is any amino acid
  Variant (123)..(134): Xaa in position 123 to 134 is any or no amino acid
  Variant (136)..(137): Xaa in position 136 to 137 is any amino acid
  Variant (138)..(138): Xaa in position 138 is any or no amino acid
  Variant (143)..(143): Xaa in position 143 is any amino acid
  Variant (146)..(146): Xaa in position 146 is any amino acid
  Variant (147)..(148): Xaa in position 147 to 148 is any or no amino acid
  Variant (150)..(162): Xaa in position 150 to 162 is any amino acid
  Variant (163)..(185): Xaa in position 163 to 185 is any or no amino acid
  Variant (187)..(187): Xaa in position 187 is any amino acid
  Variant (189)..(190): Xaa in position 189 to 190 is any amino acid
  Variant (191)..(197): Xaa in position 191 to 197 is any or no amino acid
  Variant (199)..(199): Xaa in position 199 is any amino acid
  Variant (204)..(204): Xaa in position 204 is any amino acid
  Variant (209)..(210): Xaa in position 209 to 210 is any amino acid
  Variant (212)..(213): Xaa in position 212 to 213 is any amino acid
  Variant (214)..(215): Xaa in position 214 to 215 is any or no amino acid
  Variant (217)..(220): Xaa in position 217 to 220 is any amino acid
  Variant (221)..(229): Xaa in position 221 to 229 is any or no amino acid
  Variant (232)..(232): Xaa in position 232 is any amino acid
  Variant (234)..(236): Xaa in position 234 to 236 is any amino acid
  Variant (238)..(245): Xaa in position 238 to 245 is any amino acid
  Variant (246)..(248): Xaa in position 246 to 248 is any or no amino acid
  Variant (250)..(251): Xaa in position 250 to 251 is any amino acid
  Variant (253)..(254): Xaa in position 253 to 254 is any amino acid
  Variant (257)..(257): Xaa in position 257 is any amino acid
  Variant (260)..(260): Xaa in position 260 is any amino acid
  Variant (264)..(264): Xaa in position 264 is any amino acid
  Variant (266)..(271): Xaa in position 266 to 271 is any amino acid
  Variant (273)..(276): Xaa in position 273 to 276 is any amino acid
  Variant (277)..(278): Xaa in position 277 to 278 is any or no amino acid
  Variant (280)..(283): Xaa in position 280 to 283 is any amino acid
  Variant (287)..(289): Xaa in position 287 to 289 is any amino acid
  Variant (292)..(299): Xaa in position 292 to 299 is any amino acid
  Variant (300)..(303): Xaa in position 300 to 303 is any or no amino acid
  Variant (305)..(305): Xaa in position 305 is any amino acid
  Variant (308)..(322): Xaa in position 308 to 322 is any amino acid
  Variant (323)..(332): Xaa in position 323 to 332 is any or no amino acid
  Variant (334)..(334): Xaa in position 334 is any amino acid
  Variant (336)..(340): Xaa in position 336 to 340 is any amino acid
  Variant (341)..(345): Xaa in position 341 to 345 is any or no amino acid
  Variant (347)..(359): Xaa in position 347 to 359 is any amino acid
  Variant (360)..(372): Xaa in position 360 to 372 is any or no amino acid
  Variant (375)..(375): Xaa in position 375 is any amino acid
  Variant (378)..(391): Xaa in position 378 to 391 is any amino acid
  Variant (393)..(394): Xaa in position 393 to 394 is any amino acid
  Variant (399)..(399): Xaa in position 399 is any amino acid
  Variant (404)..(406): Xaa in position 404 to 406 is any amino acid
  Variant (408)..(409): Xaa in position 408 to 409 is any amino acid
  Variant (412)..(425): Xaa in position 412 to 425 is any amino acid
  Variant (426)..(431): Xaa in position 426 to 431 is any or no amino acid
  Variant (436)..(441): Xaa in position 436 to 441 is any amino acid
  Variant (442)..(443): Xaa in position 442 to 443 is any or no amino acid
  Variant (445)..(449): Xaa in position 445 to 449 is any amino acid
  Variant (450)..(451): Xaa in position 450 to 451 is any or no amino acid
  Variant (453)..(454): Xaa in position 453 to 454 is any amino acid
  Variant (461)..(461): Xaa in position 461 is any amino acid
  Variant (464)..(465): Xaa in position 464 to 465 is any amino acid
  Variant (469)..(469): Xaa in position 469 is any amino acid
  Variant (472)..(475): Xaa in position 472 to 475 is any amino acid
KXVXXRXDXNVPXXXXXXXXXXXTXXXRIXAXXPTIXXXXXXGXXXVXXXSHLGRPXXXXXXXXXXXXXXXXXXXXXXXXXXXXSLXPXXXXLXXXXXXXXXLXXXXVXXXXXXXXXXXXXXXXXXXXXXXXXXGXXXLLENXRFXXXEXXXXXXXXXXXXXXXXXXXXXXXXXXXXXXXXXXXXLXDXXXXXXXXXVXDAFGXAHRAXXSXXXXGXXXXXXXXXXXXXAGXLXXXEXXXXXXXXXXXPXXPXXAIXGGXKVSXKXXXXXXLXXXXXXDXXXXGGGXXXTFXXXXXXXXXXXXGXSLXXXXXXXXXXXXXXXXXXXXXXXXXPXDXXXXXXXXXXFXXXXXXXXXXXXXXXXXXXXXXXXXXLDXGPXXXXXXXXXXXXXXTXXWNGPXGVFEXXXFXXGTXXXXXXXXXXXXXXXXXXXXGGGDXXXXXXXXGXXXXXXXSXXSTGGGAXLEXXEGKXLPXXXXL

SEQ ID NO: 108480 - protein, 15 aa, Artificial sequence
  protein pattern
  Variant (4)..(4): Xaa in position 4 is Ala, Gly or Ser
  Variant (5)..(5): Xaa in position 5 is Ala, Ser or Thr
  Variant (10)..(11): Xaa in position 10 to 11 is any amino acid
  Variant (13)..(14): Xaa in position 13 to 14 is any amino acid
  Variant (15)..(15): Xaa in position 15 is Ala, Gly, Ile, Leu or Val
DAFXXAHRAXXSXXX

SEQ ID NO: 108481 - protein, 22 aa, Artificial sequence
  protein pattern
  Variant (7)..(7): Xaa in position 7 is any amino acid
  Variant (10)..(10): Xaa in position 10 is any amino acid
  Variant (11)..(11): Xaa in position 11 is Phe, Ile, Leu, Met or Val
  Variant (15)..(15): Xaa in position 15 is any amino acid
  Variant (18)..(18): Xaa in position 18 is Ala, Gly or Ile
  Variant (19)..(19): Xaa in position 19 is Phe, Ile, Leu or Val
  Variant (20)..(21): Xaa in position 20 to 21 is any amino acid
  Variant (22)..(22): Xaa in position 22 is Ile or Leu
STGGGAXLEXXEGKXLPXXXXX

SEQ ID NO: 108482 - protein, 20 aa, Artificial sequence
  protein pattern
  Variant (2)..(2): Xaa in position 2 is Ile, Leu or Val
  Variant (3)..(3): Xaa in position 3 is Phe, Ile, Leu or Val
  Variant (8)..(8): Xaa in position 8 is any amino acid
  Variant (10)..(10): Xaa in position 10 is Ala, Leu or Val
  Variant (13)..(15): Xaa in position 13 to 15 is any amino acid
  Variant (17)..(18): Xaa in position 17 to 18 is any amino acid
  Variant (19)..(19): Xaa in position 19 is Ala or Gly
  Variant (20)..(20): Xaa in position 20 is Ser or Thr
TXXWNGPXGXFEXXXFXXXX

SEQ ID NO: 108483 - protein, 24 aa, Artificial sequence
  protein pattern
  Variant (2)..(3): Xaa in position 2 to 3 is any amino acid
  Variant (5)..(6): Xaa in position 5 to 6 is any amino acid
  Variant (7)..(7): Xaa in position 7 is Ala or Val
  Variant (8)..(8): Xaa in position 8 is Ile or Val
  Variant (9)..(9): Xaa in position 9 is Ile, Leu, Met or Val
  Variant (12)..(12): Xaa in position 12 is Ala or Ser
  Variant (15)..(15): Xaa in position 15 is any amino acid
  Variant (16)..(16): Xaa in position 16 is Asp, Gly, Ser or Thr
  Variant (18)..(18): Xaa in position 18 is Ile or Leu
  Variant (19)..(19): Xaa in position 19 is any amino acid
  Variant (20)..(20): Xaa in position 20 is Ala, Ile, Leu or Val
  Variant (21)..(21): Xaa in position 21 is Ile, Leu or Val
  Variant (22)..(23): Xaa in position 22 to 23 is any amino acid
PXXPXXXXXGGXKVXXKXXXXXXL

SEQ ID NO: 108484 - protein, 12 aa, Artificial sequence
  protein pattern
  Variant (2)..(2): Xaa in position 2 is any or no amino acid
  Variant (4)..(4): Xaa in position 4 is Phe or Leu
  Variant (5)..(5): Xaa in position 5 is Ile, Leu, Met or Val
  Variant (7)..(7): Xaa in position 7 is any amino acid
  Variant (9)..(9): Xaa in position 9 is Phe, Ile, Leu or Met
KXVXXRXDXNVP

SEQ ID NO: 108485 - protein, 15 aa, Artificial sequence
  protein pattern
  Variant (2)..(2): Xaa in position 2 is Ala, Asp, Glu, Gly, Gln or Ser
  Variant (3)..(3): Xaa in position 3 is Ile, Leu or Val
  Variant (4)..(4): Xaa in position 4 is any amino acid
  Variant (5)..(5): Xaa in position 5 is Leu, Met or Val
  Variant (9)..(9): Xaa in position 9 is any amino acid
  Variant (11)..(13): Xaa in position 11 to 13 is any amino acid
  Variant (14)..(14): Xaa in position 14 is any or no amino acid
GXXXXLENXRXXXXE

SEQ ID NO: 108486 - protein, 12 aa, Artificial sequence
  protein pattern
  Variant (2)..(2): Xaa in position 2 is Ile, Leu, Met or Val
  Variant (3)..(3): Xaa in position 3 is Ala, Ile, Leu or Val
  Variant (4)..(4): Xaa in position 4 is any amino acid
  Variant (5)..(5): Xaa in position 5 is Ala, Ser or Thr
  Variant (7)..(7): Xaa in position 7 is any amino acid
  Variant (9)..(9): Xaa in position 9 is Lys or Arg
  Variant (10)..(10): Xaa in position 10 is Ala, Pro or Val
  Variant (11)..(11): Xaa in position 11 is any amino acid
  Variant (12)..(12): Xaa in position 12 is Asp, Glu, Gly, Asn, Ser or Thr
VXXXXHXGXXXX

SEQ ID NO: 108487 - DNA, 1233 bp, Saccharomyces cerevisiae
  CDS (1)..(1233)
atgctaagtgcaatttccaaagtctccactttaaaatcatgtacaagatatttaaccaaatgcaactatcatgcatcagctaaattacttgctgtaaagacattttcaatgcctgcaatgtctcctactatggagaaaggggggattgtgtcttggaaatataaagttggcgaaccattcagcgcgggcgatgtgatattagaagtggaaacagataaatctcaaattgatgtggaagcactggacgatggtaaactagctaagatcctgaaagatgaaggctctaaagatgttgatgttggtgaacctattgcttatattgctgatgttgatgatgatttagctactataaagttaccccaagaggccaacaccgcaaatgcgaaatctattgaaattaagaagccatccgcagatagtactgaagcaacacaacaacatttaaaaaaagccacagttacaccaataaaaaccgttgacggcagccaagccaatcttgaacagacgctattaccatccgtgtcattactactggctgagaacaatatatccaaacaaaaggctttgaaggaaattgcgccatctggttccaacggtagactattaaagggtgatgtgctagcatacctagggaaaataccacaagattcggttaacaaggtaacagaatttatcaagaagaacgaacgtctcgatttatcgaacattaaacctatacagctcaaaccaaaaatagccgagcaagctcaaacaaaagctgccgacaagccaaagattactcctgtagaatttgaagagcaattagtgttccatgctcccgcctctattccgtttgacaaactgagtgaatcattgaactctttcatgaaagaagcttaccagttctcacacggaacaccactaatggacacaaattcgaaatactttgaccctattttcgaggaccttgtcaccttgagcccaagagagccaagatttaaattttcctatgacttgatgcaaattcccaaagctaataacatgcaagacacgtacggtcaagaagacatatttgacctcttaacaggttcagacgcgactgcctcatcagtaagacccgttgaaaagaacttacctgaaaaaaacgaatatatactagcgttgaatgttagcgtcaacaacaagaagtttaatgacgcggaggccaaggcaaaaagattccttgattacgtaagggagttagaatcattttga

SEQ ID NO: 108488 - protein, 410 aa, Saccharomyces cerevisiae
MLSAISKVSTLKSCTRYLTKCNYHASAKLLAVKTFSMPAMSPTMEKGGIVSWKYKVGEPFSAGDVILEVETDKSQIDVEALDDGKLAKILKDEGSKDVDVGEPIAYIADVDDDLATIKLPQEANTANAKSIEIKKPSADSTEATQQHLKKATVTPIKTVDGSQANLEQTLLPSVSLLLAENNISKQKALKEIAPSGSNGRLLKGDVLAYLGKIPQDSVNKVTEFIKKNERLDLSNIKPIQLKPKIAEQAQTKAADKPKITPVEFEEQLVFHAPASIPFDKLSESLNSFMKEAYQFSHGTPLMDTNSKYFDPIFEDLVTLSPREPRFKFSYDLMQIPKANNMQDTYGQEDIFDLLTGSDATASSVRPVEKNLPEKNEYILALNVSVNNKKFNDAEAKAKRFLDYVRELESF

SEQ ID NO: 108489 - DNA, 1320 bp, Magnaporthe grisea 70-15
  CDS (1)..(1320)
atggcttcattagcttcactcggccgcctgtccggcagggcgggacaagtcggcggacggaggctcgcgcaatctacagtcgcgcgcagagctgccctggcagctcagaacttcaccatgccagccctttcgccgaccatgaccgagggaaacatcgcgacgtggcgtgtcaaggagggcgacaagttccaagccggtgatgttctgctcgagatcgagaccgacaaggccaccatggacgtcgaggcacaggaggagggcgtcgtcatgaagatcctgcagggtgacggtgcaaaggcagtcaaggtgggcgcccgcatcgcagtcctcgccgaggagggcgatgacgtctcgaccctcgagatccccgccgaggaccagactggtgccaaggacagcgcaaaggaacaattgtcccagggctcatcgacctacggcggcggctcggctcctccgcccaacgactcggtgccagaccagcctacccactcagcggccaaggcgaacggtggcggcaaggcacccaaacagacataccccctgctgccgtcagtcgctcacctcgtcaaggagaagggcttggacgaggcggccctggcggagatgacgccgacgggccccaacggccgcctgctcaagggtgacgtcctggcctaccttggcgccatcaaccagaagacgcccgtgtccatctccgagatgtttgagaggctttcacatctggacctcagcaatatcaagatagtaaaatcgaccccgccgcccgccaaggaggaaacgaaggccgccgccgccgccgagactcccgctcccagggtacagcaggtccaggtcagccttcctgtgtcactcgaggctgcgttccgcgctcaccgcaaggtctacaagaacctggccgtcaatctgcctctggccaccttcatcgagcgtgccgcagacattgccaacgaaggcctccccgcatcggcccgcaagccttcggccgacgacctcttcaacgaccttctcggtctccctcaggcggggcacagcgccactcgcggccgctacttccctatgatctcttcccctaccgctactgtcgcccagcccgccttctcgggcagccgccagcagaccgacatcatcgacatcctgtccggcacagccaccaaggccaggaagccggttgcccagcctgtggccgagttcgatgttaccgatgccgacgtgcccctgttcagcctcaacgtgccgaaaactgaggagaagcgcgccagggttttcctcgagagaatcaaggttgtgttggagaacgagccggcaaggctattgttgtaa

SEQ ID NO: 108490 - protein, 439 aa, Magnaporthe grisea 70-15
MASLASLGRLSGRAGQVGGRRLAQSTVARRAALAAQNFTMPALSPTMTEGNIATWRVKEGDKFQAGDVLLEIETDKATMDVEAQEEGVVMKILQGDGAKAVKVGARIAVLAEEGDDVSTLEIPAEDQTGAKDSAKEQLSQGSSTYGGGSAPPPNDSVPDQPTHSAAKANGGGKAPKQTYPLLPSVAHLVKEKGLDEAALAEMTPTGPNGRLLKGDVLAYLGAINQKTPVSISEMFERLSHLDLSNIKIVKSTPPPAKEETKAAAAAETPAPRVQQVQVSLPVSLEAAFRAHRKVYKNLAVNLPLATFIERAADIANEGLPASARKPSADDLFNDLLGLPQAGHSATRGRYFPMISSPTATVAQPAFSGSRQQTDIIDILSGTATKARKPVAQPVAEFDVTDADVPLFSLNVPKTEEKRARVFLERIKVVLENEPARLLL

SEQ ID NO: 108491 - DNA, 1290 bp, Candida glabrata CBS 138
  CDS (1)..(1290)
atgttgagtgcaagggttttattgaacaggtctcaattgctgtgtaagaggcaatgcctcactggcgttagtgttggtctttcgaggtgcttttctagtactaggatgtcgctcgatgtgtctccattcctgatgccagctatgtcgccaaccatggagaaaggtggtattgtctcgtggaagttcaaggagaatgacagtttcaatgcaggtgatgttctgctggaagttgagacggataaagcgcagatcgatgtcgaggcgcaagatgatggtaaattggcaaagatcattcgaggggacggcagcaaagatgtgcttgtgggcgatgtgatagcgttcaccgctgatccagaagacgacctctccactttaaagatacctgaggtcactgagtctatgaagcaggtgtcatctgggagcggcaaggaggaccagaagccagctaagtctgaggagccagctcctcttcagaggaaagagggcaaaaacgtaagtgagtcaaagacagccaagtcttctggtgacgtgctcacgacagccgatgcgtctcagactctgttaccctcggtagtaatggcactagctgacaatggtatcagcaaagaagatgcgttggcgaacatcaaagcatctggggccaacggtcgcatcttgaaaggtgatgtgctagcgtatgctggcaagattcagcaggactctgtggttaaagttgcggagtacgttaaccggaaccagaaactagacctgtctaacattgagcgtatagtgcttgaggtcaattcagaagagggaggcgatggacaagcacaagcacaagcacaagcacaagcacaaggtcaaggtcaagattcaggcaagactggcaagcttgccaagccagctcaagttgagcctattcggatacaggaggagatactgttggaagtgaggagaggtgttgacttcactaggtttgagagggctgtccgtgagtatatcgatgatatttaccagtacacgcacgagcaaccgttggagaacactatgtctgagcggtatgacagtctatttgaggatctcgttaccgttgaccccaggtctgcgcggtttgatgttgaatacagtcttttagagaccactgatggctcagaggatatctttgacttgttgggacccggtgaggttaaggagggcaagcaagtgtacagcttagaagtgagtgttacggtgaatgacaagtacgacgacgctgttgagaaggccgatcggttcatggagtgtctgagacagttacagtttgatgtatag

SEQ ID NO: 108492 - protein, 429 aa, Candida glabrata CBS 138
MLSARVLLNRSQLLCKRQCLTGVSVGLSRCFSSTRMSLDVSPFLMPAMSPTMEKGGIVSWKFKENDSFNAGDVLLEVETDKAQIDVEAQDDGKLAKIIRGDGSKDVLVGDVIAFTADPEDDLSTLKIPEVTESMKQVSSGSGKEDQKPAKSEEPAPLQRKEGKNVSESKTAKSSGDVLTTADASQTLLPSVVMALADNGISKEDALANIKASGANGRILKGDVLAYAGKIQQDSVVKVAEYVNRNQKLDLSNIERIVLEVNSEEGGDGQAQAQAQAQAQGQGQDSGKTGKLAKPAQVEPIRIQEEILLEVRRGVDFTRFERAVREYIDDIYQYTHEQPLENTMSERYDSLFEDLVTVDPRSARFDVEYSLLETTDGSEDIFDLLGPGEVKEGKQVYSLEVSVTVNDKYDDAVEKADRFMECLRQLQFDV

SEQ ID NO: 108493 - DNA, 1218 bp, Kluyveromyces lactis NRRL Y-1140
  CDS (1)..(1218)
atgttccgtttagcaattaaaaacagggcgtgtctccgtcaattacaccaatgtagaactatgttgaaggcccaagcctttgggatgcctgccatgtcaccaaccatggaaaggggcggtgtcgttgattggaagttcaaagctggtgatactttctctgccggtgatgtgctcttggaggttgaaaccgacaaggcaaccattgacgtggaggcacaagatgacggtaagcttgccaaaattttgaaggagaacggtgccaaggatattcctgtcggggaacccattgcatacatcgctgatgtggacgatgatttggccactttggagttcccaaagcccgttgaagccaagaaagaatcaaagccagttgaaactaaaaaggaggaggccaaaccagtggaaaaaactgacaagaagaagcaaaccagtgcttcaaaaacaccttctaagaacggcagtgttcaggctaatgcatctcaaacattattcccatctgtgctatcactactagaggaaaacaatatttcaactgcagatgcgttggacaaaatcaaggccactggtccaaacggtagaatcttaaaaggtgatgtgctagcctatttgggtaagatttcccaagattcgttgaacaaggtaaccgagtacatcaaatcccatgagaaattggatctaaccaacatcgaattaagacctgctagagaaactgcagcagcagcagcagcagcacaagctgctaaacccgctaaaccattacctctagtactaagcgaacagatcacactccatgtcccagaaaacgtcacttactcccaactatctgctgcgatagcatcgtacgtcaaggaatgttcattcttggcacacgacgaaccattgaccaatgacgcatccgaactatacgacccattattcgaagagttactagtacaagaaccaacaaaacctcgtttcaaggtcacttataacatagtagacttggaacctacaccaagacaccgtacctcttcaccacaaccagatatctttgatttattatctggtacaacaacgcaagaactacaacaagaggcatccgcagtatccaaacaacaacaaacacgtcacgaatacgcgttgaacgtttccgtcgccgttgacgaatcgttaacggatgccaagcaaagagcagaaaatttcgttgcccaactatctaacttggaattgttccaatga

SEQ ID NO: 108494 - protein, 405 aa, Kluyveromyces lactis NRRL Y-1140
MFRLAIKNRACLRQLHQCRTMLKAQAFGMPAMSPTMERGGVVDWKFKAGDTFSAGDVLLEVETDKATIDVEAQDDGKLAKILKENGAKDIPVGEPIAYIADVDDDLATLEFPKPVEAKKESKPVETKKEEAKPVEKTDKKKQTSASKTPSKNGSVQANASQTLFPSVLSLLEENNISTADALDKIKATGPNGRILKGDVLAYLGKISQDSLNKVTEYIKSHEKLDLTNIELRPARETAAAAAAAQAAKPAKPLPLVLSEQITLHVPENVTYSQLSAAIASYVKECSFLAHDEPLTNDASELYDPLFEELLVQEPTKPRFKVTYNIVDLEPTPRHRTSSPQPDIFDLLSGTTTQELQQEASAVSKQQQTRHEYALNVSVAVDESLTDAKQRAENFVAQLSNLELFQ

SEQ ID NO: 108495 - DNA, 1296 bp, Debaryomyces hansenii CBS767
  CDS (1)..(1296)
atgcttagaggtagtacattaagaccaattattcgtagcaatgtcaatagatacgtgaaatcggcatttcatagcagtgttaagttgaatgctgggtcagtatttaagatgcccgcaatgtcacctactatgacggaaggaggaattgtttcttggaaatttaaggcaggagacgaattttcagcaggagatgtgttgttagaggttgagactgacaaggccaccattgatgtcgaggcacaggatgacggtattatgtgggaggttttggaaaacgatggggccagtggagtggcagttggaaagccgattgctttgttggcggagccgggcgacgatttatcgagcttagagaagccatctttagagtcagaagcgccaaaagcagccagcgaggaagcacctaagaaagaggccaaggagcaaccaaaagaacaaccaaaagaacaatctaagacgcaaaaagcagagaagacccaaccaaagaagagtggatcagataccgattccggaagcgtatttttgagtgctaatcctagtcaaaaacttctgccttctgttgaattgttattgcaccagaataacatttcggcagatgatgccatttccaaaataccagcctcgggtcctaacggtagattattaaagggagatgtgttggcttacgtcggagacataaagaaggatgctgtggtcagtattgccaaatttatcaagtctagagaacgcttggacttatcgaacattaaattagcggaaccaaaaccaaaagatgccggtaaggcagaaaacatcgaaccagaaaaaccctccaatatcttaacggtcgaaatgacctcagaattcccagaagatatttctaaagacaaatttaaatacgcattcgaaaaatccatcaaatcagccataagaattacctacgcccacagattccccgaatactcatcctcgccttctgcctcctccttggtcgaatctgatttgtttgatgacttattggctccatccgtcaccaagaacagattcgaagtctacgatgtcaattacaatttctttggatcggtagcatccccaacgttatctgcggccattgccgatgagttcgatgagattttaggtttatccgcaccatctccttctgtatcctctatttcagatgaaggcatgcatagtgttaatgttgaattcaagattaaatttaatgaatccttaactgactcaaaagcatttgttgattactttgaaggctccttactttctcaaattcctagcagaaggcttaaaattacaaactaa

SEQ ID NO: 108496 - protein, 431 aa, Debaryomyces hansenii CBS767
MLRGSTLRPIIRSNVNRYVKSAFHSSVKLNAGSVFKMPAMSPTMTEGGIVSWKFKAGDEFSAGDVLLEVETDKATIDVEAQDDGIMWEVLENDGASGVAVGKPIALLAEPGDDLSSLEKPSLESEAPKAASEEAPKKEAKEQPKEQPKEQSKTQKAEKTQPKKSGSDTDSGSVFLSANPSQKLLPSVELLLHQNNISADDAISKIPASGPNGRLLKGDVLAYVGDIKKDAVVSIAKFIKSRERLDLSNIKLAEPKPKDAGKAENIEPEKPSNILTVEMTSEFPEDISKDKFKYAFEKSIKSAIRITYAHRFPEYSSSPSASSLVESDLFDDLLAPSVTKNRFEVYDVNYNFFGSVASPTLSAAIADEFDEILGLSAPSPSVSSISDEGMHSVNVEFKIKFNESLTDSKAFVDYFEGSLLSQIPSRRLKITN

SEQ ID NO: 108497 - DNA, 1233 bp, Yarrowia lipolytica CLIB122
  CDS (1)..(1233)
atgaaccgactgttgagagttattccccgggcccgactgctccacaccacccctcgcctctatcaggccagcaactttgccatgccagccatgagtcccaccatgaccgagggaggcattgtgtcgtggaaggtcaaggagggcgacgagttttcagctggtgatgtcatccttgagatcgaaaccgacaaggcccagatcgacgtcgaggctgctgacgatggagtcatggccaagatctacaagaaggacggtgacaaggacattcaggtcggagacaccattgctgtgattgctgagcccggagatgacatcaaaaccattgatattcctgctcctgtcgagtcggacggcaagcctgctcccaaggaggaggccaaggaggaggtcaaggaggcccctaaggaggaggctaaggcccctgcccctaaggctccttctacccccaaggaggctcccaagaccgaatcgtcttctgctccctcatcatccggctactctgcccccgctaaccccgcacagacccttctcccttcggtgtcctcgcttcttgtggccaatggcatctccaaggaggacgcctttgccaagatcaaggccaccggtccccacggccggcttctcaagggcgacattctcgcctacctcggaaaggtccctgagggctctcctggcgctgttgccgacgagattaacaagcgatcccatctcgacttgtccaacatcaagcccgccaagaagagcgatgctgctgctcccactggggctgccaaggctggagatgctgctgctcctgctaccaaggctgctcccgagcctgtcatcttcacctcgttcctcgatgtggcccactttgagcccgaggaccagctcgagctgcagcgaatcgtcaagcaggccatcaagctggccaaatacgacgccgtggagctcgcaaagccccgccgatccgccaacgtggaccccgactttgaggctatcatcggccccgccaagggcaccaagttctacgacgtgaacgtcatctaccccaagtccacaaagcgggctctctccaatggggccgacctgtatgacattctgtcggaccgaaagccccgaaaggctgctgtccaggtgccttccaacactgtgcaggtcgatgtaacagtcaacgacaaggtccccggtgccgagaagcgagccaagcttttcttgaacagactggagtatcatttgactgtggaggagtag

SEQ ID NO: 108498 - protein, 410 aa, Yarrowia lipolytica CLIB122
MNRLLRVIPRARLLHTTPRLYQASNFAMPAMSPTMTEGGIVSWKVKEGDEFSAGDVILEIETDKAQIDVEAADDGVMAKIYKKDGDKDIQVGDTIAVIAEPGDDIKTIDIPAPVESDGKPAPKEEAKEEVKEAPKEEAKAPAPKAPSTPKEAPKTESSSAPSSSGYSAPANPAQTLLPSVSSLLVANGISKEDAFAKIKATGPHGRLLKGDILAYLGKVPEGSPGAVADEINKRSHLDLSNIKPAKKSDAAAPTGAAKAGDAAAPATKAAPEPVIFTSFLDVAHFEPEDQLELQRIVKQAIKLAKYDAVELAKPRRSANVDPDFEAIIGPAKGTKFYDVNVIYPKSTKRALSNGADLYDILSDRKPRKAAVQVPSNTVQVDVTVNDKVPGAEKRAKLFLNRLEYHLTVEE

SEQ ID NO: 108499 - DNA, 1254 bp, Candida albicans SC5314
  CDS (1)..(1254): transl_table=12
atgcttagggcagctttcaccagaagaacagtaaaccaaatacgtgcatttcatggctcatcaatttattatgccgcatctgtgtttaaaatgccagcaatgtctcccaccatgagtgaaggtggtattgtttcttggaaagtgaaaccaggtgatactttcagtgcaggagatcctattttggaagtagaaactgataaggccaccattgatgtcgaagcagccgatgatggtaaattatgggagattttagtcaatgaagggacctccggagtaccagttggtaagccaattgcctttttagcagaacaagatgacgatttaagcactttggaaaaaccaagcatagaagatgtcaagcaagaaactcaagctcccgctccacaggagaagaaccccgaagaaaagactaccaaaaaagaagttaaacaatcagcaccacgtgaagtttctactggctcaagtgtgcttcaaaaagccaatccaaatcaaaaattgtctccagcagtagagttattgttacatgaaaataatatttccaacgaagatgccttcgcgaaaatccgagcttcaggaccaaaagggagaattttgaaaggtgacgtattagcctatctcggaaagattgatacaggtgtagttgttgagttaactgagtttttgaaatcaagagaacatttggacttgtctaaaataatgcttgcagaaccatcaaagacagaagaatcaactgaatccaaatctagcaaagaagaaaaggcaaaagttgaaaaaccaaaaccaaaaaatattctttcagttgaattaacttcaaacttgggtgaagatatttcgcaatctaaattcaaatttgcttttgaaaaatccatttctgcagctatcagacaaacatatgcttccaaattcccacaatttgctcaatcccctactgcatcctcaatttacgacaaatatgacgtgtttgatgaaatactttctgcaccagttacaaagaatagatttgaagtttttgatatcaagtacaagttttacggtgaagaatcttctaaaaacaaggtttcagcagatagttttgatgaacttttgggtttgctgactcctgtccagtatttggaaactgggtcttctaatgtcaatgttctgttcaaaatcaaatttgacgataaattgcaagattccaaattgttcgttgaaaattttgaaaactctttactttcacaaattccagccaacaagttaaagatcacaaactaa

SEQ ID NO: 108500 - protein, 417 aa, Candida albicans SC5314
MLRAAFTRRTVNQIRAFHGSSIYYAASVFKMPAMSPTMSEGGIVSWKVKPGDTFSAGDPILEVETDKATIDVEAADDGKLWEILVNEGTSGVPVGKPIAFLAEQDDDLSTLEKPSIEDVKQETQAPAPQEKNPEEKTTKKEVKQSAPREVSTGSSVLQKANPNQKLSPAVELLLHENNISNEDAFAKIRASGPKGRILKGDVLAYLGKIDTGVVVELTEFLKSREHLDLSKIMLAEPSKTEESTESKSSKEEKAKVEKPKPKNILSVELTSNLGEDISQSKFKFAFEKSISAAIRQTYASKFPQFAQSPTASSIYDKYDVFDEILSAPVTKNRFEVFDIKYKFYGEESSKNKVSADSFDELLGLSTPVQYLETGSSNVNVSFKIKFDDKLQDSKLFVENFENSLLSQIPANKLKITN

SEQ ID NO: 108501 - DNA, 1290 bp, Pichia guilliermondii
  CDS (1)..(1290)
atgtacaaagtagtcgccaatcccatacgcataggcgcttccctgtcgctcatgcgtggtgccactcgtcgattccgcatctcggcatgcttaaatgcggcgtctctgtttaagatgcctgcaatgtctccaactatgactgaaggaggaatcgtatcatggaaagtgaaagcaggcgacaaattttcagccggtgacgttttgctcgaagtcgagacagacaaggctactattgatgtggaggctctggacgatgggataatgtgggaggtgttagaacaagaaggtgcttcgggtatacctgttggtaagaccattgcctatttggctgagccaggagacgacctagctactttagagaagcccaaggaagagcaaagttcgaacaaggaacagaccaaagaagagaagtccgaaaagaaaagttccaccgctgcacaatcatctcaagcaaaggacactaaaactcagagtgagccttcatcctccaaatcagaaaagaacaagaattcaggtattttcaaaagcgctaacccccatcaaaagctctttccctcggtggaattacttctacatgaaaacgaaatttcagttgaagatgcattagagaagatccctgcttctggccccaagggcagattattgaaaggtgacgtattggcctatttaggtcgcatttcgagtgagtctgttgaaaatgttgctaaattcatctcgctgagagaacatttggacttgtcaaacattcaaatcgcacaacctgaagctccaaagcaagaaccaaagaaggaggaagttgcagatttgaaaccttcgaatgttgtgtcgttcaatgcagtatacgaattaaatgatgaacttacaacttcagacttcatgcttgatttcgagagagctcttcaagacgcaaagcagcttgcatatgctgagagattccccgaatttgcgaccactccttctccatcattgttggggccctcttctgacctttttgatgacatcgtttctccacctgtcacaagaccccgctttcaggtgcaaaatttgagtttcgacttcaagaaaacttcattatcaaacataactccttctggtgacctttttgatgaaattattggtactccctcgagcgtcatcaaagacgtgcctgaaggatcagagtcccgcaacgtcagcgtcaagtttgatgtaaagtttgatgagggacttgtagattcagccctttttgtgaacaactttgaggataacttactcacgattattccccccaaagagttagtagtggcataa

SEQ ID NO: 108502 - protein, 429 aa, Pichia guilliermondii
MYKVVANPIRIGASLSLMRGATRRFRISACLNAASLFKMPAMSPTMTEGGIVSWKVKAGDKFSAGDVLLEVETDKATIDVEALDDGIMWEVLEQEGASGIPVGKTIAYLAEPGDDLATLEKPKEEQSSNKEQTKEEKSEKKSSTAAQSSQAKDTKTQSEPSSSKSEKNKNSGIFKSANPHQKLFPSVELLLHENEISVEDALEKIPASGPKGRLLKGDVLAYLGRISSESVENVAKFISLREHLDLSNIQIAQPEAPKQEPKKEEVADLKPSNVVSFNAVYELNDELTTSDFMLDFERALQDAKQLAYAERFPEFATTPSPSLLGPSSDLFDDIVSPPVTRPRFQVQNLSFDFKKTSLSNITPSGDLFDEIIGTPSSVIKDVPEGSESRNVSVKFDVKFDEGLVDSALFVNNFEDNLLTIIPPKELVVA

SEQ ID NO: 108503 - DNA, 1293 bp, Phaeosphaeria nodorum
  CDS (1)..(1293)
atggcgcacgaagaggtgagtaacaaccagcgccggactcacaaaacgcctactaacagcgatatagcattccatcccgcgcgggcctcgctcgctgcagcaaacctgaatatgcccgcactatctccgacgatgaccgagggcaatatcgcgacctggaagatcaaggaaggcgactcattcgcagctggcgacgtgctcctcgaaatcgagacagacaaggcgcagatggatgtcgaggctcaagatgacggaattctggcaaagataatacaaggagatggatcgaaagcggtccaagtcggcagccggatagcggtcacggctgagcctggcgacgatgtgagcaccctagagctcccagctgaggacagctcagcgccgaagaaggccgaagctcctaaggaagaaccaaaggagtcgaaatcggtgcccaaggaagagcgaacttccaagccggcagcaacgtcggacacatccaagtccacctccagcggcaaagccaagaagcaaacgtacccactgtacccctcggtgcagcatcttttgaagatcaacggtctgccaaaggaggaggcagacaagattccagccacaggacccaacggcagattgctgaagggcgacgtactggcttatgttggccagatccagaactcatacccctcggaatcagctgagcgcttcaagacactgtctcaccttgacctctccaacatcaaggtgatgcaaaagaaggaagctcctgccaagaagcctgtagctgacgatgctctccctgtcgaagagcccgatgttgaggtagccctaccaatctctttcaaggccgtgatggactgccagaagcgtgtgaaagactcgattggcgttttcttaccgctctcgaccttcatcgctcgcgctacagagcttgcgaacgaggagctgccaaagtcaaagaccgcaaagccctcagctgatgagctgtttaacgccgtactcggtctcgacaaggttggaaagcagtattcgcgcggccacttcgttcctcaggtcactgcccttccacctacaaccatttcaacaacacgtgcaccgggcttgagaaagccagatgtattcgatgttctcactgcaaagaagtcctccacacgcgctaccaaagcacgtgcagtcggcggagcggagggcgttgttggacccctgaatgtgtttagcatcagcgtacccaaaggtgacgagaagagaggacgcatcttcttggagcgcgtcaagagcgtcttggaaattgagcctggaaggctcgttgtttga

SEQ ID NO: 108504 - protein, 430 aa, Phaeosphaeria nodorum
MAHEEVSNNQRRTHKTPTNSDIAFHPARASLAAANLNMPALSPTMTEGNIATWKIKEGDSFAAGDVLLEIETDKAQMDVEAQDDGILAKIIQGDGSKAVQVGSRIAVTAEPGDDVSTLELPAEDSSAPKKAEAPKEEPKESKSVPKEERTSKPAATSDTSKSTSSGKAKKQTYPLYPSVQHLLKINGLPKEEADKIPATGPNGRLLKGDVLAYVGQIQNSYPSESAERFKTLSHLDLSNIKVMQKKEAPAKKPVADDALPVEEPDVEVALPISFKAVMDCQKRVKDSIGVFLPLSTFIARATELANEELPKSKTAKPSADELFNAVLGLDKVGKQYSRGHFVPQVTALPPTTISTTRAPGLRKPDVFDVLTAKKSSTRATKARAVGGAEGVVGPLNVFSISVPKGDEKRGRIFLERVKSVLEIEPGRLVV

SEQ ID NO: 108505 - DNA, 1371 bp, Schizosaccharomyces pombe
  CDS (1)..(1371)
atgttgaagcattacattcaccaatgtgtgaaagcgagttcatgcaaacattcgctttccgttaaacaaagatatttccattgttctgctcttaatggagttgcaagcatgtttcgtatgcctgcactttctcctactatggaggaaggaaacattactaaatggcattttaaagaaggtgattcgtttaaaagtggtgatatacttttggaagttgagactgataaagcgacaatggatgttgaagtgcaagataatggaatacttgctaaagtcttaatcgaaaaaggatcgaatatccctgttggtaaaaatattgccatcgttgctgatgcagaagataatttgaaagacttggaattacctaaggatgaagcgtcctcagaagagcaatctttctcctcttctaaggaagaggtaaagcctattgttcaagatcgcgaaacaaaaagtaatgtggaacacaaatcgacttctcaagcgaacgatgctgttaacaaatcgtttcttccttccgttagctatttgattcatcaatataaaatcgaaaacccgtggtctattcctgctacaggccctcatggtcgccttctcaaaggagatgtattagcacacgtcggaaaaattgataaaggggttccttcatctcttcaaaaatttgttcgtaatctcgaggttttggatttttctggcgttgagcctaaaaaaccatcgtacactgaagacagcgttcccgttaggaaatcaacgatgatagaaactttaaaaactgttccgatgaaagatgaatatatcacttttgagagatctatttcactagaaaagttaaaatctttgctagctaaaagaaaagaaaaagatgcatttggtattgatgaagtcgtctcagcaatgattggtgatgctctttctatatctgaattgtcgaaagttgaacctaactcaattgaatctgcttacgatttacttctaggcgctccaatcgtaaaattaaagtcttcggtttcaaattttcaacctaagctattcccaaaaaacaataacactaaagatttacacaaatacattcgtgattctatgataggtttacctagcaatttaagcgactatgtaaagctgaacttcagttctgtgacaaaaagctcttctaataacgttgaatttttggatgatgtttatgatatgctgctgggtagcaacagcgatagtatcgattccagaataaatcgtcacgaggagccatctactactgaggatttgaccctgacattgtccatcaaggacaacatcagcaaaagccgtgcaattaagtttgtagattgccttaagagcaattttgagaatccagaatttgtcttatcgcgctggtga

SEQ ID NO: 108506 - protein, 456 aa, Schizosaccharomyces pombe
MLKHYIHQCVKASSCKHSLSVKQRYFHCSALNGVASMFRMPALSPTMEEGNITKWHFKEGDSFKSGDILLEVETDKATMDVEVQDNGILAKVLIEKGSNIPVGKNIAIVADAEDNLKDLELPKDEASSEEQSFSSSKEEVKPIVQDRETKSNVEHKSTSQANDAVNKSFLPSVSYLIHQYKIENPWSIPATGPHGRLLKGDVLAHVGKIDKGVPSSLQKFVRNLEVLDFSGVEPKKPSYTEDSVPVRKSTMIETLKTVPMKDEYITFERSISLEKLKSLLAKRKEKDAFGIDEVVSAMIGDALSISELSKVEPNSIESAYDLLLGAPIVKLKSSVSNFQPKLFPKNNNTKDLHKYIRDSMIGLPSNLSDYVKLNFSSVTKSSSNNVEFLDDVYDMLLGSNSDSIDSRINRHEEPSTTEDLTLTLSIKDNISKSRAIKFVDCLKSNFENPEFVLSRW

SEQ ID NO: 108507 - DNA, 25 bp, Artificial sequence
  primer
atgctaagtgcaatttccaaagtct

SEQ ID NO: 108508 - DNA, 25 bp, Artificial sequence
  primer
tcaaaatgattctaactcccttacg

SEQ ID NO: 108509 - protein, 434 aa, Artificial sequence
  consensus sequence
  Variant (2)..(2): Xaa in position 2 is any amino acid
  Variant (6)..(6): Xaa in position 6 is any amino acid
  Variant (11)..(12): Xaa in position 11 to 12 is any amino acid
  Variant (14)..(14): Xaa in position 14 is any amino acid
  Variant (16)..(17): Xaa in position 16 to 17 is any amino acid
  Variant (20)..(20): Xaa in position 20 is any amino acid
  Variant (22)..(22): Xaa in position 22 is any amino acid
  Variant (25)..(25): Xaa in position 25 is any amino acid
  Variant (27)..(27): Xaa in position 27 is any amino acid
  Variant (32)..(32): Xaa in position 32 is any amino acid
  Variant (35)..(35): Xaa in position 35 is any amino acid
  Variant (41)..(42): Xaa in position 41 to 42 is any amino acid
  Variant (47)..(47): Xaa in position 47 is any amino acid
  Variant (51)..(59): Xaa in position 51 to 59 is any amino acid
  Variant (61)..(64): Xaa in position 61 to 64 is any amino acid
  Variant (65)..(65): Xaa in position 65 is any or no amino acid
  Variant (68)..(69): Xaa in position 68 to 69 is any amino acid
  Variant (72)..(73): Xaa in position 72 to 73 is any amino acid
  Variant (75)..(77): Xaa in position 75 to 77 is any amino acid
  Variant (80)..(81): Xaa in position 80 to 81 is any amino acid
  Variant (84)..(85): Xaa in position 84 to 85 is any amino acid
  Variant (87)..(132): Xaa in position 87 to 132 is any amino acid
  Variant (133)..(150): Xaa in position 133 to 150 is any or no amino acid
  Variant (152)..(152): Xaa in position 152 is any amino acid
  Variant (156)..(157): Xaa in position 156 to 157 is any amino acid
  Variant (160)..(161): Xaa in position 160 to 161 is any amino acid
  Variant (163)..(163): Xaa in position 163 is any amino acid
  Variant (165)..(167): Xaa in position 165 to 167 is any amino acid
  Variant (168)..(168): Xaa in position 168 is any or no amino acid
  Variant (170)..(171): Xaa in position 170 to 171 is any amino acid
  Variant (172)..(172): Xaa in position 172 is any or no amino acid
  Variant (174)..(174): Xaa in position 174 is any amino acid
  Variant (176)..(176): Xaa in position 176 is any amino acid
  Variant (179)..(179): Xaa in position 179 is any amino acid
  Variant (182)..(182): Xaa in position 182 is any amino acid
  Variant (191)..(191): Xaa in position 191 is any amino acid
  Variant (193)..(193): Xaa in position 193 is any amino acid
  Variant (195)..(211): Xaa in position 195 to 211 is any amino acid
  Variant (218)..(293): Xaa in position 218 to 293 is any amino acid
  Variant (294)..(314): Xaa in position 294 to 314 is any or no amino acid
  Variant (316)..(342): Xaa in position 316 to 342 is any amino acid
  Variant (343)..(381): Xaa in position 343 to 381 is any or no amino acid
  Variant (383)..(384): Xaa in position 383 to 384 is any amino acid
  Variant (386)..(386): Xaa in position 386 is any amino acid
  Variant (388)..(420): Xaa in position 388 to 420 is any amino acid
  Variant (421)..(433): Xaa in position 421 to 433 is any or no amino acid
FXMPAXSPTMXXGXIXXWKXKXGDXFXAGDVXLEXETDKAXXDVEAXDDGXXXXXXXXXGXXXXXVGXXIAXXAXXXDDXXTLXXPXXXXXXXXXXXXXXXXXXXXXXXXXXXXXXXXXXXXXXXXXXXXXXXXXXXXXXXXXXXXXXXXLXPSVXXLLXXNXIXXXXAXXXIXAXGPXGRXLKGDVLAYXGXIXXXXXXXXXXXXXXXXXLDLSNIXXXXXXXXXXXXXXXXXXXXXXXXXXXXXXXXXXXXXXXXXXXXXXXXXXXXXXXXXXXXXXXXXXXXXXXXXXXXXXXXXXXXXXXXXXXXXXXXXFXXXXXXXXXXXXXXXXXXXXXXXXXXXXXXXXXXXXXXXXXXXXXXXXXXXXXXXXXXXXXXXXXXDXXDXLXXXXXXXXXXXXXXXXXXXXXXXXXXXXXXXXXXXXXXXXXXXXXXF

SEQ ID NO: 108510 - protein, 61 aa, Artificial sequence
  protein pattern
  Variant (2)..(2): Xaa in position 2 is any amino acid
  Variant (6)..(6): Xaa in position 6 is Leu or Met
  Variant (11)..(11): Xaa in position 11 is any or no amino acid
  Variant (13)..(13): Xaa in position 13 is any or no amino acid
  Variant (15)..(15): Xaa in position 15 is Gly or Asn
  Variant (17)..(17): Xaa in position 17 is Ala, Thr or Val
  Variant (18)..(18): Xaa in position 18 is any amino acid
  Variant (20)..(20): Xaa in position 20 is His, Lys or Arg
  Variant (21)..(21): Xaa in position 21 is any amino acid
  Variant (23)..(23): Xaa in position 23 is any amino acid
  Variant (24)..(24): Xaa in position 24 is Gly or Asn
  Variant (25)..(25): Xaa in position 25 is Asp or Glu
  Variant (26)..(26): Xaa in position 26 is any amino acid
  Variant (28)..(28): Xaa in position 28 is any amino acid
  Variant (29)..(29): Xaa in position 29 is Ala or Ser
  Variant (32)..(32): Xaa in position 32 is Ile, Pro or Val
  Variant (33)..(33): Xaa in position 33 is Ile or Leu
  Variant (36)..(36): Xaa in position 36 is Ile or Val
  Variant (41)..(41): Xaa in position 41 is Ala or Ser
  Variant (42)..(42): Xaa in position 42 is Gln or Thr
  Variant (43)..(43): Xaa in position 43 is Ile or Met
  Variant (47)..(47): Xaa in position 47 is Ala or Val
  Variant (48)..(48): Xaa in position 48 is any amino acid
  Variant (49)..(49): Xaa in position 49 is Asp or Glu
  Variant (50)..(50): Xaa in position 50 is Asp, Glu or Asn
  Variant (52)..(52): Xaa in position 52 is any amino acid
  Variant (53)..(53): Xaa in position 53 is Leu, Met or Val
  Variant (54)..(54): Xaa in position 54 is any amino acid
  Variant (55)..(55): Xaa in position 55 is Glu or Lys
  Variant (56)..(56): Xaa in position 56 is Ile or Val
  Variant (57)..(59): Xaa in position 57 to 59 is any amino acid
  Variant (60)..(60): Xaa in position 60 is Asp, Glu or Lys
FXMPAXSPTMXEXGXIXXWXXKXXXXFXXGDXXLEXETDKXXXDVEXXXXGXXXXXXXXXG

SEQ ID NO: 108511 - protein, 22 aa, Artificial sequence
  protein pattern
  Variant (2)..(2): Xaa in position 2 is any amino acid
  Variant (3)..(3): Xaa in position 3 is Ala or Pro
  Variant (4)..(4): Xaa in position 4 is Ser or Thr
  Variant (6)..(6): Xaa in position 6 is Ala, Pro or Ser
  Variant (7)..(7): Xaa in position 7 is any amino acid
  Variant (10)..(10): Xaa in position 10 is Ile or Leu
  Variant (18)..(18): Xaa in position 18 is His or Tyr
  Variant (19)..(19): Xaa in position 19 is Ala, Leu or Val
  Variant (21)..(21): Xaa in position 21 is any amino acid
IXXXGXXGRXLKGDVLAXXGXI

SEQ ID NO: 108512 - protein, 22 aa, Artificial sequence
  protein pattern
  Variant (3)..(4): Xaa in position 3 to 4 is any amino acid
  Variant (7)..(8): Xaa in position 7 to 8 is any amino acid
  Variant (10)..(12): Xaa in position 10 to 12 is any or no amino acid
  Variant (14)..(14): Xaa in position 14 is any or no amino acid
  Variant (16)..(16): Xaa in position 16 is Leu or Val
  Variant (17)..(17): Xaa in position 17 is Ala or Ser
  Variant (18)..(18): Xaa in position 18 is Ser or Thr
  Variant (19)..(19): Xaa in position 19 is Ile or Leu
  Variant (20)..(20): Xaa in position 20 is Glu or Lys
  Variant (21)..(21): Xaa in position 21 is any amino acid
VGXXIAXXAXXXDXDXXXXXXP

SEQ ID NO: 108513 - protein, 16 aa, Artificial sequence
  protein pattern
  Variant (2)..(2): Xaa in position 2 is Asp, Asn or Val
  Variant (3)..(4): Xaa in position 3 to 4 is any amino acid
  Variant (5)..(5): Xaa in position 5 is Gln or Ser
  Variant (6)..(6): Xaa in position 6 is any amino acid
  Variant (8)..(8): Xaa in position 8 is any or no amino acid
  Variant (10)..(10): Xaa in position 10 is Ala or Ser
  Variant (12)..(12): Xaa in position 12 is any amino acid
  Variant (13)..(14): Xaa in position 13 to 14 is any or no amino acid
  Variant (16)..(16): Xaa in position 16 is Ala, Ile or Leu
AXXXXXLXPXVXXXLX

SEQ ID NO: 108514 - DNA, 1950 bp, Saccharomyces cerevisiae
  CDS (1)..(1950)
atgttttcggtaacgagaagaagagctgccggtgcagctgctgccatggccacagccacggggacgctgtactggatgactagccaaggtgataggccgttagtgcacaatgacccgagctacatggtgcaattccccaccgccgctccaccgcaggtctctagacgagacctgctggaccgtctggccaagacgcatcaattcgacgtgttgatcatcggtggcggggccacggggacaggatgtgccctagatgctgcgaccaggggactcaatgtggcccttgttgaaaagggggattttgcctcgggaacgtcgtccaaatctaccaagatgattcacggtggggtgcggtacttagagaaggccttctgggagttctccaaggcacaactggatctggtcatcgaggcactcaacgagcgtaaacatcttatcaacactgcccctcacctgtgcacggtgctaccaattctgatccccatctacagcacctggcaggtcccgtacatctatatgggctgtaaattctacgatttctttgccggttcccaaaacttgaaaaaatcatacctactgtccaaatccgccaccgtggagaaggctcccatgcttaccacagacaatttaaaggcctcgcttgtgtaccatgatgggtcctttaacgactcgcgtttgaacgccactttagccatcacggctgtggagaacggcgctaccgtcttgaactatgtcgaggtacaaaaattgatcaaagacccaacttctggtaaggttatcggtgccgaggcccgggacgttgagactaatgagcttgtcagaatcaacgctaaatgtgtggtcaatgccacgggcccatacagtgacgccattttgcaaatggaccgcaacccatccggtctgccggactccccgctaaacgacaactccaagatcaagtcgactttcaatcaaatcgccgtcatggacccgaaaatggtcatcccatctattggcgttcacatcgtattgccctctttttactgcccgaaggatatgggtttgttggacgtcagaacctctgatggcagagtgatgttctttttaccttggcagggcaaagtccttgccggcaccacagacatcccactaaagcaagtcccagaaaaccctatgcctacagaggctgatattcaagatatcttgaaagaactacagcactatatcgaattccccgtgaaaagagaagacgtgctaagtgcatgggctggtgtcagacctttggtcagagatccacgtacaatccccgcagacgggaagaagggctctgccactcagggcgtggtaagatcccacttcttgttcacttcggataatggcctaattactattgcaggtggtaaatggactacttacagacaaatggctgaggaaacagtcgacaaagttgtcgaagttggcggattccacaacctgaaaccttgtcacacaagagatattaagcttgctggtgcagaagaatggacgcaaaactatgtggctttattggctcaaaactaccatttatcatcaaaaatgtccaactacttggttcaaaactacggaacccgttcctctatcatttgcgaatttttcaaagaatccatggaaaataaactgcctttgtccttagccgacaaggaaaataacgtaatctactctagcgaggagaacaacttggtcaattttgatactttcagatatccattcacaatcggtgagttaaagtattccatgcagtacgaatattgtagaactcccttggacttccttttaagaagaacaagattcgccttcttggacgccaaggaagctttgaatgccgtgcatgccaccgtcaaagttatgggtgatgagttcaattggtcggagaaaaagaggcagtgggaacttgaaaaaactgtgaacttcatcaagacgtttggtgtctaa

SEQ ID NO: 108515 - protein, 649 aa, Saccharomyces cerevisiae
MFSVTRRRAAGAAAAMATATGTLYWMTSQGDRPLVHNDPSYMVQFPTAAPPQVSRRDLLDRLAKTHQFDVLIIGGGATGTGCALDAATRGLNVALVEKGDFASGTSSKSTKMIHGGVRYLEKAFWEFSKAQLDLVIEALNERKHLINTAPHLCTVLPILIPIYSTWQVPYIYMGCKFYDFFAGSQNLKKSYLLSKSATVEKAPMLTTDNLKASLVYHDGSFNDSRLNATLAITAVENGATVLNYVEVQKLIKDPTSGKVIGAEARDVETNELVRINAKCVVNATGPYSDAILQMDRNPSGLPDSPLNDNSKIKSTFNQIAVMDPKMVIPSIGVHIVLPSFYCPKDMGLLDVRTSDGRVMFFLPWQGKVLAGTTDIPLKQVPENPMPTEADIQDILKELQHYIEFPVKREDVLSAWAGVRPLVRDPRTIPADGKKGSATQGVVRSHFLFTSDNGLITIAGGKWTTYRQMAEETVDKVVEVGGFHNLKPCHTRDIKLAGAEEWTQNYVALLAQNYHLSSKMSNYLVQNYGTRSSIICEFFKESMENKLPLSLADKENNVIYSSEENNLVNFDTFRYPFTIGELKYSMQYEYCRTPLDFLLRRTRFAFLDAKEALNAVHATVKVMGDEFNWSEKKRQWELEKTVNFIKTFGV

SEQ ID NO: 108516 - DNA, 2225 bp, Zea mays subsp. mays
  CDS (105)..(1994)
aaacacacgattcgcctcccaacgctactacccctttccttccaacttccgcccgccggcgccagccgcaaccgaacaatccaagcaacgcgtcaggcgccgtcatggccacgtggcgcctccgccgcgccggtgccgccctagctgcctcctccaccctcgccgctgtcctcgccgcctcatcggcttccgccaccgacccgtccgccgccgccctagaagcggcaaggcagcgtgttgcgcggtcgggggccacgccgcccctgcgagacgcgcagcgtgcggcgctggcagggtccacccctgctgagcccctagacgtgctcgtcgttggcggcggcgccaccggatgcggcgtcgcgctcgatgccgccacccgcgggctccgtgtaggccttgtggagcgcgaggatttctcttctggaacctcctcccgatccaccaaactcatccatggcggtgtccgctacttggagaaggcagtgttcaatcttgattacgggcagctgaaacttgtttttcatgcacttaaggaacgcaaacaagtcatcgagaatgctccccatttgtgccatgctttgccatgcatgactccttgctttaactggtttgaggttgtatactactggtttggtttgaagctttatgatcttgttgctggaagaaggctactacatttgtcccgatattattctgtggatgaatcagttgagcttttcccaacccttgcaaaaaacggacataattgtagcctaaaaggaacagttgtgtactatgatggtcaaatgaatgactcacggctgaatgtggggttggcatgcactgctgcagttgttggtgcagctgttctcaattatgctgaagtggtctctctcattaaggatgaatcgggggagagaatcattggtgcacgcgtccgtgacacactatcaggtaaggagtttgaaaccttcgcaaaggtggttgttaatgcagcaggaccattctgtgactctgtgaggaagatggctgacagtaccgtagcacctatgatctgtcctagtagtggtgtgcacattgtacttcctgattactactcccctgaagggatggggctaattgttccaaaaaccaaggatggcagagttgtatttatgttgccatggttaggaaggaccgttgcgggaacaactgattcgaacacagcaataacaatgcttcctgaaccacacgaggatgaaatacagttcatattggatgcaatctctgactatcttaatgttcaggtaaggcgttcagatgttctttctgcctggagtggtatacgtcctttggcgatggatccatcagcaaagaatactgagagtatttctcgagatcatgttgtatttgaagactaccccgggttaataacaattaccggtggaaaatggacaacctataggagtatggctgaagatgctgtaaatgcagcagtcatgtctgggaatttgaaaccagccaatggttgtttgactgataatttgcatattgttggtggatatggatgggaccctgcttcttttacggttcttgctcagaattataagcgaatgaagaagacatatggtggcaaggttattccaggtgcaatggacagtgctgtatcgaaacatttatcgcatgcatatggatctttggctgaacaagtggctactattgcccagaacgaaggcttgggaaagcgccttgctcatggatacccatttttggaagctgaagtagcatactgtgctcgttatgagtactgtgaatctgccgtggattttgttgcaaggagatgccggcttgctttccttgacacagatgctgctggtagagcattgccccgaatcattgaaattttagcttcagagcacaagtgggacaaggcaaggaagaaggcggagctgcagaagggtagagagttcttggaaacattcaagtcatctaagaacgcccaattccatgatgggaagcataatggacgttcatgaccgaatatgcagttttctgaataagtgttgattttatacatgaacaagcaggctccgatacaagagtgagcctgcgaatgcagaaaggtttcgtttccacatttctacgcatggctgtgaaaatcggcgtgctggtttccagcagaataagatgtggtcacggcactatgtaattgtaaataccacatcatattagtcgattttgaaataaactggaaccaagaatttgtg

SEQ ID NO: 108517 - protein, 629 aa, Zea mays subsp. mays
MATWRLRRAGAALAASSTLAAVLAASSASATDPSAAALEAARQRVARSGATPPLRDAQRAALAGSTPAEPLDVLVVGGGATGCGVALDAATRGLRVGLVEREDFSSGTSSRSTKLIHGGVRYLEKAVFNLDYGQLKLVFHALKERKQVIENAPHLCHALPCMTPCFNWFEVVYYWFGLKLYDLVAGRRLLHLSRYYSVDESVELFPTLAKNGHNCSLKGTVVYYDGQMNDSRLNVGLACTAAVVGAAVLNYAEVVSLIKDESGERIIGARVRDTLSGKEFETFAKVVVNAAGPFCDSVRKMADSTVAPMICPSSGVHIVLPDYYSPEGMGLIVPKTKDGRVVFMLPWLGRTVAGTTDSNTAITMLPEPHEDEIQFILDAISDYLNVQVRRSDVLSAWSGIRPLAMDPSAKNTESISRDHVVFEDYPGLITITGGKWTTYRSMAEDAVNAAVMSGNLKPANGCLTDNLHIVGGYGWDPASFTVLAQNYKRMKKTYGGKVIPGAMDSAVSKHLSHAYGSLAEQVATIAQNEGLGKRLAHGYPFLEAEVAYCARYEYCESAVDFVARRCRLAFLDTDAAGRALPRIIEILASEHKWDKARKKAELQKGREFLETFKSSKNAQFHDGKHNGRS

SEQ ID NO: 108518 - DNA, 3178 bp, Klebsiella pneumoniae
  CDS (468)..(2312): transl_table=11
ctgcagaacttcgtctgctctgtgcccatcctcgcggttagaaagaagctgaattgtttcatgcgcaagggcatcagcgagtgaccaataatcactgcactaattcctttttagcaacacatacttatatacagcaccagaccttatgtcttttctctgctccgatacgttatcccacccaacttttatttcagttttggcaggggaaatttcacaaccccgcacgctaaaaatcgtatttaaacttaaaagagaacagccacaaatagggaactttggtctaaacgaaggactctccctcccttatcttgaccgtgctattgccatcactgctacaagactaaatacgtactaatatatgttttcggtaacgagaagaagagctgccggtgcagctgctgccatggccacagccacggggacgctgtactggatgactagccaaggtgataggccgttagtgcacaatgacccgagctacatggtgcaattccccaccgccgctccaccggcaggtctctagacgagacctgctggaccgtctggacaagacgcatcaattcgacgtgttgatcatcggtggcggggccacggggacaggatgtgccctagatgctgcgaccaggggactcaatgtggcccttgttgaaaagggggattttgcctcgggaacgtcgtccaaatctaccaagatgattcacggtggggtgcggtacttagagaaggccttctgggagttctccaaggcacaactggatctggtcatcgaggcactcaacgagcgtaaacatcttatcaacactgcccctcacctgtgcacggtgctaccaattctgatccccatctacagcacctggcaggtcccgtacatctatatgggctgtaaattctacgatttctttggcggttcccaaaacttgaaaaaatcatacctactgtccaaatccgccaccgtggagaaggctcccatgcttaccacagacaatttaaaggcctcgcttgtgtaccatgatgggtcctttaacgactcgcgtttgaacgccactttagccatcacgggtgtggagaacggcgctaccgtcttgatctatgtcgaggtacaaaaattgatcaaagacccaacttctggtaaggttatcggtgccgaggcccgggacgttgagactaatgagcttgtcagaatcaacgctaaatgtgtggtcaatgccacgggcccatacagtgacgccattttgcaaatggaccgcaacccatccggtctgccggactccccgctaaacgacaactccaagatcaagtcgactttcaatcaaatctccgtcatggacccgaaaatggtcatcccatctattggcgttcacatcgtattgccctctttttactccccgaaggatatgggtttgttggacgtcagaacctctgatggcagagtgatgttctttttaccttggcagggcaaagtccttgccggcaccacagacatcccactaaagcaagtcccagaaaaccctatgcctacagaggctgatattcaagatatcttgaaagaactacagcactatatcgaattccccgtgaaaagagaagacgtgctaagtgcatgggctggtgtcagacctttggtcagagatccacgtacaatccccgcagacgggaagaagggctctgccactcagggcgtggtaagatcccacttcttgttcacttcggataatggcctaattactattgcaggtggtaaatggactacttacagacaaatggctgaggaaacagtcgacaaagttgtcgaagttggcggattccacaacctgaaaccttgtcacacaagagatattaagcttgctggtgcagaagaatggacgcaaaactatgtggctttattggctcaaaactaccatttatcatcaaaaatgtccaactacttggttcaaaactacggaacccgttcctctatcatttgcgaatttttcaaagaatccatggaaaataaactgcctttgtccttagccgacaaggaaaataacgtaatctactctagcgaggagaacaacttggtcaattttgatactttcagatatccattcacaatcggtgagttaaagtattccatgcagtacgaatattgtagaactcccttggacttccttttaagaagaacaagattcgccttcttggacgccaaggaagctttgaatgccgtgcatgccaccgtcaaagttatgggtgatgagttcaattggtcggagaaaaagaggcagtgggaacttgaaaaaactgtgaacttcatccaaggacgtttcggtgtctaaatcgatcatgatagttaagggtgacaaagataacattcacaagagtaataataatggtaatgatgataataataataatgatagtaataacaataataataatggtggtaatggcaatgaaatcgctattattacctattttccttaatggaagagttaaagtaaactaaaaaaactacaaaaatatatgaagaaaaaaaaaaaaagaggtaatagactctactactacaattgatcttcaaattatgaccttcctagtgtttatattctatttccaatacataatataatctatataatcattgctggtagacttccgttttaatatcgttttaattatcccctttatctctagtctagttttatcataaaatatagaaacactaaataatattcttcaaacggtcctggtgcatacgcaatacatatttatggtgcaaaaaaaaaaatggaaaattttgctagtcataaaccctttcataaaacaatacgtagacatcgctacttgaaattttcaagtttttatcagatccatgtttcctatctgccttgacaacctcatcgtcgaaatagtaccatttagaacgcccaatattcacattgtgttcaaggtctttattcaccagtgacgtgtaatggccatgattaatgtgcctgtatggttaaccactccaaatagcttatatttcatagtgtcattgtttttcaatataatgtttagtatcaatggatatgttacgacggtgttatttttcttggtcaaatcgtaataaaatctcgataaatggatgactaagatttttggtaaagttacaaaatttatcgttttcactgttgtcaattttttgttcttgtaatcactcgag

SEQ ID NO: 108519 - protein, 614 aa, Klebsiella pneumoniae
MTRATWCNSPPPLHRQVSRRDLLDRLDKTHQFDVLIIGGGATGTGCALDAATRGLNVALVEKGDFASGTSSKSTKMIHGGVRYLEKAFWEFSKAQLDLVIEALNERKHLINTAPHLCTVLPILIPIYSTWQVPYIYMGCKFYDFFGGSQNLKKSYLLSKSATVEKAPMLTTDNLKASLVYHDGSFNDSRLNATLAITGVENGATVLIYVEVQKLIKDPTSGKVIGAEARDVETNELVRINAKCVVNATGPYSDAILQMDRNPSGLPDSPLNDNSKIKSTFNQISVMDPKMVIPSIGVHIVLPSFYSPKDMGLLDVRTSDGRVMFFLPWQGKVLAGTTDIPLKQVPENPMPTEADIQDILKELQHYIEFPVKREDVLSAWAGVRPLVRDPRTIPADGKKGSATQGVVRSHFLFTSDNGLITIAGGKWTTYRQMAEETVDKVVEVGGFHNLKPCHTRDIKLAGAEEWTQNYVALLAQNYHLSSKMSNYLVQNYGTRSSIICEFFKESMENKLPLSLADKENNVIYSSEENNLVNFDTFRYPFTIGELKYSMQYEYCRTPLDFLLRRTRFAFLDAKEALNAVHATVKVMGDEFNWSEKKRQWELEKTVNFIQGRFGV

SEQ ID NO: 108520 - DNA, 1890 bp, Arabidopsis thaliana
  CDS (1)..(1890)
atgtctctcgcttccattcgccgtttagctgccggagctgccgtaattgccgctgcatccggtggcgctgtctacctgtctccgtcggttgcctccagcgacaaaggaggtggtccgattctagattcgttgaggcgtaggcttggtgatcccaccgcttctgtaccgtctcgatctgctcaagagtctgctctgattgcagccaccgcttctgatccgctcgatgttctcgtcattggcggtggagccaccggttctggagttgctcttgacgctgttacacgtggcctccgtgttggtttggtggagcgcgaggatttctcctctgggacttcttcgcgatctacaaagctgattcatggaggggttcgttacttggagaaagctgttttcaatcttgattatggacagctgaagcttgtatttcacgctcttgaggagcgtaaacagctcattgagaatgcgccacatctctgtcatgctctgccctgtatgacaccttgttttgattggttcgaagttatctacttctggatggggttgaagatgtatgacttggttgctggaccacggttattgcatctgtccagatattactctgcaaaagagtctattgagctcttccccactcttgcaaggaaagggaaagacaagaatttgaggggtactgttgtgtattatgacgggcaaatgaacgattcacgtctgaatgtgggtttggcatgtactgccgcgttagctggtgcggcagttctcaaccatgccgaggttgtctcgcttattactgatgatgctactaagagaataattggtgcccgaattcgtaacaatctcacaggccaagaatttaacagctatgcaaaagtagttgttaatgcggcaggaccgttctgtgattccattaggaaaatgattgatgaagatacaaaaccaatgatttgtccaagcagcggtgtacacatcgtgctgcctgattactattctcctgaaggcatggggttgatagtccctaaaactaaggatggccgcgttgtgtttatgttaccgtggttgggaagaacagtagcaggcactacagactctaatacttcaatcacttcacttccagaacctcatgaagatgagattcaatttatactggacgcaatcagcgactatcttaacattaaggttcgacgtactgatgttctttcggcttggagtgggatccgtccattggccatggatccaacagccaagagcacagagagtatctccagagaccacgttgtcttcgaggaaaatcctggtctggttacaatcacgggtggaaagtggacaacttatcgaagcatggcggaagatgcagttgatgcagcaatcaaatcgggacaacttaagccaaccaatgaatgtgtaacgcagaaactacagcttctgggttcttatggatgggaaccatcttccttcacaactcttgcacagcaatacgtgcgcatgaagaaaacatacggtggtaaagtggttcctggagcaatggacacagctgctgcaaagcatttgtctcatgcctatggttcaatggctgaccgagttgccaccatagctcaggaggagggtttggggaaacggttggcgcatgggcatccgtttttggaagctgaggttgcttactgtgcaaggcacgagtactgcgaatcagcggttgatttcatagcaaggagatgtagaatcgcgttcttggacactgatgcagcggctcgggcgttgcagcgtgtggtggagattctagcaagtgaacacaaatgggacaagtcgaggcagaagcaagagttgcaaaaggctaaagagtttcttgaaactttcaagtcgtccaaaaacgcacagtttaacgatggcaagcacaactaa

SEQ ID NO: 108521 - protein, 629 aa, Arabidopsis thaliana
MSLASIRRLAAGAAVIAAASGGAVYLSPSVASSDKGGGPILDSLRRRLGDPTASVPSRSAQESALIAATASDPLDVLVIGGGATGSGVALDAVTRGLRVGLVEREDFSSGTSSRSTKLIHGGVRYLEKAVFNLDYGQLKLVFHALEERKQLIENAPHLCHALPCMTPCFDWFEVIYFWMGLKMYDLVAGPRLLHLSRYYSAKESIELFPTLARKGKDKNLRGTVVYYDGQMNDSRLNVGLACTAALAGAAVLNHAEVVSLITDDATKRIIGARIRNNLTGQEFNSYAKVVVNAAGPFCDSIRKMIDEDTKPMICPSSGVHIVLPDYYSPEGMGLIVPKTKDGRVVFMLPWLGRTVAGTTDSNTSITSLPEPHEDEIQFILDAISDYLNIKVRRTDVLSAWSGIRPLAMDPTAKSTESISRDHVVFEENPGLVTITGGKWTTYRSMAEDAVDAAIKSGQLKPTNECVTQKLQLLGSYGWEPSSFTTLAQQYVRMKKTYGGKVVPGAMDTAAAKHLSHAYGSMADRVATIAQEEGLGKRLAHGHPFLEAEVAYCARHEYCESAVDFIARRCRIAFLDTDAAARALQRVVEILASEHKWDKSRQKQELQKAKEFLETFKSSKNAQFNDGKHN

SEQ ID NO: 108522 - DNA, 1584 bp, Borrelia burgdorferi B31
  CDS (1)..(1584): transl_table=11
atggaggaatatttaaatttcatgaataataacaaagaaacaaaattaaaagatcttgaaaatcaagaatttgatcttataataattggagggggcgcaacaggtcttggcattgcggtagacgcaattacaagggggtataaagcaatacttatagaaaaatttgattatgcaaaaggaacttcctctagatcaagcaaattaattcacggtggagtaagatatttagcccaatggaatatttctttagttaaagaagctttgcgcgaaaaagccattcttgagaaaaatgcaccccatttaattaacgaatgtgcacttatcacgcctatttataatgttttagaaataccttattattattttggattaagttactaccacaatcttatgggtaaagaaaaaactactaaatacaaaactaaattactatccaaaaaatctaccattgaaaaagctcccaatattaaaacagagggccttaaatgctctgttctatattacgatgattcattcgatgatgctagaatggcaataacattgttaagaacctttaccgaaaaaggaggcattgcccttaactatacagaacttaaaaaattcaacaaagaaaacggaaagctttcgggagttcttatacaaaataaattgtcaaaagaacaaatttcattaaaaagcaaatgcataataaacgcaacaggaatattttcagatgaaataagaaggttggatgatgaaaaagccttaaacatcattaaaccttcccaaggtagccatttagtagtcaaaaaagacaaatttcccaaaaatcatgcaatattaatacctaaaactagtgataataggattttattcgctattccttggtatgatagtgttgtttgtggaagcactgacattccaataaaagagatagaagaagaacccaaaagatttgaagaagagattgactttataataaataatttaaataactatttaaatattaaaatagaaaaatcagatgtaaaaagtgtatataccggaataaggccattaataatggatccaaaagctcaaggaaacacttcaaaaatctcaagaaacgaaaaaatatttatatcagattcaaatcttattacaatagcgggggggaaatataccacatatagaaaaatggcagaaaaaaccttgcttaaggccatagaacaaaatttaataccaaatcgtgcaccaactacagaagatttaaagttgcacggctaccttaaaaaagaagaagcaatgaaaattcctgaaccttttagagcttatggcagcgactttgaaattctaaaaaatatggagggttttgacaaaaaaatacacgaaaacttggatttaaatgaagctcaaatagatttttcaattaaatttgaacaagccaaaactattgaggatgttttagcaagaagaacaagatcactacctttaaatcctcaagctacaattgaggctgctccaagagttgctgaaataatgatggaaaaattaaataaatctgaagagtggaaaaatgaacaaataaaaaactttttagaaataagtaaaaaatatttaatttaa

SEQ ID NO: 108523 - protein, 527 aa, Borrelia burgdorferi B31
MEEYLNFMNNNKETKLKDLENQEFDLIIIGGGATGLGIAVDAITRGYKAILIEKFDYAKGTSSRSSKLIHGGVRYLAQWNISLVKEALREKAILEKNAPHLINECALITPIYNVLEIPYYYFGLSYYHNLMGKEKTTKYKTKLLSKKSTIEKAPNIKTEGLKCSVLYYDDSFDDARMAITLLRTFTEKGGIALNYTELKKFNKENGKLSGVLIQNKLSKEQISLKSKCIINATGIFSDEIRRLDDEKALNIIKPSQGSHLVVKKDKFPKNHAILIPKTSDNRILFAIPWYDSVVCGSTDIPIKEIEEEPKRFEEEIDFIINNLNNYLNIKIEKSDVKSVYTGIRPLIMDPKAQGNTSKISRNEKIFISDSNLITIAGGKYTTYRKMAEKTLLKAIEQNLIPNRAPTTEDLKLHGYLKKEEAMKIPEPFRAYGSDFEILKNMEGFDKKIHENLDLNEAQIDFSIKFEQAKTIEDVLARRTRSLPLNPQATIEAAPRVAEIMMEKLNKSEEWKNEQIKNFLEISKKYLI

SEQ ID NO: 108524 - DNA, 1662 bp, Bacillus halodurans C-125
  CDS (1)..(1662): transl_table=11
atgttttcagcaaagaaaagagataaatgtattggcgagatgagtgaaaagcaactggaccttctagtcattggaggggggattacaggtgcaggaattgcccttgatgcgcaagtgcgaggaattcagaccggtcttgtggaaatgaatgatttcgcatctggaacttcaagccgttcaacaaaacttgtccatggcggtttacgctatttgaagcaatttgaaattaagcttgtggctgaggtggggaaagagcgtgcaattgtttatgaaaatgccccacatgtaacgactcccgagtggatgttactgccgatttttaaagatggtacgttcggcaaattttccacatcgttagggttgaaagtctatgattatttagccgatgtgcgaaaagatgagcggagatacatgctaaatgaaaagcaaacacttgaaaaagagccgcttctcagaaaagaaaatttaaaaggtggcggaatctatgtcgagtatcgaacagatgacgcgcgtttaacgttagagattatgaaagaagctgttgcaagaggggcagtcgcccttaactatatgaaagtggaatcattcatatatgaccaaggcaaagtggtaggcgttgttgcgaaagatcgattaacagataccactcatacaatttatgcgaaaaaagtagtcaacgcagcaggtccatgggtggatacgctaagagaaaaggaccgttcaaagcatgggaaatatttaaaactatcaaaaggtgtccatcttgtcgtagatcaatctcgttttccgttacgacaagccgtctattttgatacggaatcggatgggcgaatgatttttgccattcctagagaaggaaagacttacattggcacgaccgatacgttttatgataaagatatcgcttccccgcgtatgaccgtggaggatcgtgactatattcttgctgcggcgaactacatgtttcctagcttaaaccttacagctgacgatgtagagtctagctgggcaggattacgtcctctcatccacgaagaaggaaaaaaggcatctgaaatttctcgtaaagatgaaatcttcttttccgatagcggactcatttccattgcaggcggaaagctaaccggctatcgaaaaatggcggagcgaactgtagatgccgttgcacagggattaaatgtgaacgaaccatgcacgacagcagctatccgcttatcgggtgggctagcggaaggtgcgcaaggattcccgcgctttttagacgaagcgagccggaaaggggcaaaactgggctttgacgctgatgaagtgagacgtcttgcaaagctgtacggttcaaatgttgatcatgtgcttaactatgcttatgaaggaaaagaagaggcagaacattatggacttccagcgttgttgcttgggcaactacagtatggagtggaacaggaaatggtcgctacccctttagacttttttgtccggcgtacaggtgccctgttctttaatatctcgctggttcatcaatggaaagaggctgttcttcgttggatggcggaagagttttcttggacggaagaagagaagactcgatttcaaaatgaattagagactgagctaaaaatggctgtcgatccactgtttcaagtagagccaacaacggtgtaa

SEQ ID NO: 108525 - protein, 553 aa, Bacillus halodurans C-125
MFSAKKRDKCIGEMSEKQLDLLVIGGGITGAGIALDAQVRGIQTGLVEMNDFASGTSSRSTKLVHGGLRYLKQFEIKLVAEVGKERAIVYENAPHVTTPEWMLLPIFKDGTFGKFSTSLGLKVYDYLADVRKDERRYMLNEKQTLEKEPLLRKENLKGGGIYVEYRTDDARLTLEIMKEAVARGAVALNYMKVESFIYDQGKVVGVVAKDRLTDTTHTIYAKKVVNAAGPWVDTLREKDRSKHGKYLKLSKGVHLVVDQSRFPLRQAVYFDTESDGRMIFAIPREGKTYIGTTDTFYDKDIASPRMTVEDRDYILAAANYMFPSLNLTADDVESSWAGLRPLIHEEGKKASEISRKDEIFFSDSGLISIAGGKLTGYRKMAERTVDAVAQGLNVNEPCTTAAIRLSGGLAEGAQGFPRFLDEASRKGAKLGFDADEVRRLAKLYGSNVDHVLNYAYEGKEEAEHYGLPALLLGQLQYGVEQEMVATPLDFFVRRTGALFFNISLVHQWKEAVLRWMAEEFSWTEEEKTRFQNELETELKMAVDPLFQVEPTTV

SEQ ID NO: 108526 - DNA, 1569 bp, Deinococcus radiodurans R1
  CDS (1)..(1569): transl_table=11
atgactcaaggttctgttgtcgatccccgtccggcccaggtgcgggccgccctcgccccccaggaatgggacgtcatcgtcgtggggggcggcgcgtccggtctgggcagcgccgtcgaagcggccacgcgcggccacagcgtgctgctgctcgaaggtcacgactacgccaagggcaccagcagccgctcgaccaagctggtgcatggcggcgtgcgttacctcgcccagggcaacgtgtcgctggtgcgcgaggcgctgcacgaacgcggcctgctgcgcaagaacgccccgcacctcgtgcgtgacctcggcttcgtggtgcccgcctacgactggtgggccgcgcccttctacggcatcggcctgaagatgtacgacgtgctggcgggcaagctcaacctgggcagctcgacttacctggaccgcgacaaggtgctgtcgcgcgtctccacctacaaggaaaagggcctgcgcggcggcatcctctacttcgacggtcagttcgacgacgcccgccttgccgtgaccctgctgcgcaccctcgaagatttcggcggcgtggccctgaactacgccccggtcatcggcctgatcaaggacggcgaacaggtgcgcggcgtgcgcttccgtgacgaggaaagtgggcaggaacacgaggcccgcgccaaaatcgtggtcaacgcgaccggcgtgtgggtggacgacatccgccgcatggaagaccccaccgtcaagccgatgctctcgccgagccagggcgtgcacgtcgtcgtcgagaagaagttcctgccgggcgacagcgccatcatgattccccgcaccgacgacgggcgcgtgctgttcgcggtgccctggcatgaccacgtggtcatcggcaccaccgacaccccggtgccgcaggccgacttcgagccgcacgcactggaagaagaagtcgagttcatcctgcgcaccgctgggcgctacatggaccccgcgcctggccgcgccgacgtgctgagcgtctacgccgggctgcgtccgctggtcaagaacgagaagtccgacggcgccggctccacggcggccctctcgcgtgaccacgtcattcgcatttccaagggcaacctgatcaccctgaccggcggcaagtggaccacctaccgccgcatgggcgaagacaccatcaaccgcgccgaaaaactcggcgggctgcccgagcgcctgaccatcacccccggcctgcacctgcacggctggagcgaggatgagcgccctgaccactggaaggtctatggcaacgacgccgagcgcgtgcagcagctccccggcgccgacgcacagctccaccccgacctgccttatagcgaggccgaactgcgctgggccgtgcgccacgaaagtgcccgcaccgtcgaggacgtgctggcccgccgcacccgctcgatcctgctcggcgcccgcgccagcatggaagcggccccccgcgccgccgccatcctcgctgaggaactgggcaaggacgccgcgtggcaagcgcagcaggtcgaagcgtaccggcaagtcgccagcggctacgtgctgtaa

SEQ ID NO: 108527 - protein, 522 aa, Deinococcus radiodurans R1
MTQGSVVDPRPAQVRAALAPQEWDVIVVGGGASGLGSAVEAATRGHSVLLLEGHDYAKGTSSRSTKLVHGGVRYLAQGNVSLVREALHERGLLRKNAPHLVRDLGFVVPAYDWWAAPFYGIGLKMYDVLAGKLNLGSSTYLDRDKVLSRVSTYKEKGLRGGILYFDGQFDDARLAVTLLRTLEDFGGVALNYAPVIGLIKDGEQVRGVRFRDEESGQEHEARAKIVVNATGVWVDDIRRMEDPTVKPMLSPSQGVHVVVEKKFLPGDSAIMIPRTDDGRVLFAVPWHDHVVIGTTDTPVPQADFEPHALEEEVEFILRTAGRYMDPAPGRADVLSVYAGLRPLVKNEKSDGAGSTAALSRDHVIRISKGNLITLTGGKWTTYRRMGEDTINRAEKLGGLPERLTITPGLHLHGWSEDERPDHWKVYGNDAERVQQLPGADAQLHPDLPYSEAELRWAVRHESARTVEDVLARRTRSILLGARASMEAAPRAAAILAEELGKDAAWQAQQVEAYRQVASGYVL

SEQ ID NO: 108528 - DNA, 1725 bp, Agrobacterium tumefaciens str. C58
  CDS (1)..(1725): transl_table=11
atgcccagttttcgcgaggacgctcttagccgtattcggcacgacggtgatttcgacgccgtcgtcatcggtggcggtatcaacggcatcgccgcctatcgcgatctcgccctgcaggggttgcgggtgctgctggtcgagcgcaatgatttttcctccggctgtagcgcagcgccctcgcgcatgatccatggaggcctgcgttatctcgaaaatggtgaattcggcctcgtggcggaatccctgcgcgagcgcgatgcgcttttgacgcttgcgccgcatatggtgcagccgctgccgacgacgatcccgattttttcgatgttcagcggcctgttcaacgcggcggcgacgtttttcggctccggcggcaaacccgctagccggggagcgctcgccatcaaggcgggccttaccctctatgacttcgttacccggaagaaccgcctcctgccccgccacgagtttcgcggcgccggcaagacattgaagcgctggccgggcctgacgcctgacatcagatattcggccacctattacgatgcgtggataagccagccggagcggcttgcactggaattgctgatcgatacctcggccgacgcgccgcaaagcatcgcgctcaactatgcggagcttgtccgcaacggcgacgaatatcatatccgggcagaggaaacggacgaaacactgcccatccggccgcgcatcatcgtgaatgccacgggcgcatggatcgacgaaacgatcggcacgctttccgccggcccggccgcggaaaagcagaaaccaacggtctccggcaccaaggggtcacatctcatcattgccaatgatgggctcctcaaagcgctgaacggtcacatgattttctttgagaacgcggataaccgcgtttgtattctctttccttatctcggccgtgtgctcgcggggtcgaccgacatcaaggtggatcgccccgagcgggtgcgatgcgagcccgatgagcgggattacattctggacgcgatcagacaggtctttccggacatcaccgtcgatcattcagacattgtctttagtttcagcggcatacgcccgctgccgcgcagtgatgccgcttttaccgggagaatttcccgcagccattttatccaccgtgtcgccggcgatccgccgcagctttgcatgatcggcggcaagtggacgaccttcagggccttcggcgaacaggtgagcgatgaggttctggcctttcttgggcgcaagcgattgaccggcacgatgaaccgtccgatcggcggcggcaggaattttcccactggtgcaggacgcctgcccgctttgctgtcggaacagttttcaatcgaccggcgccgggcgcagcatctggccctggcttatggctcccgtgccttcgaattgatgggcttttgccggggacgaccggatgacgcgccgctttcgcaaaagtcgccgataacggccgctgaaatcctttggctgatccgctgcgaacatgtgcggcacctgacggacctcattctgcggcgcacgacactcgccatcgccggtctcatcgatgccgatcttatagacgccatcctcggcgtcgccgcgcgcgaattgggctggacacccacccgggccgccgtggaacggcagcagctcacccaggagctggaaactttttacggggtcaccccggcaatgcttcaaaacagatgcaaggagaatgcatga

SEQ ID NO: 108529 - protein, 574 aa, Agrobacterium tumefaciens str. C58
MPSFREDALSRIRHDGDFDAVVIGGGINGIAAYRDLALQGLRVLLVERNDFSSGCSAAPSRMIHGGLRYLENGEFGLVAESLRERDALLTLAPHMVQPLPTTIPIFSMFSGLFNAAATFFGSGGKPASRGALAIKAGLTLYDFVTRKNRLLPRHEFRGAGKTLKRWPGLTPDIRYSATYYDAWISQPERLALELLIDTSADAPQSIALNYAELVRNGDEYHIRAEETDETLPIRPRIIVNATGAWIDETIGTLSAGPAAEKQKPTVSGTKGSHLIIANDGLLKALNGHMIFFENADNRVCILFPYLGRVLAGSTDIKVDRPERVRCEPDERDYILDAIRQVFPDITVDHSDIVFSFSGIRPLPRSDAAFTGRISRSHFIHRVAGDPPQLCMIGGKWTTFRAFGEQVSDEVLAFLGRKRLTGTMNRPIGGGRNFPTGAGRLPALLSEQFSIDRRRAQHLALAYGSRAFELMGFCRGRPDDAPLSQKSPITAAEILWLIRCEHVRHLTDLILRRTTLAIAGLIDADLIDAILGVAARELGWTPTRAAVERQQLTQELETFYGVTPAMLQNRCKENA

SEQ ID NO: 108530 - DNA, 1722 bp, Staphylococcus aureus subsp. aureus Mu50
  CDS (1)..(1722): transl_table=11
atgtgggacaagtctctcgtttttacattttttaggaggcgttttggaatggcattgtctacttttaagagagaacatattaaaaagaatttaagaaatgatgaatatgatttagtaattattggtggcggtattacaggtgcaggtattgcactagacgcgagtgaaagaggaatgaaagttgcattagttgaaatgcaagactttgcacaaggaacaagctcaagatctacaaaattagtccatggtggtttacgttacttaaaacaattccaaattggagtagttgccgaaactggtaaagaacgtgcgattgtttatgaaaatgggcctcatgttacgactccagagtggatgcttttaccaatgcataaaggtggaacatttggtaaattctcaacatcaattggtttaggaatgtatgatcgtttagcaggtgttaagaagtctgaacgtaaaaaaatgttatctaaaaaagaaactttagctaaagaaccattagttaaaaaagaaggtctaaaaggcggcggttactatgttgaatatcgtactgacgatgcgcgtttaactattgaagttatgaagcgtgctgctgaaaaaggcgcagaaattatcaactatactaaatctgaacacttcacttatgataaaaatcaacaagtaaatggtgttaaagttatagataaattaactaatgaaaattatacaattaaggctaaaaaagtggttaatgcagcaggcccatgggttgatgatgttagaagtggtgattatgcacgcaataataaaaaattacgtttaactaaaggtgtacatgttgttattgatcaatcaaaattcccattaggtcaagcagtatactttgatactgaaaaagatggaagaatgatttttgcaatcccacgtgaaggaaaagcgtatgtaggtactacagatacattctatgacaatatcaaatcttcaccattaactacacaagaagacagagactatttaatcgatgcgattaattacatgttccctagtgttaatgttacagatgaagatattgaatcaacatgggcaggaattagaccattaatttacgaagaaggcaaagacccttctgaaatctctcgtaaggatgaaatttgggaaggtaaatcaggtttattaactattgcaggtggtaaattaacaggctatcgtcacatggctcaagacattgttgatttagtatctaaacgcttgaaaaaagactacggtttaacatttagtccatgtaatacaaaaggtctggcaatttcaggtggcgatgtaggtggtagcaagaactttgatgcgtttgtagagcaaaaagtagatgtagctaaaggattcggcattgatgaagatgttgcaagacgtttagcatctaaatatggttcaaatgttgatgaattgttcaacattgcgcaaacatctcaataccatgatagcaagttaccattagaaatttatgtagaacttgtttatagtattcaacaagaaatggtatacaaacctaacgatttcttagttcgtcgttctggtaaaatgtatttcaatattaaagatgtattagattataaagatgctgtcatcgatattatggcagatatgcttgattactctccagctcaaattgaagcatatactgaagaagttgagcaagcaattaaagaagcgcaacatggaaataatcaaccagcagttaaagaataa

SEQ ID NO: 108531 - protein, 573 aa, Staphylococcus aureus subsp. aureus Mu50
MWDKSLVFTFFRRRFGMALSTFKREHIKKNLRNDEYDLVIIGGGITGAGIALDASERGMKVALVEMQDFAQGTSSRSTKLVHGGLRYLKQFQIGVVAETGKERAIVYENGPHVTTPEWMLLPMHKGGTFGKFSTSIGLGMYDRLAGVKKSERKKMLSKKETLAKEPLVKKEGLKGGGYYVEYRTDDARLTIEVMKRAAEKGAEIINYTKSEHFTYDKNQQVNGVKVIDKLTNENYTIKAKKVVNAAGPWVDDVRSGDYARNNKKLRLTKGVHVVIDQSKFPLGQAVYFDTEKDGRMIFAIPREGKAYVGTTDTFYDNIKSSPLTTQEDRDYLIDAINYMFPSVNVTDEDIESTWAGIRPLIYEEGKDPSEISRKDEIWEGKSGLLTIAGGKLTGYRHMAQDIVDLVSKRLKKDYGLTFSPCNTKGLAISGGDVGGSKNFDAFVEQKVDVAKGFGIDEDVARRLASKYGSNVDELFNIAQTSQYHDSKLPLEIYVELVYSIQQEMVYKPNDFLVRRSGKMYFNIKDVLDYKDAVIDIMADMLDYSPAQIEAYTEEVEQAIKEAQHGNNQPAVKE

SEQ ID NO: 108532 - DNA, 1677 bp, Listeria monocytogenes EGD-e
  CDS (1)..(1677): transl_table=11
atggtacaattattttcagcgtttgacagagaaacaatcgaaagaaatcttcaagaggaaaaatttgatttagtcatcgtcggtggaggaattacaggagcgggaatcgctttagatgctacttcacgaggcatgagtgtcgcgcttgttgaaatgggtgatttcgcgagcggaacatcgagccgttcaacgaaattagtccacggtggattaagatatttacaacaatttgaaattaaagaagtagcagatttaggaaaagaacgtgcgatagtctacgaaaatggaccacacgtaacgactcctgaatggatgatgctcccgttccataaaggtggcaatatgggcaaaactaccgcttcgtttggtattcgtttatatgactatttagcaggtgtaaagaaaaatgaacgacgtaaaattctaagcgcaaaagaaacactagcaaaaaatcctttcgtgaaaaaagacggcttaaaaggatctggttactacgtagaataccgcactgatgatgcgcgtttaacaatagaagtaatgaaaaaagcggtagaacttggagcgaatgccattaactatacaaaagcagagcatttcttatatgatgacaataaacaagtagttggcgtaaccgtaacagatcgtttgtcgggcaaagcatacgatattaaaggacatcgagttattaatgctgctggtccatgggtagataaagtaagaaaattagattacgcaacaaacaacaaacatttacgcttaacaaaaggaattcatttggttatagataaacaaaaattcccgatggaacaagctgtatactttgatacacctgatggccggatggtttttgctattccacgcgataaaaaagtatatgttggaacgacggatactgtatacgacgaagcagtaatcaatccaaaagctcttgaatctgatcataattatgtgattaaggcgattaactatatgttccctgatgtgcatattaccgaaaaagatattgaatcaagttgggctggggttcgtccacttatctatgaagaaggtaaagatccatctgaaatttcacgtaaagatgaagtttggttttctgaaagcggcttaattacgatggcaggcggtaaactcactggttacagaaaaatggccgaaaaattattagatgacgtttctaaaacattagcgaaagaaactggtaaaaagtataaaacagttcaaacaaaacatttaccaatttctggtggtgacattggtggttcagaacaattagaagctttcctatctaaaaaagcgaaagaaggtaataatcgtttcggctggactttagaagaaggccgtgagatggctaaacgttttggtagtaatatcgatcaattatttacttatgcacaggaacataaagaacaaaacgaaaccactttaccaaacagtttgtacgctgaactacgctactcaattcaacatgaagcagtgacaacaccaatcgatttcttattacgtcgcactggctacttgcttttcgatatgccgtacttacttgaatggaaagacgctgttgtggatgaaatggctaagcaattccactggagcgacgatgtaaaacaaacctatattgaggaattaaatattcaaattaatgatgctagagaaccggctgattggcacgatagataa

SEQ ID NO: 108533 - protein, 558 aa, Listeria monocytogenes EGD-e
MVQLFSAFDRETIERNLQEEKFDLVIVGGGITGAGIALDATSRGMSVALVEMGDFASGTSSRSTKLVHGGLRYLQQFEIKEVADLGKERAIVYENGPHVTTPEWMMLPFHKGGNMGKTTASFGIRLYDYLAGVKKNERRKILSAKETLAKNPFVKKDGLKGSGYYVEYRTDDARLTIEVMKKAVELGANAINYTKAEHFLYDDNKQVVGVTVTDRLSGKAYDIKGHRVINAAGPWVDKVRKLDYATNNKHLRLTKGIHLVIDKQKFPMEQAVYFDTPDGRMVFAIPRDKKVYVGTTDTVYDEAVINPKALESDHNYVIKAINYMFPDVHITEKDIESSWAGVRPLIYEEGKDPSEISRKDEVWFSESGLITMAGGKLTGYRKMAEKLLDDVSKTLAKETGKKYKTVQTKHLPISGGDIGGSEQLEAFLSKKAKEGNNRFGWTLEEGREMAKRFGSNIDQLFTYAQEHKEQNETTLPNSLYAELRYSIQHEAVTTPIDFLLRRTGYLLFDMPYLLEWKDAVVDEMAKQFHWSDDVKQTYIEELNIQINDAREPADWHDR

SEQ ID NO: 108534 - DNA, 1845 bp, Encephalitozoon cuniculi GB-M1
  CDS (1)..(1845)
atgctggttgcgctagtggttctatttctttctgtgtttatggccatgaagtttctctacaaaagaatatttgtggcgagtagactgaagatgatcgagaagccctccgaggattgggagcctgccagcagagaggctatgatcgagagactcaggtcggaggtgtttgacctggtggtggttgggggaggaagtactggagcaggatgtgcacttgatggggcaacaagaggactgaaggtggcattggtggatgcaggggactttgggtcaggaaccagctcgaagtcgacaaagcttgtgcacgggggagtaagataccttgcaaaggcggttagcaacctggactggtctcaatacaagttggtctggcaagcactgggggagagaacaaccatgtttgagatatcgccgtatcttacaaacagcatcaagataatggttccgatatacagcaagatactgattccttactactatgttgggctgaagctctatgattggatttcgggattcaagtctttgggcaaaagctatttcatcgatagaaaggaggcggtggatgcatttccacacatcaacaagaagaatctctgtggggcaatggtctattttgacgggcagcaagacgatgcaagaaacaatgtgatgatagtgatgactgcagtctgccatggagcagtggcggcaaaccacgtgtctgcaaggtctctgatgattgagggcggaaagattgtcggagtgcggtgcagagacgagatcacgggatcggagattgagatcaggggtactggtgttataaacagcacgggcaaccttgcagatgacttgaggaggatggacgatgcagatgcaagagaaatcatagtccagagctcgggaacgcacattgtcattccaaaggaatatgcgcccaaggaaatggggtttttggatccacttacaagcgacaacagaatagccttcttcatgccatggatgggcaagacgattgtgggatccacggacatcaagacgaagacagagctctctccttctccaacagaagaggacctggagtttctgatccacgaggtccaggcctacacctcgatgcatccgaagctaacaagggatgaggtttctgccgtctggacaggaataaggcctcttgtcaaggacccagatgtttccgacacaggctcgattgtcagaaagcactttgtgaggattgagaagaacgggctgctgaccgtcactggaggaaagtggacgatatacagaaagatggctgaggatgcaatagaccttgcgatcagtgcattttccctgaagccttcgggaccgtgtgtgacgaagtatgtccgaatacttgggggcgatgggtacaccaagaatacgtgggcctcgatccagaaggagctgggggttccaaagaacgtggctgaaaggcttgcaaggtcctatggcaccagggctctgaggctttcgagctacatcaagaagaacaggaagaaggttttgtctgtaaagtattcctatcttatagaggaggtggagtactgcatagacaatgagatggccgtcaaagtatgcgatgtgctttgcaacagactgatgatcggcctgatggatgtgaaggaggcctaccaatgtattgataaggttctcggggtcttcaagaagaagcacggatgggatgcagacaggtgcaatcgtgaggaggcggacgctataagaatgctcgataagtatggccttcagatcctaagaggatgtggccaggatgcctcttctttgcagatggaatgccctgaggaaaagaggcacaggggcgagcgtagacttcctccacaggaaaaataa

SEQ ID NO: 108535 - protein, 614 aa, Encephalitozoon cuniculi GB-M1
MLVALVVLFLSVFMAMKFLYKRIFVASRLKMIEKPSEDWEPASREAMIERLRSEVFDLVVVGGGSTGAGCALDGATRGLKVALVDAGDFGSGTSSKSTKLVHGGVRYLAKAVSNLDWSQYKLVWQALGERTTMFEISPYLTNSIKIMVPIYSKILIPYYYVGLKLYDWISGFKSLGKSYFIDRKEAVDAFPHINKKNLCGAMVYFDGQQDDARNNVMIVMTAVCHGAVAANHVSARSLMIEGGKIVGVRCRDEITGSEIEIRGTGVINSTGNLADDLRRMDDADAREIIVQSSGTHIVIPKEYAPKEMGFLDPLTSDNRIAFFMPWMGKTIVGSTDIKTKTELSPSPTEEDLEFLIHEVQAYTSMHPKLTRDEVSAVWTGIRPLVKDPDVSDTGSIVRKHFVRIEKNGLLTVTGGKWTIYRKMAEDAIDLAISAFSLKPSGPCVTKYVRILGGDGYTKNTWASIQKELGVPKNVAERLARSYGTRALRLSSYIKKNRKKVLSVKYSYLIEEVEYCIDNEMAVKVCDVLCNRLMIGLMDVKEAYQCIDKVLGVFKKKHGWDADRCNREEADAIRMLDKYGLQILRGCGQDASSLQMECPEEKRHRGERRLPPQEK

SEQ ID NO: 108536 - DNA, 2019 bp, Drosophila melanogaster
  CDS (1)..(2019)
atgtccaagttgggtgccatcctggcgcaaagtgctgttcatctcagcgagcatcggcagcttttgagccaggccttcttatcatctatcacctatcaacggagccgggtcaaggttcgcggaaaccactgttgcgcaatgaaggtggtaccatctcgcgcggagcacgtaaatgcactgaaggccgaggagttcgacgttctgatcatcggaggaggagccgtgggttgtggttgtgctgtagacgcagcgtgtcgtggtcttaaaaccgccttaattgaggcagaggattttgcaagcggctctagttcgcgaaccagtaagctgatcgatggcagtggttcatatctgggcactgccctccgggagaaggatgtcgaacagctgtacattatgctgcaaatgatgagtgaacgggtgaccatgctgaagaacgctccgcatctgaaccgcatccagcccatgatcatacccatctacagttttttgcagatgccctgcacctggctgggattgaaggtttacgactggatatcagcagcatccaatatccgcggatcgcacatcatctccagggaggccaccatgtatgagtttccgctgctaaaaaccgatggccttcgcggtggcgtcgtctactatgatggtcaggtggatgatgcccggatgtgcgtcgcattggtgatgaccgcggtggccctgggcgccaatgtgggcaaccacatggaggtggtggagattatgccacaggagggatgctgccgagttgttagcgttaaggacaagatctcctgcgagcagttctacattcagtccaaggccgtgatcaatgccacaggctccagcacagatgccatccggcagatggacaaggagggaaccgcacccattctattgcccactctggaaacccaagtatccctgccccgctactttggttccggacattacggtttgttgagtccggctctgaaaaatgatgatctcactgtatatatggtgccgtttgagaaccacatggttctaggcagtcgcgaagtggacctcgatgaagtgtctagccgtggaagtcccactcccgatccagatgacgtggattgtctgctagaagcagccaagaaaaggatggatccctgcgtggagctggggcgctgtcacgtccttagtgcctggacggcgatcaaggccagtgtgagctgtccaaccgacaaggaaaatgatgatgacaagcgtggaacaccgatcaacagctatatgatcgaggttagtcccgacggtcttatcacgctggccggcggacggtggagcagttaccgcgtgatggcagccgatgccgtggatttggccattaaatcttgtggactatgcgacgatcatgtgacctccagttggacacaggacttgaagttagacggagccgaatcatggtgttgcatgctgccgctagaattcgtgcaggactacggtgtgcccatggacgtggcgcatcatatctccgattcctatgggtacaatggacatgcactgttctctcaggctcctgatctgaagaagcgcctccatccgagcttcccctatatagaggcagagattcagtatgccatgcgaaatgagtacgcctgcacccttgtggacatcatcgcacgacggttgcgcatagccttcgtggatgcggccgccacgctgcacatgctgcctagaattctcaagatcatggccggcgagaatggttgggatgaggaagagcaaaaggagcagatggtggcggcccaggagtttctggtgcgccaaatgggtctgggatcaatagtccaacccaggagcaccagcaagagcaagccgaaaaagaagggctcctcggagggatgttgctgccgggcggcagttcgcaggggggccaggagctactcgatggaaatatcaaagaagatttgcgttcaacccttggtccaacatagatccatgtctagcatgttcttgccccttatgacgagcttaagttatggactcggacgctaa

SEQ ID NO: 108537 - protein, 672 aa, Drosophila melanogaster
MSKLGAILAQSAVHLSEHRQLLSQAFLSSITYQRSRVKVRGNHCCAMKVVPSRAEHVNALKAEEFDVLIIGGGAVGCGCAVDAACRGLKTALIEAEDFASGSSSRTSKLIDGSGSYLGTALREKDVEQLYIMLQMMSERVTMLKNAPHLNRIQPMIIPIYSFLQMPCTWLGLKVYDWISAASNIRGSHIISREATMYEFPLLKTDGLRGGVVYYDGQVDDARMCVALVMTAVALGANVGNHMEVVEIMPQEGCCRVVSVKDKISCEQFYIQSKAVINATGSSTDAIRQMDKEGTAPILLPTLETQVSLPRYFGSGHYGLLSPALKNDDLTVYMVPFENHMVLGSREVDLDEVSSRGSPTPDPDDVDCLLEAAKKRMDPCVELGRCHVLSAWTAIKASVSCPTDKENDDDKRGTPINSYMIEVSPDGLITLAGGRWSSYRVMAADAVDLAIKSCGLCDDHVTSSWTQDLKLDGAESWCCMLPLEFVQDYGVPMDVAHHISDSYGYNGHALFSQAPDLKKRLHPSFPYIEAEIQYAMRNEYACTLVDIIARRLRIAFVDAAATLHMLPRILKIMAGENGWDEEEQKEQMVAAQEFLVRQMGLGSIVQPRSTSKSKPKKKGSSEGCCCRAAVRRGARSYSMEISKKICVQPLVQHRSMSSMFLPLMTSLSYGLGR

SEQ ID NO: 108538 - DNA, 2142 bp, Drosophila melanogaster
  CDS (1)..(2142)
atggccaagatcattcaaatggcggtgatgctgggcagctccaagctgggccacggcgcttttggattcgatgaaaggcaagcggactcgactccagtgccacagatgaaacgggagctgcccacgcgaaagatgtgcctggaggcctttaagcgaacccactacgacatcctcatcattggcggcggcgccgtgggttccggctgtgctctcgatgctgccacgcggggcttgaagaccgccctggtggaagcgaatgactttggcagcggcacttcctccaaatcgagcaaactgttgcacggcggcctcagggatctggagcaggccatctcgcgtctggacgtggctgcctttcggcgtgttcgctgctccttgcaggaacgcagccacattggcaagctggcgccgcatcttagccagccggtccccatcctgctgcccgtccaccactggtggcaggctccgctctactacatgaagctaaagatttaccacctgatggcgcccaaggccaccaggagttttcagtatctgagtgccgacgacgcgttggaagtatttccgatgctgcgacgccaggagctgtttggcgccttcgtcttctacgagggtcagcacgacgatgccaggatgtgcctttcggttgcccttacagcggctcgttacggagcagatatctgcaaccacatgaaggtctcgagactcatcaagaacaaggatggcaatgtggcgggcgcggaggcggtggaccagctgacgggcaagaagtatagcatacgggcgaaggtggtggtcaacgccactggccacatgagcgacagcctccgccagatggaggattcggaagccaagccgctctgcacgcgcagctggtcctcgatcatcgtcatgccccgcttctactgtccggaggaggtgggcgtcttcgacccgcacacgccctctggacgatccatcttttttctgccctggcaggggcatacgctagtcgggtccagcgatgagcctctcaatctgcccgagcaggacacgcagcccacggagacggatgtgcagtccctactggattgcgttaagcactttgtaacgcccaacttcgatgtgcgaagatgcgatgtgctggccgtttggggtggttacaaacctctgcccgtgcagtccgatacactgcaccatacccgtttcaagaaccatgtaatccagctaggacctcgaaacatgctttccatcgttggtggcacgtggtcgtcgtttcgggttctggctgagaaaaccgtgaatgcagccatccggtatggagatctttcaccgctgcgtaaggaatcggtgaccgcagagtcctgcaaactggacggagccagtggctggagtccgaagatgttcatacggctggtgcaggacttcggaatggagcgggacgtggctgagcacctgtcgaacacgtacggatcgaatgccttcaaagtggccgtgagtgcggacagcagtggaaaggcatggcccattgtgggtaagcgcctccactcggagttcccgtatattgaggcggaggtaaaacagggcgtccgagactttgcttgcacgctggaggacatggtggcgcggcgactgcgagtggcctttttaaatgtccaggtggccgaggagatactgccgcaagtggccaacatcatggccaaggagctgaactggtcgcgagatcaaattaaaaagcagatccgccagacgcgaacttttcttaactcccagatgggccagctgaccaaggagagcgcttcgcagatgagcattcccattaagatgagcgtgcgccaagtgcgcaagtttgccgggcagttcaggcaaatggatgataacaatacggggtacgtgtcgattgcagactgctgcaaggcaatgaaaacgatgggcgtaaaggaggtgcccgtcgacctgatgcacgatgtcctgcgggacattgatgtccatgcccagggcaaggtgaacctgtatgagttccttctgctcatgtcggctattgtgcagggcaacaccgagtacctgcggtacgcacggctgtatctggaccacaaaaggcagatgcaaggcagcaactttcccaccgtaatgcaaatggagcgtgccgggggcggtctttga

SEQ ID NO: 108539 - protein, 713 aa, Drosophila melanogaster
MAKIIQMAVMLGSSKLGHGAFGFDERQADSTPVPQMKRELPTRKMCLEAFKRTHYDILIIGGGAVGSGCALDAATRGLKTALVEANDFGSGTSSKSSKLLHGGLRDLEQAISRLDVAAFRRVRCSLQERSHIGKLAPHLSQPVPILLPVHHWWQAPLYYMKLKIYHLMAPKATRSFQYLSADDALEVFPMLRRQELFGAFVFYEGQHDDARMCLSVALTAARYGADICNHMKVSRLIKNKDGNVAGAEAVDQLTGKKYSIRAKVVVNATGHMSDSLRQMEDSEAKPLCTRSWSSIIVMPRFYCPEEVGVFDPHTPSGRSIFFLPWQGHTLVGSSDEPLNLPEQDTQPTETDVQSLLDCVKHFVTPNFDVRRCDVLAVWGGYKPLPVQSDTLHHTRFKNHVIQLGPRNMLSIVGGTWSSFRVLAEKTVNAAIRYGDLSPLRKESVTAESCKLDGASGWSPKMFIRLVQDFGMERDVAEHLSNTYGSNAFKVAVSADSSGKAWPIVGKRLHSEFPYIEAEVKQGVRDFACTLEDMVARRLRVAFLNVQVAEEILPQVANIMAKELNWSRDQIKKQIRQTRTFLNSQMGQLTKESASQMSIPIKMSVRQVRKFAGQFRQMDDNNTGYVSIADCCKAMKTMGVKEVPVDLMHDVLRDIDVHAQGKVNLYEFLLLMSAIVQGNTEYLRYARLYLDHKRQMQGSNFPTVMQMERAGGGL

SEQ ID NO: 108540 - DNA, 2175 bp, Drosophila melanogaster
  CDS (1)..(2175)
atgacctcgcgaatgttcaagttcggcgtaacagccgctagcgcctgtgttggttccgtcctggcctcgtacaccctggatcgctggaacaccccccatgtggttaacaatgccaccgtgccgccgaaaaggaagcgcacgctgcccccgcgagcggatcagatcaaatccctgatgagcggcgaggagttcgacgtgctgatcatcggcggaggagccacgggagctggatgtgctctcgactcggttacaaggggtcttaagaccgccctggtggagctggatgactttgccagcggaacttcctcgagatccacgaaacttatccatggcggagtgcgatatctgcagaaggccattttgggcctagatctagagcagtaccgcatggtgaaggaggcgctggctgagcgcgccaccatgctcgaatcggcgccccacttgacccaccctctgcccatcatgctgccagtttacacatggtggcaggttccttactactgggtgggcatcaaggcctacgatctggtggccggcgatcgcaatgtgaaaagctcgtactacctctccaagaaggatgccctcgaactgttccccatgctcaagaaggacaagctgtgcggcgctatcgtctactatgatggccagcaggatgatgccaggatgtgtctggcggtggcgctgactgccgctcgtcacggtgccactgtgtgcaatcacgtggaggtgaaggagctgctgaagaaggacgacggcactggcaaacaggtgctgtgcggagccaaggtcaaggaccatatctccggcaaggagttcaccgtgaaggccaagtgcattgttaatgccgccggtcccttcacggactccatccgcaagatggacaaccccacggtgaagagcatctgctgccccagttccggagttcatatcgtactgcctggctactatagccccgatcagatgggtctgctggatccctccacttccgacggccgcgtcatcttcttcctgccctggcagaggcagacgattgccggcaccaccgacctgccctgcgaaatcacccacaatccaacgcccaccgaggacgagatccagtttatcctcaacgagatcaagaactatctgaatgcggatgtggaggtgcgccgtggcgatgtgctctccgcatggagcggcatccgccctctggtctccgatcccaacaaggacgacacccagtccctggcccgcaaccacatcgtccacgtcagcccctccaatctcatcaccatcgctggcggcaagtggaccacctacagggccatggccgagcacaccatcgacgcggctatcaaggcctgcaacttaaagccagagcgcgccgaggcagtcacctcctatctgaagatcgaaggcggccagggctggaccccgaccatgtacatccgtttggtgcaggacttcggacttgagtgcgaggtggcccaacatctggccaagtcgtacggtgaccgcgccttcgccgtgtccaaaatggcttcgttgaccggcaagcgttggcccatcattggtaaccgcatccaccccgagttcccatacatcgatgccgagatccggtacggagtgcgagagtacgcctgtaccgctgtcgatatgatcgcccgtcgcctgcgactggccttcctcaatgtgcaggcagcacaggaggcgctgccagtgatcgttgacatcatgggcgaggagctgggctggtccaaggacgagaaggagcgccagattaagcacgccactgagttcctggccaacgagatgggacactcggtcaaccgcacctccaaggagcgcatacccatcaagctgtccaaggaggagatccagacatacatcaagcgcttccagctgatcgacaaagacaagaagggctacgtttccatcaacgatatccgtcgcgctctcaagagcttcggcgatggcgacgtctctggcgagcagctgcacgaaatcctgcgcgagatcgataccaacatgaacggccaggtggaactggacgaataccttcagatgatgtcggccatcaaaacgggcgacgtggcctactcccgatttgcgcgcatggccgagctggaggagcagaagcacgaggcggccaatctgaagcagatcagcgtggaccgatccggaggcggcttgtaa

SEQ ID NO: 108541 - protein, 724 aa, Drosophila melanogaster
MTSRMFKFGVTAASACVGSVLASYTLDRWNTPHVVNNATVPPKRKRTLPPRADQIKSLMSGEEFDVLIIGGGATGAGCALDSVTRGLKTALVELDDFASGTSSRSTKLIHGGVRYLQKAILGLDLEQYRMVKEALAERATMLESAPHLTHPLPIMLPVYTWWQVPYYWVGIKAYDLVAGDRNVKSSYYLSKKDALELFPMLKKDKLCGAIVYYDGQQDDARMCLAVALTAARHGATVCNHVEVKELLKKDDGTGKQVLCGAKVKDHISGKEFTVKAKCIVNAAGPFTDSIRKMDNPTVKSICCPSSGVHIVLPGYYSPDQMGLLDPSTSDGRVIFFLPWQRQTIAGTTDLPCEITHNPTPTEDEIQFILNEIKNYLNADVEVRRGDVLSAWSGIRPLVSDPNKDDTQSLARNHIVHVSPSNLITIAGGKWTTYRAMAEHTIDAAIKACNLKPERAEAVTSYLKIEGGQGWTPTMYIRLVQDFGLECEVAQHLAKSYGDRAFAVSKMASLTGKRWPIIGNRIHPEFPYIDAEIRYGVREYACTAVDMIARRLRLAFLNVQAAQEALPVIVDIMGEELGWSKDEKERQIKHATEFLANEMGHSVNRTSKERIPIKLSKEEIQTYIKRFQLIDKDKKGYVSINDIRRALKSFGDGDVSGEQLHEILREIDTNMNGQVELDEYLQMMSAIKTGDVAYSRFARMAELEEQKHEAANLKQISVDRSGGGL

SEQ ID NO: 108542 - DNA, 1584 bp, Streptomyces coelicolor A3(2)
  CDS (1)..(1584): transl_table=11
atgagccccaccagccgccccgccaccggggcctccctgtccgccgcgcggcgctcgcgcgaggtggccgacaccgtcggcggccccgtggtggacgtcctggtcgtcggtctcggcgcgaccggtgccggtgccgcgctggacgccgccgcccggggactgggcgtcgtcgccgtggacgcccacgacctggccttcggcacctcccgctggagctccaagctcatccacggcggactgcgctacctcgcctccggccagctcgacgtcgcgcacgagagcgcggtggaacgcggggtgctgatggagcgcacggcaccccacctggtgcgcgcccagccgttcgtgctgccgctcaccccgctggtctcccgcggccagggcgcgctggcgtgggccgggttccgggccggggacaccctgcgtctcgcggcgcgcaccgcacgggccaccctgcccgcgccgcgccggctgtccgcggtggagacccgtcacctcgcaccggcgctgcgctccgaccggctgcgcggcgggctgctctcctgggacggcaggctcgccgacgacgcccggctggtgaccgcgctcgcccggaccgcggcggcccgcggcgcgcggatccttacccgggtcagggcactggagctgaccgggtcgggcgcccgggtccgcgacgagacgaccggcgaggagggcgtgatccgggcccgcgcggtggtcaacgcctccggggtgtgggccggagacctcgtggacggcatccggatccgtccctcccgcggcacgcatctcgtcctgcgctccgaccgcctcggccccctcccggccggcctgcacgtgccgatccccggcgagaccaaccgcttcgtcctcgtcctgccccaggacgacggccgcgtctacgtcggcctcaccgacgagccggtggacggggacgtcccggacgtgccggaggtcccggagaccgacgtcggcttcctgctcgacgtgctcggttcggtgctcgacgtgccggtgcaccgcgaggacgtggtgggcgccttcgcgggcctgcgccccctgctcgacaccgccccgtcggaccggcccggcgccgcgccccgtacggcggacgtctcgcgccggcacgccgtgctgacctcgtccgagggtgtgatcaccgtggtcggcggcaagctcaccacgtaccggcggatggccgaggacgccgtggacgccgccgtcgccgcccggggcctcgccgcgggaccgtcccccaccgccgcgctgcccctggtcggcgccgccgccccgcacaccctggccggggtccgggcaccgcgccgcctggtgcggcgctacggcaccgaggcccctgcggtccaggccctcgcctcccgggagccctgcctcgccgaacgcgtactgcccggccaccccgtcaccggcgcggaactggtgtgggccctgcgccacgagggcgccctcgacgaggccgacctgctcgaccggcgcacccgcgtcggcctggtccccgaggaccgcgcggcggccctgggcgccgtacgtgacctcgtcggcgaggtcacggcggacccgcgctga

SEQ ID NO: 108543 - protein, 527 aa, Streptomyces coelicolor A3(2)
MSPTSRPATGASLSAARRSREVADTVGGPVVDVLVVGLGATGAGAALDAAARGLGVVAVDAHDLAFGTSRWSSKLIHGGLRYLASGQLDVAHESAVERGVLMERTAPHLVRAQPFVLPLTPLVSRGQGALAWAGFRAGDTLRLAARTARATLPAPRRLSAVETRHLAPALRSDRLRGGLLSWDGRLADDARLVTALARTAAARGARILTRVRALELTGSGARVRDETTGEEGVIRARAVVNASGVWAGDLVDGIRIRPSRGTHLVLRSDRLGPLPAGLHVPIPGETNRFVLVLPQDDGRVYVGLTDEPVDGDVPDVPEVPETDVGFLLDVLGSVLDVPVHREDVVGAFAGLRPLLDTAPSDRPGAAPRTADVSRRHAVLTSSEGVITVVGGKLTTYRRMAEDAVDAAVAARGLAAGPSPTAALPLVGAAAPHTLAGVRAPRRLVRRYGTEAPAVQALASREPCLAERVLPGHPVTGAELVWALRHEGALDEADLLDRRTRVGLVPEDRAAALGAVRDLVGEVTADPR

SEQ ID NO: 108544 - DNA, 1707 bp, Streptomyces coelicolor A3(2)
  CDS (1)..(1707): transl_table=11
gtgaggacagcgacccttgggccggcgcagcgcgccgagtcactcgcggccatggccgagcgcgaactcgacgtactggtggtgggcgccggcgtggtcggtgcgggcaccgccctcgacgccgtgacgcgcggcctgtccgtcggcctggtcgaggcgcgggactgggcctcgggcacctccagcaggtccagcaagctgatccacggcggcctgcgctatctggagatgctcgacttcgtgctcgtgcgggaggcgctgaaggagcgcggactgcttctggaacggctggcgccgcacctggtgaagccggtgccgttcctgtacccgctccagcacaagggctgggagcggctgtatgccggatcgggcgtcgcgctctacgacgccatgtccatggcccgcgggcacgggcggggcctgccgctgcaccggcacctgagccgccgtcacgccctgcgcgtggcgcccgcgctgaagaaggacgcgctggtcggcgcgttgcagtactacgacgcccagatggacgacgcccgcttcgtggccacgctggtgcgcaccgcggcggcgtacggcgccaaggtcgccaaccgcgcccgggtcacctccttcctgcgcgagggcgaacgggtggtcggcgcccgggtgcaggacgtcgaggcgggcggcgagtacgaggtccgcgccaagcaggtggtgaacgcgaccggggtgtggaccgacgacacccaggcgatggtcggcgagcgcggccagttccacgtccgggcctccaagggcatccacctggtcgtgcccaaggaccgcatccactccagcaccgggctgatcctgcgcaccgagaagtccgtgctgttcgtcatcccctggggccggcactggatcatcggcaccacggacaccgactgggacctggacaaggcccacccggccgcgtccagcgccgacatcgactacctgctggaacacgtcaactcggtgctgtcggtgcccctcacgcgcgacgacgtcgagggcgtgtacgccggactgcgcccgctgctggccggcgagtcggacgccaccagcaagctgtcgcgcgagcacaccgtcgcccacccggtgcccggcctggtcgtcgtggccggcgggaagtacacgacgtaccgggtgatggccaaggacgccgtcgacgaggccgtgcacgggctcgacctgcgggtcgccgactgcgtcaccgaggagacgccgctgctcggcgctgagggctaccacgcgcagtggaacgcccgggcccggatcgccgcccgcaccggactgcacgtcgtacgcgtcgagcatctgctcaaccgctacggctcgctgacggaggaactgctcgaactcgtcgccgccgacccctccctgggcgagccgctcaccggcgccgacgactacctgcgcgccgaagtcgtctacgccgcctcgcacgagggcgcccggcacctggacgacgtactgacccggcgcacccgtatctccatcgagaccttcgaccggggcacgcgctgcgcccgcgaggccgccgagctgatggcaccggtcctcggctgggacaagggccaggtcgagcgggagatcgagcactacgagaagcgggtcgaggccgagcgggagtcccagcgccagcccgacgacctgacggccgacgcggcccggctgggggcgccggacatcgcggcgcggtga

SEQ ID NO: 108545 - protein, 568 aa, Streptomyces coelicolor A3(2)
MRTATLGPAQRAESLAAMAERELDVLVVGAGVVGAGTALDAVTRGLSVGLVEARDWASGTSSRSSKLIHGGLRYLEMLDFVLVREALKERGLLLERLAPHLVKPVPFLYPLQHKGWERLYAGSGVALYDAMSMARGHGRGLPLHRHLSRRHALRVAPALKKDALVGALQYYDAQMDDARFVATLVRTAAAYGAKVANRARVTSFLREGERVVGARVQDVEAGGEYEVRAKQVVNATGVWTDDTQAMVGERGQFHVRASKGIHLVVPKDRIHSSTGLILRTEKSVLFVIPWGRHWIIGTTDTDWDLDKAHPAASSADIDYLLEHVNSVLSVPLTRDDVEGVYAGLRPLLAGESDATSKLSREHTVAHPVPGLVVVAGGKYTTYRVMAKDAVDEAVHGLDLRVADCVTEETPLLGAEGYHAQWNARARIAARTGLHVVRVEHLLNRYGSLTEELLELVAADPSLGEPLTGADDYLRAEVVYAASHEGARHLDDVLTRRTRISIETFDRGTRCAREAAELMAPVLGWDKGQVEREIEHYEKRVEAERESQRQPDDLTADAARLGAPDIAAR

SEQ ID NO: 108546 - DNA, 1653 bp, Leptospira interrogans serovar Lai str. 56601
  CDS (1)..(1653): transl_table=11
atgcaaatttgtagggggaaagaaacctgtaaagcaggaagagttctcaaaatggaaaaacaaaaacgagtcgatcaaatttctaaactacaaaaagaatcctttgatattttagtaatcggaggtgggtctacaggtgctggagccgctttcgacgcagcaaaaagaggttataaaacagctctgattgaaagaaaagattttgcttcgggaacttcttcccgttccaccaaactgattcatggtggggtccgttatttagctcagttccattttaaattgattcacgaggctttgacggaaaggcagaggttattggaaaatgcacctcacttagtcaaacctcttaagttcgttttacctgcatatcgattttacgaaagaccgtattacggaatcggtcttactctctatgatattcttgcgtctaagggaaaacttccttctcacaaaacggtttctaaatccgaaacaatttccgagtttaaagccatcaagagggacggtttatttggtggaattacctattacgacgctcagtttaatgatgctcgtttgaatgttcttttggcaagatctgcacaaaaagaaggagccgtagttgccaatcgaatagaactcgtttcttttattaaaaagagcggaaagattgtaggagccaatctcaaagatttagagaccgcaaaaacctttccagtttatacaaaggtaatcgcaaatacaactggaatctgggtagatcacattcgtaagttagacgatccaagaacgtttaacgtgctttctcccagccaagggatccacttagtattctccaaagaaagagttccttgtacatccgccatgatcattccgaaaacaaaggatgggagagtcgtatttatcattccttgggaagaccacgtaattcttggaaccacggatactccgattgaaaatccaggagaagaaccacttccgatcggaaatgaggttcaatttttattggatactggaaacgaatatttggaaaatccagtcactgaaaaagatattctttccgtgtttgtaggaattcgtcctttgatttcaccagagggaaatcaggatacgaagaatatttcgagagaggaagtgattttagtttctaattccggtttggttacgatgggaggaggaaaatggtccacttacagaaagatggctgaggatttggtggataaactcattcagatcggaaatctagaagttagagaaaaatgttctactaaattttatgtttatcctggagctgcagattattcagaatctctttaccaggaaattgaaaaaacatataagatcgatacgatctttgcaaaaaggcttcaaaattattatggaacggaagttttcgaagttttgggaaaaaaaccgaaactattgggaaaaggaattccgtatttcgaagaggaagttttgtttgcggttaacgaagaatttgcgttaggcgtcacggacgttcttgcaagaagatttagaattctatttgtagatctcagtttggcgcagaagatggtcgctcctgtggctatggttctttccaaacaactcaagtggaaggacaaaacaaaaaaagcggaagaatccgctgcaatggagctaatcgaaagtttgaggaagtcgtatcgataa

SEQ ID NO: 108547 - protein, 550 aa, Leptospira interrogans serovar Lai str. 56601
MQICRGKETCKAGRVLKMEKQKRVDQISKLQKESFDILVIGGGSTGAGAAFDAAKRGYKTALIERKDFASGTSSRSTKLIHGGVRYLAQFHFKLIHEALTERQRLLENAPHLVKPLKFVLPAYRFYERPYYGIGLTLYDILASKGKLPSHKTVSKSETISEFKAIKRDGLFGGITYYDAQFNDARLNVLLARSAQKEGAVVANRIELVSFIKKSGKIVGANLKDLETAKTFPVYTKVIANTTGIWVDHIRKLDDPRTFNVLSPSQGIHLVFSKERVPCTSAMIIPKTKDGRVVFIIPWEDHVILGTTDTPIENPGEEPLPIGNEVQFLLDTGNEYLENPVTEKDILSVFVGIRPLISPEGNQDTKNISREEVILVSNSGLVTMGGGKWSTYRKMAEDLVDKLIQIGNLEVREKCSTKFYVYPGAADYSESLYQEIEKTYKIDTIFAKRLQNYYGTEVFEVLGKKPKLLGKGIPYFEEEVLFAVNEEFALGVTDVLARRFRILFVDLSLAQKMVAPVAMVLSKQLKWKDKTKKAEESAAMELIESLRKSYR

SEQ ID NO: 108548 - DNA, 1830 bp, Lactobacillus plantarum WCFS1
  CDS (1)..(1830): transl_table=11
atggcattttcagcaacgacgcgtcaacaaaatattgaacgcttacaaaatgaaacgttagatttactcgttatcggtggtgggattaccggtgccggtgtcgccattcaatcaactgcaatgaacatgaagaccgggttgatcgatatgcaagactttgcagaagggacttcatcacggtcgacgaaactggtccatgggggtattcgttacttaaagacgtttgacgtgggggtagtcgccgataccgttaaagaacgggcggtcgtccaggggattgcgccacacattcctaagcccgacccaatgttattgccgatttatgatgagacgggagcgaccttcgacctcttttctgtcaaagtggcgatggatctgtatgataagctcgccgaagttaaagatcctaaattcaccaattataccctttcgcgcgaggaagtcttacaacgggaaccacagctgaaccctaaacatttagttggtggcggtgtttaccttgattttcggaataatgatgcgcgcctagtgattgaaaacattaagaaggctcacgaaaatggtgggattatggcaagtcatgtgaaggcgaccggcctcttacatgatgatgatggccggatcaatggtatcaccgctgaagacttattgactggtgcatcgttcgagattcatgcccgaatcgtcatcaatacgaccggtccatggtcagacacgattcgtaagatggaccatactgaaaagtatcaatcccagatgcggccaaccaagggtgtacatttagtcgttgacgctgagaaactcccagtgccacaaccaacctattttgattctggtgatcaagatggccggatgatcttcgtggtgccacgtgaaaacaagacgtatttcggaacgactgatacggattatcatggtgatctgaaacacccgaccgttacgcaagaagatgttgattacttgttggaaatcgtcaaccgtcgctttccaactgctaaaatcaccttagatgatattgaggctagttgggccggattgcggccactgatcgccgctaacggtagttctgattataacggtggtaattcaggaaaaatcagtgataagagcttcaaggaagttatcaaggttgttgatcagtttgaaagtcaggaagccagtcgtgaagatgtcgaaagtgtcctgaatgacttggaaacttccttggcagaggacaaactcagtccgtcagcggtttcacgcggtagttcgttgactagtagtccagacgggctgttgacccttgctggtgggaagattactgattaccgtaaaatggctgcgggtgccatggcgctgattgccaagattttagcagataagtatgatgcccactttaatgaaatcaattcgaagaacctccccgtttctggtggcgatattgatccgcacaacgtggatgcaacgattgcattttatgctaaacaagggacggataatggtttgacgaatgatgaagcgttgcggattgcaaatatgtacggttccaatgctgcgcgggtctttagtttgattggtaaagttgaaccgacgcatggtctgagcttagctgaaacgattagcttacgttatgccttggatgaagaaatgaccctgacgccagtcgactacttgctgcggcgcactaaccacttgttattcatgcgagatacgctggatggcttaaaggatggcgtcatagcgacaatggccgattatcttggttgggatgctgcaacggtcaaagcacaaaccgaattattgaatcagacgattgctgaatcggacttaacagcactgaagcagggctaa

SEQ ID NO: 108549 - protein, 609 aa, Lactobacillus plantarum WCFS1
MAFSATTRQQNIERLQNETLDLLVIGGGITGAGVAIQSTAMNMKTGLIDMQDFAEGTSSRSTKLVHGGIRYLKTFDVGVVADTVKERAVVQGIAPHIPKPDPMLLPIYDETGATFDLFSVKVAMDLYDKLAEVKDPKFTNYTLSREEVLQREPQLNPKHLVGGGVYLDFRNNDARLVIENIKKAHENGGIMASHVKATGLLHDDDGRINGITAEDLLTGASFEIHARIVINTTGPWSDTIRKMDHTEKYQSQMRPTKGVHLVVDAEKLPVPQPTYFDSGDQDGRMIFVVPRENKTYFGTTDTDYHGDLKHPTVTQEDVDYLLEIVNRRFPTAKITLDDIEASWAGLRPLIAANGSSDYNGGNSGKISDKSFKEVIKVVDQFESQEASREDVESVLNDLETSLAEDKLSPSAVSRGSSLTSSPDGLLTLAGGKITDYRKMAAGAMALIAKILADKYDAHFNEINSKNLPVSGGDIDPHNVDATIAFYAKQGTDNGLTNDEALRIANMYGSNAARVFSLIGKVEPTHGLSLAETISLRYALDEEMTLTPVDYLLRRTNHLLFMRDTLDGLKDGVIATMADYLGWDAATVKAQTELLNQTIAESDLTALKQG

SEQ ID NO: 108550 - DNA, 1830 bp, Enterococcus faecalis V583
  CDS (1)..(1830): transl_table=11
atgactttctcaatagaaacacgccgacaatcaatcgacgctttaaaaacacaacacttagatgtcttaattattggtggtggcattactggcgcaggggttgccctgcaagccagtgccgctaaaatgaagacagggttaattgaaatgcaggatttcgcagagggcacctcttcacgatcaaccaaattagttcatggtggtatccgctatttgaaaacgtttgacgtggaggtggtagcagatacagtgaaagaacgagccgtcgttcaatccattgcgccacacatccctaaagcggatcccatgttattgccgatttatgatgagccaaatgcaacatttaatctattttctgtcaaaatagcaatggatttatatgatcagttagctgatgtaacaggtaccaagtacgccaactatctgttaacaaaagacgaggttttggcacgtgagccacaactaaaaagtgaaggtttacaaggtggcggtgtttatttagattaccgaaataatgatgctcgtttagttattgaaaatattaaacaagcagtagctgacggggcgcatgctgtgagtcgggttcaagcggtgggctttttatacaatgatgaagggaaaattactggcattcaagcaaaggacctactaactgacgaacagtttgagattcacgcagatgttgtgattaatactactggtccttggtcagataaattaagaggcttagacaaaaacgattcatttacaccacaaatgcgtccaaccaaaggggttcatttagttgtcgacaaaagccgtttaaatgttcctcaaccaacgtattttgatacaggtaaacaagatggccgcatggtcttcgttgttccaagagaagaaaaaacatattttgggacgacggatacagattaccatggagactttcaacatccaacagtagaacaaagtgatgtggattacctattggaagtagtcaataatcgttatccagaggtacaattgacaattgatgatattgaagccagctgggctggcttacgacctttaatttctgctaacggtggctcagattataatgggggaaacaatggcaaactttcagataaaagtattgatgaagtcattgatgtcgttgacagataccaaaaaaatcaaacagataaacgagaaattgaagaagtcctaaaccatctggaagacagtttggtggaaaataaagtcaatccttcagctgtctctcgaggcagctcattggaaagatcagcggatggcttgctcactttggctggtgggaaattaacagattatcgtaaaatggcagaaggtgcgatgaaaatgattcaaaccatcttagcagaagaataccagaaagaattcaccttaattgattctaaaaactatccagtttcaggcggaaaattgaaccctgcaacggtagacgaagaattagaagcgttggcaaaacatggcgtgtctaaagggttaagtgaaaaggatgcactatacttagctcatttatatggctccaacgtaccaactgtttttgaaatgattgatgatgccaaagtaattcctggtttaaccttaacagaaactgtctctttaaactatgcgatggaagaagaaatggctttaacacccgtcgactttttattgcgacggaccaaccacttattatttatgcgtgatcgtttggaccaagtgaaagcgggagtcattgaagaaatggcacagcattatcagtggacagcggaagaaagagcacgacacattgaaacattagaaaaagtaattgaagaatcagatttaaaaaatttgaaagtagggtga

SEQ ID NO: 108551 - protein, 609 aa, Enterococcus faecalis V583
MTFSIETRRQSIDALKTQHLDVLIIGGGITGAGVALQASAAKMKTGLIEMQDFAEGTSSRSTKLVHGGIRYLKTFDVEVVADTVKERAVVQSIAPHIPKADPMLLPIYDEPNATFNLFSVKIAMDLYDQLADVTGTKYANYLLTKDEVLAREPQLKSEGLQGGGVYLDYRNNDARLVIENIKQAVADGAHAVSRVQAVGFLYNDEGKITGIQAKDLLTDEQFEIHADVVINTTGPWSDKLRGLDKNDSFTPQMRPTKGVHLVVDKSRLNVPQPTYFDTGKQDGRMVFVVPREEKTYFGTTDTDYHGDFQHPTVEQSDVDYLLEVVNNRYPEVQLTIDDIEASWAGLRPLISANGGSDYNGGNNGKLSDKSIDEVIDVVDRYQKNQTDKREIEEVLNHLEDSLVENKVNPSAVSRGSSLERSADGLLTLAGGKLTDYRKMAEGAMKMIQTILAEEYQKEFTLIDSKNYPVSGGKLNPATVDEELEALAKHGVSKGLSEKDALYLAHLYGSNVPTVFEMIDDAKVIPGLTLTETVSLNYAMEEEMALTPVDFLLRRTNHLLFMRDRLDQVKAGVIEEMAQHYQWTAEERARHIETLEKVIEESDLKNLKVG

SEQ ID NO: 108552 - DNA, 1707 bp, Streptomyces avermitilis MA-4680
  CDS (1)..(1707): transl_table=11
gtgaggacagcgacactggggccggcggagcgcgccgagtcactggcgggaatggccgagcgcgagctggacgtgctggtcgtgggcggcggcgtggtcggcgcgggtaccgcgctggacgccgtgacacgcggcctgtccacaggcatcgtcgaggcacgggactgggcgtccggcacatccagcaggtccagcaagctgatacacggcggcctgcgctatctggagatgctcgacttcgcccttgtgcgcgaggcactcaaggagcgcgggctgctcctggagcggctggcgccgcacctcgtgaagcccgtcccgttcctctaccccttgcagcacaagggctgggagcggctgtacgcgggcgccggggtcgcgctgtacgacgccatgtcgatggcgcccggacacggccgcggactgcccacgcaccgccatctgacccgcagccacgccctgcgcgtcgcgccggccctgaagaaggaggcgctggtcggcgcgctccagtactacgacgcccagatggacgacgcccgctatgtggcgatgctggtgcgcacggcggcggcgtacggcgcgaaggcggcgaaccgcgcgcgcgtgaccgacttcctgcgcgagggcgagcgcgttgtcggtgccagggtgcaggacgtggaaggcggcggggagtacgagatccatgcccggcaggtcgtcaacgccacgggggtgtggaccgatgacacccaggcgatggtcggggagcgggggcagttccacgtacgggcgtccaagggcatacatctggtcgtgccgaaggaccggatccactccacgaccggtctgatcctgcggaccgagaagtccgtgctgttcgtgatcccgtgggggcgccactggatcgtcggcaccaccgacaccccctgggacctcgacaaggcacacccggccgcctccagcgcggacatcgactacctgctcgaacacgtgaactcagtgctgtcggtgcccctttcgcgcgacgacgtccagggcgtgtacgcgggtctgcggccgctgctcgccggagagtcggacgccaccagcaagctgtcgcgcgagcacaccgtggcccatccggtgccggggctggtggtcgtcgcgggcggcaagtacacgacgtaccgggtcatggccaaggacgcggtcgacgaggcggtgcacggcctcgaccagcgcgtcgccgactgcgtcaccgaggacattccgctgatcggcgccgaggggtaccgggcgctgtggaacgcgcgagcgcggatcgcggcccgcaccgggctccatgtggtgcgcgtggagcacctgctgaaccgttacggctcgctcgcggaggaactgctcgacctggtggcggccgatccctcgctgggcgcgccgctccaggccgccgacgactatctgcgggcggaaatcgtctatgccgcctcgcacgagggcgcgcggcacctggacgacgtactgacccggcgcacccgcatctcgatcgagacgttcgaccgcggcacacgcagcgcccgcgaggccgccgaactgatggcgccggtcctcggctgggacaaggaccagatcgagcgcgagatcgagcactacgagaagcgggtcgaggcggagcgggagtcgcagcgccagccggacgacctgacggcggacgcggcgcggctgggggcgccggacatcgtgccgcggtga

SEQ ID NO: 108553 - protein, 568 aa, Streptomyces avermitilis MA-4680
MRTATLGPAERAESLAGMAERELDVLVVGGGVVGAGTALDAVTRGLSTGIVEARDWASGTSSRSSKLIHGGLRYLEMLDFALVREALKERGLLLERLAPHLVKPVPFLYPLQHKGWERLYAGAGVALYDAMSMAPGHGRGLPTHRHLTRSHALRVAPALKKEALVGALQYYDAQMDDARYVAMLVRTAAAYGAKAANRARVTDFLREGERVVGARVQDVEGGGEYEIHARQVVNATGVWTDDTQAMVGERGQFHVRASKGIHLVVPKDRIHSTTGLILRTEKSVLFVIPWGRHWIVGTTDTPWDLDKAHPAASSADIDYLLEHVNSVLSVPLSRDDVQGVYAGLRPLLAGESDATSKLSREHTVAHPVPGLVVVAGGKYTTYRVMAKDAVDEAVHGLDQRVADCVTEDIPLIGAEGYRALWNARARIAARTGLHVVRVEHLLNRYGSLAEELLDLVAADPSLGAPLQAADDYLRAEIVYAASHEGARHLDDVLTRRTRISIETFDRGTRSAREAAELMAPVLGWDKDQIEREIEHYEKRVEAERESQRQPDDLTADAARLGAPDIVPR

SEQ ID NO: 108554 - DNA, 1593 bp, Rhodopirellula baltica SH 1
  CDS (1)..(1593): transl_table=11
atgcaacgtcaacgatcactgacgaaactcaaagaacgttccgaaccttgggacatcgtcatcattggtggcggtgcgaccggcgtcggaatcgcgatggatgccgccagtcgcggactggactgcttgttgctcgaacaagctgacttcggaaagggaacgtccagtcgtagcaccaagctggttcacggtggtgttcggtatcttcagcaaggcaacatcaccttggtgcgagatgcattgaaggaacgcacgttgcttcgcaataacgcgccgcaattggttcatgacatgccgttcctgattccctgtcaatctcgatgggaacggatgtactacgcgattggtttgaaggtctacgactttttggcgaccggaaatcgattcggacgatctcacgcaatcaatcagaaggagtcgcttgagagagtccctacgatcaaaaccgaaaaggccaacggcggagtcatttatcacgatgggcaattcgatgacacacggttgttgatcagtatggcaagaaccgcggatgaacagggggcttgtttgctgaactacttcgccgtcaccgatttgtcgaaggatgcccgcggcgatatcgatggcgtcgtggcagaagaccgtgagacgggcgaaacgcattccatcatggctcggcgagtcatcaatgccgccggtccattctgcgatgcggtccgtatgatggatgaacccgctgctgagaaaatgctggcggccagccaaggcgtgcacattgtcttgccaaggcgattctttcctggcgacattgcgatgatcgttcctaaaacatccgatggacgtgtcttgttcatcattccgtggcacaaccacgctgtcgttggaacgaccgacaccgccatcgagaacgtttctttagaaccaaaaccgcaagccggtgaaattgagtttctactcgaaacggcaaaggagtacttggtggaggctccaacccggtcggacgttctcagcgttttcacggggattcgacctctcgtcaaaggagacaaatcgtctcggacggcttcgctttctcgtgatcataccattcgtctatctgactctggattgatcacgattaccggaggcaagtggacgacggttcgcaaaatggcggaggattgcgtggatcgcgcgctcgcttcgactaagaattccgcaaatccattgaaggccaacgcctgccgaacggagacactgcatctgcacggctacgatccaaattccggttccaccaacaccgtcgcaggatcgggacgagggcactatggatcggatttgtccgagatcgaaagtctcgagcgtgaacacgtggagtgggcatcacctttgcaccatgagctctcaatcaccggtgccgaagtgatctgggcgacccgctatgaaatggcaaggaccgtcgaagatgtgcttgcgagacgaactcgttgcctgtttttgaattcggctgctgcgatcgcaatctccgagaccgtggcaaggctgatggcttccgaatcggatcgcgacgaagcttggatcagtgcccaagttgcatccttcgcgaaactttccgaagcgtaccgaatcgggtga

SEQ ID NO: 108555 - protein, 530 aa, Rhodopirellula baltica SH 1
MQRQRSLTKLKERSEPWDIVIIGGGATGVGIAMDAASRGLDCLLLEQADFGKGTSSRSTKLVHGGVRYLQQGNITLVRDALKERTLLRNNAPQLVHDMPFLIPCQSRWERMYYAIGLKVYDFLATGNRFGRSHAINQKESLERVPTIKTEKANGGVIYHDGQFDDTRLLISMARTADEQGACLLNYFAVTDLSKDARGDIDGVVAEDRETGETHSIMARRVINAAGPFCDAVRMMDEPAAEKMLAASQGVHIVLPRRFFPGDIAMIVPKTSDGRVLFIIPWHNHAVVGTTDTAIENVSLEPKPQAGEIEFLLETAKEYLVEAPTRSDVLSVFTGIRPLVKGDKSSRTASLSRDHTIRLSDSGLITITGGKWTTVRKMAEDCVDRALASTKNSANPLKANACRTETLHLHGYDPNSGSTNTVAGSGRGHYGSDLSEIESLEREHVEWASPLHHELSITGAEVIWATRYEMARTVEDVLARRTRCLFLNSAAAIAISETVARLMASESDRDEAWISAQVASFAKLSEAYRIG

SEQ ID NO: 108556 - DNA, 1605 bp, Bordetella pertussis Tohama I
  CDS (1)..(1605): transl_table=11
atgaccgcccctaccctcgctcccatcgacccgcccgcgcgcgcgcaactgcttaccgacctgcaaggcgcccccgattgggatgtcatcgtcatcggcggcggcgccaccggcctgggcaccgccgtcgatgccgccgcgcgcggctaccgcaccctgctggtcgaggccgccgacttcgccaagggcacctccagcaaggccaccaagctggtgcacggcggcgtgcgctacctggcgcagggcaatatcagcctggtgcgcgaggccctgcacgaacgcggcctgctcaaccgcaacgcgccgcacctggtgtggccgctgggcttcgtcgtgccggcctacagcctgctggaccagccgttctacggcgtcggcctgaagatgtacgacatgctggccggcaagctgaacctggcgcccagccgctggctgtcgcgcggcgaaacgctgcgccacgccgccaccgtggccgagcgcgtcaacggacgagccttgcgcggcggcatcctgtactacgacggccagttcgacgacgcgcgcctggccatcgccctgatgcgcaccctgtacgacctgggcggcgtggcgctgaactatgcgcgcgcggtcggcctgacgcgcacggacggccgcgtcgacggcgtgacggtggccgacgcgctgggcgagctgcgcgtgacgctgcgcgccaaatgcgtggtcaacgccaccggcgtgtgggtcgacgcggtgcgccgcatggacgaccccgccgcgcagaccatggtggcgcccagccagggcgtgcacctgacgctgccgcgcgacttcctgcccggcgaagacgccattctcatacccaagaccgacgacggccgggtgctgttcgtggtgccctggaacggccacaccatcgtcggcaccaccgacacgccgcgcaccgacctgccgctcgatccgcaggccggccagaacgaaatcgacttcatccttgccaccgcggcgcgctacctgagccgcaagcccacccgcgccgacgtgaccagcgtgtgggccggcctgcgcccgctggtcaaggccaccggcgaagcctcgaccaagtcgctgtcgcgcgaacacaccatcgtggtctccaagggcgggctggtcacggtcaccggcggcaaatggaccacctaccgcaagatggcccaggatgtggtcgacaccgccatcgagcacaagctgctggccgcggcgccatgccgcacgtccgagctgccgctgcatggcgcgccggccgacgggcagcccaacggcgcgccccacggcacgcccgacagctactacggcaccgacctggcgacgctgcgcgcgctgcccggcgccgaccgcatgctggtcaaggccagcgccctgaccgaggcgcacgtgcgctatgccgcccgccacgaactcgcgcgcaccgtggaggacgtgctggcccgccgcaatcgcgccctgttcctggacgccgaggccgccctgctggccgcgcccgaagtggcccgcatcctggcgcaggaactcggccacgacgaagcctggagccgcgccacgctggccgagttcgaggccgtggccgcgcactaccggctggcctga

SEQ ID NO: 108557 - protein, 534 aa, Bordetella pertussis Tohama I
MTAPTLAPIDPPARAQLLTDLQGAPDWDVIVIGGGATGLGTAVDAAARGYRTLLVEAADFAKGTSSKATKLVHGGVRYLAQGNISLVREALHERGLLNRNAPHLVWPLGFVVPAYSLLDQPFYGVGLKMYDMLAGKLNLAPSRWLSRGETLRHAATVAERVNGRALRGGILYYDGQFDDARLAIALMRTLYDLGGVALNYARAVGLTRTDGRVDGVTVADALGELRVTLRAKCVVNATGVWVDAVRRMDDPAAQTMVAPSQGVHLTLPRDFLPGEDAILIPKTDDGRVLFVVPWNGHTIVGTTDTPRTDLPLDPQAGQNEIDFILATAARYLSRKPTRADVTSVWAGLRPLVKATGEASTKSLSREHTIVVSKGGLVTVTGGKWTTYRKMAQDVVDTAIEHKLLAAAPCRTSELPLHGAPADGQPNGAPHGTPDSYYGTDLATLRALPGADRMLVKASALTEAHVRYAARHELARTVEDVLARRNRALFLDAEAALLAAPEVARILAQELGHDEAWSRATLAEFEAVAAHYRLA

SEQ ID NO: 108558 - DNA, 1605 bp, Bordetella parapertussis 12822
  CDS (1)..(1605): transl_table=11
atgaccgcccctaccctcgctcccatcgacccgcccgcgcgcgcgcaactgcttgccgacctgcaaggcgcccccgattgggatgtcatcgtcatcggcggcggcgccaccggcctgggcaccgccgtcgatgccgccgcgcgcggctaccgcaccctgctggtcgaggccgccgacttcgccaagggcacctccagcaaggccaccaagctggtgcacggcggcgtgcgctacctggcgcagggcaatatcagcctggtgcgcgaggccctgcacgaacgcggcctgctcaaccgcaacgcgccgcacctggtgtggccgctgggcttcgtcgtgccggcctacagcctgctggaccagccgttctacggcgtcggcctgaagatgtacgacatgctggccggcaagctgaacctggcgcccagccgctggctgtcgcgcggcgaaacgctgcgccacgccgccaccgtggccgagcgcgtcaatggacgagccttgcgcggcggcatcctgtactacgacggccagttcgacgacgcgcgcctggccatcgccctgatgcgcaccctgtacgacctgggcggcgtggcgctgaactatgcgcgcgcggtcggcctgacgcgcacggacggccgcgtcgacggcgtgacggtggccgacgcgctgggcgagctgcgcgtgacgctgcgcgccaaatgcgtggtcaacgccaccggcgtgtgggtcgacgcggtgcgccgcatggacgaccccgccgcgcagaccatggtggcgcccagccagggcgtgcacctgacgctgccgcgcgacttcctgcccggcgaagacgccattctcatacccaagaccgacgacggccgagtgctgttcgtggtgccctggaacggccacaccatcgtcggcaccaccgacacgccacgcaccgacctgccgctcgatccgcaggccggccagaacgaaatcgacttcatccttgccaccgcggcgcgctacctgagccgcaagcccacccgcgccgacgtgaccagcgtgtgggccggcctgcgcccgctggtcaaggccaccggcgaagcctcgaccaagtcgctgtcgcgcgaacacaccatcgtggtctccaagggcgggctggtcacggtcaccggcggcaaatggaccacctaccgcaagatggcccaggatgtggtcgacaccgccatccagcacaagctgctggccgcggcgccatgccgcacgtccgagctgccgctgcatggcgcgccgaccgacgggcagcccagcggcgcgccccacggcacgcccgacagctactacggcaccgacctggcgacgctgcgcgcgctgcctggcgccgaccgcatgctggtcaaggccagcgccctgaccgaggcgcacgtgcgctatgccgcccgccacgaactcgcgcgcaccgtggaggacgtgctggcccgccgcaatcgcgccctgttcctggacgccgaggccgccctgctggccgcgcccgaagtggcccgcatcctggcgcaggaactcggccacgacgaagcctggagccgcgccacgctggccgagttcgaggccgtggccgcgcactaccggctggcctga

SEQ ID NO: 108559 - protein, 534 aa, Bordetella parapertussis 12822
MTAPTLAPIDPPARAQLLADLQGAPDWDVIVIGGGATGLGTAVDAAARGYRTLLVEAADFAKGTSSKATKLVHGGVRYLAQGNISLVREALHERGLLNRNAPHLVWPLGFVVPAYSLLDQPFYGVGLKMYDMLAGKLNLAPSRWLSRGETLRHAATVAERVNGRALRGGILYYDGQFDDARLAIALMRTLYDLGGVALNYARAVGLTRTDGRVDGVTVADALGELRVTLRAKCVVNATGVWVDAVRRMDDPAAQTMVAPSQGVHLTLPRDFLPGEDAILIPKTDDGRVLFVVPWNGHTIVGTTDTPRTDLPLDPQAGQNEIDFILATAARYLSRKPTRADVTSVWAGLRPLVKATGEASTKSLSREHTIVVSKGGLVTVTGGKWTTYRKMAQDVVDTAIQHKLLAAAPCRTSELPLHGAPTDGQPSGAPHGTPDSYYGTDLATLRALPGADRMLVKASALTEAHVRYAARHELARTVEDVLARRNRALFLDAEAALLAAPEVARILAQELGHDEAWSRATLAEFEAVAAHYRLA

SEQ ID NO: 108560 - DNA, 1605 bp, Bordetella bronchiseptica RB50
  CDS (1)..(1605): transl_table=11
atgaccgcccctaccctcgctcccatcgacccgcccgcgcgcgcgcaactgcttgccgacctgcaaggcgcccccgattgggatgtcatcgtcatcggcggcggcgccaccggcctgggcaccgccgtcgatgccgccgcgcgcggctaccgcaccctgctggtcgaggccgccgacttcgccaagggtacctccagcaaggccaccaagctggtgcacggcggcgtgcgctacctggcgcagggcaatatcagcctggtgcgcgaggccctgcacgaacgcggcctgctcaaccgcaacgcgccgcacctggtgtggccgctgggcttcgtcgtgccggcctacagcctgctggaccagccgttctacggcgtcggcctgaagatgtacgacatgctggccggcaagctgaacctggcgcccagccgctggctgtcgcgcggcgaaacgctgcgccacgccgccaccgtggccgagcgcgtcaatggacgagccttgcgcggcggcatcctgtactacgacggccagttcgacgacgcgcgcctggccatcgccctgatgcgcaccctgtacgacctgggcggcgtggcgctgaactatgcgcgcgcggtcggcctgacgcgcacggacggccgcgtcgacggcgtgacggtggccgacgcgctgggcgagctgcgcgtgacgctgcgcgccaaatgcgtggtcaacgccaccggcgtgtgggtcgacgcggtgcgccgcatggacgaccccgccgcgcagaccatggtggcgcccagccagggcgtgcacctgacgctgccgcgcgacttcctgcccggcgaagacgccattctcatacccaagaccgacgacggccgagtgctgttcgtggtgccctggaacggccacaccatcgtcggcaccaccgacacgccacgcaccgacctgccgctcgatccgcaggccggccagaacgaaatcgacttcatccttgccaccgcggcgcgctacctgagccgcaagcccacccgcgccgacgtgaccagcgtgtgggccggcctgcgcccgctggtcaaggccaccggcgaagcctcgaccaagtcgctgtcgcgcgaacacaccatcgtggtctccaagggcgggctggtcacggtcaccggcggcaaatggaccacctaccgcaagatggcccaggatgtggtcgacaccgccatccagcacaagctgctggccgcggcgccatgccgcacgtccgagctgccgctgcatggcgcgccgaccgacgggcagcccaacggcgcgccccacggcacgcccgacagctactacggcaccgacctggcgacgctgcgcgcgctgcccggcgccgaccgcatgctggtcaaggccagcgccctgaccgaggcgcacgtgcgctatgccgcccgccacgaactcgcgcgcaccgtggaggacgtgctggcccgccgcaatcgcgccctgttcctggacgccgaggccgccctgctggccgcgcccgaagtggcccgcatcctggcgcaggaactcggccacgacgaagcctggagccgcgccacgctggccgagttcgaggccgtggccgcgcactaccggctggcctga

SEQ ID NO: 108561 - protein, 534 aa, Bordetella bronchiseptica RB50
MTAPTLAPIDPPARAQLLADLQGAPDWDVIVIGGGATGLGTAVDAAARGYRTLLVEAADFAKGTSSKATKLVHGGVRYLAQGNISLVREALHERGLLNRNAPHLVWPLGFVVPAYSLLDQPFYGVGLKMYDMLAGKLNLAPSRWLSRGETLRHAATVAERVNGRALRGGILYYDGQFDDARLAIALMRTLYDLGGVALNYARAVGLTRTDGRVDGVTVADALGELRVTLRAKCVVNATGVWVDAVRRMDDPAAQTMVAPSQGVHLTLPRDFLPGEDAILIPKTDDGRVLFVVPWNGHTIVGTTDTPRTDLPLDPQAGQNEIDFILATAARYLSRKPTRADVTSVWAGLRPLVKATGEASTKSLSREHTIVVSKGGLVTVTGGKWTTYRKMAQDVVDTAIQHKLLAAAPCRTSELPLHGAPTDGQPNGAPHGTPDSYYGTDLATLRALPGADRMLVKASALTEAHVRYAARHELARTVEDVLARRNRALFLDAEAALLAAPEVARILAQELGHDEAWSRATLAEFEAVAAHYRLA

SEQ ID NO: 108562 - DNA, 1734 bp, Corynebacterium diphtheriae NCTC 13129
  CDS (1)..(1734): transl_table=11
gtggcaactatgaccacgaaatcccattgcacattcaaccccgactactaccaggacgtctggcagcgcttcggtgaagaagaatacgacgttgtcgtcatcggtggcggctccgtcggcgcaggcgcaggcctcgacgcagccatccgcggcctcaaagtggccgtcgtagagtcccgagacttcgcagccggcacctcctcacgatcatcaaaaatgttccacggtggcctgcgatatctcgccatgctggacttcaagctagtggccgaatccctccacgagcgcgaactcaacatgtcgacgctcgcaccgcacctagtcaagccgctgaaattcctcttccccctcacacaccacgtgtgggaacgggtgatgatgttcggcggctttactctttacgacctcatgggcggcgcaaaatcagtccccatgcaaaagcactactcccgcaagggaacactcgccatggccccaggactaaaagacgacgctgtggtcggatccgtccgctactttgacacgcttgtcgacgacgcccgccacaccatgacagtcctacgcaccgccggcgaactcggcgcagatgttcgcccctccacccaagtagtcggctttgaaaaagacggccaacgcgtggtcggcgccatcctccaagacaccgacaccggcgaacaaaccaccatccgcggcaaggtattcatcaacgccaccggcgtatggaacgaccacattgaaaagctcgccggcggcaacggccccttctcggtccacgcctccaagggcgtacacatcgtggtaccaaagaacgtctttgatgccgacgcagccatgtgctttgtcaccgaaaagtccgtgctcttcgtgatcccatggggtgaatactggatcatcggcaccaccgacaccgactgggatctcaaccgcgcagaccccgcaccaactgccgccgacatcaactacatcctcgacgaagtcaaccagcgagtccgccggcccatccaacactccgacatcgtcggcgtgtactccggactccgcccgctgctctccggcaaatccgacaccaccaccaagctgtcgcgcaaccacgccgtagcaaaggtcatgcctggactcgtctccgtcgccggcggtaagtacaccacctaccgtgtgatcggcaaggatgcagtcgacctcgccaccgaagacttggacttccgcgtaccagcctccgaatcggaacgcaccccgatcctcggtgccgacggctaccacgccctacaaaaccaagcaccacgcatcgcccgcaccttcggcaccacagaggacgtcgtcgagcacctgctcggccgctacggctccctcgtccatgaggtcctagaaccgagcgtcgataaacctgagctgctcgaacccatcccaggcgcgccgggctacattaaagcagaggccgtctatgccgtcacccacgagggtgccctgcacgtcgaggacatcgtggaacgtcgcctacgtgccggcatcgaatacgccgaccgtggcgttgccgcagctcccgccatcgccgagctcgttgccgactaccttggctgggacgccgagcgcaccgccgccgaggtcaccgcgttcaccgaccgcgtgtccgccgaaatcgccgccgagaaggagctcactgacaaagccgccaacgagcacatcgtggcaggctccgcggtgcgcagctatgtggatgtgtcaggtgataactaa

SEQ ID NO: 108563 - protein, 577 aa, Corynebacterium diphtheriae NCTC 13129
MATMTTKSHCTFNPDYYQDVWQRFGEEEYDVVVIGGGSVGAGAGLDAAIRGLKVAVVESRDFAAGTSSRSSKMFHGGLRYLAMLDFKLVAESLHERELNMSTLAPHLVKPLKFLFPLTHHVWERVMMFGGFTLYDLMGGAKSVPMQKHYSRKGTLAMAPGLKDDAVVGSVRYFDTLVDDARHTMTVLRTAGELGADVRPSTQVVGFEKDGQRVVGAILQDTDTGEQTTIRGKVFINATGVWNDHIEKLAGGNGPFSVHASKGVHIVVPKNVFDADAAMCFVTEKSVLFVIPWGEYWIIGTTDTDWDLNRADPAPTAADINYILDEVNQRVRRPIQHSDIVGVYSGLRPLLSGKSDTTTKLSRNHAVAKVMPGLVSVAGGKYTTYRVIGKDAVDLATEDLDFRVPASESERTPILGADGYHALQNQAPRIARTFGTTEDVVEHLLGRYGSLVHEVLEPSVDKPELLEPIPGAPGYIKAEAVYAVTHEGALHVEDIVERRLRAGIEYADRGVAAAPAIAELVADYLGWDAERTAAEVTAFTDRVSAEIAAEKELTDKAANEHIVAGSAVRSYVDVSGDN

SEQ ID NO: 108564 - DNA, 1554 bp, Geobacter sulfurreducens PCA
  CDS (1)..(1554): transl_table=11
atgaagcgcgaggatctgctgcggcatctggccgaaaccgaggtctgggacatgatcgtgatcggcgggggcgccacgggcctcggcacggcggtggaggcggccggccgcggctaccggacccttctcctggaacagggggactttgcccaggggacgtccagccggagcaccaagctgatccacggcggggtccgctacctgcagcagggaaacctgacgctggtgctggaggcgctgcgggagcggggcctgctcatccgcaacgcaccgcacctggtccacaacctttcctttgtggtgccgctctacgactggtgggaagggcccttctacgggatcgggctcaagctgtacgacgtcctggccggcaagctggggctggggccgtcccgcctgctgtcgcgggaagagaccctgggccacatcccgaccgtggagccccacggcctgcgcggcggggtgatctaccacgacggccagttcgacgactcccgcctcgcgatcagcctggccctgaccctggccgacctgggcggggtggcgctcaatcacttcccggtgaccggcatcatcagccgcgacggtctcgtggccggggtggaggcgcgggaccgggagaccggcggcgccttcaggatcatggggcgggcggtgatcaatgccgccggacctttcgtggacggggtgcggcggctggccgacccggcggcccgggacctcatcgccccgagccagggggtgcacctggtgctggacggctcgtttctgcccggcgacagcgcgatcatggttccccacaccgacgacggtcgcgtcctgttcgcggtcccctggcacggccggaccgtggtgggcaccaccgatacgcccatcccggcggccgggctggagccgcgcccgctgccggaagagatcgactttctcctgtcccatgcggcccgctacctgacccggcatcccgagcgccgggacgtgctgagcaccttcgccggcatccggcccctggtccgcagcgacagcggcggcgacaccgcctccctttcccgggaccacaccctgctggtggagggaagcggcctggtcaccattgccggcggcaagtggaccacctaccggaagatgggggaggacacggttaccgccgctgcccaggtggccggcctggaccatcggccgtcggtcacggagacgttgcgtatccacggctggcaggaggatgcgacggagggaccgctgcaggtctacggcagcgatgccgcagccctggagcaactcctgcgggaaaacgccgcctggcgtgagcccctgcacccggcgctcccctactgcgccggggaggtcgtctggggggtgcgtcacgagtgggcccgcacggtggaggatgtcctggcccgccgcaccagggcgctgctgctggatgcccgtgccgccgtggccgcggcgccgcgggtggcggaactgatggcgcgggagctgggacgggacagcgactggcaggcggcgcaggttgccgcgtttacccatctggcccggggctacctgccggagtga

SEQ ID NO: 108565 - protein, 517 aa, Geobacter sulfurreducens PCA
MKREDLLRHLAETEVWDMIVIGGGATGLGTAVEAAGRGYRTLLLEQGDFAQGTSSRSTKLIHGGVRYLQQGNLTLVLEALRERGLLIRNAPHLVHNLSFVVPLYDWWEGPFYGIGLKLYDVLAGKLGLGPSRLLSREETLGHIPTVEPHGLRGGVIYHDGQFDDSRLAISLALTLADLGGVALNHFPVTGIISRDGLVAGVEARDRETGGAFRIMGRAVINAAGPFVDGVRRLADPAARDLIAPSQGVHLVLDGSFLPGDSAIMVPHTDDGRVLFAVPWHGRTVVGTTDTPIPAAGLEPRPLPEEIDFLLSHAARYLTRHPERRDVLSTFAGIRPLVRSDSGGDTASLSRDHTLLVEGSGLVTIAGGKWTTYRKMGEDTVTAAAQVAGLDHRPSVTETLRIHGWQEDATEGPLQVYGSDAAALEQLLRENAAWREPLHPALPYCAGEVVWGVRHEWARTVEDVLARRTRALLLDARAAVAAAPRVAELMARELGRDSDWQAAQVAAFTHLARGYLPE

SEQ ID NO: 108566 - DNA, 1755 bp, Mycobacterium avium subsp. paratuberculosis K-10
  CDS (1)..(1755): transl_table=11
gtgagcgatccgatccacgcactcggcgagcccggctcgccggcttcggcgctgggaccgcggcaacgcgcggcggcctgggacaggctgggcgccgagcagttcgacgtggtggtgatcggcggcggcgtggtgggatcgggctgcgcgctggacgccgccacccgcgggctcaaggttgcgctggtggaggcccgcgacttcgcgtcgggcacctcgagccgttcctcgaagatgttccacggcggcctgcgctatctcgagcagctggagttcgggctggtgcgcgaggccctctacgagcgcgagctgtcgctgaccacgctggcaccgcacctggtcaagccgatgccctttctgttcccgctgaccaatcggttgtgggaacggccctacatcgccgccggcatctttctctacgaccggctgggcggggcgaaatccgttccggcgcaaaagcatttgacccgcgccggtgcgctgcggctgtgcccgggcctcaaacgcagcgcgctgatcggcggaatccgctactacgacaccatcgtcgacgacgcccggcacacactgaccgtcgcgcgcaccgccgcgcactacggcgtggtggtgcgcaactccacccaggtggtcgccctgctgcgggagggcgaccgggtgaccggggtgcgggtgcgcgactccgaagacggctcggtcaccgaggtccgcgggcatgtggtggtcaacgcgaccggcgtgtggaccgacgagatccaggcattgtccaagcagcgcgggcgatttcaggtgcgggcatccaagggggtgcacgtggtggtgccgcgcgaccgcatcgtcagcgacgtggcgatcatcctgcgcaccgagaagtcggtgatgttcgtcatcccgtggggcagccactggatcatcggaaccaccgacaccgactgggatctggacctggcccaccccgcggccaccaaggccgacatcgactacatcctgtccaccgtcaacaccgtgctggccatacccctcacccacgccgacatcgacggggtgtatgcggggctgcggccgctgctggccggggagagcgaggaaacatccaagctctcccgcgagcacgcggtggcggtgcccgcacccggcttggtggccatcgccggcggcaagtacaccacctaccgggtgatggctgccgacgcgattgatgctgcggcgcaattcattccggcccgggtggcgccgtcgatcacggagaaggtcagcctgctgggggccgacggctactgcgcgctgatcaatcaggccgagcacgtcgcgcagctgcgcgggttgcatccctaccgggtgcgccacctgctggaccgctacggctcgctgatcggtgacgtgctggcgctggccgccgatcggcccgacctgctcaacccgatcacggaggcgccgggctatctgcgggtggaggcgctgtacgccgtaaccgccgagggcgctttgcatttggaggacatcctggcccgccggatgcgcatctccatcgaatactcgcatcgtggcgtcgactgtgcccgcgaggtggccgacgtggtcgcgccggtgctggggtggacggccggcgacgtcgagcgcgaggtggccaactacaccgcccgggtgcaggccgagatcctgtcgcaggcccagcccgacgacgtgtcggccgacgagctgcgcgccagcgcgcccgaggcgcgcgccgagatcctcgagccggtgccgctcaattga

SEQ ID NO: 108567 - protein, 584 aa, Mycobacterium avium subsp. paratuberculosis K-10
MSDPIHALGEPGSPASALGPRQRAAAWDRLGAEQFDVVVIGGGVVGSGCALDAATRGLKVALVEARDFASGTSSRSSKMFHGGLRYLEQLEFGLVREALYERELSLTTLAPHLVKPMPFLFPLTNRLWERPYIAAGIFLYDRLGGAKSVPAQKHLTRAGALRLCPGLKRSALIGGIRYYDTIVDDARHTLTVARTAAHYGVVVRNSTQVVALLREGDRVTGVRVRDSEDGSVTEVRGHVVVNATGVWTDEIQALSKQRGRFQVRASKGVHVVVPRDRIVSDVAIILRTEKSVMFVIPWGSHWIIGTTDTDWDLDLAHPAATKADIDYILSTVNTVLAIPLTHADIDGVYAGLRPLLAGESEETSKLSREHAVAVPAPGLVAIAGGKYTTYRVMAADAIDAAAQFIPARVAPSITEKVSLLGADGYCALINQAEHVAQLRGLHPYRVRHLLDRYGSLIGDVLALAADRPDLLNPITEAPGYLRVEALYAVTAEGALHLEDILARRMRISIEYSHRGVDCAREVADVVAPVLGWTAGDVEREVANYTARVQAEILSQAQPDDVSADELRASAPEARAEILEPVPLN

SEQ ID NO: 108568 - DNA, 1683 bp, Bacillus cereus ATCC 10987
  CDS (1)..(1683): transl_table=11
atgaaattttcaagtaaacaacgtaaagacgtattaaacggagtaaataaacaagaattagatgtgatcgtaattggtggaggtattactggttctggtattgcattagatggagcaacacgcgggttatcaacaattgtgtttgaaatgcaggactttgcagcaggtacatcaagtcgttcaacgaagcttgtacacggtggtctacgttatttaaaacaacttgaagtgaaaatggtagcagaggtggggaaagagcgtgcgatcgtatatgagaacggtccccatgtaacaacaccagagtggatgttacttccgttccatacaggtggtacgttcggatcattcagtacatcaattggtcttcgtgtatacgacttcttagcaggtgtaaaacgaagtgagcgcagaaaaatgtttaaccgtgaagaaacactgaagaaagagcctcttgtaaaacaagaaggattaaaaggcggcggttactacgtagaatatcgtactgatgatgcgcgtcttacaattgaagtaatgaaagaagcaattgagcacggtgcaaaagctgttaactatgcaaaagtagatagtttcttatataaagatggaaaagtatgtggtgtacgtgtaatcgatttactagatggtgaagtatacgaagtttacggtaagaaaattgtaaacgcagctggtccttgggtagatacacttcgtgaaaaagataactcgaaaaaaggaaaagtacttcagttatcaaaaggtgttcacttagtaattgatcaaaaacgtttcccattagggcaagcaatttacttcgatacaccagataaacgtatggtattcgcgattccacgcggcgggaaaacttatgtaggtacaacagatacgttctatgataaagacgcagctgtaccacaaatgacaacagaagatcgcacatacatcattaatgcgattaactacatgttcccaagcgtaaaaattacggaaaaagacatcgagtcaagctgggctggcgtacgtccgttaatttacgaagaaggtaagagtgcatctgaaatttctcgtaaagacgaaatttggacttctgaatctggtttaattacaatcgcaggtggtaaattaacaggataccgcaaaatggctgaaatggtagtagactatgtaacgaacttactacaaaaagaaggccatagtgcatatccgaagagcacaacgaaacatatgccaatctctggtggacatgtagatggttctaaaggattaccagcatttatcgcgaaaaaagcaggcgagggtacgaaatacggtttaacgacagcacaagcagaagaattcgcgaaattctatggctctaacgttgacgtattgttcgaattagcgaaaaaacataaagacgaagcgaaagaatacaacatgccgctagacgttctaatcccacttgtatacgcaatggattacgaaatgacagcaaaaccagtcgacttcttcgtacgccgcagaggcgctgtattcttcaacattcactgggtatacgagtggaaagaagcagtgatcaactacatggctgcaaaactaggctggagcaaagaagagcaaatgaaatacacagcagaactagaaaaagcattaacagacgctgtcattcctgtagatcaacaagagcatgcagctgcattagcgtaa

SEQ ID NO: 108569 - protein, 560 aa, Bacillus cereus ATCC 10987
MKFSSKQRKDVLNGVNKQELDVIVIGGGITGSGIALDGATRGLSTIVFEMQDFAAGTSSRSTKLVHGGLRYLKQLEVKMVAEVGKERAIVYENGPHVTTPEWMLLPFHTGGTFGSFSTSIGLRVYDFLAGVKRSERRKMFNREETLKKEPLVKQEGLKGGGYYVEYRTDDARLTIEVMKEAIEHGAKAVNYAKVDSFLYKDGKVCGVRVIDLLDGEVYEVYGKKIVNAAGPWVDTLREKDNSKKGKVLQLSKGVHLVIDQKRFPLGQAIYFDTPDKRMVFAIPRGGKTYVGTTDTFYDKDAAVPQMTTEDRTYIINAINYMFPSVKITEKDIESSWAGVRPLIYEEGKSASEISRKDEIWTSESGLITIAGGKLTGYRKMAEMVVDYVTNLLQKEGHSAYPKSTTKHMPISGGHVDGSKGLPAFIAKKAGEGTKYGLTTAQAEEFAKFYGSNVDVLFELAKKHKDEAKEYNMPLDVLIPLVYAMDYEMTAKPVDFFVRRRGAVFFNIHWVYEWKEAVINYMAAKLGWSKEEQMKYTAELEKALTDAVIPVDQQEHAAALA

SEQ ID NO: 108570 - DNA, 2163 bp, Strongylocentrotus purpuratus
  CDS (1)..(2163)
atggtggtgcgaaaggcactgattgggggtgccctcctcggagctggagcgattacggctggatacatcgtatccaaggacaacgataagaaattggctcagagccgaaaagctcaggttgtagcagctgagctacgcaatgtgcactacatatcatctctcccgacgagagagcagcagatccaatcactacagcacacgcatgaatacgatgtcttggttatagggggcggagcaactggttgtggagtggctcttgatgcagttagtagaggtctgaagactgcccttgtagagaagtatgatttttctagtggtaccagcagtcgaagcaccaagctgattcatggaggtgtacgctaccttcaaaaagctattttaggtctagattatgaccagtacaagttagtgaaggaggctttacacgagagagctaatttattggaaatagccccacatctttctagccctctacctattatgcttccagtttacaaactatggcagcttccttactactgggctggtatcaaagcatatgatttagttgccgggagacagaacttacgatcaagctatttcttgtccaaggaacgagccttggagaggttccccatgctgaaacgagacaaacttgttggcgctatcgtctactatgacggccagcacaatgatgctagaatgaatattgcaatagcactgacagcggccaggatgggagccacactggccaaccatacagaggtacttgatctgatcaagtttaagaatgaggaaggagaggaggaggtgagaggagccagactcagggatagaatgacaggtaaagaattcagtgtgatgtccaagtgtgtgatcaatgcaacaggaccgtttacagacagcattagacagatggctgtcccagaaatcaagaagatttgccaaccaagctcaggggttcacatagtactaccagattattacagccctgaagctatgggtctgttagatccatctaccagcgatggacgtgtcatcttcttccttccgtggcagaagtttactcttgccggcacaacagatagaccttgtgaagtcactcatcatccttccccatcagaagctgatattcagttcatcttgaaagaaatcaaagactacctcagtaaagatgtcaccgtaagacgaggtgatgtaatggcggcatggagtgggatcagacctctagtgacggaccccaactctaagaacaccgaatctctctcaagaaatcatgttattgatgtctcccataacaaactcgtcacaattgcaggtggtaaatggacgacataccgcagcatggccgtggatgctattgatgcagcagtagagacgtgtggtcttgaacccaggcatagttcattgactgatgggttactgctcgagggcgctcatggttggacacctaccatgtttatcagactcattcaagactttggactcgaaaatgaggttgcccaacatttgtccagcacctatggagacaaggcagtagaggtagcccgattggcaagcttgacaggaaagagatggccagtagtaggcaagagactcgtggaggatttcccttacattgaagcagaggtggtgtatgcagtgaaggagtatgcttgtactgcagtggatgtgctggctaggaggacacgtcttgcctttctcaatgtccaagcagctgaagaagctctacctaggatcgttgagatcatggccaagctactcagctggaacaagactaaacaagagatgatgcttgccgatggaagaagatttttgaatgaagagatgggatataactgccgagcagacctcatgactgtacccatcaacttcactgagggggagaaagagaagtacaccaagcgtttccagatgttagacaaggagaagaaaggatacattactcctaatgacatgagacagttcttgcagagtgctggagatgatttgactgaagatcagctacgcagcatgatgaatgaagtagattgtaacaagaatggcagggtagaactcacggaattcctacagctcatgagtgcaataaggactggagcaatggccaacattcgcctggagctggcgctcaacaaatgggagcgtaaactgattcctacctacaggagcggaggtggagtatag

SEQ ID NO: 108571 - protein, 720 aa, Strongylocentrotus purpuratus
MVVRKALIGGALLGAGAITAGYIVSKDNDKKLAQSRKAQVVAAELRNVHYISSLPTREQQIQSLQHTHEYDVLVIGGGATGCGVALDAVSRGLKTALVEKYDFSSGTSSRSTKLIHGGVRYLQKAILGLDYDQYKLVKEALHERANLLEIAPHLSSPLPIMLPVYKLWQLPYYWAGIKAYDLVAGRQNLRSSYFLSKERALERFPMLKRDKLVGAIVYYDGQHNDARMNIAIALTAARMGATLANHTEVLDLIKFKNEEGEEEVRGARLRDRMTGKEFSVMSKCVINATGPFTDSIRQMAVPEIKKICQPSSGVHIVLPDYYSPEAMGLLDPSTSDGRVIFFLPWQKFTLAGTTDRPCEVTHHPSPSEADIQFILKEIKDYLSKDVTVRRGDVMAAWSGIRPLVTDPNSKNTESLSRNHVIDVSHNKLVTIAGGKWTTYRSMAVDAIDAAVETCGLEPRHSSLTDGLLLEGAHGWTPTMFIRLIQDFGLENEVAQHLSSTYGDKAVEVARLASLTGKRWPVVGKRLVEDFPYIEAEVVYAVKEYACTAVDVLARRTRLAFLNVQAAEEALPRIVEIMAKLLSWNKTKQEMMLADGRRFLNEEMGYNCRADLMTVPINFTEGEKEKYTKRFQMLDKEKKGYITPNDMRQFLQSAGDDLTEDQLRSMMNEVDCNKNGRVELTEFLQLMSAIRTGAMANIRLELALNKWERKLIPTYRSGGGV

SEQ ID NO: 108572 - DNA, 2160 bp, Nasonia vitripennis
  CDS (1)..(2160)
atggcgaccctaaaattgttggcggctggcgcgagcgcgatcagcgccggagccctcacctcgtactacatgctcacgcccgaacaaccggtacacgcggaaaaagctcgacctaagaggaggcagctgccgacccgagaggaccaggtgaaggcgctgaagagcggcgacacctacgacgtcctgatcatcggaggaggcgccaccggcgccggttgcgcgctcgacgcgtgcacgcgaggactgaagacggcgttgatagagggcgacgacttcgcctcgggcacctcctccaggagcaccaagctcatccacggcggtgtcaggtacctgcagaaggccatcatgcagctggacatcgagcagtacaggatggtcaaggaggcgcttcacgagcgggcggccatgatccacaacgctccccacctggcgcatcctctgcccatcatgcttccagtttacacatggtggcagatcccgtactactggttcggcatcaagatgtacgacatcgtggccggcagcaaaaccgtcaagtcctcgtactacctcagcaggcagaacgccctcgagctgtttcccatgttgaagggcgacaaactcaccggagccatcgtctactacgacggacaacaagacgacgccagaatgaacttggcggtggcgctgaccgcctcgaggcacggagcgactgtcgtcaaccacgtcagcgtactgaatctcctcaaaggcttggacagagatggcaagcgagtgctgacgggagcccgcgtcaaagacgaactgaccggcgagcagtgggacgtgaaggcgagggcgatcatcaacgcgaccggtcccttcaccgacagcattcgaaaaatggacgaccagagcgtcccggagatctgctgcccgtcgtccggcgtccacatcgtcctgcccggttactacagccccgaccagatgggactgctcgatccttcgacgagcgacggccgcgtcatcttcttcctgccctggcagaagcacacgatcgccggcacgacggacctgccctgcaacatcacgcacaaccccaagcccaccgaggacgagatcatgttcatcctgcaggaggtgaagaactacctgaacccggacgttgaagtgcgacgaggcgacgtgctctcggcctggagcggcatccggcccctcgtctccgaccccaacaagcccaacacccagtctctggcgcgcaaccacatcgtacacataagcccttcgaatctcatcacgatagccggcggcaagtggaccacctacagggctatggctcaggagaccatcgacgcggccatcaaggcctgcgatctgaagcccgagcgatcctgccagactgacggtctccacctcgaaggagcccagggcttcaccccgacgatgtacatccgactggtgcaggactttggtctcgagtgcgaggttgcccagcacctggccaaggcctacggtgaccgcgccttcgccgtcgcgaagatggccgcgctgactggcaagcggtggcccatcatcggcaagaagctgcaccccgagttcccctacatcgacgctgagatccgttacggttgccgagagtacgcgcgaactgcgatcgacatgatcgcgcgcaggctcagactggctttcctgaacgtccaggcggcccaggaagctctgcccatgatcgtcgacatcatggccgaggagctcaagtggagcgaggacgagaagaagaagcagctgaaggcggccaccgaattcatagccaacgagatgggacaggtggtgaacagggcctctcgcgacaagatacccatcaatctcaccaaggacgagattcagttgtacatcaagcggttccagatcatcgacaaggaccgcaagggatacgtgtcaatcaacgacatcagacgaggacttaagctgtttggtgacaaggatgtgccgggcgaagagcttcacgaaatcctaaaagaaatcgacactaacatgaacggtcaagtcgaactggacgaataccttcagatgatgtcggcgataaagtccgggcacgtggcctactcgcgtttcgcgcggatggccgaaatggaggaggcgcagcacgagaaggaatcgctcaagaagaagattagcgtcgaacggtctggcggtggactctaa

SEQ ID NO: 108573 - protein, 719 aa, Nasonia vitripennis
MATLKLLAAGASAISAGALTSYYMLTPEQPVHAEKARPKRRQLPTREDQVKALKSGDTYDVLIIGGGATGAGCALDACTRGLKTALIEGDDFASGTSSRSTKLIHGGVRYLQKAIMQLDIEQYRMVKEALHERAAMIHNAPHLAHPLPIMLPVYTWWQIPYYWFGIKMYDIVAGSKTVKSSYYLSRQNALELFPMLKGDKLTGAIVYYDGQQDDARMNLAVALTASRHGATVVNHVSVLNLLKGLDRDGKRVLTGARVKDELTGEQWDVKARAIINATGPFTDSIRKMDDQSVPEICCPSSGVHIVLPGYYSPDQMGLLDPSTSDGRVIFFLPWQKHTIAGTTDLPCNITHNPKPTEDEIMFILQEVKNYLNPDVEVRRGDVLSAWSGIRPLVSDPNKPNTQSLARNHIVHISPSNLITIAGGKWTTYRAMAQETIDAAIKACDLKPERSCQTDGLHLEGAQGFTPTMYIRLVQDFGLECEVAQHLAKAYGDRAFAVAKMAALTGKRWPIIGKKLHPEFPYIDAEIRYGCREYARTAIDMIARRLRLAFLNVQAAQEALPMIVDIMAEELKWSEDEKKKQLKAATEFIANEMGQVVNRASRDKIPINLTKDEIQLYIKRFQIIDKDRKGYVSINDIRRGLKLFGDKDVPGEELHEILKEIDTNMNGQVELDEYLQMMSAIKSGHVAYSRFARMAEMEEAQHEKESLKKKISVERSGGGL

SEQ ID NO: 108574 - DNA, 2058 bp, Magnaporthe grisea 70-15
  CDS (1)..(2058)
atgtccaggttcgctcgcgggagcatcctgcggcgcctggcagccccgacggccatcacggccctcggtggtagcctcgtcctatacgcctatcgcccgcgaaacatcccgggctttgaggacccggccgttccgccaccaacctacggcgcggatggcacatttaaacttcccaggtttccgcgcacgaaatcgcgcgaggagcagatcgccatcctgcagcgcagctctgaccccaaagccgccgacaaggacgagggtgtctatgatatgcttgtcataggtggtggagccacgggtgccggcgtggccctcgatgccgctacccgtggactcaaggttgctttggtggaacgcgatgactttgcggccggtaccagtagcaagagcaccaagctcgtccacggaggtgttcgatacctggaaaaggccgtctgggagctcgactattcgcagtatgagttggtcaaggaggccttgaaagagcgcaagtacttcttgcagactgctccgcatctgagctcatggctgcccatcatgcttcctttggacaagtggtggaaggtaccttactactgggctggaaccaagttctatgacttcctcgctggcagtgaaggcatagagagttcttacttcctcacacgcagcaaggcactcgacgctttccccatgctgaagaaggagggccttgtcggtgctctagtctactacgatggtgcacacaacgactcccgtatgaatgtctccatcgccatgacggcggcgctgtacggagccacggtcgtcaaccacatggaggtcacgtctcttaccaaggacgccaacggaaggttgtgtggcgcaactgccaaggacttggttccagcgagggatggaaagcctgccccagaggttaacattcgcgcccgctgcattgtcaactgcaccggtcccttctccgacggtatccgcaagctcgatgactcatcggtacaggagattgtcgccccggcggctggtgtacacattgtcctcccgggcttctacagccccgcaaacatgggcctgattgacccgcagacctcagacgggagggtcgtgttcttcctcccatggcagggcaacaccatcgccggcactactgacgacccctccacaatcgtcaaggaccccattccagacgagaagtcgattgagtggatcctcaacgaaatccgccactatctctccccagatatcaccgtccgtcgtggtgacgtcctcgctgcttgggcaggtctgcgtcctttggtcaaggacccaaaggccaagaacactgaggccattgtccgcaaccaccttgtagatatttcgccatcgggactagtcacctgcgccggcggcaagtggaccacataccgccagatgtctgaggagtgcgtcgacgccgccattgccgagtttaagctcaagcctggccgcgtcgtcaacgcaccgcgcgtgtcaggtactgaggagattgatgacggcgccgatctcgatggctcctgccagacccacaaggtccggctcattggagcccacggcttcagcaagaacctgtttatccacgtcatccagcactttggcgtcgagaccgacgtcgccaagcacctgacagagagctatggcgatcgtgcctggaccgtcgcggccctgagtaaggtcaccgacaagcgcttccccgcacgtggcgagcgcatccacgagctctacccctttgtagacggcgaggtcagatatgcggtgcgccacgagtatgcgcaatctgccatcgacgtcgtggcccgccgcacgagattggctttcctgaacgcccaggccacgctcgaggtgctgcccaaggtcattgacatcatgaccgaggagctcaagtgggacaaaaggaggcaggaatttgaatggaaagagactgtcaaattcctcgagtccatgggtcttcccaggcctctcctgaccgtcactcgcaaggagatcgagcagggcaagatcgacctctcgacgtcgcttgagtacaagatgtacaccaggcatgataagccggtggaggagctgtaa

SEQ ID NO: 108575 - protein, 685 aa, Magnaporthe grisea 70-15
MSRFARGSILRRLAAPTAITALGGSLVLYAYRPRNIPGFEDPAVPPPTYGADGTFKLPRFPRTKSREEQIAILQRSSDPKAADKDEGVYDMLVIGGGATGAGVALDAATRGLKVALVERDDFAAGTSSKSTKLVHGGVRYLEKAVWELDYSQYELVKEALKERKYFLQTAPHLSSWLPIMLPLDKWWKVPYYWAGTKFYDFLAGSEGIESSYFLTRSKALDAFPMLKKEGLVGALVYYDGAHNDSRMNVSIAMTAALYGATVVNHMEVTSLTKDANGRLCGATAKDLVPARDGKPAPEVNIRARCIVNCTGPFSDGIRKLDDSSVQEIVAPAAGVHIVLPGFYSPANMGLIDPQTSDGRVVFFLPWQGNTIAGTTDDPSTIVKDPIPDEKSIEWILNEIRHYLSPDITVRRGDVLAAWAGLRPLVKDPKAKNTEAIVRNHLVDISPSGLVTCAGGKWTTYRQMSEECVDAAIAEFKLKPGRVVNAPRVSGTEEIDDGADLDGSCQTHKVRLIGAHGFSKNLFIHVIQHFGVETDVAKHLTESYGDRAWTVAALSKVTDKRFPARGERIHELYPFVDGEVRYAVRHEYAQSAIDVVARRTRLAFLNAQATLEVLPKVIDIMTEELKWDKRRQEFEWKETVKFLESMGLPRPLLTVTRKEIEQGKIDLSTSLEYKMYTRHDKPVEEL

SEQ ID NO: 108576 - DNA, 2061 bp, Gibberella zeae PH-1
  CDS (1)..(2061)
atgcaacaaagattacggtcgatgaagcgccctctgcttctcgcagctgcggccacaacaactctcgctgtcggaggcggctactacgcaacccgcaacagaacccacgtcgtcgacaaggccctcgtccctctcaagcgcgaccaaacaggacgcatcgtccctcccacattcagcgcaacaaaagcgcgcgccgaagccctcgccgagctgcgccgtagcggccagcccaataaagatactgagtacgacctcctcgtcattggcggcggcgctacaggaactggcatcgctatcgacgccatcacccgcggcctcaaggtcgctctcgtcgagcgcgatgacttctcctctggcacaagctccaagagcacaaagctcgtccacggtggcgttcgatacctagaaaaggctgtctggaaccttgactacggtcaattgcagcttgttatggaggctctccgcgagcgcaagactttcctcaatattgcgccccatctgtccagctcgcttcctattctactgcccctccagaagtggtgggaagcgccctacttctgggccggtaccaaggcctatgatcttctcgctggctcccagggtctcgagagctcttactacatgagcaaaaacaaggctatggaggctttccccaagctgcgcaaggagaacatggtcggtgctctggtttactacgatggccagcacaacgattcccgcatgaacgtcgctctcgctatgacggctgcgcagtacggtgccaccgttctcaaccacgttgaggttaccggtctcgagaaggatgccaacggcaagatcaatggcgctcaagtccgcgatgtcctcgcttccaagaacggcgactctgccaacgccgagcccttcaaggtccgcgccaagggtgttgtgaacgctaccggtcccttcaccgatgctatccaccaaatggatgacccctctcgcaagcctatcgtcgcccctgcttcaggtgtgcacgtcatgctccccaaggacatctgccctaacggcattggtctcctcgacgctgctacctccgatggccgagttatcttcgtccttccctggcaaggattcaccctcgccggtaccaccgacaacccctgcgaggtcgagcgcgcacccgttgctcagcagaacgatgttgacttcattctccgtgaagtcagcaagcttttgactcccgagtccgccctttcccgcaaggacgtccaggctgcctggtctggcatccgacctctcgtcaagaaccccaacgcgaagaacaccgaatccctcgtccgaagccacctcatcaccacctctccatccggtctcctcacctgcgccggtggcaagtggactacataccgtgagatggccgaggatactgtcaacgaggccgtaaagatgtttgagctcaagccccaagctgtctctctccccgacatcagcggtgccaacgcaagcggcttcaccacctctggcctctgctgcactcgcaacattcctctcattggcgcgcacggatactctacttctctggcctctcagctgatggagatgtaccccatcgacgctgatgttgccgaccacctcgctcacaactacggtgatcgcgcatggactgtcctctccaccaacccctccctcaacacccgccttgtctccggtcttccctacctcgaggccgaagtcgcccacggcatccgcaatgaagctgcctgcactgttgccgacatcatcgctcgccgcacccgtctttcattcctcgactcgagcaaggctctccaggctcttccccgcgtcatcgacattgccgctactgagctccagtggtccaaggcccgcaaggcccaagagaaggctgacagcattgctttcctcgcctccatgggtcttgagcaaatgaccgacgcgcctgtccaggcctctcagcaggagcgcatgccctctcgtcaaattgagcacagccaacagcgccccactcgcgtcggcggtctcgaagttgacctgaacggtctcggcagcactagctcctacagcaagtcccgcgacgactaa

SEQ ID NO: 108577 - protein, 686 aa, Gibberella zeae PH-1
MQQRLRSMKRPLLLAAAATTTLAVGGGYYATRNRTHVVDKALVPLKRDQTGRIVPPTFSATKARAEALAELRRSGQPNKDTEYDLLVIGGGATGTGIAIDAITRGLKVALVERDDFSSGTSSKSTKLVHGGVRYLEKAVWNLDYGQLQLVMEALRERKTFLNIAPHLSSSLPILLPLQKWWEAPYFWAGTKAYDLLAGSQGLESSYYMSKNKAMEAFPKLRKENMVGALVYYDGQHNDSRMNVALAMTAAQYGATVLNHVEVTGLEKDANGKINGAQVRDVLASKNGDSANAEPFKVRAKGVVNATGPFTDAIHQMDDPSRKPIVAPASGVHVMLPKDICPNGIGLLDAATSDGRVIFVLPWQGFTLAGTTDNPCEVERAPVAQQNDVDFILREVSKLLTPESALSRKDVQAAWSGIRPLVKNPNAKNTESLVRSHLITTSPSGLLTCAGGKWTTYREMAEDTVNEAVKMFELKPQAVSLPDISGANASGFTTSGLCCTRNIPLIGAHGYSTSLASQLMEMYPIDADVADHLAHNYGDRAWTVLSTNPSLNTRLVSGLPYLEAEVAHGIRNEAACTVADIIARRTRLSFLDSSKALQALPRVIDIAATELQWSKARKAQEKADSIAFLASMGLEQMTDAPVQASQQERMPSRQIEHSQQRPTRVGGLEVDLNGLGSTSSYSKSRDD

SEQ ID NO: 108578 - DNA, 1953 bp, Candida glabrata CBS 138
  CDS (1)..(1953)
atgtttgctcgtgttgctgcctctacaagggcacattcgaggttactggccggtactgttgctgccggtgctacactagcagttgctaaccattataataataacaacaagttgatctctaacgatgtcagcctgatttctcctgtagagaaaccagacgtgaaactgcctacaagagatgaacttctggataaactctccagaaccaaccagttcgatgtgcttatcatcggtggtggtgccacaggtaccggttgtgctctggacgctgccactagaggtctgaacgttgctttggtcgagaagaatgatttcgcctcaggtacttcttccaagtctaccaaaatggcccacggtggtgttagatacttggaaaaggcattctgggagatgtctaaggcccaattggacctggtcatcgaggccctgaacgaaagagcccatttgctaaacaccgctcctcacctatgtaagttgctaccaatcatcattcctgtctataactactggcaagtaccttacttctacgctggttgtaagatgtacgacctgttcgcaggttcccagaacttgaaaggttcctacctgatgtccaagaacgctaccatggaagtcgctccaatgcttgacggctccaacttgaaggctggtttggtctaccacgatggttccttcaacgataccagaatgaacgctacattggctgtcaccgctattgaaaactctgctactgttctaaactacatggaagttaaacagctagtaaaggacaaagacggtaaagttgctggtgctgttgtcgaggacagagaaactggtaagacctacagtgttcgcgctaaagttgtcgtgaatgccactggtccatacagtgatcgactattacaaatggatgctaaccctgatggtctacctgatgaagtcgtccaaaagactgagcctatcattgatggtaatgccacagtcaaatctattatgtcccaagtcgccgttaccaagccaaacatggttgtcccatccgctggtgtccatattattttgccttccttctactgtccaaaggaaatgggtctgctagatgctaagacctccgacggtagagttatgttctttttgccatggcaaggaaaggtccttgctggtaccaccgatatcccattgaaacaagtccctgaaaacccaactgccaccgaggctgatattcaagacatcttgaaggagttgcaaccatacatcaagttcccagttaagagagaagatgttttaagtgcatgggctggtattagaccattggtcactgacccaagaaagaagagcaaggccgatggaagtactcaaggtttagttagatctcatttcatttttacctctgaccatggcttggttaccattgccggtggtaagtggaccacttaccgtgctatggctgaagagactatcgatgaagttgttaagaacggcaagtttgacgctaagccatgtatcactagaaagttgaagttggctggtgccgaaaactgggatccaaatctacctgctcttttggctcaaaagtatcacttgtctcaaaagatgtcccattacttggctgaaaactatggtactagagctcctttgatttgtgagatgttccatgaagacccagaaaacagacttccattgctgcttgcagacaaggaacaaacccctgtactaggacatgtcgacttcgacagtttccgttacccaattaccattgctgaattaaaatacgctattaaatatgaatatgccagaacagctctagacttcttgatgagaagaacaagatttgctttcctagatgctaagcaagctttgaatgctgtagaaggtaccgttagattgatgggtgacagcttaggctgggatgaacaaagaagacaagatgaaatcagatactctactgaattcattaaaacctttggtgtatga

SEQ ID NO: 108579 - protein, 650 aa, Candida glabrata CBS 138
MFARVAASTRAHSRLLAGTVAAGATLAVANHYNNNNKLISNDVSLISPVEKPDVKLPTRDELLDKLSRTNQFDVLIIGGGATGTGCALDAATRGLNVALVEKNDFASGTSSKSTKMAHGGVRYLEKAFWEMSKAQLDLVIEALNERAHLLNTAPHLCKLLPIIIPVYNYWQVPYFYAGCKMYDLFAGSQNLKGSYLMSKNATMEVAPMLDGSNLKAGLVYHDGSFNDTRMNATLAVTAIENSATVLNYMEVKQLVKDKDGKVAGAVVEDRETGKTYSVRAKVVVNATGPYSDRLLQMDANPDGLPDEVVQKTEPIIDGNATVKSIMSQVAVTKPNMVVPSAGVHIILPSFYCPKEMGLLDAKTSDGRVMFFLPWQGKVLAGTTDIPLKQVPENPTATEADIQDILKELQPYIKFPVKREDVLSAWAGIRPLVTDPRKKSKADGSTQGLVRSHFIFTSDHGLVTIAGGKWTTYRAMAEETIDEVVKNGKFDAKPCITRKLKLAGAENWDPNLPALLAQKYHLSQKMSHYLAENYGTRAPLICEMFHEDPENRLPLLLADKEQTPVLGHVDFDSFRYPITIAELKYAIKYEYARTALDFLMRRTRFAFLDAKQALNAVEGTVRLMGDSLGWDEQRRQDEIRYSTEFIKTFGV

SEQ ID NO: 108580 - DNA, 1929 bp, Kluyveromyces lactis NRRL Y-1140
  CDS (1)..(1929)
atgtttgcagctaaacgtgccagtaaggttttgctgggatcagctgtgtctgctgccgcagtgtttggcgctgtttccatggtaaaccagtcacgtgatacaaatactttgcagaacgatgtgtcagtgtcaactatcaagaaatctaatgtagacctgccatctagagccaatcttttgtctaggttgtccaaaacggacaagtttgatgtattgattatcggtggtggtgctactggtaccggttgcgctttggatgcttccactagaggtttgaacgtagccttggttgaaatgaacgattttgcttctggtacttcttccaaatctaccaagatggctcatggtggtgtcagatatttggaaaaagctttctgggaactatcgaaagcccagttagatcttgttatagaagctttgaacgaaagagcacatatgttgaacactgctcctcatctttgtaagattttacctatcatgattcctgtttacaactattggcaagttccttacttttacgtcggtactaaaatgtacgatttgttcgctggttcgcaaaatttgaaatcctcttacttattgtccccttctagagcttcagaagtagcaccaatgctagatgcttctaaattgaaggcaggtcttgtttatcatgatggtagtttcaatgattctagaatgaacagcagtttggctatcaccgctatagaaaagggtgctactgtcttaaactacgttcaaatcaaacaattggtaaaaaacaaggaaactggtaaggtagaaggtgccattgctgtggatcgcgaaactggagatgaatatcaaatcaaggctaaggtagttgtgaatgcaacagggccttacagtgatcgtttgttacaaatggatcaatctccaactggtttgccagacgattctgtgctacaaaagatcaatgaaaatgctaccgtctccactaagattgctgttccaaatccaaaaatggttgttccaagtgccggtgtccatattgtcttgccatctttctactgcccaaaggaaatcggtctattagatgctcaaacttctgatggtagagttatgttcttcttgccatggcaagggaaggttttggctggtacaactgatattccaatgaaacaaattccagagaatccaactgctaccgaagctgatattcaagatatcttaaaggaattgcaacactatatcaatttccctgttaagagagaagatgttttgagtgcttgggctggtatcagacctttagttaaagatccaagaaaagctgactctggttctggatctactcagcaattggttagatctcatttcttgttcacctctccttccaatttggtgacaatttctggtggtaaatggaccacttacagagagatggcagaagaaaccattgacgaagttgttaaagtaggccaatttaacagcaaaccttgcgtaactaagaaattgaaactggtcggaggtgaaaactggaaccctaacttgtctgctttattgtcccaaaaataccatctttcgagtgccatgtctgaacatttggcaaacaactatggtacaagagcccctctaatttgtgagttattcaatgaagatccaagaaacaaacttcctgttgcactagctggtcaagaaaatgtttctgtatttggtcatgttgattatgactccttccgttacccttacactattggtgaactaaagtatagtttgaaatacgaatacgcaagaaactgtctagacttcctaatgagaagaactagatatgcctttttagatgcaaaacaagctttgaatgcagtagaaggtactgtaaaagttatgggagatgaattgggctgggattccaaaaagagacaagatgaaattcaacaggcaaccgaatacattaagactttcggtgtctaa

SEQ ID NO: 108581 - protein, 642 aa, Kluyveromyces lactis NRRL Y-1140
MFAAKRASKVLLGSAVSAAAVFGAVSMVNQSRDTNTLQNDVSVSTIKKSNVDLPSRANLLSRLSKTDKFDVLIIGGGATGTGCALDASTRGLNVALVEMNDFASGTSSKSTKMAHGGVRYLEKAFWELSKAQLDLVIEALNERAHMLNTAPHLCKILPIMIPVYNYWQVPYFYVGTKMYDLFAGSQNLKSSYLLSPSRASEVAPMLDASKLKAGLVYHDGSFNDSRMNSSLAITAIEKGATVLNYVQIKQLVKNKETGKVEGAIAVDRETGDEYQIKAKVVVNATGPYSDRLLQMDQSPTGLPDDSVLQKINENATVSTKIAVPNPKMVVPSAGVHIVLPSFYCPKEIGLLDAQTSDGRVMFFLPWQGKVLAGTTDIPMKQIPENPTATEADIQDILKELQHYINFPVKREDVLSAWAGIRPLVKDPRKADSGSGSTQQLVRSHFLFTSPSNLVTISGGKWTTYREMAEETIDEVVKVGQFNSKPCVTKKLKLVGGENWNPNLSALLSQKYHLSSAMSEHLANNYGTRAPLICELFNEDPRNKLPVALAGQENVSVFGHVDYDSFRYPYTIGELKYSLKYEYARNCLDFLMRRTRYAFLDAKQALNAVEGTVKVMGDELGWDSKKRQDEIQQATEYIKTFGV

SEQ ID NO: 108582 - DNA, 1959 bp, Debaryomyces hansenii CBS767
  CDS (1)..(1959)
atgtctaagatttttcaaaccaaattagccaaaactgcgttagcagctgctgcaggggttggtggtactatcgtgtacttggattttatcaggccgccagttgtgtcggacttgaacaactcatacaagccattaagaaaagagttggcgacaccaccatcaagagaatcgttattgaataagttggaaactacgcctaaattcgacgttatagtcgtcggaggaggtgcaactggtactggtacagcagtcgatgctgctaccagagggttaaacgtttgtttgttggaaaagagtgattttgcttccggaacatcttctaaatcgaccaagatggcccacggtggggttcgttacttggaaaaggctattttccagttatcgaaggctcagttggacttggttatcgaagcattaaatgaaagaggtaacatgttgagaaccgcaccacatttatgttctgttttgccaatcatgattccagtttacaaatggtggcaagttccttacttcttcgttggttgtaagatgtacgattggttcgctggtcaccaaaacttgagatcatcgactgttttctcaagagaaatgactagtgctattgccccaatgatggacgactcgaacttgaaggccacatgtgtttaccacgatggtacctttaatgatgctagaatgaatgctactttggctattactgctattgatcaaggtgctactgttttgaactacatggaagttaagcaattggtcaagaaggatgataagattaccggtgtcctcgctgttgatagagaaactggtaaggaatacaatattaatgctactgctactgttaacgctactggtccatttgctgacaagcttttggaaatggacaaggatcctcaaggtttaccaccaaagattgaccaacctccaagaatggttgttccatcttctggtgtccacgttgttttacctgaatactactgtccaagagatatgggtttattagatccatctacttctgatggtcgtgttatgttcttcttaccatggcaaggaaaggttttggctggtactactgatactcctttgaaatccgttccagaaaacccaattcctaccgaagaagatatccaagatattttacaagaattgcaaaagtatattgttttccctgttaacagaaccgatgttttatctgcttggtctggtattagaccattagtccgtgacccatctactattcccgaagatgaacaaccaggttccggtagtacgcaaggtttagttcgttctcatttcatttctcaatctcctagtggtttacttaccatttctggtggtaaatggactacttacagagaaatggctcaagaaactgttgatacattagttaaaaactacgatttcgatggtaagaacaacgccttattaccatgtcaaactaacaagattatcttagctggtggtgaagattattcaaagaattattctgctagattgattcacgaatacagaattcctttgaagttggctaagcatttgtcacacaactatggttcaagagcttcattgattttggaattatatcaccaatctgattacaacaagttaccaatcactttagcagccaataagtcttttgaaccttccgaagataaggaatcagaagaaaatattttatcgtaccaatcgtttgacgagccattcacgattgccgaattaaaatactctttgaagtacgaatacgccagaactccagttgatttcttagctagaagaactagattagctttcttaaacgccagagaagctttgactgctgttgacggtgtatgtgctattatggaacatgaattaaagtgggatgaagaaacgaccaagaaaatgaaatttgaagctaacgattatattggtaagatgggtatctctccaaagagattcgatgttgaagatttcatcgtccaatga

SEQ ID NO: 108583 - protein, 652 aa, Debaryomyces hansenii CBS767
MSKIFQTKLAKTALAAAAGVGGTIVYLDFIRPPVVSDLNNSYKPLRKELATPPSRESLLNKLETTPKFDVIVVGGGATGTGTAVDAATRGLNVCLLEKSDFASGTSSKSTKMAHGGVRYLEKAIFQLSKAQLDLVIEALNERGNMLRTAPHLCSVLPIMIPVYKWWQVPYFFVGCKMYDWFAGHQNLRSSTVFSREMTSAIAPMMDDSNLKATCVYHDGTFNDARMNATLAITAIDQGATVLNYMEVKQLVKKDDKITGVLAVDRETGKEYNINATATVNATGPFADKLLEMDKDPQGLPPKIDQPPRMVVPSSGVHVVLPEYYCPRDMGLLDPSTSDGRVMFFLPWQGKVLAGTTDTPLKSVPENPIPTEEDIQDILQELQKYIVFPVNRTDVLSAWSGIRPLVRDPSTIPEDEQPGSGSTQGLVRSHFISQSPSGLLTISGGKWTTYREMAQETVDTLVKNYDFDGKNNALLPCQTNKIILAGGEDYSKNYSARLIHEYRIPLKLAKHLSHNYGSRASLILELYHQSDYNKLPITLAANKSFEPSEDKESEENILSYQSFDEPFTIAELKYSLKYEYARTPVDFLARRTRLAFLNAREALTAVDGVCAIMEHELKWDEETTKKMKFEANDYIGKMGISPKRFDVEDFIVQ

SEQ ID NO: 108584 - DNA, 1839 bp, Yarrowia lipolytica CLIB122
  CDS (1)..(1839)
atgttcagaaccattcgaaaacccgcgtgggctgctgccgccgccgtggcagccgctggcgctggagccgtcgccctgtctgtgcctgcccaggcccaggaggagctccacaagaagcacaaattcacagtgccccccgtggccgccgagcccccctctcgagccgcccagctcgagaagatgaagaccgaggagtttgatctcgtcgttgttggtggaggagctaccggatccggtatcgccctcgacgctgtcacacgaggcctcaaggttgctctggtcgagcgagacgatttctcctgcggaacctcgtcccgatccaccaagctcatccacggaggtgtccgatacctcgagaaggctgtgtggaacctcgactacaaccagtacgagctggtcaaggaggccctgcacgagcgaaaggtcttcctcgacattgctccccacctcacctttgctctgcccatcatgatccccgtctacacctggtggcagcttccctacttctggatgggtgtcaagtgctacgatctgcttgccggccgacagaacctcgagtcctcttacatgctctcccgatcccgtgctctcgatgccttccccatgctttccgatgacaagctcaagggcgccattgtctactatgatggctcccagaacgactctcgaatgaacgtttctcttattatgactgctgttgagaagggtgccaccatcctgaaccattgcgaggtcaccgagctcaccaagggcgccaatggccagctcaacggtgttgttgccaaggatactgacggaaacgctggatccttcaacatcaaggccaagtgtgtcgttaatgctactggacccttcactgactctctgcgacagatggacgacaagaacaccaaggagatctgtgctccttcctccggtgttcacatcattctccccggttactactcccccaagaagatgggactccttgaccccgctacttctgacggccgagttatcttcttcctcccctggcagggaaacacccttgccggtactactgaccagcctaccaagatcactgctaaccctatcccctccgaggaggacattgacttcattctcaacgaggtccgacactacgttgagggcaaggttgatgtgcgacgagaggacgttctggccgcctggtccggaatccgaccccttgtccgggacccccacgccaagaacaccgagtctcttgtccgaaaccatctcatcacctactccgagtctggtcttgtcaccattgctggcggaaagtggaccacttaccgacagatggctgaggagactgtcgatgcctgcattgccaagttcggtctcaagcctgaaatctccgccaaggccgtcacccgagacgtcaagctcatcggtgctaaggactggactcctctcacttacattgatctgatccagcaggaggaccttgaccccgaggttgctaagcacctttctgagaactacggatctcgagctttcaccgttgcttctcttgctgagatgcccacccccgaacccggtgtgatcccccagtctactctcacaaagggtaagcgaatcctgtacccctacccctacctcgatgccgagtgcaagtactctatgaagtacgagtatgccaccaccgccatcgacttccttgctcgacgaactcgtcttgctttccttaacgccgctgccgcctacgaggctctccctgaggtcattgagatcatggccaaggagctccagtgggacgaggctcgaaaggagcaggaattcaacaccggtgtcgagtacctctactccatgggccttacccccaaggacaaataa

SEQ ID NO: 108585 - protein, 612 aa, Yarrowia lipolytica CLIB122
MFRTIRKPAWAAAAAVAAAGAGAVALSVPAQAQEELHKKHKFTVPPVAAEPPSRAAQLEKMKTEEFDLVVVGGGATGSGIALDAVTRGLKVALVERDDFSCGTSSRSTKLIHGGVRYLEKAVWNLDYNQYELVKEALHERKVFLDIAPHLTFALPIMIPVYTWWQLPYFWMGVKCYDLLAGRQNLESSYMLSRSRALDAFPMLSDDKLKGAIVYYDGSQNDSRMNVSLIMTAVEKGATILNHCEVTELTKGANGQLNGVVAKDTDGNAGSFNIKAKCVVNATGPFTDSLRQMDDKNTKEICAPSSGVHIILPGYYSPKKMGLLDPATSDGRVIFFLPWQGNTLAGTTDQPTKITANPIPSEEDIDFILNEVRHYVEGKVDVRREDVLAAWSGIRPLVRDPHAKNTESLVRNHLITYSESGLVTIAGGKWTTYRQMAEETVDACIAKFGLKPEISAKAVTRDVKLIGAKDWTPLTYIDLIQQEDLDPEVAKHLSENYGSRAFTVASLAEMPTPEPGVIPQSTLTKGKRILYPYPYLDAECKYSMKYEYATTAIDFLARRTRLAFLNAAAAYEALPEVIEIMAKELQWDEARKEQEFNTGVEYLYSMGLTPKDK

SEQ ID NO: 108586 - DNA, 2169 bp, Anopheles gambiae str. PEST
  CDS (1)..(2169)
atggcatcgagacttcgaaagttcggcgtgacagcagccggtatcgcgatcggtgccgccctgtccacctatgccctgcagcacaaagatacgccccagtatcaggaaatgcaacgtattcgacgtaagcgaacgctgccttcacgatcggaacagatcaaggcgctgcagagcgacgaagagtacgatgtgctgatcatcggtggtggagccactggggccggttgtgcactggattcggtcacgcgcggacttaagaccgccctggtcgaagcggacgactttgccagcggtacctcgtcacgatcaaccaagctgatccatggtggtgtgcgatatctgcagaaagccattctcggtttggacattgaacagtaccggatggtaaaagaagctctgcacgagcgcgcctcaatgctgcgatcggcgccacatctgaccagaccactgccgatcatgcttcccgtttacacctggtggcaaattccgtacttctgggtcggcattaaggcgtacgatttcgtcgctggcgatcgtaacgtgaaaagctcgtactatctgtcacgcgccgatgcgctggaactgtttcccatgttgcgcggcgataaactgtgcggagctatcgtgtactacgacggacagcaggatgacgcacgtatgaatctggccatcgcactgaccgcggcacgccatggcgctgccatcacgaatcacgtcgaggtgttggagctgctgaagaaaaagggcgacgatggtaaggatgtgctgtgtggcgccaaggtccgtgataacattagcaaaaaggagtggacgatcaaggcaaagtgtatcatcaacgcgaccggtccgtttacggactcgatccgcaaaatggataacccgacggtgaaggaaatctgctgcccgagctcgggcgtgcatattgtgctgccgggatactacagcccacagcagatgggtctgctcgatccggacacttcggacggtcgcgttatcttcttcctgccctggctgaacggcacgatcgccggtaccacggactcgccgtgcgatgtaacgcgcacccccacgcccaccgaggacgagatccagtttattctgagcgaaatcaagaactatctcaacaaggacgttgatgttcgccgtggtgatgtgctgtcggcgtggagtggcatccgaccgctggtgtccgatccgaacaaggaggacacgcaatcgctggctcgcaaccacatcgtgcacgtgagcgactcgaagctgatcacaattgccggtggcaagtggacgacgttccgagcgatggccgagcacacgatcgatgctgccatcaaggcgtgcaacctgaagcccgagcgcggttgtgtcaccgatgggctgtggattgagggcgcccagggatggacaccgacgatgtacatccgcttggtgcaggatttgggtctggaggtagaggtggccaaacatctggccatatcgtacggcgatcgtgcgtttgccgtggccaagctggctacgctgactggcaagcgttggcccatcatcggcaagaagctgcatccggagttcccgtacattgatgcggaggtgcgctacggcattcgcgagtatgcctgcacttgcgtggacatgatttcgcgccgtttgcgactgtcgttcctgaatgtgcaggccgccatcgaggcgctccccatgattgcagacatcatggcggaggagctaaagtggtcaaaggacgaaaaggagcgccagataaagcagtgcgaacacttcctgcagacgcagatgggccaccaagctaaccgcacactgaaggagaaggtaccgatcaatctctccaagcaggaggtcgacatgtacgtgaagcgcttcgaaacgatcgacaaggagaagaagggctacgtgtcgatcaccgacattaagcgcgcaatgaagtcgttcggcgatgcggaggtcagtggcgaagagctgcacgacattctcaaggaaatcgacaccaacatgaacggacaggtcgagctggaggagtacctacagatgatgtcggcaatcaagtccggatttgtatcgcactctcggtttgctgcggtggcggaacaggaagaaatccgcaaggagcaggaacgtctcaagaagcagatcaccatcgagcgatctggaggtggcttataa

SEQ ID NO: 108587 - protein, 722 aa, Anopheles gambiae str. PEST
MASRLRKFGVTAAGIAIGAALSTYALQHKDTPQYQEMQRIRRKRTLPSRSEQIKALQSDEEYDVLIIGGGATGAGCALDSVTRGLKTALVEADDFASGTSSRSTKLIHGGVRYLQKAILGLDIEQYRMVKEALHERASMLRSAPHLTRPLPIMLPVYTWWQIPYFWVGIKAYDFVAGDRNVKSSYYLSRADALELFPMLRGDKLCGAIVYYDGQQDDARMNLAIALTAARHGAAITNHVEVLELLKKKGDDGKDVLCGAKVRDNISKKEWTIKAKCIINATGPFTDSIRKMDNPTVKEICCPSSGVHIVLPGYYSPQQMGLLDPDTSDGRVIFFLPWLNGTIAGTTDSPCDVTRTPTPTEDEIQFILSEIKNYLNKDVDVRRGDVLSAWSGIRPLVSDPNKEDTQSLARNHIVHVSDSKLITIAGGKWTTFRAMAEHTIDAAIKACNLKPERGCVTDGLWIEGAQGWTPTMYIRLVQDLGLEVEVAKHLAISYGDRAFAVAKLATLTGKRWPIIGKKLHPEFPYIDAEVRYGIREYACTCVDMISRRLRLSFLNVQAAIEALPMIADIMAEELKWSKDEKERQIKQCEHFLQTQMGHQANRTLKEKVPINLSKQEVDMYVKRFETIDKEKKGYVSITDIKRAMKSFGDAEVSGEELHDILKEIDTNMNGQVELEEYLQMMSAIKSGFVSHSRFAAVAEQEEIRKEQERLKKQITIERSGGGL

SEQ ID NO: 108588 - DNA, 2163 bp, Apis mellifera
  CDS (1)..(2163)
atggcatcgctgaaactattagtgggtggtgcaagtgccatcggtgctagtgctcttacttcttatctattaatgtccgataatacagtacatgcggatgtatgcaatccacggccattaaagaggcctttaccaactagagaagaacaagtgaaaacattgaagaatactagcgaatatgatgttcttattataggtggtggtgcaacaggagctggatgtgcattagatgcctgtacacgaggtttgaaaacagctttaattgaaggagatgatttttcttctggcacatcttctaggagtacaaaacttattcatggaggcgtccgttacttacaaaaagctataatgcatgttgatgtcgaacaatataaaatggttaaagaagcattacaagaacgagcgtctatgttacatagcgcgcctcatttagctcatcctttgcctattatgttgcccgtatatacatggtggcaaattccctatttctgggttggtataaaaatgtatgattttgttgctggaagaaaaacagtaaaatcgtcatattttctcagcaaaaggaatgcattagaattatttcccatgttgaaaggagacaaacttacaggagctattgtttattatgatggtcaacaagatgatgccagaatgaatttagcaattgcgctaacagcctcgcggcatggtgccacagttgtaaatcatgttaaagttgttaatcttttaaaaggtcttgataaggatggtaatcgagtccttactggtgcacgtgtgaaagacgaacttacgggtgaacaatgggatgtgaaagcaaaggcaataataaacgcaacaggtccattcacggatcatattagaaaaatggatgaccaaaatgttaaagaaatttgttctccttcttctggtgctcacattgttcttccaggttactatagtcctgatcaaatgggtttattggatccagaaacaagcgatggtcgagtaatttttttcttaccatggcaaaaacaaacaattgcaggaacaactgatttaccttgcgaaataacacacaatcctcgaccaactgaagatgaaattatgttcattttacgtgaagtaaaaaactatctcaatccggatgttgaagttcggcggggagatgtattatctgcttggagtggaattagacctctcgtttctgatccaaacaaaccggatactcaatctcttgccagaaatcatattgtacatgttagtcctacgaaacttatcacaatagctggaggaaaatggacaacatatagagcgatggcagaggaaactatcgatgcagctattaaagcttgcgatttaaaacctgaaagaccctgtcaaacaaatggtttacttcttgagggagctcatggttggagtccaacaatgtatattagactagttcaagattttggtttagagtgtgaagttgcacaacatctagctaagagttatggagatcgtgcatttgctgtagcaaaaatggcttctcttactggtaaaagatggccaattataggcaaaaaacttcatcctgaatttccatatatcgatgcagaaattcgatatggagttcgtgaatatgcgagaacagcaatcgatatgatcgcaagacgattgagattagcctttttgaatgttcaagcagcacaagaagctcttccaggcattatcgatatcatggcagaagaattacactggtcgccagaagaaaaaaacaggcaaacaaaagaagccagtgaattccttgctaatgaaatgggacaaatggtcaatcgtgcatctcgtgataaaattcctattaatctcacaaaagaagaaattcagttatatattaagcgtttcggaatcatcgataaagacaacaaaggctacgtttctattaatgatattagacgaggacttaagctgttcggtgacaaagaagtacctggtgaagagcttcatgaaatattgcgcgaaatcgacactaatatgaatggtcaggtcgaattggacgaatatcttcagatgatgtcggccataaaatctggacatgtagcatattcacgttttgcaagaatggcagagatggaagaggcacaacacgagaaagaaatattgaaaaaacagattagtgtagaaagatcaggcggtggattataa

SEQ ID NO: 108589 - protein, 720 aa, Apis mellifera
MASLKLLVGGASAIGASALTSYLLMSDNTVHADVCNPRPLKRPLPTREEQVKTLKNTSEYDVLIIGGGATGAGCALDACTRGLKTALIEGDDFSSGTSSRSTKLIHGGVRYLQKAIMHVDVEQYKMVKEALQERASMLHSAPHLAHPLPIMLPVYTWWQIPYFWVGIKMYDFVAGRKTVKSSYFLSKRNALELFPMLKGDKLTGAIVYYDGQQDDARMNLAIALTASRHGATVVNHVKVVNLLKGLDKDGNRVLTGARVKDELTGEQWDVKAKAIINATGPFTDHIRKMDDQNVKEICSPSSGAHIVLPGYYSPDQMGLLDPETSDGRVIFFLPWQKQTIAGTTDLPCEITHNPRPTEDEIMFILREVKNYLNPDVEVRRGDVLSAWSGIRPLVSDPNKPDTQSLARNHIVHVSPTKLITIAGGKWTTYRAMAEETIDAAIKACDLKPERPCQTNGLLLEGAHGWSPTMYIRLVQDFGLECEVAQHLAKSYGDRAFAVAKMASLTGKRWPIIGKKLHPEFPYIDAEIRYGVREYARTAIDMIARRLRLAFLNVQAAQEALPGIIDIMAEELHWSPEEKNRQTKEASEFLANEMGQMVNRASRDKIPINLTKEEIQLYIKRFGIIDKDNKGYVSINDIRRGLKLFGDKEVPGEELHEILREIDTNMNGQVELDEYLQMMSAIKSGHVAYSRFARMAEMEEAQHEKEILKKQISVERSGGGL

SEQ ID NO: 108590 - DNA, 2127 bp, Aspergillus nidulans FGSC A4
  CDS (1)..(2127)
atggcatctcgtaatactcgcaggatactgcgacctctcctctacggtactgccgcagtcacaaccgtgggtgcaggtgccctctatttctcgatccgtccccgtaacattcctggtctcgaagcgccggctgttccaccacccggttatcatgaaggcaaacttgtgcctcccagctttcctaaaatcaaatcgcgccttgagcaaatcgaggatctcaaacgcagttcttcaggtgacgatgcggatgtgtatgaccttctcgtgattggcggaggcgctacagggtcaggaattgcactcgatgcggcgacacgtggattaaaggtagcagtggtcgaaagagacgacttcagtgctgggacaagtagcaagagtaccaaacttgttcatggcggcgtgcgttacctggaaaaggctgtttgggagttggactacaatcagtataaactggtgaaagaagctctaagggagcgaaagtactttttgaacaccgcccctcatctttccagctggctcccgatcatggtaccagtccaaaagtggtggcagattccctacttctgggccggtacgaaatgctatgattggctagctggctctgaaggaattgagagctcctacttcttgccaaagagtaaagccattgaggcattccccatgctccgaaaggataacgttctcggtgctatggtttactacgatggtgctcacaacgactctcgaatgaatgtttcgctcgcaatgacggctgcgctatatggtagcactgttgtcaaccatatggaagtcacaggcctcaccaaggatgcgtcgggaagattgaacggcgctcggcttagggactgcattcccgaacgggacggccaaggagcagaggagatctccattagggcgaagggtatcatcaacgctaccggtccattcactgattccatcaggaagatggacgatcccaatactaaggagattgtcgcacctagctctggtgtccacgttattctgcctggttactacagtccttcaaacatgggcctcatcgatccgtccacgtctgacggccgtgttattttcttccttccctggcaaggaaacacgatagctggtactacagatgcccccacagagatcacgcgccaacctcagccgtctgagaaggatatcgactggatcctcaaggaaatcagaggttatctggcgcccgacatcaacgttggccgatccgatgttcttgctgcctgggccggaattagacctctggtgcgcgaccctaaggtgaagagttctgaagctcttgtccgcaaccacctcatcactgtttcttcctcggggctgttgacttgcgctggaggaaagtggacgacttaccgccagatggctgaagaagcagttgatgaggccatcaaagaattcaatctcaagccctgtgaattgcacgatgtccccgatatcagtggcgttggcggacgcggtttggttgccgacaatgcttcgctcgatggctcatgccaaactcaccaggttcgcctgatcggagctcatggctggtccaagactctgttcatcaatctcattcaacattacggccttgagacagacgtggctcggcacttaaccacgtcgtacggagaccgagcatggcaagtggcagcactgtcttctcccacacagacacgcttccctgtccgcggacagcgcatttcagccctctaccctttcattgatggcgaggtccgctttgccgttcgccacgaatacgcacagactgcagtcgatgtcatcgcccgaagaacccgcttggcattccttaacgcccaagctgccctcgaagcactccctacagtgatcgacttgatgggcgaggaacttcattgggataagaacaggaaagaagtcgagtggaaggacagtgtgcaatttttggcttcaatgggattggccccagacctcctcaacgtgactagggatcaagtagagaatggtaaagttcaacagctgcttgctagtgagagaggcgcattcacgcgaactgaccgggacagattggctgcagtgtactgcggtttatccttgggtagcaaggggcttgcctctttctggacacgctccagcttttcgtatgcttga

SEQ ID NO: 108591 - protein, 708 aa, Aspergillus nidulans FGSC A4
MASRNTRRILRPLLYGTAAVTTVGAGALYFSIRPRNIPGLEAPAVPPPGYHEGKLVPPSFPKIKSRLEQIEDLKRSSSGDDADVYDLLVIGGGATGSGIALDAATRGLKVAVVERDDFSAGTSSKSTKLVHGGVRYLEKAVWELDYNQYKLVKEALRERKYFLNTAPHLSSWLPIMVPVQKWWQIPYFWAGTKCYDWLAGSEGIESSYFLPKSKAIEAFPMLRKDNVLGAMVYYDGAHNDSRMNVSLAMTAALYGSTVVNHMEVTGLTKDASGRLNGARLRDCIPERDGQGAEEISIRAKGIINATGPFTDSIRKMDDPNTKEIVAPSSGVHVILPGYYSPSNMGLIDPSTSDGRVIFFLPWQGNTIAGTTDAPTEITRQPQPSEKDIDWILKEIRGYLAPDINVGRSDVLAAWAGIRPLVRDPKVKSSEALVRNHLITVSSSGLLTCAGGKWTTYRQMAEEAVDEAIKEFNLKPCELHDVPDISGVGGRGLVADNASLDGSCQTHQVRLIGAHGWSKTLFINLIQHYGLETDVARHLTTSYGDRAWQVAALSSPTQTRFPVRGQRISALYPFIDGEVRFAVRHEYAQTAVDVIARRTRLAFLNAQAALEALPTVIDLMGEELHWDKNRKEVEWKDSVQFLASMGLAPDLLNVTRDQVENGKVQQLLASERGAFTRTDRDRLAAVYCGLSLGSKGLASFWTRSSFSYA

SEQ ID NO: 108592 - DNA, 1953 bp, Candida albicans SC5314
  CDS (1)..(1953): transl_table=12
atgtcaagatttttaagatcaactttagcaaagtcagtattggcagctagtgctgctgttggtggtacagttgtttatttggattttattagaccaaaaaacgaacctcaccttgctacttcctataaaccattcaacaaagatattccaccaccaccatctcgtgaatcattgattggtaacttgaaaaaagtgccacaatttgatgttttggtcattggtgggggtgccgttggtaccggtactgccgttgatgcagctacacgtggtttaaatgtttgtcttttggaaaaaaccgattttggtgctggtacttcttcaaaatccaccaaaatggcccatggtggtgttcgttatttggaaaaagccattttccaattgtctagagctcagttggatttggtcattgaagctttgaatgaaagaggtaacatgttgagaactgccccacatttgtgtactgttttgccaattatgattccagtttacaactggtggcaagtcccttatttctttgctggttgtaaaatgtatgattggtttgctggtaaacaaaatttgcgttcctccactattttctccactgaacaagctgctgccattgctcctatgatggataccagtaacttgaaagctacttgtgtttaccacgatggtagtttcaacgataccagatacaatgttactttagctttgactgccattgaaaacggtgccactgtattgaactactttgaagtcgaacaattgttgaaagatagcaatggtaaattgtatggtgtcaaggctaaagatttggaaaccaatgaatcatacgaaattaaagctaaaagtgttgttaatgctactggtccatttgctgataaaattttggaaatggatgaagatcctcaaggtttaccaccaaaagttgaacaatcaccaagaatggtcgttccttcatccggtgtccacgttgttttgccagaatattactgtccaaccacctacggtttattagatccttctacctctgatggtagagtcatgttctttttgccatggcaaggtaaagttttggctggtaccactgatactccattgaaaaaagtcccagaaaatcctgttccaactgaagaagaaatccaagatattcttaatgaaatgcaaaaataccttgttttcccaattgacagaaatgatgttttatctgcttggtcaggtattagaccattagttagagatccatctactattcctaagggccaagaagcttctggtaaaaccgaaggtttggtacgttcacatttgttagttcaatcaccaactggattggtcactatttccggtggtaaatggactacttacagagaaatggcccaagaaactattgattacgttgttaaacactttgattttggtgataaaaagatcctaccatgtcaaaccaacaaattgattttggtcgggggtactgattattcaaagaactattctgctagattgattcatgaataccacatcccattgaaattggctaaacacttgtctcacaactatggttccagagctccattgattttggatttgtatgctgaaagtgattacaataaattgccagttactttagctgctactgaagaattcgaaccttctgaaaagaaagctaatgaagacaatcaattgagttatcaaagatttgacgaaccattcagtattgctgaattgaaatactctttgaaatatgaatatccaagaactccacttgatttcttagccagaagaactagattggcattcttaaatgctagagaagctcttagtgccgttgatggggttgttgaaatcatgagcaaagaatacggttgggacaaagaaaccgaggaaaaattgagaaaagaagctagacaatacattggcaatatgggtatttctccaaagaagtttgatgttgaaaagattgtcatccaataa

SEQ ID NO: 108593 - protein, 650 aa, Candida albicans SC5314
MSRFLRSTLAKSVLAASAAVGGTVVYLDFIRPKNEPHLATSYKPFNKDIPPPPSRESLIGNLKKVPQFDVLVIGGGAVGTGTAVDAATRGLNVCLLEKTDFGAGTSSKSTKMAHGGVRYLEKAIFQLSRAQLDLVIEALNERGNMLRTAPHLCTVLPIMIPVYNWWQVPYFFAGCKMYDWFAGKQNLRSSTIFSTEQAAAIAPMMDTSNLKATCVYHDGSFNDTRYNVTLALTAIENGATVLNYFEVEQLLKDSNGKLYGVKAKDLETNESYEIKAKSVVNATGPFADKILEMDEDPQGLPPKVEQSPRMVVPSSGVHVVLPEYYCPTTYGLLDPSTSDGRVMFFLPWQGKVLAGTTDTPLKKVPENPVPTEEEIQDILNEMQKYLVFPIDRNDVLSAWSGIRPLVRDPSTIPKGQEASGKTEGLVRSHLLVQSPTGLVTISGGKWTTYREMAQETIDYVVKHFDFGDKKILPCQTNKLILVGGTDYSKNYSARLIHEYHIPLKLAKHLSHNYGSRAPLILDLYAESDYNKLPVTLAATEEFEPSEKKANEDNQLSYQRFDEPFSIAELKYSLKYEYPRTPLDFLARRTRLAFLNAREALSAVDGVVEIMSKEYGWDKETEEKLRKEARQYIGNMGISPKKFDVEKIVIQ

SEQ ID NO: 108594 - DNA, 2580 bp, Ustilago maydis 521
  CDS (1)..(2580)
atgttccgcaggactttgagcgcggcgcctcgcgctggcgtgcgactcgcctcgacatcctctacatcgtcgtcggccggtcaacgacgaaccctaacgaatcgttccgtgcttgtagctgttgcactcgccggtggtgctgtcgctacctactccctcaccaagccgagcctgtacgccgaggctcccgataccgtgcccggcgatactcgtccgcatcctctgtggtcgccacctacgcgcgctcagatgctcgaggctctcaagcagtcttcagcaaaaagtctccgacccatcgcttcgaaaggcaggtcagacaactcgagcttgttacctcttgccaaagatgccacttctagcagccctagcccggctgcctcggagcaattgggcggtaccgccgcctctcgcagcggcgatgaagacggcgagggcttcgacattctcgttgtcggtggtggtgccacaggcgccggtgtcgctgtcgatgccgccactcgtggtctcagcgtagccatggtcgaacgtgacgactttggtgccggtacttcctccaagtcgaccaaacttgtccacggcggtgttcgttacctccagaaagccgtctttgagctcgactacgaacagtacaagatggtgcgagaagcgctgcacgagcgcaagacgttcctcaagatcgctccgtacctctctgaccaccttcccatcatgcttcccgtctacaagtactggcaaatcccctactactgggctggtaccaagatgtacgacattcttgccggctctgaaaacatggaaagctcctacgtgctcggcaagggcaaagcgctcgaggcgttccccatgctcaagtcggccggtctcgccggtgccgtcgtctactacgatggtcagcacaacgacactcgcatgaacgttgctctcgccatgaccgccgtgcatcacggtgccgttgtcgccaaccacaccgaggtggtggctatccacaagaagcctgctgctggcaagcccgaccagatctgcggtgctcgtgtccgcgatgtgctcactggtgacgaatgggacgtcaagtgcaagtgtctcatcaacgccacaggtcccttttccgacacgctgcgtaagctcgacgcacccacctctcaagaaattgttgctgcttcttccggagtccacatcacgcttcccggctacttttcgccacgcgacatgggtctgatcgacccacagacctcggatggccgagtcatctttttcctgccatggcagggaaacaccatcgccggtaccaccgataccgctgctccagtggaggcgcatcctcgccccaaggaggaagagatccagtggattctggacgaagtgcgcaactacctcagccccgatatcaaggtgcgacgaggcgacgtgcttagcgcctggtcgggtctgcgacccttggtcaaggatcctgctgctaccgatacgcagtcgcttgttcgaaaccacatgatcaacgtctccgagtcgggcttgctgaccatcgccggtggcaagtggaccacgtaccgcgagatggccgaacagaccgtggaccgcgctatcgcagatttcaagctcaagcctcagcgtggctgtgtgaccaagaacacgcgcttgctcggaagccacggctggacaaagaccatgtacgtcaagcttttgcagcgcttcggtctcgagaccgacgttgcgcgtcacttgtccaacacgtacggtgaccgtgcctggagcgtgtgttcgattgccgagcctaccggccagagatggccggtgcacggcaagcgtattgaccaactctacccttacattgaggctgagatccgatacgcatgtcgcagcgagtatgctgctacggcgcaggactttatcgctcgtcgaacgcgtttgtccttcctcaacgccgaggcaaccgtggatgcgctgccgcgcgtgattgacgtgatggccgaggagctgggctgggacgaacagcgaaagaagcacgagtgggccgagggagtcgagttcatggccagcatgggtcttcagccggctcgtgtgcaacaactcaaggagacgtcactggaccagatgcgcaagcagcgtcagagccagcaacaggcgttcaaggtatcttcgctcggcgccgcctcgctagatgacaaggatgctttggccatcagcggctgcgcttctttcaattcggaagagatggacgagctgcgtgccaaattcaagctgctcgacgtcaaccgcgacggcaagctcgactcaaaggatctcaaacaggtgctgcagcgcatcggatactcggacgtcgacgactcgacgctgcgcggtatcgtcaatgaggtggatttcaccaagactggtgcactccactttgaagactttttggacgtctttgcggcgctgaaagatgcgcgtttggaaaatgcctttactcacatcttgagcgagatggactcacaaggcttgcagcctccctcgcacgaccctgttggacctgcggccaaggagcagagccagagacgcgatgctagccgcaccattcctgttgagaagagtggtggcgggtggtaa

SEQ ID NO: 108595 - protein, 859 aa, Ustilago maydis 521
MFRRTLSAAPRAGVRLASTSSTSSSAGQRRTLTNRSVLVAVALAGGAVATYSLTKPSLYAEAPDTVPGDTRPHPLWSPPTRAQMLEALKQSSAKSLRPIASKGRSDNSSLLPLAKDATSSSPSPAASEQLGGTAASRSGDEDGEGFDILVVGGGATGAGVAVDAATRGLSVAMVERDDFGAGTSSKSTKLVHGGVRYLQKAVFELDYEQYKMVREALHERKTFLKIAPYLSDHLPIMLPVYKYWQIPYYWAGTKMYDILAGSENMESSYVLGKGKALEAFPMLKSAGLAGAVVYYDGQHNDTRMNVALAMTAVHHGAVVANHTEVVAIHKKPAAGKPDQICGARVRDVLTGDEWDVKCKCLINATGPFSDTLRKLDAPTSQEIVAASSGVHITLPGYFSPRDMGLIDPQTSDGRVIFFLPWQGNTIAGTTDTAAPVEAHPRPKEEEIQWILDEVRNYLSPDIKVRRGDVLSAWSGLRPLVKDPAATDTQSLVRNHMINVSESGLLTIAGGKWTTYREMAEQTVDRAIADFKLKPQRGCVTKNTRLLGSHGWTKTMYVKLLQRFGLETDVARHLSNTYGDRAWSVCSIAEPTGQRWPVHGKRIDQLYPYIEAEIRYACRSEYAATAQDFIARRTRLSFLNAEATVDALPRVIDVMAEELGWDEQRKKHEWAEGVEFMASMGLQPARVQQLKETSLDQMRKQRQSQQQAFKVSSLGAASLDDKDALAISGCASFNSEEMDELRAKFKLLDVNRDGKLDSKDLKQVLQRIGYSDVDDSTLRGIVNEVDFTKTGALHFEDFLDVFAALKDARLENAFTHILSEMDSQGLQPPSHDPVGPAAKEQSQRRDASRTIPVEKSGGGW

SEQ ID NO: 108596 - DNA, 2007 bp, Cryptococcus neoformans var. neoformans B-3501A
  CDS (1)..(2007)
atgttccgcggaaggtcatatatgccaggccgacgtgcattcgccgtcacaaccaccacaacccttgcagtcggttctgcctatctctacttccgtcctcagccagttcggctagaagatgcctcatcagtctatgatgtcaaacggcccgccaacctctcgtggaagccgcctacacgtgatcagatgcttagccatctggccacttcgggcatctatgtcaatcgaactcaagagagcggaccggagatcggcgaaatcaaaggagaaaaaaaggaggaggaggacgacgacgttttcgatctgttgattgtcggcggtggagccacaggtgctggtacagctctcgacgccgttagcagaggtttgaaagtggcttgtgtagagagagacgacttctccagcggcacgtcctcaaagagtacgaaacttgtccacggtggtgtccgttatctccaaaaagctatctttgagcttgactatgaacaatggaaactagtaaaggaggcccttagagagcgtcgtattttcttagatactgctccccatctcagtcacatgcttcccatcctcttaccgatctacacctggtggcagctaccttactactatgccggttgtaaactttacgatgtccttgctggtaaagagaatatggaaagcgcttattgggtgggcaaaggtaaagctttggaggctttccccactttgaagaaggagggacttgtcggcggtgttgtttattacgatggtcaacataatgactctcgaatgaacatatccattatgatgactgctgtccagcatggcgcagtcgttgccaactatacagaagttacggagctccacaagaaggctgatccttcgcgaaatggtcaagaaagaatctatgcggctaccgtcaaggacaacctgactggaaagaccatgaaggtccgatgtagaggtgtcatcaacgcgactggacccttcagtgatggtatcagacagttggatgaacccagcgttcaaaatatcgtggctcccagcgcaggtgtccatatctcccttcctaactactttggctccaagactatgggcctgcttgacccagctacctctgatggccgtgtcattttcttccttccttggcagggcgtcatcattgctggtacaacagactcccccaccagcctctctcagaaccctattcccgatgagaaagaaatccaatggattttagatgaagtagatcactatttgtcacctgatgtgaaagcaagaagggaggatattcttgctgcttggtctggcattaggccattggtcaaggatcctaattccaaaaacactgaatccctcgtcaggaaccatatcatcaacacctctaagggaggtctgatgaccatcgcagggggcaagtggactacctaccgagcaatggcagaagaaacagtcgacgctgctgtcaaagagtttgaccttaagcctaatggccctacacggacccatcatctcaagctcatcggcggtcacgcttggtccaaggtcatgtatatcaaacttcttcaagagtacggtctcgaaaccgaagtcgccaagcacctctctgaatcttacggtgaccgggcatggaccgttgcttcttttgctaatcccactggagaaagctggccgaagcacggtgtcaggttctaccgccgatacccctacattgaagccgaatgtcgatacgcctgtcgatgtgaatatgcccaaacggctgtcgacttccttgctagacgtatccgtctgtccttccttgatattcatgcgacagtggttgcccttcctagggtcattgacataatgagtgatgagctcggttgggatgctaagaggagagcagaagagttagagtcaacgatcaagttcctgcagtccatgggactcggctccaagtctgaccgagactatgctcacgaattgagtgagaggcgtggcgaaaggagacagatccccatcgagaggtctgctggtggagcgtag

SEQ ID NO: 108597 - protein, 668 aa, Cryptococcus neoformans var. neoformans B-3501A
MFRGRSYMPGRRAFAVTTTTTLAVGSAYLYFRPQPVRLEDASSVYDVKRPANLSWKPPTRDQMLSHLATSGIYVNRTQESGPEIGEIKGEKKEEEDDDVFDLLIVGGGATGAGTALDAVSRGLKVACVERDDFSSGTSSKSTKLVHGGVRYLQKAIFELDYEQWKLVKEALRERRIFLDTAPHLSHMLPILLPIYTWWQLPYYYAGCKLYDVLAGKENMESAYWVGKGKALEAFPTLKKEGLVGGVVYYDGQHNDSRMNISIMMTAVQHGAVVANYTEVTELHKKADPSRNGQERIYAATVKDNLTGKTMKVRCRGVINATGPFSDGIRQLDEPSVQNIVAPSAGVHISLPNYFGSKTMGLLDPATSDGRVIFFLPWQGVIIAGTTDSPTSLSQNPIPDEKEIQWILDEVDHYLSPDVKARREDILAAWSGIRPLVKDPNSKNTESLVRNHIINTSKGGLMTIAGGKWTTYRAMAEETVDAAVKEFDLKPNGPTRTHHLKLIGGHAWSKVMYIKLLQEYGLETEVAKHLSESYGDRAWTVASFANPTGESWPKHGVRFYRRYPYIEAECRYACRCEYAQTAVDFLARRIRLSFLDIHATVVALPRVIDIMSDELGWDAKRRAEELESTIKFLQSMGLGSKSDRDYAHELSERRGERRQIPIERSAGGA

SEQ ID NO: 108598 - DNA, 2397 bp, Cryptococcus neoformans var. neoformans B-3501A
  CDS (1)..(2397)
atgtttcgcggtaggtcttacatgcccggtcgacgcgctttggttttcaccaccgcgaccaccgttgctgttggttctgcctattatgctctgcgaccaactcccctacaccttgactcccagcatgttcctctcacgaagcgtcgtcccggaccactctgggcacctccctcccgtgagcagatgttggagcatctccgaacttctggtatctacatccaccgaaccgaagaaggtggacctgagccaggtgccgttctgcgaaaagatgaagcggaaagcgaaggggacgatgtatttgaccttctgattgttggcggcggtgctaccggtgctggtactgctcttgatgctgctagtcgcggtttgaaggttgcttgcgttgagagagaagatttctctagtggtacgtcttcaaagagtaccaaactggtccacggcggtgtacgatacctccagaaggcgatctttgagctcgattatgagcaatggaaattggtgaaggaggctcttcgggagcgtcgaatcttccttgaaactgccccacacctgagccacatgcttccgattcttcttccgatctacacttggtggcaacttccctattactacgccggatgcaagctctacgatttccttgctggtaaagagaatatggaaagtgcctactggatgggtaagggtaaggctcttgaggctttcccaatgttgaagaaggacggtcttgtcggtggtgtcgtgtactacgacggtcagcacaatgactcgcggatgaatatttcccttgtcatgactgctgtgcagcacggtgcggttgttgccaattatgtagaggtgaccgagctccacaaaaagcctgatccttcacgtggtggccaggagagaatctgcgcagcaactttgaaggacagacggaccggtgaaacatggaaagtccgaactagaggtgtcatcaatgctactggcccattcagcgatggcttgagaaagctcgatgaacctactacgcaggacattgttgctcctagtgctggtgttcatatcactctccctaattactacggcccaaaaaccatgggtttgcttgatcccgccacctccgatggtcgagtgatcttcttccttccttggcagggcaatgtgattgccggaactacagactcccccactaaggtttcacaaaaccccatcccagacgagaaggaaattcaatggattttggacgaggttcgaaattatctctcccctgatgtcaaggtccgacgtggtgacatcctatctgcgtggtccggcatcaggcctctcgtcaaggaccccaactccaagaataccgagtctttggtccgaaatcatatgatcaacacttccaagggtggtttgttgaccatcgctggtggcaagtggactacctatcgagctatggccgaagagacggtcgacgtcgccgtcaaagagttcaacctcaagcccaacgggccctcacagactaatcacatcaagcttgttggtggccacgcttggtccaagaccatgtacatcaagcttatccagcaattcggtcttgagactgaggttgccaaccatctctccgaatcctacggtgacagggcctggacggtggcatcaatggctaaacccaccggtgaatcatggcccttccatggtgttcgtctttcaaaactttacccgtacattgaggccgagtgccgatatgcctgtcgatgtgaatacgcacaaacggctgttgactttattgcccgccgaacgcgattatccttcctcaacgtccaagctacggtcgagacccttcctagagttttggagattatgggcgaggagcttggttgggacatgaagaggaaagagcaggagtttgacgacgctatggagttcttgaagtctatgggcctgcctcagcacaccaagctcaagctttccgacgttgagaagagtcatggccatatcggtcctcttggtctcgctcagaaggaggaagttgctctttatcaaagagctcagttcactcccgacgaagtcactcacttgcgtactcagtttgagcgattcgactttgaccatgatcaacgtatcacccgcgctgatctcattcacgccatgactggtatgggttatgacgcgtcagtcgaactggccgactctatcctccgagaagtcgactttggacgaaagggcgagattgacttccaagattaccttgatattgccgctggtcttaaggagttgcagctcgagaatgccttcactcacttgacccagcttgactctagcaggaaggaggcaggcgcaagggatattggtgaccatgctcatgaatccagtgaaagaagagaaaagaggaggaagattcccgttgagagatctggtggaggtgcctaa

SEQ ID NO: 108599 - protein, 798 aa, Cryptococcus neoformans var. neoformans B-3501A
MFRGRSYMPGRRALVFTTATTVAVGSAYYALRPTPLHLDSQHVPLTKRRPGPLWAPPSREQMLEHLRTSGIYIHRTEEGGPEPGAVLRKDEAESEGDDVFDLLIVGGGATGAGTALDAASRGLKVACVEREDFSSGTSSKSTKLVHGGVRYLQKAIFELDYEQWKLVKEALRERRIFLETAPHLSHMLPILLPIYTWWQLPYYYAGCKLYDFLAGKENMESAYWMGKGKALEAFPMLKKDGLVGGVVYYDGQHNDSRMNISLVMTAVQHGAVVANYVEVTELHKKPDPSRGGQERICAATLKDRRTGETWKVRTRGVINATGPFSDGLRKLDEPTTQDIVAPSAGVHITLPNYYGPKTMGLLDPATSDGRVIFFLPWQGNVIAGTTDSPTKVSQNPIPDEKEIQWILDEVRNYLSPDVKVRRGDILSAWSGIRPLVKDPNSKNTESLVRNHMINTSKGGLLTIAGGKWTTYRAMAEETVDVAVKEFNLKPNGPSQTNHIKLVGGHAWSKTMYIKLIQQFGLETEVANHLSESYGDRAWTVASMAKPTGESWPFHGVRLSKLYPYIEAECRYACRCEYAQTAVDFIARRTRLSFLNVQATVETLPRVLEIMGEELGWDMKRKEQEFDDAMEFLKSMGLPQHTKLKLSDVEKSHGHIGPLGLAQKEEVALYQRAQFTPDEVTHLRTQFERFDFDHDQRITRADLIHAMTGMGYDASVELADSILREVDFGRKGEIDFQDYLDIAAGLKELQLENAFTHLTQLDSSRKEAGARDIGDHAHESSERREKRRKIPVERSGGGA

SEQ ID NO: 108600 - DNA, 2184 bp, Tribolium castaneum
  CDS (1)..(2184)
atggcctcaacccttggaaaaatcgcactgggtggcctcaccaccacgctgggtgccggcctagcctcttacctcttcctcacagacgacaaagacaatcgatggggcgccgtttacgcccaacacagcccccctaaggccaaacgcaacctcccgagccgcgaggaacaaataaaatcgttgcagaacgactccttcgatgtgcttatcgtcggaggtggggccacaggggctggatgtgcgctagacgccgtcaccagggggctcaagacggctctcgtggaggccgacgatttcgcaagtgggacttctagtcgcagcacgaagctgatccatggaggggtgcgctacctccagaaggcgatcatgcagctggatatcgagcagtataggatggtcaaagaggcgctgcatgagagggcgtctatgttacagtcagccccacacttggcgcatcctctgcccatcatgctccccgtttatacgtggtggcaagtgccatattactgggttggcataaaaatgtacgacgttgtcgctggtcggaagaccctcaaatcatcgtatctcctctcaaagaaaaacgccttggagttgtttccaatgcttcgaggagacaaactttgtggtgctatagtttattacgacggccaacaagacgacgcccgaatgaatctcgccattgctttaacagccacccgtcacggcgccactgtggcaaaccacgtttctgtgaccggcctcctcaaagaaaaagattcttccggcaaagaaatcgtgtgtggcgtcagtgtcaaggacgaaatcaccggaaacaaatggaatgtcccggcaaaatgtgtgataaacgccactggacccttcacggactccatccggaagatggacaatccggaagtgaaaacgatttgttcgcccagcagtggcgtccatatcactcttcctgggtattacagcccggagcagatgggtttgcttgaccccagtaccagtgacggtcgcgtgattttcttcctgccgtggcagaagcagaccatcgctggtacgacggacctcccatgcgacgtcacccaccatcccaagcccaccgaggacgagattttatttattttagaagaagttaagaattatttgaatccggatgtggaagtgaggcgaggtgatgtcttgtcggcctggagcggtataaggccactcgtttccgatccgaataagccggacacgcagtcgcttgcccgtaaccacattgttcatgttagtgatagtaaattggtaacgatagctgggggtaaatggaccacgtatcgtgccatggctcaggagactattgatgcggcgattgccgcctgttgtctcaagccggtgcataaagagtgtcagactgacgggttgttgctggagggggcgcacggatggacccccaccatgtacattcggttagtgcaggatttcggcctggagtgcgaggtggcgcaacatttgtccaagtcctacggcgacagggcgttcacggtggccaagatggcagcgctgacagggaagcggtggcccatcatcggcaaaaaaatccaccccgagttcccgtacatcgacgccgaggtcagatacggcgtccgagagtacgcagtgactgccgtcgacatgatcgcacgaaggcttcgtttggctttcctcaacgtgcaagccgctcaagaagccctccctgagattatcacaatcatggccgaggagttaggctggtctgacgaggagaagcaaaagcagcacaaagacgccacaatcttcctccagaacgagatgggccagaacgtgaaccgcgccagcagagacaaaatcccgatcaatttgagcaaagaagagatacagttgtacattaagcggttccaaattatcgacaaggaccgcaagggatacgtctcgatcaatgatataaggaggagtctcaagcgggatgatggaaaggaggttcctggtgaggagctccacgaaatccttcgggagattgatacgaatatgaatggacaagttgaacttgacgagtatttgcagatgatgtctgccatcaagtcaggccatgtgacgtattcgagattcgcccgaatggctgaactcgaagaacaaaaacacgagaaagaaatgctcaagaagaagatttcggtcgagcgcagcggtggcggcgtgtaa

SEQ ID NO: 108601 - protein, 727 aa, Tribolium castaneum
MASTLGKIALGGLTTTLGAGLASYLFLTDDKDNRWGAVYAQHSPPKAKRNLPSREEQIKSLQNDSFDVLIVGGGATGAGCALDAVTRGLKTALVEADDFASGTSSRSTKLIHGGVRYLQKAIMQLDIEQYRMVKEALHERASMLQSAPHLAHPLPIMLPVYTWWQVPYYWVGIKMYDVVAGRKTLKSSYLLSKKNALELFPMLRGDKLCGAIVYYDGQQDDARMNLAIALTATRHGATVANHVSVTGLLKEKDSSGKEIVCGVSVKDEITGNKWNVPAKCVINATGPFTDSIRKMDNPEVKTICSPSSGVHITLPGYYSPEQMGLLDPSTSDGRVIFFLPWQKQTIAGTTDLPCDVTHHPKPTEDEILFILEEVKNYLNPDVEVRRGDVLSAWSGIRPLVSDPNKPDTQSLARNHIVHVSDSKLVTIAGGKWTTYRAMAQETIDAAIAACCLKPVHKECQTDGLLLEGAHGWTPTMYIRLVQDFGLECEVAQHLSKSYGDRAFTVAKMAALTGKRWPIIGKKIHPEFPYIDAEVRYGVREYAVTAVDMIARRLRLAFLNVQAAQEALPEIITIMAEELGWSDEEKQKQHKDATIFLQNEMGQNVNRASRDKIPINLSKEEIQLYIKRFQIIDKDRKGYVSINDIRRSLKRDDGKEVPGEELHEILREIDTNMNGQVELDEYLQMMSAIKSGHVTYSRFARMAELEEQKHEKEMLKKKISVERSGGGV

SEQ ID NO: 108602 - DNA, 2181 bp, Tribolium castaneum
  CDS (1)..(2181)
atggcctcaacccttggaaaaatcgcactgggtggcctcaccaccacgctgggtgccggcctagcctcttacctcttcctcacagacgacaaagacaatcgatggggcgccgtttacgcccaacacagcccccctaaggccaaacgcaacctcccgagccgcgaggaacaaataaaatcgttgcagaacgactccttcgatgtgcttatcgtcggaggtggggccacaggggctggatgtgcgctagacgccgtcaccagggggctcaagacggctctcgtggaggccgacgatttcgcaagtgggacttctagtcgcagcacgaagctgatccatggaggggtgcgctacctccagaaggcgatcatgcagctggatatcgagcagtataggatggtcaaagaggcgctgcatgagagggcgtctatgttacagtcagccccacacttggcgcatcctctgcccatcatgctccccgtttatacgtggtggcaagtgccatattactgggttggcataaaaatgtacgacgttgtcgctggtcggaagaccctcaaatcatcgtatctcctctcaaagaaaaacgccttggagttgtttccaatgcttcgaggagacaaactttgtggtgctatagtttattacgacggccaacaagacgacgcccgaatgaatctcgccattgctttaacagccacccgtcacggcgccactgtggcaaaccacgtttctgtgaccggcctcctcaaagaaaaagattcttccggcaaagaaatcgtgtgtggcgtcagtgtcaaggacgaaatcaccggaaacaaatggaatgtcccggcaaaatgtgtgataaacgccactggacccttcacggactccatccggaagatggacaatccggaagtgaaaacgatttgttcgcccagcagtggcgtccatatcactcttcctgggtattacagcccggagcagatgggtttgcttgaccccagtaccagtgacggtcgcgtgattttcttcctgccgtggcagaagcagaccatcgctggtacgacggacctcccatgcgacgtcacccaccatcccaagcccaccgaggacgagattttatttattttagaagaagttaagaattatttgaatccggatgtggaagtgaggcgaggtgatgtcttgtcggcctggagcggtataaggccactcgtttccgatccgaataagccggacacgcagtcgcttgcccgtaaccacattgttcatgttagtgatagtaaattggtaacgatagctgggggtaaatggaccacgtatcgtgccatggctcaggagactattgatgcggcgattgccgcctgttgtctcaagccggtgcataaagagtgtcagactgacgggttgttgctggagggggcgcacggatggacccccaccatgtacattcggttagtgcaggatttcggcctggagtgcgaggtggcgcaacatttgtccaagtcctacggcgacagggcgttcacggtggccaagatggcagcgctgacagggaagcggtggcccatcatcggcaaaaaaatccaccccgagttcccgtacatcgacgccgaggtcagatacggcgtccgagagtacgcagtgactgccgtcgacatgatcgcacgaaggcttcgtttggctttcctcaacgtgcaagccgctcaagaagccctccctgagattatcacaatcatggccgaggagttaggctggtctgacgaggagaagcaaaagcagcacaaagacgccacaatcttcctccagaacgagatgggccagaacgtgaaccgcgccagcagagacaaaatcccgatcaatttgagcaaagaagagatacagttgtacattaagcggttccaaattatcgacaaggaccgcaagggatacgtctcgatcaatgatataaggaggagtctcaagtctctaggtatgaaactaaccgacgacgaaatccaccacctcttatccgatattaacgtaacttacaacggccaattggaactggctgattacttgcagatgatgtctgccatcaagtcaggccatgtgacgtattcgagattcgcccgaatggctgaactcgaagaacaaaaacacgagaaagaaatgctcaagaagaagatttcggtcgagcgcagcggtggcggcgtgtaa

SEQ ID NO: 108603 - protein, 726 aa, Tribolium castaneum
MASTLGKIALGGLTTTLGAGLASYLFLTDDKDNRWGAVYAQHSPPKAKRNLPSREEQIKSLQNDSFDVLIVGGGATGAGCALDAVTRGLKTALVEADDFASGTSSRSTKLIHGGVRYLQKAIMQLDIEQYRMVKEALHERASMLQSAPHLAHPLPIMLPVYTWWQVPYYWVGIKMYDVVAGRKTLKSSYLLSKKNALELFPMLRGDKLCGAIVYYDGQQDDARMNLAIALTATRHGATVANHVSVTGLLKEKDSSGKEIVCGVSVKDEITGNKWNVPAKCVINATGPFTDSIRKMDNPEVKTICSPSSGVHITLPGYYSPEQMGLLDPSTSDGRVIFFLPWQKQTIAGTTDLPCDVTHHPKPTEDEILFILEEVKNYLNPDVEVRRGDVLSAWSGIRPLVSDPNKPDTQSLARNHIVHVSDSKLVTIAGGKWTTYRAMAQETIDAAIAACCLKPVHKECQTDGLLLEGAHGWTPTMYIRLVQDFGLECEVAQHLSKSYGDRAFTVAKMAALTGKRWPIIGKKIHPEFPYIDAEVRYGVREYAVTAVDMIARRLRLAFLNVQAAQEALPEIITIMAEELGWSDEEKQKQHKDATIFLQNEMGQNVNRASRDKIPINLSKEEIQLYIKRFQIIDKDRKGYVSINDIRRSLKSLGMKLTDDEIHHLLSDINVTYNGQLELADYLQMMSAIKSGHVTYSRFARMAELEEQKHEKEMLKKKISVERSGGGV

SEQ ID NO: 108604 - DNA, 1839 bp, Streptococcus pyogenes str. Manfredo
  CDS (1)..(1839): transl_table=11
atggaattttcaagagaaacaagacgcttagctctccaaaaaatgcaagaaagagatttagacctactgattattgggggaggtattacgggtgctggtgtggcgcttcaggcggcagctagtggcctagatacgggtctgattgagatgcaagattttgcgcaaggaacctctagccgttcaaccaaattggttcacggggggcttcgttatttgaaacaatttgatgtggaggtggtttcagatacggtgtcagagcgggctgtggtgcaacaaattgcaccccacattccaaaaccagaccctatgttattacctgtttatgacgaacctggtagtacctttagcatgttccgtttgaagatcgctatggatttgtatgatcttttagcaggcgtgtccaatacgccagcggccaacaaggtgttaactaaagaagaagtcttaaaacgagaaccagacttaaaacaagaaggcttgcttggtggtggggtttaccttgatttccgtaataatgacgcaaggcttgttattgaaaatatcaaacgagctaatcgtgatggggctcttattgctagtcatgtgaaatcagaagatttcttgctagatgacaatggtaagattattggtgtgaaggcgcgtgatttgctgtcagatcaagaaatcattatcaaggctaaattagtcatcaacaccacaggtccatggagtgatgagattcgtcaattctctcataagggacaaccgattcatcaaatgcgccctacaaaaggggtgcatctggtagtggaccgtcaaaaattaccagtgtctcaacctgtctatgttgacacagggttaaatgatggtcgtatggtctttgtcttgccacgtgaagaaaaaacttattttggaacaacggacacggactacactggagacttggagcacccacaagttactcaagaagatgtggattatttgttaggcgttgtcaataaccgctttccaaatgccaacgtgaccattgatgatattgaaagcagttgggctggtcttcgccccttgttatcaggtaatagtgcttctgactacaatggtggcaacagcggtaaagtcagtgatgatagttttgatcacttggttgatactgtcaaagcctatattaaccacgaagatagccgagaagctgttgaaaaagctattaagcaggttgaaaccagcacatctgaaaaagaattggatccgtctgcagtgtcacgaggttcaagttttgaccgtgatgagaatggcctctttaccttggcaggtggtaagattaccgactatcgcaaaatggctgaaggagcattgacagggattattcaaaccctcaaagaagagtttggcaaatccttcaagcttatcaattcaaaaacctatcctgtttcaggaggtgaaatcaatccagccaatgtagattcggaaatagaagcctatgctcaattaggaactcttagtggtctttcgatggatgatgctaggtatttggcaaacctttatggttctaatgcgccaaaagtctttgccttaactcgtcaattaacagcagctgaagggttaagtttagctgaaaccttgtccttacattatgcgatggattatgaaatggctcttaaaccgacagattatttcttgagaagaacaaatcacctcttatttatgcgagatagcctagatgctttgattgacccagtgattaatgaaatggctaaacattttgaatggtctgatcaggaaagagtggcacaagaagacgatcttcgtcgcgtgattgcagacaatgatttgagtgccctaaaaggccagcaggagggttaa

SEQ ID NO: 108605 - protein, 612 aa, Streptococcus pyogenes str. Manfredo
MEFSRETRRLALQKMQERDLDLLIIGGGITGAGVALQAAASGLDTGLIEMQDFAQGTSSRSTKLVHGGLRYLKQFDVEVVSDTVSERAVVQQIAPHIPKPDPMLLPVYDEPGSTFSMFRLKIAMDLYDLLAGVSNTPAANKVLTKEEVLKREPDLKQEGLLGGGVYLDFRNNDARLVIENIKRANRDGALIASHVKSEDFLLDDNGKIIGVKARDLLSDQEIIIKAKLVINTTGPWSDEIRQFSHKGQPIHQMRPTKGVHLVVDRQKLPVSQPVYVDTGLNDGRMVFVLPREEKTYFGTTDTDYTGDLEHPQVTQEDVDYLLGVVNNRFPNANVTIDDIESSWAGLRPLLSGNSASDYNGGNSGKVSDDSFDHLVDTVKAYINHEDSREAVEKAIKQVETSTSEKELDPSAVSRGSSFDRDENGLFTLAGGKITDYRKMAEGALTGIIQTLKEEFGKSFKLINSKTYPVSGGEINPANVDSEIEAYAQLGTLSGLSMDDARYLANLYGSNAPKVFALTRQLTAAEGLSLAETLSLHYAMDYEMALKPTDYFLRRTNHLLFMRDSLDALIDPVINEMAKHFEWSDQERVAQEDDLRRVIADNDLSALKGQQEG

SEQ ID NO: 108606 - DNA, 1560 bp, Dichelobacter nodosus VCS1703A
  CDS (1)..(1560): transl_table=11
atgaacagagtaaacgcgctttgtcagttatcacaggcaaagtgttgggacgttgtcgtcatcggcggcggcgcaacgggattaggcattgcactcgatgcgattacccgcggtttttctactttattgctcgaagctaaagattttgctcaaggaacgtccagtcgttccacaaaattggtacacggcggcgtgcgttatttagcacaaggcgatgttgctttggtgcgcgaagcgttaagagaacgcggacgtttggcaaaaaatgccccgcatttatttaaaattcaaccgtttattattcctggtgaatatttttggacagcaccttattacacttttggtttgtggttatacgatcggctttccggaaaattaagcatcggcgcaacccgttatttatctaaaacggaaacgcaaaaacgactcgccggcattaaagcagaaaaaatccgcgccggtgtatgttattacgacgggcaatttgatgacgcgcgtttagcagtaacgttggcgcaatctgccgttgaccacggcgcgaccgtgctcaattattgccctgttgtggcattacataaaaacgacgcgggtaaagttgatggcgtggtggcgcaagatgcgttttctcaacagtcttaccagatttcagcgcgcgcggtgattaatgccacgggcgtttttgccaatgaaattgtggcgatggacgagcccgacagtaaaccgcgcattgtgcccagtcagggaattcatttggtttttgaccgcgatttattagccagcgatgatgcgttaatggtgccgaaaaccagcgatggacgcgttctttttgcggtgccgtggcatgataaattggtggtgggaacaaccgatacgctcgttaattcagttagttatgatcctaaaccattggatcaagaaattcagtttattttagaaaccgctcgagattattttaaacgcgcgccaacgcgggcagatgtaaaaagcgtttttgtgggattgcgtccgctggcagcgccgaaaaaagaaggcaaagcaacgaaggaagtttcgcgcagtcataaagttcatatcagcgattcgggattggtgcatattatcggcggcaaatggacgacgtatcgccaaatggcagaagatacgattgacgccgcaatgaaagccaatttattgccgaaaaaagcctgccaaacagtggcgctcaaattgcacggttatcaagaatcttcattaagcgattcttttttaagcgtttacggcagcgatactgcagcattacaaaaatacagcgccgatgatgcggctttagcagaaaaaattcaccctgattatccttatcttttggcgcaagttgcttgggcaattgatcacgaaagcgcgttgactttggaggatattttagccagacgtattcgtttattatttttagatgcccgcgctgccgcacaatcggcggaaaaagtggcgcggtttatggcaaaacgtttgcaatgggacgatgaacgtttgcaaacagaattgaacaattttactgccaaagcagcgcagtatcatttgtaa

SEQ ID NO: 108607 - protein, 519 aa, Dichelobacter nodosus VCS1703A
MNRVNALCQLSQAKCWDVVVIGGGATGLGIALDAITRGFSTLLLEAKDFAQGTSSRSTKLVHGGVRYLAQGDVALVREALRERGRLAKNAPHLFKIQPFIIPGEYFWTAPYYTFGLWLYDRLSGKLSIGATRYLSKTETQKRLAGIKAEKIRAGVCYYDGQFDDARLAVTLAQSAVDHGATVLNYCPVVALHKNDAGKVDGVVAQDAFSQQSYQISARAVINATGVFANEIVAMDEPDSKPRIVPSQGIHLVFDRDLLASDDALMVPKTSDGRVLFAVPWHDKLVVGTTDTLVNSVSYDPKPLDQEIQFILETARDYFKRAPTRADVKSVFVGLRPLAAPKKEGKATKEVSRSHKVHISDSGLVHIIGGKWTTYRQMAEDTIDAAMKANLLPKKACQTVALKLHGYQESSLSDSFLSVYGSDTAALQKYSADDAALAEKIHPDYPYLLAQVAWAIDHESALTLEDILARRIRLLFLDARAAAQSAEKVARFMAKRLQWDDERLQTELNNFTAKAAQYHL

SEQ ID NO: 108608 - DNA, 1575 bp, Synechococcus sp. WH 7803
  CDS (1)..(1575): transl_table=11
atgaatgacacaggcttcgatctcctggtgatcggcggaggtgccagcggtgcctgcgttgcctacgagggcgtgcgccgcggcctgcgtgtggccttgctggagggccatgacctgggaggtggcaccagttgccgcagcaccaagttgctgcacggaggggttcgctacctcgagcttgcgttcaaaaccgccgacacagcgcagctgcgcttggtgagggaagccttgctggagcgcggtcactggctccagcaagctccctttttggccaaacgcctcgaactggccctgcccacagacggagtgatcggccaggcctactaccgcctcgggcttggcctttacgacgcactctcgggccgctcagggattggaagcagtcgcctgctgtcaagccaacagctgcgccatgccctgcccgcccttcgagacgacatcacccgaggtgtggcctacagcgacgggcagtttgatgatgcgcgcctcaacctgctgatggcactcaccgcggagcaagcgggcgcggtcgtgcgcacccgcacgcgggttgtcgctctggaaaccgacagcagcggcaggctctgcggtgcgatcagtgaaagcgccagcgggcagaacgagcgctggcaggcgaaggtggttgtgaatgccactgggattcactccgacacgattcggagaatggctgatccctcctgcgaggagaggatgctcaccagccggggcattcacctcgtgctcaagcaaaccctttgcccagagggggtcggcctgctgctcccgtccaccgatgacgggcgggtgctgttcatgcttccgttcttcgggcgaaccctggtgggcaccaccgacaccccctgcccccaagagcaagcctccgttccagcggaaaacgaagtgaagtacctcctggattacgtgcagcgctggtttcctgcacgcgaccccgttgatgtgggcagctgctgggccgggggacgccccctgctgaagccggccggtgccgatgtgaacagcagccgtgttgtgcgtgagcacgaggtggaaaccctggcctgcgggctggtgagtgtgatgggaggcaagtggaccacctgccggcccatggccatcgacaccctccaagcggtggagcagcagctcggacacaccctcaaagcgcctggggcactgcctctgatcggaagcgcccccgatcccctgcaaacgcctgctctgctccagacccaacacgcttctctggaatcactgttgccagacacgcctcagcgctcgcagcagattgcccatctccaggccaaccacgggcttgcagcagcacagtgggtgtcgagctggtcgaacgacgaccgacagcccctcagcgaggtgattcctgtctgccggggtgagcttcgccatgcgatcacccatgagcatgcgcgcggcgtcacggatgtgctctgccggcgcacacgcctgggcatggtggatcagcaggatgccgagcgactgcgcccgaacgtgagcgaactgctggcgcaggctggccacggcggtgctgatgcggaggccctggatctgtcccgctga

SEQ ID NO: 108609 - protein, 524 aa, Synechococcus sp. WH 7803
MNDTGFDLLVIGGGASGACVAYEGVRRGLRVALLEGHDLGGGTSCRSTKLLHGGVRYLELAFKTADTAQLRLVREALLERGHWLQQAPFLAKRLELALPTDGVIGQAYYRLGLGLYDALSGRSGIGSSRLLSSQQLRHALPALRDDITRGVAYSDGQFDDARLNLLMALTAEQAGAVVRTRTRVVALETDSSGRLCGAISESASGQNERWQAKVVVNATGIHSDTIRRMADPSCEERMLTSRGIHLVLKQTLCPEGVGLLLPSTDDGRVLFMLPFFGRTLVGTTDTPCPQEQASVPAENEVKYLLDYVQRWFPARDPVDVGSCWAGGRPLLKPAGADVNSSRVVREHEVETLACGLVSVMGGKWTTCRPMAIDTLQAVEQQLGHTLKAPGALPLIGSAPDPLQTPALLQTQHASLESLLPDTPQRSQQIAHLQANHGLAAAQWVSSWSNDDRQPLSEVIPVCRGELRHAITHEHARGVTDVLCRRTRLGMVDQQDAERLRPNVSELLAQAGHGGADAEALDLSR

SEQ ID NO: 108610 - DNA, 1653 bp, Leptospira interrogans serovar Copenhageni str. Fiocruz L1-130
  CDS (1)..(1653): transl_table=11
atgcaaatttgtagggggaaagaaacctgtaaagcaggaagagttctcaaaatggaaaaacaaaaacgagtcgatcaaatttctaaactacaaaaagaatcctttgatattttagtaatcggaggtgggtctacaggtgctggagccgctttcgacgcagcaaaaagaggttataaaacagctctgattgaaagaaaagattttgcttcgggaacttcttcccgttccaccaaactgattcatggtggggtccgttatttagctcagttccattttaaattgattcacgaggctttgacggaaaggcagaggttattggaaaacgcacctcacttagtcaaacctcttaagttcgttttacctgcatatcgattttacgaaagaccgtattacggaatcggtcttactctctatgatattcttgcgtctaagggaaaacttccttctcacaaaacggtttctaaatccgaaacaatttccgagtttaaagccatcaagaaggaaggtttatttggtggaattacctattacgacgctcagtttaatgatgctcgtttgaatgttcttttggcaagatctgcacaaaaagaaggagccgtagttgccaatcgaatagaactcgtttcttttattaaaaagagcggaaagattgtaggagccaatctcaaagatttagagaccgcaaaaacctttccagtttatacaaaggtaatcgcaaatacaactggaatctgggtagatcacattcgtaagttagacgatccaagaacgtttaacgtgctttctcccagccaagggatccacttagtattctccaaagaaagagttccttgtacatccgccatgatcattccgaaaacaaaggatgggcgagtcgtatttatcattccttgggaagaccacgtaattcttggaaccacggatactccgattgaaaatccaggagaagaaccacttccgatcggaaatgaggttcaatttttattggatactggaaacgaatatttggaaaatccagtcactgaaaaagatattctttccgtgtttgtaggaattcgtcctttgatttcaccagagggaaatcaggatacgaagaatatttcgagagaggaagtgattttagtttctaattccggtttggttacgatgggaggaggaaaatggtccacttacagaaagatggctgaggatttggtggataaactcattcagatcggaaatctagaagttagagaaaaatgttctactaaattttatgtttatcctggagctgcagattattcagaatctctttaccaggaaattgaaaaaacatataagatcgatacgatctttgcaaaaaggcttcaaaattattatggaacggaagttttcgaagttttgggaaaaaaaccgaaactattgggaaaaggaattccgtatttcgaagaggaagttttgtttgcggttaacgaagaatttgcgttaggcgtcacggacgttcttgcaagaagatttagaattctatttgtagatctcagtttggcgcagaagatggtcgctcctgtggctatggttctttccaaacaactcaagtggaaggacaaaacaaaaaaagcggaagaatccgctgcaatggagctaatcgaaagtttgaggaagtcgtatcgataa

SEQ ID NO: 108611 - protein, 550 aa, Leptospira interrogans serovar Copenhageni str. Fiocruz L1-130
MQICRGKETCKAGRVLKMEKQKRVDQISKLQKESFDILVIGGGSTGAGAAFDAAKRGYKTALIERKDFASGTSSRSTKLIHGGVRYLAQFHFKLIHEALTERQRLLENAPHLVKPLKFVLPAYRFYERPYYGIGLTLYDILASKGKLPSHKTVSKSETISEFKAIKKEGLFGGITYYDAQFNDARLNVLLARSAQKEGAVVANRIELVSFIKKSGKIVGANLKDLETAKTFPVYTKVIANTTGIWVDHIRKLDDPRTFNVLSPSQGIHLVFSKERVPCTSAMIIPKTKDGRVVFIIPWEDHVILGTTDTPIENPGEEPLPIGNEVQFLLDTGNEYLENPVTEKDILSVFVGIRPLISPEGNQDTKNISREEVILVSNSGLVTMGGGKWSTYRKMAEDLVDKLIQIGNLEVREKCSTKFYVYPGAADYSESLYQEIEKTYKIDTIFAKRLQNYYGTEVFEVLGKKPKLLGKGIPYFEEEVLFAVNEEFALGVTDVLARRFRILFVDLSLAQKMVAPVAMVLSKQLKWKDKTKKAEESAAMELIESLRKSYR

SEQ ID NO: 108612 - DNA, 1641 bp, Desulfovibrio vulgaris subsp. vulgaris str. Hildenborough
  CDS (1)..(1641): transl_table=11
atgagcagacgacagattctggaacgcctgcaggccgacaagacgttcgacctgctcattgtcggaggcggggccaccggctgtggcgtcgccctcgacgcggccacgcgcggactggacgtggcactggtggagagggacgacttcgcgcaaggcaccagcagcaagagcaccaaactcgtccacgggggtgtgcgctaccttgagaaggccatcctcaaggcagacaaggaacagttcgcactcgtgcacgagggtcttcgcgaacggggctacctcttgcgcaacgcgccccacctcgcccaccccgtgcaactcatgacgccggtcgattcgtggaaggacgcgggctacctctttgcgggcctcaccatgtacgacctgctggcaggtcgcctcggactgggacacagtcgcttcgtcacccgttccaaggcacaacgcctcttcccgaccttgcgcctcggaaaggccaaaggggcggtcctctactacgacgggcagttcaacgatgcgcgcatggccgtcaccctcgcccgcacggcagccctccacggcgcgacctgcgccaaccacgtcgaggtcatcgacctcgtgcgcgagaacgggcgcctttgtggtgccgtcttgcgcgatgtgaacagcggcgagacgtggcaggtacgggcgcggggcatcatcaacgccaccggacccttcagcgacggccttcgccgcatggacgaccagaatgcctgcgacatcctcaaggtgagttcgggcatccatctggtcatcgaccccgggcacaccccgccccatctcggcctcatggtcccccgcaccgatgacggacgcgtcctgttcatgattccgtggcaggggcatgtggtcttcggcaccaccgacgaaccggtggacatctcgcgcgaccctgtgcccacgcaggaggacatcgactacctgctgaactatgccggacgctacctgtcgcgccccctttcgcgcgatgacgttcgcgcggcgtggtgcggcctgcgcccgctcgtgttcgaggccgacaaatcgtgcacacaggaacttgcgcgcacccatgtcatcgaagtctcgcccggagggctgctcaccatcaccggcggcaagtggaccagctacaggcgcatggccgaagacaccatcgacagggcggatgcagccttcgaactggggctgcagcggccttgcgtcacgcgcgacctcagggtcatcggttcacgggggttcgtgcgcggggcccatgccgagatggcacgcgatttcggtgtagaccctgcccttgcccgcgggcttttcgaactccatggcgacgagaccccactcatcctcacccttgcccgcgaagaggggctgatggaccgcctgcacccggcgcacaactacatcggggcgcaagtggccttcgccgtgcgccacgagatggcggtgcacctcaccgacgtcatggtccgcagacttccgctgggtctggtcgatgtgcagcacacccttgaggcatctgccccggctgcggacatcatggcgcaggaactgggctgggatgcagcaacccgccagcgcgagatggaggcccttgccgcctacctcgccgcatggcgacccgcccctgacgccgccacgacatga

SEQ ID NO: 108613 - protein, 546 aa, Desulfovibrio vulgaris subsp. vulgaris str. Hildenborough
MSRRQILERLQADKTFDLLIVGGGATGCGVALDAATRGLDVALVERDDFAQGTSSKSTKLVHGGVRYLEKAILKADKEQFALVHEGLRERGYLLRNAPHLAHPVQLMTPVDSWKDAGYLFAGLTMYDLLAGRLGLGHSRFVTRSKAQRLFPTLRLGKAKGAVLYYDGQFNDARMAVTLARTAALHGATCANHVEVIDLVRENGRLCGAVLRDVNSGETWQVRARGIINATGPFSDGLRRMDDQNACDILKVSSGIHLVIDPGHTPPHLGLMVPRTDDGRVLFMIPWQGHVVFGTTDEPVDISRDPVPTQEDIDYLLNYAGRYLSRPLSRDDVRAAWCGLRPLVFEADKSCTQELARTHVIEVSPGGLLTITGGKWTSYRRMAEDTIDRADAAFELGLQRPCVTRDLRVIGSRGFVRGAHAEMARDFGVDPALARGLFELHGDETPLILTLAREEGLMDRLHPAHNYIGAQVAFAVRHEMAVHLTDVMVRRLPLGLVDVQHTLEASAPAADIMAQELGWDAATRQREMEALAAYLAAWRPAPDAATT

SEQ ID NO: 108614 - DNA, 1722 bp, Staphylococcus aureus subsp. aureus MRSA252
  CDS (1)..(1722): transl_table=11
atgtgggacaagtctctcgtttttacattttttaggaggcgttttggaatggcattgtctacttttaagagagaacatattaaaaagaatttaagaaatgatgaatatgatttagtaattattggtggcggtattacaggtgcaggtattgcactagacgcgagtgaaagaggaatgaaagttgcattagttgaaatgcaagactttgcacaaggaacaagctcaagatctacaaaattagtccatggtggtttacgttacttaaaacaattccaaataggagtagttgccgaaactggtaaagaacgtgcgattgtttatgaaaatgggcctcatgttacgactccagagtggatgcttttaccaatgcataaaggtggaacatttggtaaattctcaacatcaattggtttaggaatgtatgatcgtttagcaggtgttaagaagtctgaacgtaaaaaaatgttatctaaaaaagaaactttagctaaagaaccattagttaaaaaagaaggtctaaaaggcggcggttactatgttgaatatcgtactgacgatgcgcgtttaactattgaagttatgaagcgtgctgccgaaaaaggcgcagaaattatcaactatactaagtcagaacacttcacttatgataaaaatcaacaagtaaatggtgttaatgttatagataaattaactaatgaaaattatacaattaaggctaaaaaagtggttaatgcagcaggtccatgggttgatgatgttagaagtggtgattatgcacgcaataataaaaaattacgtttaactaaaggtgtacatgttgttattgatcaatcaaaattcccattaggtcaagcagtatactttgatactgaaaaagatggaagaatgatttttgcaatcccgcgtgaaggaaaagcgtatgtaggtactacagatacattctatgacaatatcaaatcttcaccattaactacacaagaagacagagattatttaatcgatgcgattaattacatgttccctagtgttaatgttacagatgaagatattgaatcaacatgggcaggaattagaccattaatttacgaagagggcaaagacccttctgaaatctctcgtaaggatgaaatttgggaaggtaaatcaggtttattaactattgcaggtggtaaattaacaggctatcgtcacatggctcaagacattgttgatttagtatctaaacgcttgaaaaaagactatggtttaacatttagtccatgtaatacaaaaggtctggcaatttctggtggcgatgtaggtggtagcaagaactttgatgcgtttgtagagcaaaaagtagatgtagctaaaggattcggcattgatgaagatgttgcgagacgtttagcatctaaatatggttcaaatgttgatgaattgttcaacattgcgcaaacatctcaataccatgacagcaagttaccattagaaatttatgtagaacttgtttatagtattcaacaagaaatggtatacaaacctaacgatttcttagttcgtcgttctggtaaaatgtacttcaatattaaagatgtattagattataaagatagtatcatcgatattatggctgatatgttagactattctccagctcaaattgaggcttatactgaagaagttgagcaagcaattaaagaagcgcaacatggaaataatcaaccagcagttaaagaataa

SEQ ID NO: 108615 - protein, 573 aa, Staphylococcus aureus subsp. aureus MRSA252
MWDKSLVFTFFRRRFGMALSTFKREHIKKNLRNDEYDLVIIGGGITGAGIALDASERGMKVALVEMQDFAQGTSSRSTKLVHGGLRYLKQFQIGVVAETGKERAIVYENGPHVTTPEWMLLPMHKGGTFGKFSTSIGLGMYDRLAGVKKSERKKMLSKKETLAKEPLVKKEGLKGGGYYVEYRTDDARLTIEVMKRAAEKGAEIINYTKSEHFTYDKNQQVNGVNVIDKLTNENYTIKAKKVVNAAGPWVDDVRSGDYARNNKKLRLTKGVHVVIDQSKFPLGQAVYFDTEKDGRMIFAIPREGKAYVGTTDTFYDNIKSSPLTTQEDRDYLIDAINYMFPSVNVTDEDIESTWAGIRPLIYEEGKDPSEISRKDEIWEGKSGLLTIAGGKLTGYRHMAQDIVDLVSKRLKKDYGLTFSPCNTKGLAISGGDVGGSKNFDAFVEQKVDVAKGFGIDEDVARRLASKYGSNVDELFNIAQTSQYHDSKLPLEIYVELVYSIQQEMVYKPNDFLVRRSGKMYFNIKDVLDYKDSIIDIMADMLDYSPAQIEAYTEEVEQAIKEAQHGNNQPAVKE

SEQ ID NO: 108616 - DNA, 1842 bp, Leifsonia xyli subsp. xyli str. CTCB07
  CDS (1)..(1842): transl_table=11
atggcgacaacagccctgtccaactcagcgcagtcctcggcggcatccgctccatcacgactcggcccggccgaacgggctgccgcgatcgcggcgctgaaggaatccgaactcgacatcctggtggtcggcggcggcatcgtcggtgccggcagcgcggtggacgccgtcacccgcggtctgagtgtggggctggtggaggcgcgtgacttcgcttcgggcacctccagccggtcgtccaagctcgtccacggcggcatccggtacctggaacagctggacttcggtctcgtgcgcgaggcgctcatcgagcgtggtctgctgctgcagcggatcgcgccgcacctcgtgaagccggtgcggttcctgtacccgctgcacaagcgggtgtgggagcgcctctacatcggcgccgggatgatgctgtacgacatcttctcctacaccggtctccgcccgccgggagtcccgcaccaccgccacctcagccggcgccaggtgctgaaggccatcccgagccttgcgccgaacgccctggtgggcggcatcacctactacgacgcgcaggtggacgacgcccgctacgtggccaccctcgcccgcaccgcggcgcactacggcgcccaggtcgccacccgcctccgagtcgagggcttcgtcaaggtcggcgagcgcgtcgtcggcgtgtgggcgcgcgatctggagacggacgaacggttcgagatccgcgccaagcaggtcgtgaacgcgaccggcgtctggacggacgatacccaggcgatggtgggggagcgcggccagttcaaggtgcgcgcctcgaagggcgtccacctcgtcgttccgcgcgaccgcttccaatcgaagataggtctgctgctgcgcaccgagaagagcgtgctgttcgtgatcccgtggggccggcactggctcatcggcaccaccgacaccgactggaacctcgacaaggcccacccggcggcgaccgcggccgacatcgactacctgctcgcgcacgtgaatcaggtgctcaacgtgccgctgacccgcgaagatgtcgagggcgtgttcgccgggctgcgtccgctgctcgccggggagtcggaggagacctcgaaactctcccgcgagcacctcgtggcgcactccgtgccggggctcgtcgtgatcgcgggtggtaagtggacgacctaccgcgtgatggcgaaggacgcgatcgacgccgccgtggacgcgctcgacggcaagatcccggccagtgccacaatggagatcgcgctcgtcggagccgagggctaccaggctgcctggaacagccgcggccgcatcgcgcgggagagcggtctccaccccgcccgcatcgagcacttcctcaaccgctatgggacgatgaccgccgatatcctggcgctcatccgcgaagacccggcgctcgccgaacctcttccgggcgccgacgactacgtgggcgcggaggtcgtctacgccgtctcccacgagggcgccctgcacctcgaagacgtcctcgcccgccgcacccgcatctccatcgaagcctgggaccgtggcgcctcggctgcgcccgtcgccgcatacctgatggccaaggtgctcggctgggacagggcccgcgaagaacgcgaggtgcagacctacctgctgcgcgtcgccgccgaacgcgagagccagcttcagcccgacgacgaatccgccgaccgtgtgcggctcgaagcgccggacatcgtggcggtggacgccgcggccgagaccgggtccgcagcgaaagcgcctcggacggccgcagcgtcccggaggcccaagggacccaagggacccaagccgtaa

SEQ ID NO: 108617 - protein, 613 aa, Leifsonia xyli subsp. xyli str. CTCB07
MATTALSNSAQSSAASAPSRLGPAERAAAIAALKESELDILVVGGGIVGAGSAVDAVTRGLSVGLVEARDFASGTSSRSSKLVHGGIRYLEQLDFGLVREALIERGLLLQRIAPHLVKPVRFLYPLHKRVWERLYIGAGMMLYDIFSYTGLRPPGVPHHRHLSRRQVLKAIPSLAPNALVGGITYYDAQVDDARYVATLARTAAHYGAQVATRLRVEGFVKVGERVVGVWARDLETDERFEIRAKQVVNATGVWTDDTQAMVGERGQFKVRASKGVHLVVPRDRFQSKIGLLLRTEKSVLFVIPWGRHWLIGTTDTDWNLDKAHPAATAADIDYLLAHVNQVLNVPLTREDVEGVFAGLRPLLAGESEETSKLSREHLVAHSVPGLVVIAGGKWTTYRVMAKDAIDAAVDALDGKIPASATMEIALVGAEGYQAAWNSRGRIARESGLHPARIEHFLNRYGTMTADILALIREDPALAEPLPGADDYVGAEVVYAVSHEGALHLEDVLARRTRISIEAWDRGASAAPVAAYLMAKVLGWDRAREEREVQTYLLRVAAERESQLQPDDESADRVRLEAPDIVAVDAAAETGSAAKAPRTAAASRRPKGPKGPKP

SEQ ID NO: 108618 - DNA, 1569 bp, Borrelia garinii PBi
  CDS (1)..(1569): transl_table=11
atgaataataacaaagaaacaaaattaaaagatcttgaaaatcaagaatttgatctcataataattggaggaggcgcaacaggtcttggtatcgcagtagatgcaatcacaaggggatataaagcaatacttatagaaaaatttgactacgcaaaaggaacttcctctagatcaagcaaattaattcacgggggagtaagatatttagctcaatggaatatttctttggttaaagaagccttacatgaaaaagcaattcttgaaaaaaatgcacctcatttaattaacgaatgtgcatttattacccctatttataatatcttagaaataccttattattatctgggattaacttattaccacaatcttatgggcaaagaaaaagctaccaaatataaaactaaattactatccaaaaaatctaccattgaaaaagctactaatattaaaacaaaaggccttaaatgctctgttttatattacgatgattcattcgatgatgctagaatggcaataacattattaagaacttttaccgaaaaaggaggaattgcccttaactacacagagcttgtacaatttaacaaggaaaacggaaaactttcaggggttttaatacaaaataaattgtcaaaagaacaaatttcattaaaaagtaaatgtataataaacgcaacaggaatattttcagatgaaataagaagattggatgatgaaaaagctttaaacattatcaaaccttcccaaggtagccatttaataatcaaaaaagacaaattcccccaaaattatgcaatattaatacctaaaactagtgataatagaattttattcgctattccttggtatgatggcgttgtttgtggaagtaccgacattccaataaaagagatagaagtagagcccaaaagacttgatgaggagattgactttataataaataatttaaacaattatttaaatattaaaatagaaaaatcagatgtaaaaagcgtatatactggaataagacccttaataatggatccaaaagtcgaaggcaacacttcaaaaatttcaagaaacgaaaaaatatttatatcagattcaaatcttattacaatagcgggaggcaaatatattacatatagaaaaatggcagaaaaaaccttgctcaaagccatagaaaaaaatttattaccaaattatccaccaactacagaaaatttaaagttacacggctatcttaaaaaagaagaggcagtaaaaattcctgaatcttttagaacttatggtagtgactttgaaattctaaaaaatatggaagggtttgacaaaaagatacacgagagcttagatttaaatgaagctcaaatagctttttcgattgaatttgaacaagccaaaactattgacgatgttttagcaagaagaacaagatcgttgcctttaaatcctcaagctgcaattgaagctgccccaagggttgctgaaataatgatgaaaaaattaaataaatctgaaaagtggaaaaatgaacaaataaaaacctttttagaaataagcaaaaaatatttaattaaaaattaa

SEQ ID NO: 108619 - protein, 522 aa, Borrelia garinii PBi
MNNNKETKLKDLENQEFDLIIIGGGATGLGIAVDAITRGYKAILIEKFDYAKGTSSRSSKLIHGGVRYLAQWNISLVKEALHEKAILEKNAPHLINECAFITPIYNILEIPYYYLGLTYYHNLMGKEKATKYKTKLLSKKSTIEKATNIKTKGLKCSVLYYDDSFDDARMAITLLRTFTEKGGIALNYTELVQFNKENGKLSGVLIQNKLSKEQISLKSKCIINATGIFSDEIRRLDDEKALNIIKPSQGSHLIIKKDKFPQNYAILIPKTSDNRILFAIPWYDGVVCGSTDIPIKEIEVEPKRLDEEIDFIINNLNNYLNIKIEKSDVKSVYTGIRPLIMDPKVEGNTSKISRNEKIFISDSNLITIAGGKYITYRKMAEKTLLKAIEKNLLPNYPPTTENLKLHGYLKKEEAVKIPESFRTYGSDFEILKNMEGFDKKIHESLDLNEAQIAFSIEFEQAKTIDDVLARRTRSLPLNPQAAIEAAPRVAEIMMKKLNKSEKWKNEQIKTFLEISKKYLIKN

SEQ ID NO: 108620 - DNA, 1683 bp, Bacillus cereus E33L
  CDS (1)..(1683): transl_table=11
atggaattttcaagtaaacaacgtaaagacgtattaaacggagtaaataaacaagaattagatgtgatcgtaattggtggaggtattactggttctggtattgcattagatggagcaacacgcgggttatcaacaattgtgtttgaaatgcaggactttgcagcaggtacatcaagtcgttcaacgaagcttgtacacggtggtctacgttatttaaaacaacttgaagtgaaaatggtagcagaggtgggtaaagagcgtgcgatcgtatatgagaacggtccccatgtaacaacacctgagtggatgttacttccgttccatacaggaggtacgttcggatcattcagtacatcaattggtcttcgtgtatacgacttcttagcaggtgtaaaacgaagcgagcgcagaaaaatgtttaaccgtgaagaaacgctgaagaaagagcctcttgtaaaacaagaaggattaaaaggcggcggttactacgtagaatatcgtacagacgatgcgcgtcttacaattgaagtaatgaaagaagcaattgagcacggcgcaaaagctgttaactacgcaaaagtagatagtttcttatataaagatggaaaagtatgtggtgtacgtgtaatcgatttactagacggagaagtatacgaagtttacggtaagaaaattgtaaacgcagctggtccttgggtagatacacttcgtgaaaaagataactcgaaaaaaggaaaagtacttcagttatcaaaaggtgttcacttagtaattgatcaaaaacgtttcccattaggtcaagcgatttacttcgatacaccagataaacgtatggtattcgcgattccgcgcggaggaaaaacatatgtaggtacaacagatacgttctatgataaagacgcagctgtaccacaaatgacaacagaagatcgcacatacatcattaatgcgattaactacatgttcccaagcgtaaaaattacggaaaaagacatcgaatcaagctgggctggtgtacgtccgttaatttacgaagaaggtaagagtgcatctgaaatttctcgtaaagatgaaatttggacttctgaatctggtttaattacaatcgcaggtggtaaattaacaggataccgcaaaatggctgaaatggtagtagactacgtaacgaacttactacaaaaagaaggtcatagtgcatatccgaagagctcaacgaaacatatgccaatctctggtggacatgtagatggctctaaaggattaccagcatttatcgcgaaaaaagcaggcgaaggtacgaaatacggtttaacaacagcacaagcagaagaattcgcgaaattctacggctctaacgttgacgtactatttgacctagcgaaaaaacataaagacgaagcgaaagaatataacatgccgctagacgttctaatcccacttgtatacgcaatggattacgaaatgacagcaaaaccagtcgacttcttcgtacgccgcagaggcgctgtattcttcaacatccactgggtatacgagtggaaagaagcagtaatcaactacatggctgcaaaacttggctggagcaaagaagaacaaatgaaatacacagcagaactagaaaaagcattaacagacgctgtcattcctgtagatcaacaagagcatgcagctgcgttagcataa

SEQ ID NO: 108621 - protein, 560 aa, Bacillus cereus E33L
MEFSSKQRKDVLNGVNKQELDVIVIGGGITGSGIALDGATRGLSTIVFEMQDFAAGTSSRSTKLVHGGLRYLKQLEVKMVAEVGKERAIVYENGPHVTTPEWMLLPFHTGGTFGSFSTSIGLRVYDFLAGVKRSERRKMFNREETLKKEPLVKQEGLKGGGYYVEYRTDDARLTIEVMKEAIEHGAKAVNYAKVDSFLYKDGKVCGVRVIDLLDGEVYEVYGKKIVNAAGPWVDTLREKDNSKKGKVLQLSKGVHLVIDQKRFPLGQAIYFDTPDKRMVFAIPRGGKTYVGTTDTFYDKDAAVPQMTTEDRTYIINAINYMFPSVKITEKDIESSWAGVRPLIYEEGKSASEISRKDEIWTSESGLITIAGGKLTGYRKMAEMVVDYVTNLLQKEGHSAYPKSSTKHMPISGGHVDGSKGLPAFIAKKAGEGTKYGLTTAQAEEFAKFYGSNVDVLFDLAKKHKDEAKEYNMPLDVLIPLVYAMDYEMTAKPVDFFVRRRGAVFFNIHWVYEWKEAVINYMAAKLGWSKEEQMKYTAELEKALTDAVIPVDQQEHAAALA

SEQ ID NO: 108622 - DNA, 1629 bp, Azoarcus sp. EbN1
  CDS (1)..(1629): transl_table=11
atgagtgcgggcggcgaggaggggagcgtccaggaaaccagtcttcatgcgcacgcccgatccgctgcggcggagcgccgacttgcccgcacggtgctgctcgatcgcctgcgcaagtcgcagcgctgggacgtggtcgtcattggcgggggtgcgaccgggctcggatgcgcggtcgatgccgccgcacgcggctattcgacgctgctcgtcgaagcatgcgacttcgcgaaaggaaccagttcgcgggcgacgaagctgattcacggcggcgtgcgttatctcgcacggggcgagctggggctggtgcgcgaagcgctcgccgagcgttcgcggctgctcgcgaacgcgcctcacctcgttcatccgctgcgtttcgtcgtgccggcctatcactggcacgaccgggcgcgattcgggctggggctcgggttttacgatctgcttgccggcatccacggcatcgagcgcagccgcatgctcgacgcggccgcgacggccgcagcgctgccgggcttgaatccctccgggctgaggggcgggatcgcctactgggacgcccagttcgacgacgcgcggctggcaatcgcgctgatgcgcacggtcttcgacctgggcggcctggcactcaactacctgccggtcgacggtctgatcctcgaagccggccgcgtgcaaggggtcatcgcgcgtgatgcggaaagcggcgaggttttccgcatcgctgcccgcgtcgtcatcaacgcgaccggtgtatgggccgacgcggtgcggcgtctggaacgtcccgcggccagcgcgctggtgcgtccgagccagggcgtgcacgtcgtcgtcgaccggagtttcctcccgggcgataccgcgctgctggtgccggagacgccggatggacgcgtgctgttcgtcattccgtggcaaggcaaggtcctgattgggacgaccgatacgcctcgctccgacgttccgctggagcccgaagcgctgcccggtgaagtggatttcatcctcgcgaccgcggcccgctatctcgcgccggccccgacacgggccgatgtgcgcagcatcttcgtcggcctgcggccgctggtcggtgaggacgacaggacggcgacgcaccggctgtcgcgcgaacattgcatcgaagtgtcgcccggcgggttggtgacgatcaccggcggaaaatggacgacgtaccggcgaatggcagaggaaaccgtcgaccaggcctgcgccctcggcatgctgccgcgacgcccggcagcgaccgccgcgctgcgcctgcacggcgcgaccaccggtttttccggcgactgctatggctgcgaccgcgccgtcgtcgacctgctgccgggtgccgcccggcgcatacaggacggcctgacgctgaccgaggccgaagtacgccatgccgcacggttcgagcttgcacgtggcgtcgaggacgtgctggcgcgccggcaccgcgcgctggttctcgatgccgcacgggctgccgcggcagcaccggcggtcgcggcgctgctcgcccaggaactcggacacgatgcgcagtggtgcgtggacgaagtcgcgcgctttcgcgcgctggcgatccgctatggtgcgccggccggagaatgctcgtga

SEQ ID NO: 108623 - protein, 542 aa, Azoarcus sp. EbN1
MSAGGEEGSVQETSLHAHARSAAAERRLARTVLLDRLRKSQRWDVVVIGGGATGLGCAVDAAARGYSTLLVEACDFAKGTSSRATKLIHGGVRYLARGELGLVREALAERSRLLANAPHLVHPLRFVVPAYHWHDRARFGLGLGFYDLLAGIHGIERSRMLDAAATAAALPGLNPSGLRGGIAYWDAQFDDARLAIALMRTVFDLGGLALNYLPVDGLILEAGRVQGVIARDAESGEVFRIAARVVINATGVWADAVRRLERPAASALVRPSQGVHVVVDRSFLPGDTALLVPETPDGRVLFVIPWQGKVLIGTTDTPRSDVPLEPEALPGEVDFILATAARYLAPAPTRADVRSIFVGLRPLVGEDDRTATHRLSREHCIEVSPGGLVTITGGKWTTYRRMAEETVDQACALGMLPRRPAATAALRLHGATTGFSGDCYGCDRAVVDLLPGAARRIQDGLTLTEAEVRHAARFELARGVEDVLARRHRALVLDAARAAAAAPAVAALLAQELGHDAQWCVDEVARFRALAIRYGAPAGECS

SEQ ID NO: 108624 - DNA, 1659 bp, Bacillus clausii KSM-K16
  CDS (1)..(1659): transl_table=11
atggcgttttcagcaaagacaagagaaaaagcaattgcaagcatggaaggcaaacagttagatctgttaattattggtggtggcattactggcgtaggggccgctttggatgcggcaacacgaggaatcgatgtcggcttgattgaaatgcaagattttgcggcgggaacgtcaagccggtcgacaaagttgatccatggtggccttcgttatttaaagcaatttgaagttaaattagttgctgaagttggcactgagcgggcgatcgtctatgaaaatgcaccccatgttacagagcccgtgcgaatgatgttgccgttttacaaaggcggtacgtttaatgcgttaacaacgtcaatcgggcttgctgtctacgatcgacttgcaggcgtcaagaaagcagagcggcgcacgatgatgaaggcgaaagatgcattaaaaaaagagccgattttggcaaaagacggccttcgcggcgccggtatgtatgtcgaataccgcacggacgacgcccgcttaacgattgaaattgcaaaaacagcagctgaaaaaggcgcgaaattagcgaactatgtaaaagcggaaggatttatttatgacaaagggaaaattacgggtgtcattgcccgtgatttgctgacgggtgaagctgtcacgatccaggcaaaaaaagttgtcaatgcaacggggccatgggtcgaccatttgcgtgagcaagatcgctcaaagaccggaaaaacgatccatttaacgaaaggcgtccacttggtattatccaaaaaaagattgcctttaaaccaagcgctttattttgacacgccttttggcgatggccgcatgatgtttgcgattcctcgcggtgaaaaagtgtatgtaggcacaaccgatacaaattataaaggcgataagcgggaacctggtgtgacgaaggaagatgtcgactatattatgaaggcaacaaatgccttattcccaggatatcagctcacaactgccgatattgagtcaagctggtcagggttgcggccccttattcacgaagaaggcaaaagcccttccgatatttcacgtaaagacgaaatttttcactcagacagtgggcttatgacgatagcaggcggcaaattgactggttaccgaaagatggccgacaatattgtctcgatcgtcgccaaagagcttgaacaagaaacaggtgcggtctataaaccgtgccagacaaaaaaactggttttatcaggtggggaagtaggtggatcggaccagctcgacatgtttaatgctgcccatattgaagctggaaaaacccttggcttagaagaggctgaagcagctgaactcgtcacacgttacggttcaaatgtgacgcacgtgtttgcgtttctaaatgatggggaagcagagaaatatgggcttccaaaagcagtatgggcgtcgctccgttacgcgatggcctatgaaatggcactcacgcctgtcgatttcttattacgccgctcttcctatatgctctttgatattgacaaagccaacgcttataaagacaaaatcgtggaggctatggcttctgttttgaagtggagcgacaaacagcgggccatttacgaggctgagttggcagaacaatggcggatacacacgcttgaggatatcggttaa

SEQ ID NO: 108625 - protein, 552 aa, Bacillus clausii KSM-K16
MAFSAKTREKAIASMEGKQLDLLIIGGGITGVGAALDAATRGIDVGLIEMQDFAAGTSSRSTKLIHGGLRYLKQFEVKLVAEVGTERAIVYENAPHVTEPVRMMLPFYKGGTFNALTTSIGLAVYDRLAGVKKAERRTMMKAKDALKKEPILAKDGLRGAGMYVEYRTDDARLTIEIAKTAAEKGAKLANYVKAEGFIYDKGKITGVIARDLLTGEAVTIQAKKVVNATGPWVDHLREQDRSKTGKTIHLTKGVHLVLSKKRLPLNQALYFDTPFGDGRMMFAIPRGEKVYVGTTDTNYKGDKREPGVTKEDVDYIMKATNALFPGYQLTTADIESSWSGLRPLIHEEGKSPSDISRKDEIFHSDSGLMTIAGGKLTGYRKMADNIVSIVAKELEQETGAVYKPCQTKKLVLSGGEVGGSDQLDMFNAAHIEAGKTLGLEEAEAAELVTRYGSNVTHVFAFLNDGEAEKYGLPKAVWASLRYAMAYEMALTPVDFLLRRSSYMLFDIDKANAYKDKIVEAMASVLKWSDKQRAIYEAELAEQWRIHTLEDIG

SEQ ID NO: 108626 - DNA, 1575 bp, Dechloromonas aromatica RCB
  CDS (1)..(1575): transl_table=11
atgatcaacgcaccgctcaagcgcgaagacggcctcgccaagctgcgcgacactgccccttgggatgtactgatcatcggcggtggcgccagcggcctgggcgcagccgtcgacgccgcggcacgcggttaccgcaccctgctcatcgaggcccgcgacttcgcgtccggaacctcatcgtgcagcaccaagctgattcacggcggcgttcgttacctgcgccagggcgacatcgggctggtccgcaatgccctgcacgaacgctcgcacctgcttcgcaatgccgcccatctggtgcatccgctggctttcatcatcccagcctggcgaaacatcgaccgcgttttttacggcgccggcctgaagctttatgacctgctggccggccggcaggggctggctgcctcgcgcagcctgaaccgccaggacgtgatcgacgccctgcccggcctgcggcgcgccagcttatgcggcggtattcgctactgggacggccagttcgatgatgcgcggctggccatcacgttgatgcgcacggccactgatctcggcgcaagctgcctcaactacctgccggtcacccggttgatcaagaccggcggccgcgttgccggtgccgtgctgtgtgacgcggaaagcggcgaggaattcgaagtccgcgcccgtgccgtgatcaacgccaccggagtgcatgccgacagcgtgcggcgtttcgatgacagcgctgccgtgccgctgctgaccccaagccagggcatccatctcgtcgtcgatgccgatttcctgcccggccagcaggcaattctggtcccaaaaaccgaagacggccgcgtcatgttcgccattccctggcaaggcaaggtactgcttggcaccaccgatacgccgcgccccgaactaagccagctcgacgacccgcaaccgctggacgaggagatcgacttcctgctgcgtaccgccgccagcgtcctcagccgcccacccacgcgatccgatatccgcagtgcctttgccggcctgcgcccgctgatccacccggacaacaaggatggcaagagcaccgccgccctgtcgcgcgaacacgccgtgttggtcagcaccagcggactgatcaccgtcgctggcggcaagtggacgacctaccggctgatggccgagcaggtgatcgaccgcaccatcgaggtcgccggcctgcccgccgtgccatgcccgacccgaacactgaaactgcacgcttgcccggcccagccaggcaacgatgtttatggcaccgaggcaccgctgctcgccacgctgcctggccacgaccagccgctccacccagaactgccttacaacgcagcgatggtgcgcttcgccatccgctacgaaatggctcggacgattgaagacgtgctggcccgccggacacgtgccctgtttcacgatgcggcggcagccgaaaaaatgatcgaccgcatcgccgggatattcgccgaggaactccagttgaccgaagaacgtttggccagcttgatcgaagccgcccatgaaagtgcacggcgtttcatggcggcgcagaactccggcgcctga

SEQ ID NO: 108627 - protein, 524 aa, Dechloromonas aromatica RCB
MINAPLKREDGLAKLRDTAPWDVLIIGGGASGLGAAVDAAARGYRTLLIEARDFASGTSSCSTKLIHGGVRYLRQGDIGLVRNALHERSHLLRNAAHLVHPLAFIIPAWRNIDRVFYGAGLKLYDLLAGRQGLAASRSLNRQDVIDALPGLRRASLCGGIRYWDGQFDDARLAITLMRTATDLGASCLNYLPVTRLIKTGGRVAGAVLCDAESGEEFEVRARAVINATGVHADSVRRFDDSAAVPLLTPSQGIHLVVDADFLPGQQAILVPKTEDGRVMFAIPWQGKVLLGTTDTPRPELSQLDDPQPLDEEIDFLLRTAASVLSRPPTRSDIRSAFAGLRPLIHPDNKDGKSTAALSREHAVLVSTSGLITVAGGKWTTYRLMAEQVIDRTIEVAGLPAVPCPTRTLKLHACPAQPGNDVYGTEAPLLATLPGHDQPLHPELPYNAAMVRFAIRYEMARTIEDVLARRTRALFHDAAAAEKMIDRIAGIFAEELQLTEERLASLIEAAHESARRFMAAQNSGA

SEQ ID NO: 108628 - DNA, 1818 bp, Thermobifida fusca YX
  CDS (1)..(1818): transl_table=11
atgccgcaccgcacgcggcttcccgcgagaggagggaagcggcgtcctctgcctccgcccggcgcccggaaaggaggaggggaccccgcgcaccagatgacggcagcacggttgggaccacaggaacgggacgccgccctcagggccatggccgacaccgaactcgacgtgctggtggtcggaggagggatcgtcggagcgggtgtcgctctggacgcggtggcgcgcggcctctccgtcgggctcgtggaggcccgcgacttcgcttcaggaacctccagcaggtccagcaagctcatccacgggggcctgcgctacctggagcacttggacttccctctcgtccgcgaggcgctcaccgaacgcggcctgctcctcagccggatcgccccgcacctggtgcgcccggtgccgttcctgttcccgctccgctcccactgggaacgcccctacatcggggcgggggtggccctctacgacgcgctggccctgtccggcacccgcacccgcggcctgcccggccaccgccacctcagccgccgtgccgccctgcggatcttccccgcgctgcgccgcgacgccctcgtcggcgccgtgcagtactgggacgcacaggtggacgactcccgctacgtggtgatggtgctccgcaccgccgccacctacggcgcgcacatcgcctcgcgtacccaggccgtcgggttcctgcgggaaggggagcatgtcaccggggcccgcgtcgtcgacctggaaaccggccgagagttcgcggtccgcgcgaaacaggtggtcaacgcggccggggtgtggaccgacgagatccaggagatggtgggcgggcgcggccagatccacgtgcgcgcctccaaaggcgttcacctggtggtgcctcgggaccggatccacgcatcctccgggctgatcctgcgcaccgagaagagcgtgctgttcgtcatcccgtggggacggcactggatcctcggcaccaccgacaccgcatgggacctggacaaggcgcaccccgcggccagccgaaccgacatcgactacgtgctcaaccgcgtcaacgcagtcctgaaaaccccgttgaccagagacgacgtggagggggtgtatgcggggctgcggccgctgctcgcgggggagtccgaggagacctcccggttgtcccgggagcacaccgtggcgcacccggtgcccggcctagtcctcatcgcgggcggaaagtacaccacctaccgggtcatggccaaggacgcggtggacgcggtcgcccacgggatgggcgggggagtgcccccgtcggtgaccgaccggcttcccctggtgggcgccgacggctatttcgcgctgtggaaccagcgtcgcatcctcgcccgccgcaccggcctgcacgtgtcccggatccagcaccttctgcgccgctacggttccctcatccacgaagtgctgggactgatcgccgaacagccggatttgaagcagccgttgaccggcgccgacgactacctgcgtgccgaagtggtctacgcggtccgctacgaaggggcccgccacctcgacgacgtgctcagccgccgcacccacatcgccattgagacgtgggaccgcggccttgccgcggctgaggaggcggcacagctcatggccggcccgctcggctgggacgatgcccaaatcgcccgagaagtggagtactaccgtgcccggatcgaagcggaacgggccgcccaggagcaagacagcgaccaggaagccgacgcggtccagcacggtgccccggatatcgtgccgcaagccaccaccgtacgggtctga

SEQ ID NO: 108629 - protein, 605 aa, Thermobifida fusca YX
MPHRTRLPARGGKRRPLPPPGARKGGGDPAHQMTAARLGPQERDAALRAMADTELDVLVVGGGIVGAGVALDAVARGLSVGLVEARDFASGTSSRSSKLIHGGLRYLEHLDFPLVREALTERGLLLSRIAPHLVRPVPFLFPLRSHWERPYIGAGVALYDALALSGTRTRGLPGHRHLSRRAALRIFPALRRDALVGAVQYWDAQVDDSRYVVMVLRTAATYGAHIASRTQAVGFLREGEHVTGARVVDLETGREFAVRAKQVVNAAGVWTDEIQEMVGGRGQIHVRASKGVHLVVPRDRIHASSGLILRTEKSVLFVIPWGRHWILGTTDTAWDLDKAHPAASRTDIDYVLNRVNAVLKTPLTRDDVEGVYAGLRPLLAGESEETSRLSREHTVAHPVPGLVLIAGGKYTTYRVMAKDAVDAVAHGMGGGVPPSVTDRLPLVGADGYFALWNQRRILARRTGLHVSRIQHLLRRYGSLIHEVLGLIAEQPDLKQPLTGADDYLRAEVVYAVRYEGARHLDDVLSRRTHIAIETWDRGLAAAEEAAQLMAGPLGWDDAQIAREVEYYRARIEAERAAQEQDSDQEADAVQHGAPDIVPQATTVRV

SEQ ID NO: 108630 - DNA, 1605 bp, Ralstonia eutropha JMP134
  CDS (1)..(1605): transl_table=11
atgccgaaagccccgaccccgatccagccgccgtcccgagccgccctgctcgcaaggctggaacgcgagccgcgctgggacgtgatcgtcatcggtggcggcgccaccggcctcggcacggccgtcgatgccgcgtcgcgcggatatcgcacactgctggtggaggccgccgacttcgccaagggcacgtcgagcaaggccaccaagctcgtgcacggcggcgtgcgctacctggcccagggcaatatcagcctggtgcgcgaagcgctgcatgaacgcgggctgctcgcccgcaacgcgcctcacctcgtgtggccgctcggctttgtcgtaccggcttaccagctgttcgaccagccgttctatggcatcggcctgaagctttatgacatgctggccggcggcctgaatctcgatggcagccgctggctcaaccaccgcgaggtactggccgccgcccccacgctggccgagcatgtcggcggacgcccgctgcgcggcggcaacctgtacttcgacggccagttcgacgacgcacgcctcgccattgcgctgatgcgcacgctgttcgacgtcggcggcaccgccatcaactacctgccggtaatcggcctgtcgcagcagggcggcgtggtcaatggcgtgaccgtgcgagatgcgcttggcgataccacgttccgcctgcgcgcggattgcgtggtcaatgccaccggcgtgtgggtggatgccatccgccggatggaagacgggcaggcgcgcaccatggtcgcgccgagccagggtgtgcatctgacgctgccgcgcagcttcctgcccggcgatcgcgccatcctgattccgaagaccgatgacggccgcgtgttgttcgtggtgccgtggaacgggcatgtcatcgtcggcaccaccgacacgccgcgcaaggacctgccgctggagcctggcgcaagcggcgacgatgtggatttcatcctcgataccgcttcgcgttacctggcgcgcgaccccggccgcaccgatgtcacaagcgtctgggccggattgcggccgctggtcaaggcgacaggcgaggcatccacggcttcgctgtcgcgcgagcacaccatcgtggtgtcgcgcgccgggctgatcacggtgaccggcggcaaatggaccacgtaccgcaagatggccgaagatgtcatcgagacggccatccagcgccagatgctgcgcgccgcgccttgcgtgaccgccgatctgccgctgcacggcgcgagcggcctgccagccgacctgcccgcgccgaattcggtgtcgcccgatcgctactatggcaatgagttgcccgcattgcgcgccttgcccggcatcgaccatgtcctggcgccggcgtccgggctgaccgaggcgcacgtgcgctttgcggctcgccatgaactcgcgcgccgcgtcgaggatgtgctggcgcggcgcaaccgcgcgctgttcctggacgcgcgcgcggccgtggaagccgccccacaggtggcagcgatcctggcggaagaactgggccacgacgaagcctggcaggccagcgaagtggaaaacttccgcaagctcgccgccggatacatgctcgactga

SEQ ID NO: 108631 - protein, 534 aa, Ralstonia eutropha JMP134
MPKAPTPIQPPSRAALLARLEREPRWDVIVIGGGATGLGTAVDAASRGYRTLLVEAADFAKGTSSKATKLVHGGVRYLAQGNISLVREALHERGLLARNAPHLVWPLGFVVPAYQLFDQPFYGIGLKLYDMLAGGLNLDGSRWLNHREVLAAAPTLAEHVGGRPLRGGNLYFDGQFDDARLAIALMRTLFDVGGTAINYLPVIGLSQQGGVVNGVTVRDALGDTTFRLRADCVVNATGVWVDAIRRMEDGQARTMVAPSQGVHLTLPRSFLPGDRAILIPKTDDGRVLFVVPWNGHVIVGTTDTPRKDLPLEPGASGDDVDFILDTASRYLARDPGRTDVTSVWAGLRPLVKATGEASTASLSREHTIVVSRAGLITVTGGKWTTYRKMAEDVIETAIQRQMLRAAPCVTADLPLHGASGLPADLPAPNSVSPDRYYGNELPALRALPGIDHVLAPASGLTEAHVRFAARHELARRVEDVLARRNRALFLDARAAVEAAPQVAAILAEELGHDEAWQASEVENFRKLAAGYMLD

SEQ ID NO: 108632 - DNA, 1830 bp, Streptococcus agalactiae A909
  CDS (1)..(1830): transl_table=11
atggaattttcacgagaaacacgacgtttagccttacaaagaatgcaagatcgtactctggatttacttatcataggtgggggtatcacaggcgctggtgtcgctttacaagcagcagctagtggattagatactggacttattgaaatgcaagattttgcagaagggacaagtagtcgctcaacaaaattggtccatggtggtcttcgttacttgaagcaatttgatgtagaagttgtttctgatacagtatcagagcgtgcagtcgtgcagcaaattgcaccacacattcctaagccagatccaatgcttttaccggtttacgatgagccgggttctacttttagtatgtttcgccttaaagtggctatggatttatatgatttattagcaggtgtgacaaacacacccgcagccaataaagttttaagcgcagaagatgttcttaagcgtgagcctgatttacaaaaagaaggtttgctaggcggaggggtctatttagatttccgtaataacgatgcacgcctagtgattgaaaatattaaacgcgctaatagggatggagcttatattgccagtcatgtcaaagctgaggacttcttatttgatgacaacaatcaaattataggagtacgtgcgcgtgatttgttgactgaccaagttatcgatataaaagctaggcttgttattaatacaactggaccttggagtgacaccgttcgcaacttctccaatgaaggtaaacaaattcatcaattacgtccaactaagggagttcacttagttgtagatcgccaaaaattaaatatttctcaacctgtttatgttgatacaggcctgaatgatggtcgcatgatttttgttttgccacgtgaagataagacttattttggaactacagatactgattaccatggagacttagaacatcctacggtaactaaagaagatgttgactacctccttaatattgtaaacaaacgcttcccagaagcagagcttactattgatgatattgagagttcatgggcaggtttgcgtccactactatcagggaatagtgcctctgactataatggaggcaatagtggaaaactaagcgatgaaagttttgaagaattaattgattccgttaaagattatattgcacataaaaatcatcgtgaggatgttgaaaaagctatttctcatgtagaatctagtacttctgaaaaagaattggacccatcagctgtttctcgaggatcaagttttgagcgtgatgataatggcctattaacacttgctggtggtaaaattactgattatcgaaaaatggcagaaggtgccatggaaactattattaacattttggataaagaatataatcgcaagtttaaactaatcaattctaaaacctatcctgtttcaggaggagagattaacccatctaatgttgattctgaaattgaagcttatgctcaattgggcacactaagtggtttaagtattgaggatgcacgttatattgctaacctttatgggtcaaatgcaccaaaattatttgcattgacacgccaaattacagaagcagaaggtctgagcttggtagaaacgttgtcacttcactatgctatggattatgaaatggcgcttagcccaacggatttcttcttaagacgtacgaaccatatgcttttcatgagagataatttagattctttgattcagcctgttattgatgagatggctaaacattatcaatggtctgatcaagacaaaactttctatgaagaagaattacatgagactctaaaagacaatgacttggcagctttgaaggataattga

SEQ ID NO: 108633 - protein, 609 aa, Streptococcus agalactiae A909
MEFSRETRRLALQRMQDRTLDLLIIGGGITGAGVALQAAASGLDTGLIEMQDFAEGTSSRSTKLVHGGLRYLKQFDVEVVSDTVSERAVVQQIAPHIPKPDPMLLPVYDEPGSTFSMFRLKVAMDLYDLLAGVTNTPAANKVLSAEDVLKREPDLQKEGLLGGGVYLDFRNNDARLVIENIKRANRDGAYIASHVKAEDFLFDDNNQIIGVRARDLLTDQVIDIKARLVINTTGPWSDTVRNFSNEGKQIHQLRPTKGVHLVVDRQKLNISQPVYVDTGLNDGRMIFVLPREDKTYFGTTDTDYHGDLEHPTVTKEDVDYLLNIVNKRFPEAELTIDDIESSWAGLRPLLSGNSASDYNGGNSGKLSDESFEELIDSVKDYIAHKNHREDVEKAISHVESSTSEKELDPSAVSRGSSFERDDNGLLTLAGGKITDYRKMAEGAMETIINILDKEYNRKFKLINSKTYPVSGGEINPSNVDSEIEAYAQLGTLSGLSIEDARYIANLYGSNAPKLFALTRQITEAEGLSLVETLSLHYAMDYEMALSPTDFFLRRTNHMLFMRDNLDSLIQPVIDEMAKHYQWSDQDKTFYEEELHETLKDNDLAALKDN

SEQ ID NO: 108634 - DNA, 1680 bp, Burkholderia sp. 383
  CDS (1)..(1680): transl_table=11
atgatgtttttgccatccagaaaaccacagacggaccgcgccggcatgacggggaccgagccgctgcgcgtgaatcgcgacgagcacctggcgcgactcgagacggatacgttcgacgtgctgatcgtcgggggcggcgtgacgggcgcgtatgcggcgttcgacgcgagcctgcgcgggttgcgcgtcgcgctcgtcgagaaaagcgacttcgcatcgggcacgtcgtcgaaatcgtcgaagatggtgcacggcgggctgcgctacatcgagcagggcaatctcgggctcgtgcgccattcgctgctcgagcggcagcggctgcggcgcaacgcccgccatctcgtgcagcggctgccgttcctgttcccggtgatggagcgcgaaggcgtgttcgatgcgcgtctcgcgaaagccttcgaaagcctgctgtggacctacgacatcgccggcggctggcgcgagggcatcctgcaccagaagctgacgaaggccgaggtcctgtcgcattgcccgaccttcaacgagacgtacctgaccggcggcttcctgtacttcgacgcgcgcgtcgacgatgcgcgcctgacgctgaacctcgtgcgcacggccgcgtttcacggtgcggccgtggcgaaccatgcacgcgtggtcgagctgacgcgcgatggccacggcaaggtcgatggcgcgatcgtgcatgccgacggccgcgagcggcgcatccgtgcgcgcgtggtcgtgatggcgacgggcgtctggctgcgcgactggaccggcgcgcgcaagggtgacacggccgcgttgcaggtgcgccccgcgaagggcgtacacgttgcgattccgtggctgaagatccgcaacgactgcacggtgacgatccccgtgccgggccgcaaccgccgcgcgacgatcacgcgctggggcaacgtgtcgtatctcggcacgaccgacgaagactacgacggcgatctcgacgacgtgcactgcacgcggcaggagctcgatttcctgctcgaaggcgcgcgttccgcgttgaaagtcgacctgaatgcggacgacgtggtcggcagcatcgccggctgccggccgcttgtcgggccgcccggcggcaagacgatcgagatgaagcgcaatcacgagatccacgtcgcgcccgacgggctcgtgacgatcgtcggcggcaagctgacgacgtcgcggcacatggccgagcagacgatcgatacggtcggcaagctgctcggccgccgcacgcgctgccacacgaaatcggcctacctgctgggcgcggccggctatgacccgcaggcgatcgtcgcatcgggtgggctcgccgcgcatctcggcgaacgctacggcaccgaagcgcgcttcgtcggcgacctcgccgatgcggcaccgtcgctgcttgcgccgatcgtcgaagggctgccgtacagcgaagcggaagtgctctacgcggtgcgccacgaattcgcgcgcagtgtcgacgacgtgctgtcgcggcgcacccgcgcgcggctgatggcgcgcgacgcgtcggcgcgcgcggcaccgcgcgtcggagaaatactcaaggcggagctcggcctgtccgatgcggccgtcgccagccaggtgcgcgactacgtcgccgccgtcgccctcgaaaaatccatcctcatgggagatatcggatga

SEQ ID NO: 108635 - protein, 559 aa, Burkholderia sp. 383
MMFLPSRKPQTDRAGMTGTEPLRVNRDEHLARLETDTFDVLIVGGGVTGAYAAFDASLRGLRVALVEKSDFASGTSSKSSKMVHGGLRYIEQGNLGLVRHSLLERQRLRRNARHLVQRLPFLFPVMEREGVFDARLAKAFESLLWTYDIAGGWREGILHQKLTKAEVLSHCPTFNETYLTGGFLYFDARVDDARLTLNLVRTAAFHGAAVANHARVVELTRDGHGKVDGAIVHADGRERRIRARVVVMATGVWLRDWTGARKGDTAALQVRPAKGVHVAIPWLKIRNDCTVTIPVPGRNRRATITRWGNVSYLGTTDEDYDGDLDDVHCTRQELDFLLEGARSALKVDLNADDVVGSIAGCRPLVGPPGGKTIEMKRNHEIHVAPDGLVTIVGGKLTTSRHMAEQTIDTVGKLLGRRTRCHTKSAYLLGAAGYDPQAIVASGGLAAHLGERYGTEARFVGDLADAAPSLLAPIVEGLPYSEAEVLYAVRHEFARSVDDVLSRRTRARLMARDASARAAPRVGEILKAELGLSDAAVASQVRDYVAAVALEKSILMGDIG

SEQ ID NO: 108636 - DNA, 1578 bp, Synechococcus sp. CC9605
  CDS (1)..(1578): transl_table=11
atggctgatcaccaggttgacctgctggtcatcggcgccggcgccagcggtgccagcgtggcctatgaagcaacacgacgggggctgagcgtggccctgctcgaggccggagacatcggcggtggcaccagttgccgcagcacgaagctgcttcatggaggggtgcgctacctggagctagcctttaaaagtctggacctggcccagctgaggctggtgcgggaagccctgctcgagcggagccactggttgacccaggcaccattcctggcccgacgactggagctggccctgcccacacaacagctctggggccaggcctactacagagttgggctgggggtgtacgacgccctggccggtcagcgaagcatcggccacagccgactgctgtcccagcagcagatgcgtcaggccctgcctctgctgaaggcgtgtcagggcggcgtggcctacagcgacggacagttcgacgatgcacgcctcaacctgctgttggcccttaccgccgagcaacagggggcaaccctgcgcacccgttgccgggtggtggagctggagactggcggcatgggccagctcaaggccgccatcagtgaatccgccaccggccaacgggaacgctggtgtgcctcggcatttgtgaatgccacgggcatccgggcggatgagatccgccagatggcggaggctgatgcccctcctcggatgctcaccagccgtggggcccacatcgtgctggagcagaacctctgcccgaaaggtgttgggcttctggtgccatccaccgcggatggacgcgtgctgttcatgctccccttccacggccgcaccctggtggggacgacggatgaagcctgcagcaaagagaacgccacatccccctctccagaagaggaggcctacctgctcaactacgtgcgtgactggtttccccagctccagggtccgaaggtgagcagccgatgggcggggggacgcccgctgctgaagccagcggaccagggcctggacagcagccgtgtggtgcgggagcacgaggtggaaacgctggcctgcggcctggtgagcgtgatggggggcaagtggaccacctgccggccgatggctgaagacaccctgaccgcagtggaacgccagctcggccgggcgctgccaccccctgaaccgatgccgctgcgcggggcaacggagtcgttgcaggcaaccctggacggccttcaacgccagaaacaccaactcgaggccctgctccccgataccgccctacggactgcgcaagtcgcccatctccaaagcacctatggattggacggcttggctttgatcgaacgggccgagcccagccgacgcgagcccatcagcccagtgatccccctctgcggcgcagagctggaccacgccattcaacgggaacatgcgcgcagcagcagcgatgtgctggcccgccgctgccgtctggccatggtggacctgaacgaggccgaacggctcaggccccaggtggaggccctgctggatcaggcagccgtggcggcgggctccacctctccgatcaaccaccagttgaatccatag

SEQ ID NO: 108637 - protein, 525 aa, Synechococcus sp. CC9605
MADHQVDLLVIGAGASGASVAYEATRRGLSVALLEAGDIGGGTSCRSTKLLHGGVRYLELAFKSLDLAQLRLVREALLERSHWLTQAPFLARRLELALPTQQLWGQAYYRVGLGVYDALAGQRSIGHSRLLSQQQMRQALPLLKACQGGVAYSDGQFDDARLNLLLALTAEQQGATLRTRCRVVELETGGMGQLKAAISESATGQRERWCASAFVNATGIRADEIRQMAEADAPPRMLTSRGAHIVLEQNLCPKGVGLLVPSTADGRVLFMLPFHGRTLVGTTDEACSKENATSPSPEEEAYLLNYVRDWFPQLQGPKVSSRWAGGRPLLKPADQGLDSSRVVREHEVETLACGLVSVMGGKWTTCRPMAEDTLTAVERQLGRALPPPEPMPLRGATESLQATLDGLQRQKHQLEALLPDTALRTAQVAHLQSTYGLDGLALIERAEPSRREPISPVIPLCGAELDHAIQREHARSSSDVLARRCRLAMVDLNEAERLRPQVEALLDQAAVAAGSTSPINHQLNP

SEQ ID NO: 108638 - DNA, 1551 bp, Geobacter metallireducens GS-15
  CDS (1)..(1551): transl_table=11
atgacccgtacgaggctcttgcaacagcttgaagaggagaagtgctgggatctcctcgttatcggcgggggcgccaccgggctcggcgtggccgttgagggggcgagccggggctaccggacgctcctcctggagcgtgacgacttcggcagcggcacctccagccggagcaccaagctcatccacggcggggtccggtacctgcagcaggggaatctctccctggtactggaggccctccacgagcggggaatcctgatccgcaacgccccgcacctggtgcataacctctccttcgtggtcccgctctatgactggtgggaaggtcccttctacggcatcggactgaagctctacgacatgttggcgggaaagctgggactcggcccgtcgcagatactctcccgggaggagaccctgcgccgcatccccaccgtggagccggcagggttgcggggcggggtgatctaccacgacggccagttcgacgatgcccggcttgccgtggccctggcccgcacctgcgcggacctggggggagttcccctgaaccgcatggaggtggcaggcctcctcaagggggatggcctggtccgcggcgtagcggcccgggaccgggagagcggccgcgaatacgagatcgaggcgcgggtggtggtgaatgccaccgggccctcctgcgacgccatccgccagctggacgaccccggcgcgcagccggtcattgctccgagccagggggtgcatctggtcctgccccgggaattcctccccggcgacagcgccatcatggtcccccacaccgacgacgggagggtgctcttcgccgtcccctggcacgaacgggtgatcgtcggcaccaccgacacgccggtggagcgggtcacggccgaaccccgtcccctggcggctgaagtggggttcctcctggaacatgcggcccggtatctctcccgggatcccgccacgtccgacatcctcagtgtcttcgccgggctccgccccctggtgcggggtgaagcagtcaatacagcggccctttcccgtgatcacaccattatggtttcgaccgccggtctggtcaccatcaccggcggcaagtggaccacctaccgcaggatggccgaggatacggtaaacagcgctgtcaggatggcggggctggcagagagaccgtcgcgcacggccgacctccccatccacgggtggctggccaaggggggtgttgacggggagtgggcgatgtatggcgccgaagccgctgccctggaagagctgtgcgccgtgcaaccggccctgcgccggcaactccatccccggctcccgtaccggctggccgaggtggtctggggggtgcggtacgaatgggcgcggagtgttgaggatgtgttgagccgccgtacccgggcactcattctcgatgcccgtgccgccatggaggcggccccggaggttgccgccctgatggcgacggaactggggcgcgatgaggcctggcaggcggcagaggttgcggcttttcgcgccctggctgaggggtatctgccttag

SEQ ID NO: 108639 - protein, 516 aa, Geobacter metallireducens GS-15
MTRTRLLQQLEEEKCWDLLVIGGGATGLGVAVEGASRGYRTLLLERDDFGSGTSSRSTKLIHGGVRYLQQGNLSLVLEALHERGILIRNAPHLVHNLSFVVPLYDWWEGPFYGIGLKLYDMLAGKLGLGPSQILSREETLRRIPTVEPAGLRGGVIYHDGQFDDARLAVALARTCADLGGVPLNRMEVAGLLKGDGLVRGVAARDRESGREYEIEARVVVNATGPSCDAIRQLDDPGAQPVIAPSQGVHLVLPREFLPGDSAIMVPHTDDGRVLFAVPWHERVIVGTTDTPVERVTAEPRPLAAEVGFLLEHAARYLSRDPATSDILSVFAGLRPLVRGEAVNTAALSRDHTIMVSTAGLVTITGGKWTTYRRMAEDTVNSAVRMAGLAERPSRTADLPIHGWLAKGGVDGEWAMYGAEAAALEELCAVQPALRRQLHPRLPYRLAEVVWGVRYEWARSVEDVLSRRTRALILDARAAMEAAPEVAALMATELGRDEAWQAAEVAAFRALAEGYLP

SEQ ID NO: 108640 - DNA, 1638 bp, Desulfovibrio desulfuricans G20
  CDS (1)..(1638): transl_table=11
atgaaaagagaagaattactggaccgcctgaaggccgataaggaattcgacctgcttgttgtcggcggcggagccaccggctgcggcgttgcgctggacgcagccacccgcggactggatgtggcgctggtggaacgggctgactttgccgaggggacaagcagcaaaagtacaaagctggtgcacggcggcgtacgctatcttgaaaaggctgtgctcaagctggataaggaacagtttgatctggtgcgcgaagggctgaaggaacgcgggctgctgttgaagaacgctcctcatctggcgcatccgctgcggcttatcacaccggtgcacacggcacgcgaggccgggtacatgtatgccggactggtgatgtatgacctgctggccggcaggctggggctggggcgcagcaggcttgtgacgcgtaaaaaggcgcagcagctttttcccacgcttaatctggatggctacaaggcggcggtcatatattatgacggtcagttcaatgatgcccgtatggccgtgactctggcccgtacggccaacctgcacggtgccacctgcgccaaccatgtggaagtgaccgcccttgtgcgcgagcacggtaaaatacgcggagccgtggtgcgcgataacctgacaggtgacgaatggaccatcagggcgcgcggtgtggtcaatgccaccggccccatggcagacaggctcagacatatggacgacacccggctgcccgatatccttaaagtgagctcgggtatccacatcatgctggatgccggattcactccccccgatctttcattgatgattcccagaacagaggacgggcgtgtgctctttatgattccgtggatgggacatgtggtgttcggcaccacagatgaacccgccacgccggaatacagcccggtacccgttgaaaaggatgtggaatacctgctggaatatgcgcgcagatatctgaaccgccccgtggaccgcagtgatgtgctttccgtgtggagcgggctgcggccgctggtgtttgcatcgggcaaatcaagcacgcaggaactggcccgtacgcatgtcatcgaggtatcacccggcgggctgctgaccattaccggcggcaagtggaccagctaccggcgtatggccgaagacaccgtggacagggccgattcgctgttcggtttcaatctgcggcgtccgtgcgtgacggaaaagctgaaggtgctgggatcacgcgggtatgtgcccggcgcccatgccgaactggcccgagaatacgcggtgtcagaagagctggcagcagcgctgtacaccacatacggcgatgaagcctgcgcggtgctgcaggtggcccgcgaaactggattcaccgaacctctgcatcccgaccacccgtatatcggggcggaggttgtgtatcaggtgcggcacgaaatggcctcgcatgtgagcgatgtgctggtgcggcgcctgccgttgggacttgtgaatattgcccatgccgtcgaagtcgcccccgttgtggcggaaatcatgggcagcgagctgagttgggacccggcccggtgcaaggaggaatcggatgccgccatagccatgctgcacagctggcatatgccgcagggcagcgaagggtag

SEQ ID NO: 108641 - protein, 545 aa, Desulfovibrio desulfuricans G20
MKREELLDRLKADKEFDLLVVGGGATGCGVALDAATRGLDVALVERADFAEGTSSKSTKLVHGGVRYLEKAVLKLDKEQFDLVREGLKERGLLLKNAPHLAHPLRLITPVHTAREAGYMYAGLVMYDLLAGRLGLGRSRLVTRKKAQQLFPTLNLDGYKAAVIYYDGQFNDARMAVTLARTANLHGATCANHVEVTALVREHGKIRGAVVRDNLTGDEWTIRARGVVNATGPMADRLRHMDDTRLPDILKVSSGIHIMLDAGFTPPDLSLMIPRTEDGRVLFMIPWMGHVVFGTTDEPATPEYSPVPVEKDVEYLLEYARRYLNRPVDRSDVLSVWSGLRPLVFASGKSSTQELARTHVIEVSPGGLLTITGGKWTSYRRMAEDTVDRADSLFGFNLRRPCVTEKLKVLGSRGYVPGAHAELAREYAVSEELAAALYTTYGDEACAVLQVARETGFTEPLHPDHPYIGAEVVYQVRHEMASHVSDVLVRRLPLGLVNIAHAVEVAPVVAEIMGSELSWDPARCKEESDAAIAMLHSWHMPQGSEG

SEQ ID NO: 108642 - DNA, 1647 bp, Rhodospirillum rubrum ATCC 11170
  CDS (1)..(1647): transl_table=11
atgccccgctgcgatccccgggacggcgacaccccccggcatgacgctttggccgcccttcaatcgggggaggtcttcgatctgctggtcatcggcggcggcgccaccggctgtggcatcgccctggatgccgccggccggggtctgcgtacggccttggtcgagcgcttcgatttcgccgagggcaccagcggccgcagcaccaagctggttcatggcggcgtgcgctatcttgaggcggccgtccgccatcttgattccgcccagtaccatctggtgcgcgacgccctgcgcgagcgctgggccttcctggccaatgccccccatctgtgcgatcggctgtcgctgatcaccccgctctattcctgggccgaggtgccctatgtctatgccgggctcacgctttacgacctgttgtcgggcaagcgctcgctgggtcgcagccggctgatcggccgggccgaggccttggcccgctgtcccatgctcaaggccgagggattgaaggccgcggtgctttattacgatggccagttcgtcgatacccgcatgaccatcgccctggcgatgacggcgcggcgcgacggggcggttgtggccaatcacgtggcgcttgaggccctgatccacgatgacgccggcacggtggtcggcgcccggctgcgcgatggcctggacggcgcctcctggccgatcgccgccaaggtggtgatcaatgccaccgggcccttcgccgatcacctgcgcaagatggatgaccctggagccaagccgatcctgcgggcgagttcgggcgttcatatcgtgcttgagggccgcttcgcgccgcccgacgggggcgtgctcatccccaaaaccgatgatggccgggtgctgttcatcctgccctggcagggtcacgccctggtcggcaccaccgagggcgaaagcgaggtggtcgaccatccgccggccaaggcggtcgatgtggcctatctgctgggccacctgcggcggtctctcgcccttgatgtcagcgaaggcgacgtgctgtcggtgtgggcgggggtgcggccgctggtcttcgatcccgaggccatcgggaccgcccaactggcccgcgaccatgtgatcatcgaggatccatccgggctgatcaccattaccggcggcaaatggacgacctatcgcaagatggccgaacaggcggtggaccgggcggtggcgcgcggcgggctcgccccggcgcggccttgcgccaccgtgtcgcgcaaggtgatcggcggtgaggccttcaagaaggacggcgcggcggctttggtcgggcgcttcgccctggccggggatatcgcccgccatctccaccgcgcctatggcgaccgggcgccgctcgtcgccgagttggcggcgcgcggggcgggcgcccgtctgcaccccgatcatccccatatcgaggccgaggtcgtctatgccgccaccctggaggcggccgagcatggcgccgatgtgctggtccgccgcctgaccctggccctggtcgatcgcgccgccgcccgcgccgccgccccccgggtgatcgccctgctcggcgatctgcgcggctgggacgcggcgcgccgcgccgccgaaaccgccctgcttgacgagcggctgtcgggatcgctgtaa

SEQ ID NO: 108643 - protein, 548 aa, Rhodospirillum rubrum ATCC 11170
MPRCDPRDGDTPRHDALAALQSGEVFDLLVIGGGATGCGIALDAAGRGLRTALVERFDFAEGTSGRSTKLVHGGVRYLEAAVRHLDSAQYHLVRDALRERWAFLANAPHLCDRLSLITPLYSWAEVPYVYAGLTLYDLLSGKRSLGRSRLIGRAEALARCPMLKAEGLKAAVLYYDGQFVDTRMTIALAMTARRDGAVVANHVALEALIHDDAGTVVGARLRDGLDGASWPIAAKVVINATGPFADHLRKMDDPGAKPILRASSGVHIVLEGRFAPPDGGVLIPKTDDGRVLFILPWQGHALVGTTEGESEVVDHPPAKAVDVAYLLGHLRRSLALDVSEGDVLSVWAGVRPLVFDPEAIGTAQLARDHVIIEDPSGLITITGGKWTTYRKMAEQAVDRAVARGGLAPARPCATVSRKVIGGEAFKKDGAAALVGRFALAGDIARHLHRAYGDRAPLVAELAARGAGARLHPDHPHIEAEVVYAATLEAAEHGADVLVRRLTLALVDRAAARAAAPRVIALLGDLRGWDAARRAAETALLDERLSGSL

SEQ ID NO: 108644 - DNA, 1788 bp, Frankia sp. CcI3
  CDS (1)..(1788): transl_table=11
atgacgccgaccagacacggaaccccgaccgcccgactcgaccaggtcggccgcgccgaggcactgcgccggatgggagcggatccggtggatgtggccgtgatcggcggcggggtcaccggtacgggggtggcgctggacgcggtgacccggggcctgtccgtcgccctggtcgaggcgcgcgacctcgccgccggcacgtccagccggtcgagcaagctcatccacggcgggctgcggtatctcgagcagctcaacgccccgctggtccgggaggcgctgcgggagcggtccctcatgctggacacgctcgcgccccatctggtccgggccatcccgttcctgctgccgttgacccgccacggttgggaacgtgcctacatcggcagtggtgtgctgctctacgacaccctcgggcaggggctggcccgcgtcgggccgggcggcgacgccaccatgccccatcaccggcacctgacccgcaaggcggcgctgcgggagttcccgtcgctgcgcccggacgccctcgtcggcgcgatccagtactgggacggccaggtcgacgacgcgcggcacaccgtgttcgtcgcgcggaccgctgctcgctacggggcgctcatcgcgaccagcgcgcgggtcaccggcttcctgcgggagggcgaccgggtcgccggcgtgcgggtgcgtgacctcgagtcgggcgccgagatcgagctgcgggcccgccagacgatcaacgccgccggggtgtggaccgacgagatccaggcgatggtaggcgggcgtggccagctgtcggtccgagcctccaagggagtgcacatcgtcgtgccccgcgaccgcatccatggcgtcaccggcctgatcctgcgcaccgagaagagcgtgctgttcgtcatcccgtggggcagccactggatcatcggcaccaccgacaccgactggagcctcgacctcgcccatccggcggccagcagcgccgacatcgactacctgctcgacacggtcaaccgggtgctgcgcacgccgctcacggcggcggacatcaccggggtgtacgccgggctgcgcccgctgctcgccggggagtccgaggacacctcgcggctgtcccgcgagcatgccgtggtcagccccgtctccgggctgacgatggtcgccggcgggaagtacacgacctaccgggtgatggccgccgacgccgtcgacgcggccgtgcacggcatgaaccgggcggtgccgccgtcgtgcaccgagaagatcccgctgctcggcgcggacgggttccccgcgctgtggaacgcccgggagaccctcgcccgccgcgcggggctgcacgtcggctggatcgagcacctcctgcaccgctacggcaccctcaccgaggagcttctggacctcatcgagacgcgaccggatctcgcccagccgctgcgcggggcatcgacctacctggccgcggaggcggtgtacgcggcctcccacgagggggcgctgcacctggaggacgtgctcacccggcggacccgcgtctcgatcgagaccatcgaccggggggtggaggccgccgagcacgtggccgatctcatcgcccccgtgctcggctgggaccaggtgacccgcgcccgcgaggtcgcgcactacctcgcccgggtggaggccgaacgggcctcgcagcggcaagccgacgacgcgaccgccgacgcggcccggctcggcgcgcccgacgtgcgccggctgggccggacggaccaccgcgccccggcggcgaccggcggaccgtcctga

SEQ ID NO: 108645 - protein, 595 aa, Frankia sp. CcI3
MTPTRHGTPTARLDQVGRAEALRRMGADPVDVAVIGGGVTGTGVALDAVTRGLSVALVEARDLAAGTSSRSSKLIHGGLRYLEQLNAPLVREALRERSLMLDTLAPHLVRAIPFLLPLTRHGWERAYIGSGVLLYDTLGQGLARVGPGGDATMPHHRHLTRKAALREFPSLRPDALVGAIQYWDGQVDDARHTVFVARTAARYGALIATSARVTGFLREGDRVAGVRVRDLESGAEIELRARQTINAAGVWTDEIQAMVGGRGQLSVRASKGVHIVVPRDRIHGVTGLILRTEKSVLFVIPWGSHWIIGTTDTDWSLDLAHPAASSADIDYLLDTVNRVLRTPLTAADITGVYAGLRPLLAGESEDTSRLSREHAVVSPVSGLTMVAGGKYTTYRVMAADAVDAAVHGMNRAVPPSCTEKIPLLGADGFPALWNARETLARRAGLHVGWIEHLLHRYGTLTEELLDLIETRPDLAQPLRGASTYLAAEAVYAASHEGALHLEDVLTRRTRVSIETIDRGVEAAEHVADLIAPVLGWDQVTRAREVAHYLARVEAERASQRQADDATADAARLGAPDVRRLGRTDHRAPAATGGPS

SEQ ID NO: 108646 - DNA, 1668 bp, Frankia sp. CcI3
  CDS (1)..(1668): transl_table=11
atgacggttctgacgctcccgccgaccacggcgacctcgttgaacgccgggcggcgggaacgggagctggccgccgtcgcggctggcggcccggtggacctgctggtgatcggcggtggggtcaccggggctggggtggccctggacgccgcctcccgcggcctgtccgtcgtcctcgccgaggcgcacgatctcgccttcggcacgagccgatggagttccaagctcgttcacggcgggctgcgttacctggccaccggagatgtggcgctggcgcgggagagcgccgtcgagcgcgacatcctgatgcggcacaccgcgccccatctcgtgcgggcgctgcccatgctcaccccgctgaccccgggagtaccgcggtcgaacgccgcgctggtccaggccggggtgtggctcggcgacctgctgcgccgcggcgcgggcacgccccgcgcggtcctgcccggcccacgccggctgaccgccgtggagacgctcggggtggctcccgcgctccgggaagccggactgcgcggcggggtgctgcactgggacggccggctcgtcgacgacgcccgtctcgtagtcgcgctggcccggaccgcagccggattcggcgcccggatcctgacccggctgcgggtgaccggcctcgacggcggcggcctcgacggcggaccccgcggcccgagccggcacggttgtcgtgggatcgaggcgaccgcggtggacaccctcaccggtacccggatcaccctgcgtgcgcggacggtggtcaacgccaccggcgtgtgggcgccggccctggctccggggatccggctgcggccgagccgcggcacccacctcgtgctgcgctccaccgtcctggccgggacccgcgcggcgctgtccctgccgatgccgggtgaacggaaccggttcgcgctggtgctgccccaggacgacggccgcgtctacgtcgggttgaccgacgtgccggtcgaggaggtcgtcgacgtcccggtgcccgacgaggacgagatcgcgcagctgctgggcatcgtctcgaacgtgctggccacccccatcgacccggcggaccggctgggcgccttcgccggcctgcgcccactgctcgacaccggcaccgaccacaccggcaccgaccacaccgtcgttccccacagcgccgccacccgtaccagcgccgcccgcaccgccgatctctcccgacggcacctggtgcggaccgacccgggcggcctggtcacggtggtcggcggcaaactgacgacctatcgacggatggccgcagacgcggtggacgccgccgtcgcggtgggcgacctcgacgccggcccctgccgtacccggcgactcggcctggtcggtgcggcacctcgatcggtcctcgccacggtggccgcgccgcgccgtctggtcgagcggtacgggacggaggcaccgagggtgctggccctggccgacggcgaccccgacctgctggcacccgtcgccgaggggacgccggtcaccggcgcggagctgctgttcgcggtgcgggacgaaggcgcgctcgacccggcggacctgctggatcgccggacgcgcatcgggctggctcccgccgaccgccgggcggccctgggcccggcccggcagctgttcgaccatacgctgacgcgctaa

SEQ ID NO: 108647 - protein, 555 aa, Frankia sp. CcI3
MTVLTLPPTTATSLNAGRRERELAAVAAGGPVDLLVIGGGVTGAGVALDAASRGLSVVLAEAHDLAFGTSRWSSKLVHGGLRYLATGDVALARESAVERDILMRHTAPHLVRALPMLTPLTPGVPRSNAALVQAGVWLGDLLRRGAGTPRAVLPGPRRLTAVETLGVAPALREAGLRGGVLHWDGRLVDDARLVVALARTAAGFGARILTRLRVTGLDGGGLDGGPRGPSRHGCRGIEATAVDTLTGTRITLRARTVVNATGVWAPALAPGIRLRPSRGTHLVLRSTVLAGTRAALSLPMPGERNRFALVLPQDDGRVYVGLTDVPVEEVVDVPVPDEDEIAQLLGIVSNVLATPIDPADRLGAFAGLRPLLDTGTDHTGTDHTVVPHSAATRTSAARTADLSRRHLVRTDPGGLVTVVGGKLTTYRRMAADAVDAAVAVGDLDAGPCRTRRLGLVGAAPRSVLATVAAPRRLVERYGTEAPRVLALADGDPDLLAPVAEGTPVTGAELLFAVRDEGALDPADLLDRRTRIGLAPADRRAALGPARQLFDHTLTR

SEQ ID NO: 108648 - DNA, 1641 bp, Ralstonia metallidurans CH34
  CDS (1)..(1641): transl_table=11
atgacgccgcacgctgaacccagattcgaatttcccatgcaaacttccgtcactccgatcgcccctccctcccgcgacaccctgcttcagacgctcgcgcgcgagccacgctgggatgtgatcgtcatcggcggcggcgccaccgggctgggcaccgcgctcgacgctgcttcgcgtggctaccgcacgctgctgctcgaagccgccgacttcgccaagggcacgtcgagcaaggccaccaagctcgtgcacggcggcgttcgctacctggcgcaaggcaacatcagcctggtgcgcgaggccctgcacgaacgcggcctgctcgcgcgcaacgcaccgcacgtggtgtggccgcttggcttcgtcgtgccggcctaccagatgttcgaccagccgttctacgggatcggcctgaagctctatgacatgctggcaggcggcctgaacctttccggcagccgctggctcagccatcacgaaacgctcgaggccgcgccaaccctggccgagcacgtgggcgggcgtccgctgcgcggtggcaatctgtatttcgacggccagttcgatgacgcgcggctggcgatggcgttgatgcgcacgctgttcgatgtgggcggcaccgcggtcaactacatgcgcgtgagcggactctcgcagtccaacggcgtcatcaccggcgtcacggcacaagatgtgatcggtggggagacgttccacctgcgcgcggattgcgtgatcaacgccaccggcgtgtgggtcgatgccgtgcgccagatggaagacggccaggcccggcggatggtggcgccgagccagggcgttcacttgacgattccgcgcagcttcctgcccggcgatcgcgcagtcctgattccgaaaaccgacgatggccgcgtgctgttcctggtgccctggaacggacacacgatcgtcggcaccaccgacaccccgcgccaggatctaccgctggagccccgggcagcgagcgacgacgtcgacttcatcctggaaacggccgcgcgttacctggcccgcgacccgacccgcgatgacgtgaccagcgtctgggcggggctgcgtccgctggtgaaggccaccggagaagcctccaccgcgtcgttgtcgcgcgagcatacgatcctggtatccaaagccggactgatcacggtcacgggcggcaaatggaccacgtatcgcaagatggccgaggacgtgatggaaaccgcgatccagcggcagttgctgcgcgccgcgccctgccgcacggccgacctgccgctgcacggcgcgaccaacatgcccaatgacctgccgccctcgggcaccggatcgcccgaccgctactacggcgccgacctccccctggttcaggcgatgcctggcgcggacaacgtgctcgtgcccgcctccggcctgaccgaggcccacgtccgctttgcggcgcgctacgagctggcccgccgcgttgaggacgtgctggcgcggcgcaatcgggcgctgttcctggacgcccgcgctgcgctggacggcgccccccgggtggcggcgatcctggcggaggaactcgcgcacgactcggcctggcaggcacgcgaactcgaggacttcggcaagctcgccaggggctatatgctcggatga

SEQ ID NO: 108649 - protein, 546 aa, Ralstonia metallidurans CH34
MTPHAEPRFEFPMQTSVTPIAPPSRDTLLQTLAREPRWDVIVIGGGATGLGTALDAASRGYRTLLLEAADFAKGTSSKATKLVHGGVRYLAQGNISLVREALHERGLLARNAPHVVWPLGFVVPAYQMFDQPFYGIGLKLYDMLAGGLNLSGSRWLSHHETLEAAPTLAEHVGGRPLRGGNLYFDGQFDDARLAMALMRTLFDVGGTAVNYMRVSGLSQSNGVITGVTAQDVIGGETFHLRADCVINATGVWVDAVRQMEDGQARRMVAPSQGVHLTIPRSFLPGDRAVLIPKTDDGRVLFLVPWNGHTIVGTTDTPRQDLPLEPRAASDDVDFILETAARYLARDPTRDDVTSVWAGLRPLVKATGEASTASLSREHTILVSKAGLITVTGGKWTTYRKMAEDVMETAIQRQLLRAAPCRTADLPLHGATNMPNDLPPSGTGSPDRYYGADLPLVQAMPGADNVLVPASGLTEAHVRFAARYELARRVEDVLARRNRALFLDARAALDGAPRVAAILAEELAHDSAWQARELEDFGKLARGYMLG

SEQ ID NO: 108650 - DNA, 1698 bp, Myxococcus xanthus DK 1622
  CDS (1)..(1698): transl_table=11
gtgcgttctgaatccgtcgcgctcagccgtgttgtctccgaagcagatgtgcccccgcctccgtcccgcgcagcacgcctgcgggccctggccacggagaccttcgacgtcctcatcatcgggggcggtgtcaccggcgcgggctcggcgcgggatgccgcgctccggggcctcaaggtggcgctcgtcgagcgtgacgacttcgccagtggcacctccagccgctcgtcccggctcatccacggcggccttcgctacctggagcacggccacctgggcctcgtcttcgaatccagcatcgagcgccaacgtctgctgcggctcgccccgcatctggtgcgtccgctcgccttcatctggcccgtgtacgcgggcgcccgcgtgcctcgctggaagctcaacgcgggcctcatgctctacgacgccctctccctcttccggaacgtgaagggctaccggcggctcaacgcccggcaggtccacgcggccgagccaggcctgcgcaccgaccacctcaagggcggtgcccgctactacgacgcggccacggacgacgcgcgcctcaccctggccaatgccgtgggcgcgtccgaggcgggcgccgtcgtcctcaaccacgcgtccgtgaaggcgctcgtcctggagcagggacaagcgcacggcgcgacggtggtggaccacctcaccggcgaggaggtcaccgtgcgcgcacgggccctcgtcaacgccacgggcccgtggagtgatgaaatccgccggctggatgcgccgaatggggcgagcccggccgtgcgcggcagcaagggcgtccacctcgccgtaccgcgcgagcgcatcaaccaccgcgacgccttcacgctgctgtcccccaaggacggccgggtgatgttcgtgctgcccgccgacaacttcaccatcattggcaccacggagacgtccacgcgcgcgcaccccgcggaggtccgcgccagcgagtccgacgtggcctacctgctggagtccgccaacgccttcttccccgaggcgcgcctcactcgcgcggacgtggtgagcgcgtgggccggcatccgccccctggtggccagcggctaccacggcacacaggccgacgcgggcagtgccagccgcgagcacgccatcgacgtgagcccctccggcgtgctcgccatcagcggtggcaagctcaccacctatcgcgtcatggcgcgcgacgtggtggacgctgtggagcgccgcctgggccagcctcgccgccgctcgcccacggatgtgttgcccctgccgggtggagacatccgcgcgctggacgccgagttcgccgcggcgcgcaccgaggtgggagacgacgccacagccgtccacctggtgcgcgcctatggcagccgctggcgccgcgtgtgggccctgacgcgagaggacgccgcgctgtcccggccgctcgccgaggggcttccctaccgggccgccgaggccgcctggggtgtcacccacgaactggtgcacaccctgtcggacctgctcatccgccgcctcaaggtggcgttcgagacgcgcgaccaggggcaggcggccgcgcgtgtggcggccgaggtcatggcgccccggttgggctgggacgccgcggagacgcagcggcaactggacgtctatgccgccgatgcgctccgccttttcggtgtggatccggccgaggcgtga

SEQ ID NO: 108651 - protein, 565 aa, Myxococcus xanthus DK 1622
MRSESVALSRVVSEADVPPPPSRAARLRALATETFDVLIIGGGVTGAGSARDAALRGLKVALVERDDFASGTSSRSSRLIHGGLRYLEHGHLGLVFESSIERQRLLRLAPHLVRPLAFIWPVYAGARVPRWKLNAGLMLYDALSLFRNVKGYRRLNARQVHAAEPGLRTDHLKGGARYYDAATDDARLTLANAVGASEAGAVVLNHASVKALVLEQGQAHGATVVDHLTGEEVTVRARALVNATGPWSDEIRRLDAPNGASPAVRGSKGVHLAVPRERINHRDAFTLLSPKDGRVMFVLPADNFTIIGTTETSTRAHPAEVRASESDVAYLLESANAFFPEARLTRADVVSAWAGIRPLVASGYHGTQADAGSASREHAIDVSPSGVLAISGGKLTTYRVMARDVVDAVERRLGQPRRRSPTDVLPLPGGDIRALDAEFAAARTEVGDDATAVHLVRAYGSRWRRVWALTREDAALSRPLAEGLPYRAAEAAWGVTHELVHTLSDLLIRRLKVAFETRDQGQAAARVAAEVMAPRLGWDAAETQRQLDVYAADALRLFGVDPAEA

SEQ ID NO: 108652 - DNA, 1671 bp, Rubrobacter xylanophilus DSM 9941
  CDS (1)..(1671): transl_table=11
gtgagccgcagcataccgcgggatatacgacagtaccccttcgacctcatcgtcatcggggccgggataaacggcgcggggatagcccgggacgccgcgatgcgcggcctgagggtgctgctgctggacaagggcgacatctccgacgggaccacccagtggtccacccgcctcatccacggcggcctgaggtacctggagtactacgagttcgggctggtgcgggagtcgctgagggagcgggagatcctgctccacatcgccccgcacctggtcaggcccctgggcttcctcgtccccgtctacgagcgctccaagagggggccccgcacgatccggctcggcatgatcgcctacgacctcctctccttcgacaagagcctggagaaccaccgcatgttctcggcccgggaggccctggagcgcgagccgggcctgaacccggagggcctgctgggcgcggccttctactacgacgcccaggccgagtacgccgagcggctggcggtggagaacgcgctctccgccgcgcggcacggggcggtggtcctcacctacgccagggtcgagcgcctgctgcaggaggggggcagcgtcgtgggggtggagttcgccgacctgctcggcggcgggcgccacaccgctcgcgcccccgtgaccgtcaacgtggccggcccgtgggtggacgaggtgctcaggggcggcgggtacggcgggccgcgcctgatcggggggaccaagggcagccacatcgtcgtcgaccccttccccggggccccgcgcgaggaggccctctacgtcgaggccaggcgcgacggccgcccgtacttcatcgtcccgtggaacggccgctacctcatcgggaccaccgacctgcgctacgagggggacctcgaccacgtcgaggccaccgaggaggagatagagtacctcctcgacgagacgaaccacgtcatccccggcgcgaacctctcccgcgaggacgtcctgttcacctactccggcgtgaggcccctcccctaccagcccgagggggaggccggctccatcacccgccgccacatcatccacgaccacgcccgcgacgagcggcccacgggcggcctggtctcgatcgtcggcgggaagctcaccacctaccggaatttggcccgccagacggtgaacctcgtctacgagaagctgcgcctccccgaccccggctgccgcacggaccgcatccccctccccggggggctcgccgacgacttcgccgccttcgccgcggacttcaaggccacgagcgggctctccgaggagctggccgggcgcctgctccgggtctacgggacccgggcccccgaggtgctggagtgcgccggggacgacgcctccctcaggatgccgctctcctcccgcgccagcctgcccaccggcctcatcggggccgaggtcgtctacgccttccggcgggagatggcccagaccctcgccgacgtcctgctgcgccgctccatggccggtatgggcccccgggtcgccctcgacgtggacgaggccgccgcagaggtcgcgagaaagcacctcggctggtcggaggagcgggccgcagaggaggtgcgccgctaccgcgagttcgtccggcgctaccacccgaaggacttcaggcgccgcaaggcggtgaacgtctga

SEQ ID NO: 108653 - protein, 556 aa, Rubrobacter xylanophilus DSM 9941
MSRSIPRDIRQYPFDLIVIGAGINGAGIARDAAMRGLRVLLLDKGDISDGTTQWSTRLIHGGLRYLEYYEFGLVRESLREREILLHIAPHLVRPLGFLVPVYERSKRGPRTIRLGMIAYDLLSFDKSLENHRMFSAREALEREPGLNPEGLLGAAFYYDAQAEYAERLAVENALSAARHGAVVLTYARVERLLQEGGSVVGVEFADLLGGGRHTARAPVTVNVAGPWVDEVLRGGGYGGPRLIGGTKGSHIVVDPFPGAPREEALYVEARRDGRPYFIVPWNGRYLIGTTDLRYEGDLDHVEATEEEIEYLLDETNHVIPGANLSREDVLFTYSGVRPLPYQPEGEAGSITRRHIIHDHARDERPTGGLVSIVGGKLTTYRNLARQTVNLVYEKLRLPDPGCRTDRIPLPGGLADDFAAFAADFKATSGLSEELAGRLLRVYGTRAPEVLECAGDDASLRMPLSSRASLPTGLIGAEVVYAFRREMAQTLADVLLRRSMAGMGPRVALDVDEAAAEVARKHLGWSEERAAEEVRRYREFVRRYHPKDFRRRKAVNV

SEQ ID NO: 108654 - DNA, 1632 bp, Cytophaga hutchinsonii ATCC 33406
  CDS (1)..(1632): transl_table=11
ttgaattactaccaacaacgcgcagcacttttagagcatgccactcaggttgaatacggtcttatcgttatcggaggcggggtaacaggctgtggtatcgcattggatgcacagtccagaggcattccaaccttattgattgagatgcatgatattgcttcgggtacatcttcacgttctaccaaactgatccatggcggacttcgctacctgaagcagctggaattcggattggtaaaagagacgggtagagagcgcgctgttgtacatcacctggcaccgcatatcactattcctgaacctatgttattgccaattatcaaaggcggttctatgcctaaatggatggcttcaatgggtacattaatctacgattttttagctggtgttaagaaaagcgagcgcaggaaagtactcaataaagcagatacacttgctgcagagcccttattatcgggtttaaatgttaccggcggtatacgctactatgaataccggaccgatgatgcccgtttgactatggcgcttgcatgtaccgcaaaagcgcagggtacaacggtattgacctatacaaaagtagtgaaactgatgtaccaggcaggagagatcattggtgtaaaagtaattgaccgttttacagataaagaatatattttaaaatcggaagaagtgatcaatgctgccggcccctgggtcgacagcattgatgagcaggatgcggatatccgtaaaaataaactggtacttacaaagggcgtacacattgtagtggattttaaaaagtttccgattcagcaggccgtttattttgatgtgggagacgggcgtatggtgtttgctattccaagagaaaagaaaacgtacatcggtacaacagatactaaatacaccggagattataaagagccggggattgaagaggcagataaaacctatttgatcggatgtatccggacagcgtttccgggtgtaaccttgacggttgctgatatagaaagttattggtcgggcttacgtccgctgatccgtcagcgcgacagtaaatcgccttcggctatttcaagaaaagatgaagtctttcaaagcgcaaccggtctgttaagtattgccggggggaaacttaccggctatcgtaaaatggcggaacgtattgtcgatattgttgccgaacgcttaaaacttgcttatgatattgatacgtgccagacagagtttcatttattaagcggcggcgatattgctaagcacggcgggctagacacatttattgctgagatgctgcctgtattgaaagcatttggtttggataccaatacggcagcacgtatgatccgcttgtatggaagtaatattcatttgtatgaagccgaattaaaacacatagatgaaaggctggcttccatcaatcttccggattggcagaaagcacaattacagtacacgatcaaacatgagtttgtttgtaaacctgcagattttattgtccgccgtacggcagacttttatttcagacgtgctgaagccgagcagtatgcctcggaacttattaaagcaatgcagctgctgcttggctggacagaccaggagtatgcgctgtacaacgaagaatggctgttatttctcaaaaaataa

SEQ ID NO: 108655 - protein, 543 aa, Cytophaga hutchinsonii ATCC 33406
MNYYQQRAALLEHATQVEYGLIVIGGGVTGCGIALDAQSRGIPTLLIEMHDIASGTSSRSTKLIHGGLRYLKQLEFGLVKETGRERAVVHHLAPHITIPEPMLLPIIKGGSMPKWMASMGTLIYDFLAGVKKSERRKVLNKADTLAAEPLLSGLNVTGGIRYYEYRTDDARLTMALACTAKAQGTTVLTYTKVVKLMYQAGEIIGVKVIDRFTDKEYILKSEEVINAAGPWVDSIDEQDADIRKNKLVLTKGVHIVVDFKKFPIQQAVYFDVGDGRMVFAIPREKKTYIGTTDTKYTGDYKEPGIEEADKTYLIGCIRTAFPGVTLTVADIESYWSGLRPLIRQRDSKSPSAISRKDEVFQSATGLLSIAGGKLTGYRKMAERIVDIVAERLKLAYDIDTCQTEFHLLSGGDIAKHGGLDTFIAEMLPVLKAFGLDTNTAARMIRLYGSNIHLYEAELKHIDERLASINLPDWQKAQLQYTIKHEFVCKPADFIVRRTADFYFRRAEAEQYASELIKAMQLLLGWTDQEYALYNEEWLLFLKK

SEQ ID NO: 108656 - DNA, 1743 bp, Rhodococcus sp. RHA1
  CDS (1)..(1743): transl_table=11
ttgagtagtcagccaggtgtgcagttcctcggtccccggcagcgtgatgccgcatgggacaagctgcagaccgaacagttcgacgtcgtcgtgatcggcggtggtgtggtcggagccggtgcggccctcgacgcggccacccgcgggctgaaggtggcgttggtggaggcacgcgactacgcgtccgggacgtcgagtcgctcgtcgaagatgttccacggcggtctgcgctatctcgagcagctcgagttcgggctggtccgggaggcgctccgggagcgtgagctctcgctgacgaccctcgcaccgcacctggtgaagccgctcaagttcctgttcccgatcacccaccgcgtgtgggagcgcccctacatggcggcgggcatcttcctctacgaccggatgggcggggccaaatcggttccggcgcagaagcatctgacgcgggcgggtgcgctgcggatggcgccggggctcaagcgcaactcgctgaccggcggcatccagtactacgacaccgtggtcgacgacgcccgccacaccatgaccgtcgcccgcaccgccgctcactacggggcggtcgtgcgcacgtccacgcaggtggtcggattcctccgggaggcggaccgggtctccggagtgcgcgtccgggactgcgaggacggccgcacggcggacgtgaaggcgcacgtcgtcatcaacgccaccggggtgtggaccgacgagatccaggcgttgtcgcggcaacgcggccggttccgcgtccgcgcgtcgaagggcgtccacatcgtggtgccgcgcgatcggatcgtgagcgacgccgcgatcatcctccgcaccgagaagtcggtgctgttcgtgatcccgtggggcagccactggatcatcggcaccactgacacggactggaatctcgacctcgcgcacccggcggccaccaaggccgacatcgactacatcctcggtcacgtcaacaaggtgctggtgacgtcgctgactcacgacgacatcgacggcgtctacgcgggtctgcgcccactgctcgcgggggagagcgacgaaacgtcgaaactctcgcgggaacacgccgtcgcgcgcgtggcgccgggtctggtcgccatcgcgggcggcaagtacaccacctaccgggtgatggccgaggacgccgtggatctcgccgccgacgacattcccgcgcggatggcaccgtccatcacggagaaggtgccgctcgtcggtgcggacggctatttcgcgctcgtcaatcagaccgtccatctcggagagatgtacggcctgcacccgtaccgcgtgaagcatctgctggaccgatacggttcgctgatcgacgaggtgctcgaccaggcgcgcgggaaaccggaacttctccagcccctcacggacgcgcccgcctacctgcaggtcgaggtcgtgtacgcggcggcggccgagggtgccctgcatctcgacgacatcctcgcccggcgcacgcgcatcgccatcgagtactcgcatcggggtgtgaactgcgccgagcaggtggcgcaactggtggccccggtcctcggctgggatgccgacgccgtcgaccgcgaggtgaagacgtatcaggcgcgggtggaggcggaggtgcagtcgcaggcacagccggacgacctgtcggccgacgcgttgcgggctgcggcgcccgagtcgcgggtcgaactgctcgaaccaccggtcagtgtgtcagaaataccttga

SEQ ID NO: 108657 - protein, 580 aa, Rhodococcus sp. RHA1
MSSQPGVQFLGPRQRDAAWDKLQTEQFDVVVIGGGVVGAGAALDAATRGLKVALVEARDYASGTSSRSSKMFHGGLRYLEQLEFGLVREALRERELSLTTLAPHLVKPLKFLFPITHRVWERPYMAAGIFLYDRMGGAKSVPAQKHLTRAGALRMAPGLKRNSLTGGIQYYDTVVDDARHTMTVARTAAHYGAVVRTSTQVVGFLREADRVSGVRVRDCEDGRTADVKAHVVINATGVWTDEIQALSRQRGRFRVRASKGVHIVVPRDRIVSDAAIILRTEKSVLFVIPWGSHWIIGTTDTDWNLDLAHPAATKADIDYILGHVNKVLVTSLTHDDIDGVYAGLRPLLAGESDETSKLSREHAVARVAPGLVAIAGGKYTTYRVMAEDAVDLAADDIPARMAPSITEKVPLVGADGYFALVNQTVHLGEMYGLHPYRVKHLLDRYGSLIDEVLDQARGKPELLQPLTDAPAYLQVEVVYAAAAEGALHLDDILARRTRIAIEYSHRGVNCAEQVAQLVAPVLGWDADAVDREVKTYQARVEAEVQSQAQPDDLSADALRAAAPESRVELLEPPVSVSEIP

SEQ ID NO: 108658 - DNA, 1818 bp, Pediococcus pentosaceus ATCC 25745
  CDS (1)..(1818): transl_table=11
atgtcattctcattaattagtagaaaacaagatatcgaaagattgaaaaatgaaacgctcgacttacttaccatcggtggtggaatcaccggcgcaggtgttgctattcaagcaagcgccatgggtatgaacaacgccctaattgaaatgcaagatttcgctgaaggaacatcttctcgttcaaccaagttagttcatggtggaattcgttatcttaaaaacttcgatgtcgaggtagtttctgataccgttaaagaacgcgcggttgttcaaggaattgcccctcatattcctcgccctgatccaatgcttcttccaatttatgacgaacctggatcaacctttgatatgttttcagttaaaattgcaatgaatttgtacgatcaacttgctggtgttacagatcctaaatacaccaactacactatttcaaaagacgaggttcttcaacgtgagcctcaacttaatccggaaggtcttttgggtggtggtgtttaccttgattttcgtaataatgatgctcgtttagtgattgaaaacatcaaaaaagctcatgaaaatggtggcttaatggtcagtcatatcaaagctcaacacattctgcatgatgaaaatggtcgtgtaaatggtgttaacgttaaagatctcttaactggtgaagaatttgatattcacgctaaattggtaatcaacacaacgggtccttggtcggactttattcgtgaaatggatgataaagaagaagttgttccacagatgcgccctactaaaggggtgcacttggttgttgatcgctcacgtctaaacgtccctcagccaacttactttgactctggcaaacaagatggtcgtatgattttcgcaattcctcgcgaaggaaagacctattttggaaccaccgatacagattacaaaggcgacttcttgcatccacgagttgagcaagaggatgtcgattacttgttaagtatcattaataaacattatccagaagctaagattacgattgatgatattgaagctagttgggcaggtttacgtcctctaatttcttccaatggtagctcagactacaatggtggtaattccggaaaaattacttcggatagctttgatgaagtcattgatattgtaaataagtatgaaaataaagaagctgatcgagttgacgttgaagatgtccttaataatctagaaagcaccctctcagaaaaaaatccttctgctgtatctcgtggtagcgccctcgacgttgcaaacgatgggctaatcacccttgcaggtggaaaaattaccgattatcgtaaaatggctgctggagccattgctctaatcaccaaagttctcaaagaagacttcaacgaaacattcaacgaaattgattctaagcatctccaagtttctggtggtgacatcgatcctaataacgtcgacgctaccctttcattcttcgctaaacaaggaattgaaagtggtctatcaaaagctgaggctgaacaaatagctaacctatttggatcaaatgctgctcgtgtatttagccagattgggaaaattgaagcagcacccggactaacacttgctgagacaattagtctacattattcaatgaatgaagaaatgacgctgacacctgttgactacttgctccgccgtaccaatcaccttcttttccaccacgatacaattgatgatgttaaaaagggtgttattaatgaaatggctcgttacttcgaatggtctgacgaagagcgtgaagctcaagcgaagaaactccaagaaacaatcgatgaagctagccttacttacctaaaatag

SEQ ID NO: 108659 - protein, 605 aa, Pediococcus pentosaceus ATCC 25745
MSFSLISRKQDIERLKNETLDLLTIGGGITGAGVAIQASAMGMNNALIEMQDFAEGTSSRSTKLVHGGIRYLKNFDVEVVSDTVKERAVVQGIAPHIPRPDPMLLPIYDEPGSTFDMFSVKIAMNLYDQLAGVTDPKYTNYTISKDEVLQREPQLNPEGLLGGGVYLDFRNNDARLVIENIKKAHENGGLMVSHIKAQHILHDENGRVNGVNVKDLLTGEEFDIHAKLVINTTGPWSDFIREMDDKEEVVPQMRPTKGVHLVVDRSRLNVPQPTYFDSGKQDGRMIFAIPREGKTYFGTTDTDYKGDFLHPRVEQEDVDYLLSIINKHYPEAKITIDDIEASWAGLRPLISSNGSSDYNGGNSGKITSDSFDEVIDIVNKYENKEADRVDVEDVLNNLESTLSEKNPSAVSRGSALDVANDGLITLAGGKITDYRKMAAGAIALITKVLKEDFNETFNEIDSKHLQVSGGDIDPNNVDATLSFFAKQGIESGLSKAEAEQIANLFGSNAARVFSQIGKIEAAPGLTLAETISLHYSMNEEMTLTPVDYLLRRTNHLLFHHDTIDDVKKGVINEMARYFEWSDEEREAQAKKLQETIDEASLTYLK

SEQ ID NO: 108660 - DNA, 1530 bp, Solibacter usitatus Ellin6076
  CDS (1)..(1530): transl_table=11
atgtaccttcggctccgcgagcacaacggcccgtgggacatgatcgtcatcggaggcggcgctaccggcgccggcgtcgccgtggacgcatccacccgcggctatagcgtcctcctcctcgagcagagcgatttcggtaagggcacctccagccgcagtaccaagctcgtgcacggcggcgtccgttatctggaacagggcaatctctcgctcgttatggaggccctcaaggagcgcggactgctgctccgcaacgcgccccacctggtccgcaacctcggcttcgtcgtccccaattacgactggtggcaggcgcccttctacggagtcggcctcaaggtctacgacctgctggctgggaaatacggcttcggcagttcgcgcattctctcgcgcgaggagaccctggcgcgcctccccaccatccgcgccgaagatctgcgcggcggcgtcatctacttcgacggccagtttgacgacgcgcgcctcctcattcatctgcttgccactgccttcgaccacggcgcaagtctcttcaatcacacgcgcgtggtcgctgccgcctgcgatggcgtccgcgtgcgcgacgaagaaaccggcgaggagttcgatgccgccgcgcgcgtcgtgatcaatgccaccggcgccttcagcgattccgtccgccgcatggccgaccccacggccgccccaatcatcgctcccagccagggcatccacctggtcttcgaccgctcgtttctccccggcgacaacgccatcatggtgccgcacaccagcgatggccgcgtcatgttcgccattccctggcacggccataccgtggtcggcactaccgacaccccggtgccgcaagcctcgctcgaaccagtcgccatggagcaggagatcgacttcatcctgcaaacggccgcgctctatctggccaagccgcccttccgcgccgacgtcctcagcgtcttcgccggcatccgtccgctcgtcaaacagggtgacgccggacgtaccgcgtcgctatcccgcgaccacaccatcatcatcgaagactccggcatcgtcactatcgccggcggcaagtggaccacctatcgccgcatggccgaggattgcgtcaatcaggctgccaccctcggcggcctcgaagaacgcccctgcgtcaccgccgacctgcccgtccacggcagccatcgcgcggccgacgccttcggggcgctctcggtctatggctccgacgcccccgccgtgcgcgagttgtccggcgaccgtcttcaccccgcattgccgtataccagtggtgaagttctctgggccgtccgccacgaaatggcgctcaccgtggaagacgtgctcgcccgccgcacacgcgcgctcttcctcaacgcccgcgccgccgttcaaatggctccccaggtcgccgctctgatggcccgcgaactgggccgcgaccagcagtggatcgccacccaactcgagtcttttcgcgccgtcgcacagcattatctgatcgggcccgctagtcttccggactag

SEQ ID NO: 108661 - protein, 509 aa, Solibacter usitatus Ellin6076
MYLRLREHNGPWDMIVIGGGATGAGVAVDASTRGYSVLLLEQSDFGKGTSSRSTKLVHGGVRYLEQGNLSLVMEALKERGLLLRNAPHLVRNLGFVVPNYDWWQAPFYGVGLKVYDLLAGKYGFGSSRILSREETLARLPTIRAEDLRGGVIYFDGQFDDARLLIHLLATAFDHGASLFNHTRVVAAACDGVRVRDEETGEEFDAAARVVINATGAFSDSVRRMADPTAAPIIAPSQGIHLVFDRSFLPGDNAIMVPHTSDGRVMFAIPWHGHTVVGTTDTPVPQASLEPVAMEQEIDFILQTAALYLAKPPFRADVLSVFAGIRPLVKQGDAGRTASLSRDHTIIIEDSGIVTIAGGKWTTYRRMAEDCVNQAATLGGLEERPCVTADLPVHGSHRAADAFGALSVYGSDAPAVRELSGDRLHPALPYTSGEVLWAVRHEMALTVEDVLARRTRALFLNARAAVQMAPQVAALMARELGRDQQWIATQLESFRAVAQHYLIGPASLPD

SEQ ID NO: 108662 - DNA, 1707 bp, Mycobacterium smegmatis str. MC2 155
  CDS (1)..(1707): transl_table=11
gtgaccgtgggtgcttatccgctgagtccggctcatcgcgccgcggcactcgaccggctcgcgagtgacgagttcgacgtcctcgtcgtcggtggcggcgtggtgggcgcgggcgccgcgctcgacgcggccacgcgcgggctgcgggtcggactggtcgaggcacgtgactacgcgtcgggcacgtcgagccggtcgagcaagctcttccacggcgggctgcgctatctcgagcagttcaacttctcgctggtgttcgaggcactgcgtgaacgctcgctggtgctcaacacgctgtgcccgcacctggcccggcccgtgccgttcatctacccgctgcagacgcgattcgaccgcgcctacgcgggtctgggtatcggtgtctacgacgtcatgggcgcgggacgcggtgtgcccggccaccacgaacatctgggccgtgcaaggacactcgaatcgttcccctcgggcagtccggcgatccgcggcgcgatccggttctacgaggggcaggtggacgacgcccgccacaccatgatgctcgtgcgcacggccgcacacttcggcgcggtgtgcgcgaacagcacccgggtgacgggtttcgtacgcgacggcgagcgcgtggccggcgtcggggtgcgtgatctggacggcggacgtgagttcgaggtccgcgcaaagcaggtcatcaacgcgaccggggtgtggacggacgagactcagggcatggccggtggtcagggccagttccgcgtgcgggcgtccaaaggggtgcacctcgtggtgccccgcagccggatcaactcgtcgaccggcatcatcacgcgcaccgagaagagcctgctgttcgtgatcccgtggggcagccactggatcgtcgggaccaccgacaccgactggtcactcgacctggcgcaccccgcggcgagccgcgccgacatcgagtacctgctcgggcacgtcaacacgctgctcgccgatccgctcaccgcggacgacgtggtcggcgtgtacgcggggctgcgcccgctgctggccggggagtccgactccacgagcaagctctcgcgcgaacatgcggtcgcctcccctgttcccggcctcacggtcatcgcaggcggcaagtacaccacctaccgcgtgatggcaaaggatgccgtggatctcgcggtcaggggtctcggtcgtgccgtgccgtcctcgtgcaccgagcgcgtgccactgctcggcgcggacggttacccggccgcgtggaacgcgcgccgtcgcaccgccgaggacaccggtctggcggtgacgacggtcgcgcatctgctggggcgttacggcaccctgaccgacgagttgctcgaaatcatcgcgcatcgacccgatctcggtgttcccttggcgggcgctccggagtatctcaaggtggaggcgtactacgcggcgagccacgagggggcgcggcacctggaggacgtgctgacccgccgtacccggatctcgatcgaggtggccgaccgcggagtcgccgccgcgcgggaggtcgccgacctgatcgcaccggtgctcgggtggagtcagaccgacatcgcccgggagatcgagcattacgacgcccgcgtggccgccgagcgggaatcccagcaccagctcgatgattacaccgcggacgccgcacgcctcggcgcgcccgacgtgcgggtgggcgtcacgcagtga

SEQ ID NO: 108663 - protein, 568 aa, Mycobacterium smegmatis str. MC2 155
MTVGAYPLSPAHRAAALDRLASDEFDVLVVGGGVVGAGAALDAATRGLRVGLVEARDYASGTSSRSSKLFHGGLRYLEQFNFSLVFEALRERSLVLNTLCPHLARPVPFIYPLQTRFDRAYAGLGIGVYDVMGAGRGVPGHHEHLGRARTLESFPSGSPAIRGAIRFYEGQVDDARHTMMLVRTAAHFGAVCANSTRVTGFVRDGERVAGVGVRDLDGGREFEVRAKQVINATGVWTDETQGMAGGQGQFRVRASKGVHLVVPRSRINSSTGIITRTEKSLLFVIPWGSHWIVGTTDTDWSLDLAHPAASRADIEYLLGHVNTLLADPLTADDVVGVYAGLRPLLAGESDSTSKLSREHAVASPVPGLTVIAGGKYTTYRVMAKDAVDLAVRGLGRAVPSSCTERVPLLGADGYPAAWNARRRTAEDTGLAVTTVAHLLGRYGTLTDELLEIIAHRPDLGVPLAGAPEYLKVEAYYAASHEGARHLEDVLTRRTRISIEVADRGVAAAREVADLIAPVLGWSQTDIAREIEHYDARVAAERESQHQLDDYTADAARLGAPDVRVGVTQ

SEQ ID NO: 108664 - DNA, 1755 bp, Nocardioides sp. JS614
  CDS (1)..(1755): transl_table=11
atgagccagcccagcgccctcagcccgcaggcccgcgaccgagcgctcgccgccatgcggtcgaccggcggccagcccgccggggtccggcccgagctggacgtcctggtcgtcggcggcggcgtgaccggtgccggcaccgcgctggacgcggtgacccgcggcctgagcaccgggctgctcgagcagcgcgacctggccagcggcaccagcagccgcagcagcaagctgatccacggtggcctgcgctacctggagatgctcgacttcggcctggtccgcgaggcgctccaggagcgtggcctgctgctcacccgactggcgccgcacctggtccggccggtcccgttcctctacccgctgacccatcgcggctgggagcgcccctacgtcgccgcggggctcacgctgtacgacgggatggcggccctcggcgcgctgcggagccagggtgacatggggctgccgcggcacaagcacctgctgcgccgccacgtggcgcggatcgccccggacttccgggcggagacgatcaccggtgcgatccagtactgggactgccaggtcgacgacgcccggctggtggtcacgctcgcccgcaccgccgccgcccacggcgcgcacgtggccactcgggtcaaggtgaccgggttcctccgcgagggcgagcgggtggtcggcgtacgcgccctcgacctggagacccaggaggagctcgaggtgcgggcgcgggtggtggtgaacgccgccggcgtgtggaccgacgagatccaggagatggtcggcggccgcggcgcgctgcacgtccaggccagcaagggcatccacctcgtcgtgccgcgcgaccggatccgctccgaggcggggttcatcgtgcgcaccgcgatctccgtgctgttcgtgatcccgtggggccggcactggatcatcggcaccaccgacacgccgtgggacctggacaaggcgcaccccgcggcgtcgcgggccgacatcgactacgtcctcgagcacgtcaacgcgatcctgcgcgagccgctggaccacgacgacgtccagggcgtgtacgccgggctccggccgctgctgtccggggagtcggagccgacctcgcggatctcccgcgagcacaccgtggtcaccccggtccctgggctggtgatgatcgcgggcggcaagctcacgacctaccgggtgatgggcaaggatgcggtcgacgcggccgcacactcgctgcgcaccaccgcgaacctcaccgtccgcgactcgatcaccgacagggtgccgctggtcggcgccgccgactgggagacccgcgccaaccagcgggtgctcctctcgcgtcgttcggggctgcacgtcgcccggatcgaccacctcctcggccgctacggcggcctggtcgacgacctgctcgacctggtggccacccggcccgagctggccgcgccgctggacggtgcggacgactacctcgccgccgaggtcgtctacgccgtcacccacgagggtgcccggcacctcgacgacctgctgacccgccgtacccgcatctcgatcgagaccttcgaccgcggtgtccgggtggcctccgaggtcgcgcggctgatggccggtgagctcggctgggacgacgcccgcaccgccgacgagatcgaccactaccggcgccgggtcgaggccgagcggcagagccagctgcagctcaccgaccaggaggccgacgaggcccgggtgtcggcccccgacatcgtgtga

SEQ ID NO: 108665 - protein, 584 aa, Nocardioides sp. JS614
MSQPSALSPQARDRALAAMRSTGGQPAGVRPELDVLVVGGGVTGAGTALDAVTRGLSTGLLEQRDLASGTSSRSSKLIHGGLRYLEMLDFGLVREALQERGLLLTRLAPHLVRPVPFLYPLTHRGWERPYVAAGLTLYDGMAALGALRSQGDMGLPRHKHLLRRHVARIAPDFRAETITGAIQYWDCQVDDARLVVTLARTAAAHGAHVATRVKVTGFLREGERVVGVRALDLETQEELEVRARVVVNAAGVWTDEIQEMVGGRGALHVQASKGIHLVVPRDRIRSEAGFIVRTAISVLFVIPWGRHWIIGTTDTPWDLDKAHPAASRADIDYVLEHVNAILREPLDHDDVQGVYAGLRPLLSGESEPTSRISREHTVVTPVPGLVMIAGGKLTTYRVMGKDAVDAAAHSLRTTANLTVRDSITDRVPLVGAADWETRANQRVLLSRRSGLHVARIDHLLGRYGGLVDDLLDLVATRPELAAPLDGADDYLAAEVVYAVTHEGARHLDDLLTRRTRISIETFDRGVRVASEVARLMAGELGWDDARTADEIDHYRRRVEAERQSQLQLTDQEADEARVSAPDIV

SEQ ID NO: 108666 - DNA, 1599 bp, Acidovorax sp. JS42
  CDS (1)..(1599): transl_table=11
atgactagcgacacctccacccctttggcaaccgtacgggccgacctgctggcccgcctggctcaacccgtgacctacgacctggcggtcgtcggaggtggggcgacgggccttggggtggcgctggatgcggcggcgcgcggcttttccgtcgtgctgctggaatcgcacgacttcgccaagggcacctcctcgcgtgccaccaagctggtgcacggcggcgtgcgctacctcgctcagggcaacatcgccctggtgcgcgaggcgctgcatgagcgcaccacgctgttgcgcaacgccccccatctggcgcagccgttggcattcgtcatgccttcttacaaggtgtgggaaacaccgttctacggtgtgggcctgaagatgtacgacgccctggccggcaaggcgggcctggggcctaccgaattccttgggcgcatggagaccctgcgctgcctgcccacggccatggccgacgggctcaagggcggcgtgaagtattgggacgggcagttcgacgacgccagactggccctggccctggcgcgtaccgccgcgcagcggggggccctgctgctcaactactgccccgtggacgacctgttgtacgacggggggaaggtggcgggcgtggtttgccaggatgccgagaccgggcggcgctacgaggtgcgtgcgcgctgcgtggtcaacgccaccggcgtgtgggtggatgccctgcgccagcgcgatggcgatgtgagcggccagcccgtcaagcccatggtggcgcccagccagggggtgcacatcgtggtggaccgcgagttcttgccctccgaccatgcgctgatggtgcccaagacggccgacgggcgggtgctgtttgcggtgccctggctgggcaaggtgattttgggcacgaccgacagcccacgccaggatctggcgcgcgagccccaggccatgcgggaggaagtggccttcatcctgggggaatcggcgcgctacctgcggcgcgccccccaggcgagcgatgtgcgcagcatctgggtgggcctgcgtcccttggtcaagccctcggacgaagacgccgccgccaccaagagcatcagccgggaacacactgtgttggccagccgcagcgggctggtcaccgtgactggcggcaagtggaccacctaccgcgccatggccgaggatgtactgctcaagtgcatggacgaacacctgctgccgcgccgcccgggcgggatcaccgttgcgctgcccctggtaggagccggtgccacccgggagcgacagggaatgaacgcgccccagggtctgcattcctacggtgacgaggccgcgcgggtgcaagcccttccgggttcgcaggtgcaactggccgaagggctcagcgaggccatggtgcgctttgccgcgcgccatgagtacgcacgcaccgtggaggacgtgctcgcacggcgctcgcgcgtgctgtttctcgatgcgcgcctggcggccgcgctggcgccgcgcgtggcggacatcctgcgcgaggaaatccccggccaggacccgcagctgcccgcgttcctagagttggccgcacactacgccacggtgccggcataa

SEQ ID NO: 108667 - protein, 532 aa, Acidovorax sp. JS42
MTSDTSTPLATVRADLLARLAQPVTYDLAVVGGGATGLGVALDAAARGFSVVLLESHDFAKGTSSRATKLVHGGVRYLAQGNIALVREALHERTTLLRNAPHLAQPLAFVMPSYKVWETPFYGVGLKMYDALAGKAGLGPTEFLGRMETLRCLPTAMADGLKGGVKYWDGQFDDARLALALARTAAQRGALLLNYCPVDDLLYDGGKVAGVVCQDAETGRRYEVRARCVVNATGVWVDALRQRDGDVSGQPVKPMVAPSQGVHIVVDREFLPSDHALMVPKTADGRVLFAVPWLGKVILGTTDSPRQDLAREPQAMREEVAFILGESARYLRRAPQASDVRSIWVGLRPLVKPSDEDAAATKSISREHTVLASRSGLVTVTGGKWTTYRAMAEDVLLKCMDEHLLPRRPGGITVALPLVGAGATRERQGMNAPQGLHSYGDEAARVQALPGSQVQLAEGLSEAMVRFAARHEYARTVEDVLARRSRVLFLDARLAAALAPRVADILREEIPGQDPQLPAFLELAAHYATVPA

SEQ ID NO: 108668 - DNA, 1656 bp, Exiguobacterium sibiricum 255-15
  CDS (1)..(1656): transl_table=11
atggcaaaccaacaattttcaagcaaaaaccgtgcagaggtctacaatcgattaacgcgtgaagaacttgatctacttgtcgtaggtggaggaatcacgggagctgggatcgcacttgatgccgcgtcacgtggcatgaagattggactcgttgagatgcaagactttgcagcgggaacgtcaagccgttcaacgaaattggttcatggtggtttacgttatttgaaacaattcgaaatccaaatggttgccgaagtcgggaaagaacgggccatcgtttatgaaaacggaccacacgttacgacaccggaatggatgttgttaccgatgcataagggcggtacgttcggaccgttcagtacgtcaatcgggttacgtgtttatgatttcttggcaggcgttaagcgttcagagtggcgttcaatgttgtcggcaaaagaaacattggcaaaagagccgcttgtgaaacaagacggtctaaaaggcggcggctactacgttgagtatcggacagatgacgcccgtttaacgatcgaagtcatgaaagaagcggttgctcacggagcacgtgtcgtcaactacacgaaagcggaagaaattctgtatgaaaacggaaaagtcgtcgggatgcgcgtgacggatctcgcgacaggggacgttcatgaaattcgtgcgaaaaaagtcgtcaacgcaaccggcccttgggtcgatgaattgcgtgaaaaagacggttcgaaagtcggcaaacaactccgtttgacaaaaggggttcacgtcgtcatcgaccagtcaaaattcccgctgaaacaagccgtctatttcgatacaccggatggccggatgatttttgccattccacgtgacggaaaagcgtatgtcggaacaacggatacgttctttgacaaagacacatcacatccgaaatttacagtcgaagaccaggaatatgttctcgatgcaattcattacatgttccctgaagtgaaagtgacagccgaagatgtggaatcaagctgggctggtgttcgtccattgatttatgaacaaggaaaagacccgtctgaaatttcgcggaaagacgaagtatggcagtctgaatccggtttgattacgattgccggcggaaaactgacaggctaccgtaaaatgggcgagcatgtcgtcgatctcgtcgcaaaacttctcaaaaaagaagaaaatgtcgcgtatgcccgttgtgcaacaaaaaacatgccgatttcaggcggtcatgtcggaggagcagccggatacgcgaagttcttgaaatcacaagcaccggcaaacggattaacgtcggaagaagtcttgttccttgcgaaacgctatggttcaaacgtaccggttgttttggaatatgcggcagagtatgatgcggcggaaacagaattaccgcgtgatgtttacgcacaactccattacggtatcaatcatgagatggtagcccgtccaatcgacttcttcatccgtcggaccggcgcagtcttctttgatattgcatgggcacgtcagcacaaagaagccgtcatcaaagagatggctcgtcacttgaactggacagctgcacaaacagcagagtatacaaaagaactcgagattgaaatcgaagatgcggcgcacgcactcgtcacagaataa

SEQ ID NO: 108669 - protein, 551 aa, Exiguobacterium sibiricum 255-15
MANQQFSSKNRAEVYNRLTREELDLLVVGGGITGAGIALDAASRGMKIGLVEMQDFAAGTSSRSTKLVHGGLRYLKQFEIQMVAEVGKERAIVYENGPHVTTPEWMLLPMHKGGTFGPFSTSIGLRVYDFLAGVKRSEWRSMLSAKETLAKEPLVKQDGLKGGGYYVEYRTDDARLTIEVMKEAVAHGARVVNYTKAEEILYENGKVVGMRVTDLATGDVHEIRAKKVVNATGPWVDELREKDGSKVGKQLRLTKGVHVVIDQSKFPLKQAVYFDTPDGRMIFAIPRDGKAYVGTTDTFFDKDTSHPKFTVEDQEYVLDAIHYMFPEVKVTAEDVESSWAGVRPLIYEQGKDPSEISRKDEVWQSESGLITIAGGKLTGYRKMGEHVVDLVAKLLKKEENVAYARCATKNMPISGGHVGGAAGYAKFLKSQAPANGLTSEEVLFLAKRYGSNVPVVLEYAAEYDAAETELPRDVYAQLHYGINHEMVARPIDFFIRRTGAVFFDIAWARQHKEAVIKEMARHLNWTAAQTAEYTKELEIEIEDAAHALVTE

SEQ ID NO: 108670 - DNA, 1581 bp, Synechococcus sp. WH 5701
  CDS (1)..(1581): transl_table=11
atgagtgtggatctgctcgtgatcggcgctggggcaaccggtgccaccattgccctggaagcggcacggcggggcctgagcgtggccctggtggaagccggcgacatcgctggcggcaccagcagccgcagcacgaagttgctgcatggaggggtccgctacctggagctggccttccgccgactcgactggcggcagctgcagctggtgcgcgaagccctctctgagcggggccactggctggaggcggtgcccttcctggctcggcggctggagttgctgctgcccagtgaggggctgctgcagcaggcctactacggccttggcctggcggtgtacgacctgctggctgggcggcgcggcatcggctccagccgctggctctgccgtgaggcggtgcaagagctgctgcctgagctgaaggccggccagctcggagtggcctacggcgacggtcagttcgatgacgcgcgcctgaacctgctgatcgtgcgcaccgccgcccgcctgggggccgaggttttcacgcgaaccgaagtggtggagctgctgcgccagggcgatcggctcagcggcgccgtgctgcacgacctggccacgggccagcggcgcaggctggaggcccgggtggtgctcaatgccacgggcatcggcgccgatcggatccgtcagctggcccagcccgacctgcctcccaccctgcaggtgagccgcggggtgcatctggtgctggccgccgacctctgccccggggggaccggattgctgatcccctccacggacgacggccgggtgctgttcgtgctgccgtttcacggccgcaccctggtgggcaccacggacaccccctgcgcatccagcgagtccgagaggcccagcgaggtggaggaggcctacctgctcgactatgtgcgccgctggttcccgggccacggggagccggttgtgagcagccgctgggccggcggccgccccttgctgctggggaatggcgactcagccagcgccgggaccgccacggtggtgcgtgagcaccaggtggaaacgctcccctgcggtctgatcagcgtgatgggcggcaagtggaccacctgccggccgatggccttcgatggactccaggccgtggcacagctgctgggtggccccctgcccgctccatccgccgaggccgctgctgtcccgatccacggagcggcggacactggcgcggccaccatcgctgggcttgaccgtctgcgcctggagctgtcccagcgcttgcccggcggcgacctggccctgctggagcacctgctggcgtgccacgggctggaggtggaggcggtgctggcctgtgccgccagcccggccgagctcgaacccctcagcgcggtgatcccactcaccgctgccgaggtgcgccatggcgtgcgccacgagtgggcccggtcggccgatgatctgctggcccggcgttgccgcctggcctttgtggacagcgccgaggccgagcgactgcggcctgtggtgcaggccctgctggatcaggagttggcgtcgctcgagtcctcgcccaccagccaccagaagaatccgtag

SEQ ID NO: 108671 - protein, 526 aa, Synechococcus sp. WH 5701
MSVDLLVIGAGATGATIALEAARRGLSVALVEAGDIAGGTSSRSTKLLHGGVRYLELAFRRLDWRQLQLVREALSERGHWLEAVPFLARRLELLLPSEGLLQQAYYGLGLAVYDLLAGRRGIGSSRWLCREAVQELLPELKAGQLGVAYGDGQFDDARLNLLIVRTAARLGAEVFTRTEVVELLRQGDRLSGAVLHDLATGQRRRLEARVVLNATGIGADRIRQLAQPDLPPTLQVSRGVHLVLAADLCPGGTGLLIPSTDDGRVLFVLPFHGRTLVGTTDTPCASSESERPSEVEEAYLLDYVRRWFPGHGEPVVSSRWAGGRPLLLGNGDSASAGTATVVREHQVETLPCGLISVMGGKWTTCRPMAFDGLQAVAQLLGGPLPAPSAEAAAVPIHGAADTGAATIAGLDRLRLELSQRLPGGDLALLEHLLACHGLEVEAVLACAASPAELEPLSAVIPLTAAEVRHGVRHEWARSADDLLARRCRLAFVDSAEAERLRPVVQALLDQELASLESSPTSHQKNP

SEQ ID NO: 108672 - DNA, 1605 bp, Synechococcus sp. WH 7805
  CDS (1)..(1605): transl_table=11
atgacgccgtttcacggagcctccactggcatgaatgacacgtgcttcgatctcctggtgatcggcggaggcgccagcggtgcctgcgttgcctacgagggcgtgcgccgcggcctgcgtgtggccctgctggaaagccatgacctgggaggaggcaccagttgccgcagcaccaagttgctgcacggaggggttcgttacctcgagcttgcgttcaaaaccgccgacacggcgcagctgcgattggtcagagaagccttgctggagcggggacactggctccagcaagctcctttcctagccaaacgcctcgaactggccctgcccacgggcggagtgatcggccaggcctactaccgcctcgggctgggcctttacgacgcactttcgggccgctcagggattggaagcagtcgcctgctctcaagccaacagctgcgccatgccctccccgcccttcgagacgacatcacgcggggggtggcctacagcgacgggcagtttgatgacgcgcgcctcaacctcctgatggcactcaccgcggaacaagcgggcgcggtcgtgcgcacccgtacgcgggtcgtcgccctggaaaccgacagcagcggcaggctctgcggagcgatcagcgaaagcacgggcggtcaaagcgagcgttggcaggcgagggtggtggtgaatgccactgggatccactccgacacgatccggaggatggcagatccctcctgcgagaagaggatgctcaccagccgtggcatccacctcgtgctcaagcaaaccctttgcccggagggaatcggcctgctgctgccgtctaccgatgacggacgggtgctgttcatgcttccgttctttgggcgaaccctggtgggcacaaccgacaccccctgcccccaggagcaggcctcctctccatcagagaacgaagtgaagtacctgttggattatgtacagcgctggtttcctgcactcaacaacatcgacgtaggcagctgctgggccgggggacgccctctgctgaagcctgcaggtgccgatgtgaacagcagccgcgtcgtgcgcgagcacgaggtggagactctggcctgcggactggtcagtgtgatgggaggcaaatggaccacctgccggcccatggccatcgatactctccaagcagtggagcagcagctcgggcacgcccttcaagcacctgggatgttgcctctgatcggcagcgccccagattccctgcaaacacctgctctgctccagagccaggaggcctctctggaatcactgttgccagacacgcctcagcgccagcagcagatcgcccacctactgggcaaccatgggcttgcagcaacacacctggtgtcgagctggtctgacgacgaccgacagcccctcagcgatgtgattcctgtctgccgaggcgagctgcgtcatgcgatcacccatgagcatgcgcgaagcgtcactgatctgctctgccgccgcacacgcctggccatggtggatcagcaggatgccgagcgactgcgcccggaggtgagcgaactcctggctcaggctggccacggcagtgctgatgctggcgtcctggatctgtcccgctga

SEQ ID NO: 108673 - protein, 534 aa, Synechococcus sp. WH 7805
MTPFHGASTGMNDTCFDLLVIGGGASGACVAYEGVRRGLRVALLESHDLGGGTSCRSTKLLHGGVRYLELAFKTADTAQLRLVREALLERGHWLQQAPFLAKRLELALPTGGVIGQAYYRLGLGLYDALSGRSGIGSSRLLSSQQLRHALPALRDDITRGVAYSDGQFDDARLNLLMALTAEQAGAVVRTRTRVVALETDSSGRLCGAISESTGGQSERWQARVVVNATGIHSDTIRRMADPSCEKRMLTSRGIHLVLKQTLCPEGIGLLLPSTDDGRVLFMLPFFGRTLVGTTDTPCPQEQASSPSENEVKYLLDYVQRWFPALNNIDVGSCWAGGRPLLKPAGADVNSSRVVREHEVETLACGLVSVMGGKWTTCRPMAIDTLQAVEQQLGHALQAPGMLPLIGSAPDSLQTPALLQSQEASLESLLPDTPQRQQQIAHLLGNHGLAATHLVSSWSDDDRQPLSDVIPVCRGELRHAITHEHARSVTDLLCRRTRLAMVDQQDAERLRPEVSELLAQAGHGSADAGVLDLSR

SEQ ID NO: 108674 - DNA, 1575 bp, Synechococcus sp. RS9916
  CDS (1)..(1575): transl_table=11
atgagcgaaccccttgatctgctggtgatcggtggcggcgccagtggtgccagcgtgacctatgaagcagcacgccgcggcctgagcgtggcgctgctggaagggtctgacctcagctgtggcaccagttgccgcagcaccaagctgctgcacggcggcgtgcgttacctcgagctcgccttcaaaacagcagaccctgcccagctgcgcctggtgcgggaagccctgctggaacggggccactggctgcggcaagccccctttctcgcccaacggctggaactggcgttacccaccaacgggctgatcggtcagctctactaccggatggggcttggggtctacgacgctttagcgggtcagaccagcatcgggtccagtcgatggctctccaaaacccagctgcatcaggccttacctcagatcaaaccggggctgaacggtggcgtggcctacagcgatgggcaatttgacgatgcacgcctcaacctgctgcttgccctcacagcagaacaggccggcgcccagatccttccaggctgtcgcgtcaccagcctcaccaaagacggatcggggcgcatcaacggtgccatcagcatgaacgccgacggccaggagcagcgctggacagccagggcagtggtcaacgccacagggatccaagccgacagcatccgtcagatggcggatcccgacgtgcccgatcgcatgctcaccagccgcggcgtgcatctagtgctgcgggccaacctctgcccggctggagtcggtctgctgctgccctccaccgatgacggtcgggtgttgttcatgctgccgttcttcgggcgcacgctcgtgggaaccacggacaccgcctgttccctcacagcagcagcaacgccctcccaggacgagcgggactatttgcttgcttacgtccgtcgctggttcccccagctcagcgatttggatgtgggcagcagctgggcgggggggcgccccctgctgaagcctgccggagcggaacgcgacagcagccgggtggtgagggaacacgaggtggagaccttgccttgtggcctggtgagcgtgatgggaggcaaatggaccacctgcagacccatggccctcgacacccttgacgccgtggcagatcagttagggcgaccgctcccgtcccccaagccccttcccctgcttggcgcagccgacacccctgatcacaccagggatcaactgcagcagcaacaacaggaactccacaccctcttgccagccactccccaacggggcgcccagatccgacatctgcagggcaacttcggcgtccgcgccgcaaccctggtgagccgctggactgctgacgaacgggtccctctgagtgacgtgatcccgatctgccgcggcgagcttcgccacgcggtgaaggctgaacacgcccggagcgtcaccgcagtgctggcccgccgctgccgactggccatggtggatcagggtgatgcggaacgcctggtgcctctggtgaatgacttactcgaggagcatcaagacaccactccggctggagccgatcggctcaatctggcgctgtaa

SEQ ID NO: 108675 - protein, 524 aa, Synechococcus sp. RS9916
MSEPLDLLVIGGGASGASVTYEAARRGLSVALLEGSDLSCGTSCRSTKLLHGGVRYLELAFKTADPAQLRLVREALLERGHWLRQAPFLAQRLELALPTNGLIGQLYYRMGLGVYDALAGQTSIGSSRWLSKTQLHQALPQIKPGLNGGVAYSDGQFDDARLNLLLALTAEQAGAQILPGCRVTSLTKDGSGRINGAISMNADGQEQRWTARAVVNATGIQADSIRQMADPDVPDRMLTSRGVHLVLRANLCPAGVGLLLPSTDDGRVLFMLPFFGRTLVGTTDTACSLTAAATPSQDERDYLLAYVRRWFPQLSDLDVGSSWAGGRPLLKPAGAERDSSRVVREHEVETLPCGLVSVMGGKWTTCRPMALDTLDAVADQLGRPLPSPKPLPLLGAADTPDHTRDQLQQQQQELHTLLPATPQRGAQIRHLQGNFGVRAATLVSRWTADERVPLSDVIPICRGELRHAVKAEHARSVTAVLARRCRLAMVDQGDAERLVPLVNDLLEEHQDTTPAGADRLNLAL

SEQ ID NO: 108676 - DNA, 1620 bp, Marinobacter sp. ELB17
  CDS (1)..(1620): transl_table=11
atgagccgctcacaacaactgtcagagctaaaaaaacagacacagagttttgatgtggtggtgatcggcgcaggcattaccggcgcgggcatcgcccttgaagccgccgcaagcggcctgaaaaccctggtgctggagcagcaggatttcgcctggggcagttccagtcgctcatcaaaaatggttcatggcgggctgcgctatctggccggcggccacctgcgcctggcccgcagcgcagttcaggaacgccagcgcatgctggccgaagcgccgggcctggtaatgcccatgcactatgttatgccgcattataaaggcgagtttccgggcccgcggctgtttcggctaatgctgcgcctgtacaaccggcttgccggcgcagcgaccctgccccccttgcagccagcccaggttccactctgggtgcctgggctgaattctgaaaacctggccgctgccagcgtttttactgacgcggtgaccgacgatacccggctggtacagcgactgcttgccgaggcacgcgccaagggcgcgctgtgcttgaactacgtgaaagtgctcaagcttcagcgtaatgcagacagtcaaaagcaagtttgtggtctggtcgcccaagcggaggaagacaccaagccgttcaccatcaagaccctactggccatagccgccactggtgcctggagcagccagtttaaatcagcagaagagaaacagtttcccatacgcccgctgcgcggtagccatctggtgctgccctggcagcgtttgccggtagattgctcggtcaccgcattccacccgaaagaccggcgccccgtgttcgtgttcccgtggctggggcaaaccgtgctcggcaccaccgacctggatcataacgaggatctggcccaagaaccggccatcagccagggcgaagtagattacctgatggcggttgctgcacacttatttccggcaagcgaactgaagcctgccgacgtactgtcaagctgggcgggtgttcggcctgtaatcagcacgcaggaaaacgatggaattaaacgctcgccctcccgtgaaagccgcgagcacaagatcaacaacgataacgggctgattaccatcgccggcggcaaactgactacctttcgcctgattgcccgcgaggccctcaaaatggggttatctggaggcacgaaaccaaagctgcgcgataaccgcctgcgggtgtttaaccccgcgcccgaactgcaaaagccggcccgaattagccataaaacctgggccagactgcgcggctattacggccccgatctccctgcgctgctcgccgcaggaccgctggaaccagtgctggatgcaagccttgtgcataaccccgccatcgacgtgacatgggctgaactttgctatgcctgccggaacgagcaggtcaagcacttggacgatctgctgttgcggcgtacccgtttaggactcttgatagcagacggcgccgccgtgcttctaccgcagataaaaagccgctgcagaccgctgctgggctggagcgaaagccactggcacagcgaagtcgaacgctatatggcaatttggcaaagctattacagcctgcccccgggaacagccgaatga

SEQ ID NO: 108677 - protein, 539 aa, Marinobacter sp. ELB17
MSRSQQLSELKKQTQSFDVVVIGAGITGAGIALEAAASGLKTLVLEQQDFAWGSSSRSSKMVHGGLRYLAGGHLRLARSAVQERQRMLAEAPGLVMPMHYVMPHYKGEFPGPRLFRLMLRLYNRLAGAATLPPLQPAQVPLWVPGLNSENLAAASVFTDAVTDDTRLVQRLLAEARAKGALCLNYVKVLKLQRNADSQKQVCGLVAQAEEDTKPFTIKTLLAIAATGAWSSQFKSAEEKQFPIRPLRGSHLVLPWQRLPVDCSVTAFHPKDRRPVFVFPWLGQTVLGTTDLDHNEDLAQEPAISQGEVDYLMAVAAHLFPASELKPADVLSSWAGVRPVISTQENDGIKRSPSRESREHKINNDNGLITIAGGKLTTFRLIAREALKMGLSGGTKPKLRDNRLRVFNPAPELQKPARISHKTWARLRGYYGPDLPALLAAGPLEPVLDASLVHNPAIDVTWAELCYACRNEQVKHLDDLLLRRTRLGLLIADGAAVLLPQIKSRCRPLLGWSESHWHSEVERYMAIWQSYYSLPPGTAE

SEQ ID NO: 108678 - DNA, 1647 bp, Bacillus sp. SG-1
  CDS (1)..(1647): transl_table=11
ttgcaaagaggccaaataaaagaaaaattaaagcaagaccagtatgatcttatcgtgataggcggcgggataacaggagcggggattgctcttgatgcagcatcccgggggatgaaggtcgctttagcggaaatgcaggattttgcagcaggaacatcgagtcgttcaactaaattggtccatggaggactgcgttacttaaaacagtttgaagtgaaaatggtggctgaagtgggaaaggaaagagaggtcgtttatgaaaatggaccacatgttacgacacctgaatggatgctgctgccgattcataaaggagggacctttggcaagttcagtacttccgtaggcttaagggtctatgattacctggccggtgtgaaaaaagttgaaagaagaaatatgctttcagcttctaacacactcgggaaggaaccccttattaaaagaaaaggattaaagggcggcgggtactatgtcgaatacagaacagatgatgcccggctgacaattgaagtgatgaaaaaggctgtcgagcatggtaccgtggccctcaattatctgaaagccgataggttcatttatgaaagtgaaaaagtgaagggaatccaagccagggatgtgttgactggagagatttttaatatccgttcagaaaaggtcgtgaatgcttctggtccctgggtggatgaggtcaggagaaaagattactccatcaataataaaaagctcagacatacaaaaggggttcacatagtagttgaccaaaaaaagttcccgttgaaacaggctgtttattttgatacaagggacggcaggatggtttttgcaatcccccgggaagggaaggcgtatgtaggcaccaccgatactttttttgaaggtgatacatcaaatccaaaaatgacagaggaagatcgcgcgtatcttattgattgcatacattatatgttccctgaagtgaaggttacagagaatgatgtagaatccagctgggcaggaatccgaccgctgatatttgaagatggaaaagacccttctgaaatctcaaggaaggatgaagtctgggaaggagaaagcggcctggtgacgatagccggcgggaaactgaccggttatcggaaaatggcggagcatgtcgtagacctgatcgccaaaaggttcaagcaggaaatgaaagaaagctttcccgcatctaaaacaagacatatgcccatagctggtggtgaagtcggcggttcggcaggatttctttcctatgtagctgaaaagtctttggaggccgaacaattcggactaagcgttgaaacaggaagagagcttttacagcgatatggctccaatgcagaggagttatttaagattgcacactcctataaaaaaactaactccagttcccttgaaatgccagctgaaattttcgccatgctgttgtattccatcaatgaggaaatgaccgtcacacccctcgatttctttatgagaagaacaggcaagctcttctttgatattcagtgggtaaagcggtggaaaaaaagtgtcgttgaaatgatggccgctctgcttgactggaagccggaactcaaaaggcaataccaaaccgaacttgacaatgccattaaggatgcccaggttcccgttggaaaatag

SEQ ID NO: 108679 - protein, 548 aa, Bacillus sp. SG-1
MQRGQIKEKLKQDQYDLIVIGGGITGAGIALDAASRGMKVALAEMQDFAAGTSSRSTKLVHGGLRYLKQFEVKMVAEVGKEREVVYENGPHVTTPEWMLLPIHKGGTFGKFSTSVGLRVYDYLAGVKKVERRNMLSASNTLGKEPLIKRKGLKGGGYYVEYRTDDARLTIEVMKKAVEHGTVALNYLKADRFIYESEKVKGIQARDVLTGEIFNIRSEKVVNASGPWVDEVRRKDYSINNKKLRHTKGVHIVVDQKKFPLKQAVYFDTRDGRMVFAIPREGKAYVGTTDTFFEGDTSNPKMTEEDRAYLIDCIHYMFPEVKVTENDVESSWAGIRPLIFEDGKDPSEISRKDEVWEGESGLVTIAGGKLTGYRKMAEHVVDLIAKRFKQEMKESFPASKTRHMPIAGGEVGGSAGFLSYVAEKSLEAEQFGLSVETGRELLQRYGSNAEELFKIAHSYKKTNSSSLEMPAEIFAMLLYSINEEMTVTPLDFFMRRTGKLFFDIQWVKRWKKSVVEMMAALLDWKPELKRQYQTELDNAIKDAQVPVGK

SEQ ID NO: 108680 - DNA, 1860 bp, Vitis vinifera
  CDS (1)..(1860)
  misc_feature (89)..(89): s is g or c
  misc_feature (111)..(111): y is t or c
  misc_feature (129)..(129): y is t or c
  misc_feature (141)..(141): r is g or a
  misc_feature (168)..(168): k is g or t
  misc_feature (498)..(498): r is g or a
  misc_feature (825)..(825): r is g or a
atggccaccacctccactcgcctgaggcgactcggaacagtcgctgccgccgtcgcgctctccgccggcgtcaccctccgagatcctcstatctcctccagcgaccgaggyggtccctcgctcgatgcygtccgccggaaratcgctgactccaacggtgtcgttccktccagagccgtgcaggagtcggcactgatcggctctagcgctgtcaatcctctcgacatcctcgtcgtaggcggaggcgccaccggttgcggcgtggcgctggacgctgccacgagagggcttcgtgtcgggcttgtggagagggaggacttctcttctggaacttcttcaaggtccaccaagttacttcatggaggggtccggtacttggagaaagctgtttttaatcttgactatggacaactaaagctggttttccatgcacttgaggagcgcaagcaggttattgagaatgctcctcacctttgtcaagctttgccatgcatgacrccatgttttgactggtttgaagttgtatactactggatgggcttgaaattatatgatctggtggcaggatcacgcctgctacatttgtccagatattattctgcacaagagtctgttgaactcttccccactcttgcaagaaatggtaaagatagaagcttgagaggcacagttgtgtactatgatgggcagatgaatgactcccgacttaatgttgcgttggcatgcactgctgcattagctggtgcagctgtgcttaaccatgcagaagtagtatcacttcttatggatgaggttagcaaccaaataataggtgcacgtattcgrgacaatctatcaggcaaagagtttgacacatatgcaaaagttgttgtgaatgctgctgggccattttgtgactctccaatgatctgtcctagcagtggtgtacatattgttctccctgattactattcgcctgagggaatgggtctcattgtccccaaaactaaggatggacgtgtagtattcatgttaccatggttgggaagaacagttgcaggcactactgattccaacactagcatcacaatgcttccagaaccgcatgaggatgagatccaatttatacttgatgctatcagtgattaccttaatgttaaggtacggcgcacagatgttctctctgcttggagtggcattcgtccactggctgtggatccaaaggcaaaaagcactgagagcatttcccgagatcatgttgtatgtgaagatcatcctgggttagtcacaatcacaggtggaaaatggaccacttatcggagcatggcagaagatgcagttgatgcagctataaagtctggaaagctgagtccgaccaatgaatgcttgacaaataacttacacctttctggaagtgaagattgggatcctgcttcttttacagtgcttgcccaacaatatgtacgtatgaagaggagccacagtggtaaagttgttccaggagtaatggacactgctgcagcaaagcatttgtctcatgcatatggtactatggctgatcgagtggctgctatagctcaggatgaacatctagggaagcggcttgcccatggatacccttttctagaggctgaagtggcatactgtgcccgtaatgagtactgtgaatctgctatagatttcattgctaggagatcacggcttgcttttcttgacactgatgcagcaagcagggctctgccacgcataattgagatactagcaacggaacacaattgggaccgcacaaggaagaagaaagagttgcagaaggctaaagaattcttggagacatttaagtcatctagaaacgctcagttctatgatgggaaacacaaatag

SEQ ID NO: 108681 - protein, 619 aa, Vitis vinifera
  misc_feature (30)..(30): The Xaa at location 30 stands for Arg, or Pro.
MATTSTRLRRLGTVAAAVALSAGVTLRDPXISSSDRGGPSLDAVRRKIADSNGVVPSRAVQESALIGSSAVNPLDILVVGGGATGCGVALDAATRGLRVGLVEREDFSSGTSSRSTKLLHGGVRYLEKAVFNLDYGQLKLVFHALEERKQVIENAPHLCQALPCMTPCFDWFEVVYYWMGLKLYDLVAGSRLLHLSRYYSAQESVELFPTLARNGKDRSLRGTVVYYDGQMNDSRLNVALACTAALAGAAVLNHAEVVSLLMDEVSNQIIGARIRDNLSGKEFDTYAKVVVNAAGPFCDSPMICPSSGVHIVLPDYYSPEGMGLIVPKTKDGRVVFMLPWLGRTVAGTTDSNTSITMLPEPHEDEIQFILDAISDYLNVKVRRTDVLSAWSGIRPLAVDPKAKSTESISRDHVVCEDHPGLVTITGGKWTTYRSMAEDAVDAAIKSGKLSPTNECLTNNLHLSGSEDWDPASFTVLAQQYVRMKRSHSGKVVPGVMDTAAAKHLSHAYGTMADRVAAIAQDEHLGKRLAHGYPFLEAEVAYCARNEYCESAIDFIARRSRLAFLDTDAASRALPRIIEILATEHNWDRTRKKKELQKAKEFLETFKSSRNAQFYDGKHK

SEQ ID NO: 108682 - DNA, 1815 bp, Ostreococcus tauri
  CDS (1)..(1815)
atgtccctcggtcgcgccgcgcgcgccgccaccggcaccgccgtggccatcaccgccaccgcgctcgccgtcagaggttttgccctttcgagcgacgacgagcttccgagagacccctggagcgagcaaggtaggcctttgcccacgcgcgcagagacgatcgcgtcgttaaagcgcgcgcgaacgacgccccacgacgtgctgatcatcggtggtggtgcgacgggctcggggtgcgctctggacgcggcaacgcgggggttgagcgtggtgctcgtcgagggcgaggatttcggcgccggtacgagcggacggagcacaaagctcgtgcacggcggcgtgcggtatctcgagaaggcagtgtttcagctcgatcccgggcagttaaagttagtttttgaggcgctgcaggagcggcggcggctgctggcgaatgcgccgcacctgacgcgggcgctgccgatcgcgacgccgtgctacgagtggtgggaggtgccgtattactgggcggggatgaaggcgtacgatctcgtcgctggatcgcaagggctcacgatgtcgagctacgcgagggcttccacggtgagtcggatgtttccgcagttggcggagacgcggttggacatcggacgtcgatcgatgaagggggcaatcgtgtactatgacggacagtttgacgacgcgagaatgaatgtcgccttggcctgcacggcggcgcacgcgggcgccgccgtggtgaatcacaccaaagtgatcaagttttataaggatggcgataaaattgtgggtgtgcgcgcgcgcgatatgttaaccgggagcgagtacgatgtgtacgccaaggttgtcatcaacgcgagcggacccttcacagacgagatcagaaaattgtccgataacgaggctcagaagatcatgacgcccgctgccgggactcacttgacgcttccggcgtactattgtccgagtgatttgggtatgatcattcccaagacgaaggatggtcgagtcgtttttgtcctcccttggctcggcgcgtgcgtcgcgggtacaacagacacgttgtccgaggttacgatgacgccatcggcgacaaaggacgaaatcgatttcattttagaatcgatcgcaccgtttctcaaggttgaagcgagacgtgcggatatcctgagtgcgtggagtgggattcgccctcttgcagcggatccaggagcaaagaacaccgaaaacatgtctagagatcacgtgattgcggtcgaaaaggacggaatggtcaccgttacaggtggtaagtggacaacttatagacgaatggccgaagaagcggtcgataaggccgttgaaatcgctggtctggcgggagaagccggaaagtgtcgcacgttgtccatgggtgttgtcggagcacatggatacacgaatgatctattcgttcgcgttgcccaacgaggcgggagtggcttcggtggtccccccgatgaagcggttgcaaagcatctcgcgacgtcatacggcgatagagcgcttgtcgtggcggacctggcggcttactctcatctgtcaaaacgtctcgtaccaaaccatcccattattgaagcggaagtcgtgtatgccgctcgagctgagtactgtcaaactgctgttgacttcctctctcgacgtacgcgtctcgcatttttagacgttgaagcggctgagaagtctttacctcgcgtggtttctcttctaggcactgagctcaactggtcgtacatgaggcgtcgtcgggaactcgcaaacgcaaaggctttcctgtcgaccttcagggcggcaacctag

SEQ ID NO: 108683 - protein, 604 aa, Ostreococcus tauri
MSLGRAARAATGTAVAITATALAVRGFALSSDDELPRDPWSEQGRPLPTRAETIASLKRARTTPHDVLIIGGGATGSGCALDAATRGLSVVLVEGEDFGAGTSGRSTKLVHGGVRYLEKAVFQLDPGQLKLVFEALQERRRLLANAPHLTRALPIATPCYEWWEVPYYWAGMKAYDLVAGSQGLTMSSYARASTVSRMFPQLAETRLDIGRRSMKGAIVYYDGQFDDARMNVALACTAAHAGAAVVNHTKVIKFYKDGDKIVGVRARDMLTGSEYDVYAKVVINASGPFTDEIRKLSDNEAQKIMTPAAGTHLTLPAYYCPSDLGMIIPKTKDGRVVFVLPWLGACVAGTTDTLSEVTMTPSATKDEIDFILESIAPFLKVEARRADILSAWSGIRPLAADPGAKNTENMSRDHVIAVEKDGMVTVTGGKWTTYRRMAEEAVDKAVEIAGLAGEAGKCRTLSMGVVGAHGYTNDLFVRVAQRGGSGFGGPPDEAVAKHLATSYGDRALVVADLAAYSHLSKRLVPNHPIIEAEVVYAARAEYCQTAVDFLSRRTRLAFLDVEAAEKSLPRVVSLLGTELNWSYMRRRRELANAKAFLSTFRAAT

SEQ ID NO: 108684 - DNA, 1953 bp, Dunaliella salina
  CDS (1)..(1953)
atggccacacggcgctttctgcccctcctgggcggagcaggttctgtggcactggccgggacagctggttggagcttgtggagaccagacacggccagcgctgacgctgcccacacggggagggagctgtctgtggacaatgtgcccagccgctccgagcagtaccagcgcctggccagccacacgaaaaacaacccctttgatgtcctagtcatcggcgggggagccacaggcgcgggctgtgccttcgatgcacagacaaggggtcttcaaacggcgctcatcgagcgtgaggacttcgcttctggtacctcctccaggtctaccaaactggtccacgggggtgttcgctacctggagaaggctgtgttcaacctggactatgaccagctcaaactggtgtatgaagccctgcatgagagggacaggctgctgtccaacgcatcgcacctggcacaccctttgcccatcctcacgccctgctacaactggtgggaggttccttactactgggcaggcatgaagatgtatgacttggtggcaggcacctcaacccttgttccttccaagttcctgacctcgttggaaactctcacctacctacccacaatgtccaagaacatcgggggcaagtcactcaagggatcgatcatgtactacgatggccagttcaatgattcccgcatgaatgtggcgctagcttgctcctctgcagctgcgggtgccactgtgatgaactacacagagtgcaagcagctcatcaaggatgaccaaggcaaggtgattggtgcaaggtgccgcgaccgcgccacgggggcagagaccgatgtgtacgcccgcgttctgatcaacgccactggcgcgtttgcggacgacgtgcgccgctattccgagcctgacgcgcagcaaacagtgatggccagctctggcgcgcatgtgaccctgcctgatttctacggctcagcccggaccggcatgatcattccaaagaccaaggacggccgcgtgatcttcatgctgcccttccaaggccatgtgatagcagggaccacggacacccccatcaaggccacctcccgaccccgctccagcgaagaggacatcgacttcatcctcgccaccctcagtgacttcctagacgtgcgcgtgtcccggggcgatgtgctgtccacctggtgcggcatccgccccttgcctgcccccaagaagaacaccacctccgagaatgtggtgcgcgatcatgtgatctttgaggacaaggacggcttgctgaacgtgacaggcggcaagtggacgacctaccgcgccatggccgagcaagccatcgacttggccatggcctccggaaagctgcccaagagcgccaagccctgccagactgccaactacaagctcctgggagcaaccaactacacctacacgctcatggctgagctcgcacagcagcatggtatgccacagcgctactttggcaagaacagcagcaaggagcgcaacagcaacggctccccccgcgtggccatggacacagagatcgcccaccacctgtccacggcttatggcgacaatgcgatgcgcgtgattgccatggctgaggaggagggcctgggcaagcgcctgattgcaggccaccctatcttggaagcggaggtcatgtacactgcaaagcatgagtactgcttgaccatcgaggacttcatcgaccgccgctcccgcctggccttcctagatgtcaaggccacagaggcggcgctgcctcgcattgcagagatcatgggcaacacgctgggctggaacgacaagcagcgcacctccgccatcactgctgccgtcaagcacctgcaggagaacttcacctcaggccccctcgtccaccctggcccagatgcccctgctcaccccatcctggcgcctgagcccacgaagccagctgcgaccgttgcagcggcctaa

SEQ ID NO: 108685 - protein, 650 aa, Dunaliella salina
MATRRFLPLLGGAGSVALAGTAGWSLWRPDTASADAAHTGRELSVDNVPSRSEQYQRLASHTKNNPFDVLVIGGGATGAGCAFDAQTRGLQTALIEREDFASGTSSRSTKLVHGGVRYLEKAVFNLDYDQLKLVYEALHERDRLLSNASHLAHPLPILTPCYNWWEVPYYWAGMKMYDLVAGTSTLVPSKFLTSLETLTYLPTMSKNIGGKSLKGSIMYYDGQFNDSRMNVALACSSAAAGATVMNYTECKQLIKDDQGKVIGARCRDRATGAETDVYARVLINATGAFADDVRRYSEPDAQQTVMASSGAHVTLPDFYGSARTGMIIPKTKDGRVIFMLPFQGHVIAGTTDTPIKATSRPRSSEEDIDFILATLSDFLDVRVSRGDVLSTWCGIRPLPAPKKNTTSENVVRDHVIFEDKDGLLNVTGGKWTTYRAMAEQAIDLAMASGKLPKSAKPCQTANYKLLGATNYTYTLMAELAQQHGMPQRYFGKNSSKERNSNGSPRVAMDTEIAHHLSTAYGDNAMRVIAMAEEEGLGKRLIAGHPILEAEVMYTAKHEYCLTIEDFIDRRSRLAFLDVKATEAALPRIAEIMGNTLGWNDKQRTSAITAAVKHLQENFTSGPLVHPGPDAPAHPILAPEPTKPAATVAAA

SEQ ID NO: 108686 - DNA, 2133 bp, Aspergillus oryzae
  CDS (1)..(2133)
atggccgctcgtcattcccgcagacttttgcggcctctgctttatacttcggccgcagcggctgcaggagctggtgttctgtatatctcctaccgtccccgcaacatccctggctcggaagctccggctgtaccaccccctggttatcatgaggggaaacttgtgcctccgagctttccctcaatcaagtcgcgtctggaacagattcaggacttgaaacgcagttccagtggtgatgattcagacgtgtatgacctccttattatcggtgcaggcgccactgggtcaggaatcgctttagacgcagcgacacgaggtttaaaggtagcggttgtcgaaagagacgacttcagctctgggacaagcagtaagagcacgaaactggtacacggtggcgtccgctacttggaaaaggccgtgtgggagctagattacaaccagtacaaacttgtcaaggaagccttgagggagcgcaaatactttttgaacactgctcctcacctctccagctggcttcctatcatggttcccgttcagaagtggtggcaagctccctatttctgggttggtaccaagttttatgactacttggctgggtcggagggaattgagagctcctacttcctgcctaaaagcaaggcaattgatgcttttcctatgctgagaaaagataatatgattggtgccatggtttactacgatggcgcccacaacgactctcggatgaacgtgtctcttgcgatgacagctgcattgtatggaagcactgttgtcaatcacatgcaggtcactggcctcaccaaagatgcctcgggtaacttgaatggggcgcgagtgaaagatatcataccaggaaagaatggccaagaggaaggagaatttactatacgggccaagggcatcatcaatgcgaccggccccttcaccgattccatcagaaagatggacgagcctgacgtgaaagaaattgtcgcacctagctctggtgtccatgttattttacctggatattatagtccttcggacatgggtctcattgacccttcaacgtccgatggccgtgttatcttcttccttccatggcagggaaacacaattgctgggaccactgatcaacctaccgaaatcacgactcaacccgagccgtctgaaaaggacatcaactggattctgtcagaagtccgtggctacttagcccctgatatcaacgttgagcggagcgatgtgctggcagcatggtctggaattcggcctttggttcgtgatcctaaagtgaagagctccgaagcattggttcgcaaccatctgattactgtttctccgtccgggctgttaacatgtgcgggaggaaaatggacgacttaccgccaaatggcagaagaagctgtagatgaggcgattaatgttttcaacctgaagccccggcatgtctcccaggttccagatattagtggtgtcggaggcagcggcttggtggctgatggtgctgttcttgacgggtcttgtcagacacaccaggtccgcttgattggggcccacggttactccaaaacactatttatcaacctcattcaacattttggtcttgagaccgatgtggcccagcatctaacgcaatcatatggtgatcgcgcttggcaggtggcagctttgtcttcaccgacaaacgcccgcttccctgttcgcggtcaacgtatttctgcgttatacccgtttatcgatggcgaggttcgctatgctgttcgccatgaatatgctcaaactgccgttgatgtcattgctcgcagaactcgattggcattcctcaacgctgaggcagcacttgaagcccttcccaatatcatcgacttgatgagcgaggaactcaattgggataacaaaagaaaagacctcgagtggaaagagagtgttagcttcctttcgtccatggggcttcccaagaatttccttggattgtccagggcgcaggtcgaggcgggcaaagtgaagcaagtggattctgcggaacaccaagcgtcctccagaactgacccccccgcagatgtgctcaatagcgacctccaccccgagacttccgtggcttctgaagcatcaagtcgcttgataagttcagaatctgctgcaaacaaatag

SEQ ID NO: 108687 - protein, 710 aa, Aspergillus oryzae
MAARHSRRLLRPLLYTSAAAAAGAGVLYISYRPRNIPGSEAPAVPPPGYHEGKLVPPSFPSIKSRLEQIQDLKRSSSGDDSDVYDLLIIGAGATGSGIALDAATRGLKVAVVERDDFSSGTSSKSTKLVHGGVRYLEKAVWELDYNQYKLVKEALRERKYFLNTAPHLSSWLPIMVPVQKWWQAPYFWVGTKFYDYLAGSEGIESSYFLPKSKAIDAFPMLRKDNMIGAMVYYDGAHNDSRMNVSLAMTAALYGSTVVNHMQVTGLTKDASGNLNGARVKDIIPGKNGQEEGEFTIRAKGIINATGPFTDSIRKMDEPDVKEIVAPSSGVHVILPGYYSPSDMGLIDPSTSDGRVIFFLPWQGNTIAGTTDQPTEITTQPEPSEKDINWILSEVRGYLAPDINVERSDVLAAWSGIRPLVRDPKVKSSEALVRNHLITVSPSGLLTCAGGKWTTYRQMAEEAVDEAINVFNLKPRHVSQVPDISGVGGSGLVADGAVLDGSCQTHQVRLIGAHGYSKTLFINLIQHFGLETDVAQHLTQSYGDRAWQVAALSSPTNARFPVRGQRISALYPFIDGEVRYAVRHEYAQTAVDVIARRTRLAFLNAEAALEALPNIIDLMSEELNWDNKRKDLEWKESVSFLSSMGLPKNFLGLSRAQVEAGKVKQVDSAEHQASSRTDPPADVLNSDLHPETSVASEASSRLISSESAANK

SEQ ID NO: 108688 - DNA, 1563 bp, Borrelia hermsii
  CDS (1)..(1563): transl_table=11
atgagtaaaaatggaaaagaagaattaaaaaacattgataatcaagcttttgatttaatcatagttggcggaggagcaactggtcttagtattggaatagattcaattacaagaggatacaaaactttactcattgacaaatttgactatgcaaaaggcacctcctctagatcaactaagttaatacatggaggagtaagatatttagcccaatttaatttatctttagtaaaagaggccctacatgagaaagcgttatttgaaaaaaatgcacctcacctagttagtaaacgtgcatttattacccccatatacaacctcttaagcataccctactactattttggactaagttggtaccataaccttcttggaaagtacaaaaagtctaaatataaaacaaagctactatcaaaatccaaaacaatagagaaaatgccaaatatcaaaaccaaaggccttaaatgttctgttttatactatgacaattcatttgatgatgctaggatggcgataagcatgcttagaacttttactgaaaaaggggggattgcgtttaattatacggaacttacaggttttactaaaagaaacggcaaaatatctggtgctattattaaagatactattaatggtgaacaagtcattattaatagtaaatgcataataaatgcaacaggaatattcgcagacgagctcagaaaattagatgatactaatgcaactaatattataaaaccttcccaaggaacacatttaataattaaaaaagacaaactacgtaccaagtacgcaatgcttatgcctacgacaagcgataagagagtcttattttctataccttggtatgatggtattatttgcggaagtacagatatttcaatagataaaattgaggaagaacccaaaagactagagagcgaaattgaattcataataaaaaatatgaataattacttagatattaaaataacaaaaaatgatattctaagtgtttacacaggaattagacccttaataatagatcccaagaaagaacaaaatacctcaaaaatatcaagaaacgagaaaatatttgtatcagactcaaatctcattacaattgctggagggaaatatactacttgcagaaagatggctgaaaaagttatacaaaaagcaatagacgcaaaattaatacctgattcaattcccaaaacagaaaatttaaagctgcacgggtatatagaaagggaagaagcacttaaaatccctgaacactttagagtttatgggagtgattttaaatatctaagtcaaatgaaagactttaataacaagattcacaccgatttgccattaactgaagctcaaataacttttgccattgaatttgaacaagcaaaaactattgaagacattttatcaagaagaacaagatctctacttctcaatgcaaaagccacaattgaagctacaccaaaggtagctgagattatgatgcacaaacttggcaaatctgaaaaatggaagaacgaacaaataaaaagctttaaagaagtagcaacaaaatatttagcttaa

SEQ ID NO: 108689 - protein, 520 aa, Borrelia hermsii
MSKNGKEELKNIDNQAFDLIIVGGGATGLSIGIDSITRGYKTLLIDKFDYAKGTSSRSTKLIHGGVRYLAQFNLSLVKEALHEKALFEKNAPHLVSKRAFITPIYNLLSIPYYYFGLSWYHNLLGKYKKSKYKTKLLSKSKTIEKMPNIKTKGLKCSVLYYDNSFDDARMAISMLRTFTEKGGIAFNYTELTGFTKRNGKISGAIIKDTINGEQVIINSKCIINATGIFADELRKLDDTNATNIIKPSQGTHLIIKKDKLRTKYAMLMPTTSDKRVLFSIPWYDGIICGSTDISIDKIEEEPKRLESEIEFIIKNMNNYLDIKITKNDILSVYTGIRPLIIDPKKEQNTSKISRNEKIFVSDSNLITIAGGKYTTCRKMAEKVIQKAIDAKLIPDSIPKTENLKLHGYIEREEALKIPEHFRVYGSDFKYLSQMKDFNNKIHTDLPLTEAQITFAIEFEQAKTIEDILSRRTRSLLLNAKATIEATPKVAEIMMHKLGKSEKWKNEQIKSFKEVATKYLA

SEQ ID NO: 108690 - DNA, 2019 bp, Drosophila melanogaster
  CDS (1)..(2019)
atgtccaagttgggtgccatcctggcgcaaagtgctgttcatctcagcgagcatcggcagcttttgagccaggccttcttatcatctatcacctatcaacggagccgggtcaaggttcgcggaaaccactgttgcgcaatgaaggtggtaccatctcgcgcggagcacgtaaatgcactgaaggccgaggagttcgacgttctgatcatcggaggaggagccgtgggttgtggttgtgctgtagacgcagcgtgtcgtggtcttaaaaccgccttaattgaggcagaggattttgcaagcggctctagttcgcgaactagtaagctgatcgatggcagtggttcatatctgggcactgccctccgggagaaggatgtcgaacagctgtacattatgctgcaaatgatgagtgaacgggtgaccatgctgaagaacgctccgcatctgaaccgcattcagcccatgatcatacccatctacagttttttgcagatgccctgtacctggctgggattgaaggtttacgactggatatcagcagcatccaatatccgcggatcgcacatcatctccagggaggccaccatgtatgagtttccgctgctaaaaaccgatggccttcgcggtggcgtcgtctactatgatggtcaggtggatgatgcccggatgtgcgtcgcattggtgatgaccgcggtggccctgggcgccaatgtgggcaaccacatggaggtggtggagattatgccacaggagggctgctgccgagttgttagcgttaaggacaagatctcctgcgagcagttctacattcagtccaaggccgtgatcaatgccacaggctccagcacagatgccatccggcagatggacaaggagggaaccgcaccgattctcttgcccactctggaaacccaagtatccctgccccgctactttggttccggacattacggtttgttgagtccggctctgaaaaatgatgatctcactgtatatatggtgccgtttgagaaccacatggttctaggcagtcgcgaagtggacctggatgaagtgtctagccgtggaagtcccactcccgatccagatgacgtggattgtctgctagaagcagccaagaaaaggatggatccctgcgtggagctggggcgctgtcacgtccttagtgcctggacggcgatcaaggccagtgtgagctgtccaaccgacaaggaaaatgatgatgacaagcgtggaacaccaatcaacagctatatgatcgaggttagtcccgacggtcttatcacgctggccggcggacgatggagcagttaccgcgtgatggcagccgatgccgtggatttggcgattaaatcttgtggactatgcgacgatcatgtgacctccagttggacacaggacttgaagttagacggagccgaatcatggtgttgcatgctgccgctggaattcgtgcaggactacggtgtgcccatggacgtggcgcatcatatctccgattcctatgggtacaatggacatgcactgttctctcaggctcctgatctgaagaagcgcctccatccgagcttcccctatatagaggcagagattcagtatgccatgcgaaatgagtacgcctgcacccttgtggacatcatcgcacgacggttgcgcatagccttcgtggatgcggccgccacgctgcacatgctgcctagaattctcaagatcatggccgccgaaaatggttgggatgaggaagagcaaaaggagcagatggtggcggcccaagagtttctggtgcgccaaatgggtctgggatcaatagtccaacccaggagcaccagcaagagcaagccgaaaaagaagggctcctcggagggatgttgttgccgggcggcagttcgcaggggggccaggagctactcgatggaaatatcaaagaagatttgcgttcaacccttggtccaacatagatccatgtctagcacgttcttgcccctaatgacgagcttaagttatggactcggacgctaa

SEQ ID NO: 108691 - protein, 672 aa, Drosophila melanogaster
MSKLGAILAQSAVHLSEHRQLLSQAFLSSITYQRSRVKVRGNHCCAMKVVPSRAEHVNALKAEEFDVLIIGGGAVGCGCAVDAACRGLKTALIEAEDFASGSSSRTSKLIDGSGSYLGTALREKDVEQLYIMLQMMSERVTMLKNAPHLNRIQPMIIPIYSFLQMPCTWLGLKVYDWISAASNIRGSHIISREATMYEFPLLKTDGLRGGVVYYDGQVDDARMCVALVMTAVALGANVGNHMEVVEIMPQEGCCRVVSVKDKISCEQFYIQSKAVINATGSSTDAIRQMDKEGTAPILLPTLETQVSLPRYFGSGHYGLLSPALKNDDLTVYMVPFENHMVLGSREVDLDEVSSRGSPTPDPDDVDCLLEAAKKRMDPCVELGRCHVLSAWTAIKASVSCPTDKENDDDKRGTPINSYMIEVSPDGLITLAGGRWSSYRVMAADAVDLAIKSCGLCDDHVTSSWTQDLKLDGAESWCCMLPLEFVQDYGVPMDVAHHISDSYGYNGHALFSQAPDLKKRLHPSFPYIEAEIQYAMRNEYACTLVDIIARRLRIAFVDAAATLHMLPRILKIMAAENGWDEEEQKEQMVAAQEFLVRQMGLGSIVQPRSTSKSKPKKKGSSEGCCCRAAVRRGARSYSMEISKKICVQPLVQHRSMSSTFLPLMTSLSYGLGR

SEQ ID NO: 108692 - DNA, 1854 bp, Lactobacillus rhamnosus
  CDS (1)..(1854): transl_table=11
atggcattttcaaaagaaacccgcacccagacgattgatcaattgaagcagaccgaactcgacttactcattgttggcggtggtattaccggtgccggcgtagcaattcaggcagccgcaagcggtttgaaaaccggcttgattgaaatgcaggatttcgcggaaggaaccagttcccgctcgaccaagctggttcatggcggcattcgttacctcaagacttttgatgtcggcgttgtcgccgataccgttaaagaacgtgccgtagttcaaggaattgcgcctcacattccgcgtccattcccgatgttgttgccagtttatcaggaagccggcagtacttttgatatgttcagtatcaaaatcgccatggatctctatgatcgtctggcaaacgttgaaggttcccagtacgccaactacaccgtcaccaaagatgaaattctgcaacgcgaaccgcatttagccgctgatggcctccaaggcggcggcgtgtacctcgactttgtcaacaacgatgcccggcttgttattgaaaacatcaaagaagcagcagaattaggcggactgatggctagtcgggttcaagccattggcgttttgcatgatgatgccggtcaggttaatggcttacaggttaaggatcttttggatggcagcgttttcgacattcatgccaaactcgtgatcaatacgaccggaccttggtctgacaagttcaaggcgttggatcaagccgaagatcaaaccccaacattgcggccaacgaaaggggttcacttggttgtcgatggttctcgactgccggtaccacagccaacgtatatggatactggcttgaacgacggccggatgttcttcgtggtgccacgggaaggcaagacttacttcggcaccaccgataccgattaccacggcgacttcaaccatccgcaagtcgaacaagccgatgtcgattatctcttgaaagtcatcaacaagcgctatccgcaaagccatatcacgcttgacgatatcgaagcgagctgggcaggattgcgaccgctgattgccaacaacggcagctccgattacaacggcggcggtgcgaacaccggtaaagtttcggatgattcctttgaagcgttaatccgtgtcgttgatgattacgaagacaaccaggctacccgcgctgacgttgaacatgcgatctccagactagaaacagcccacgccgaagctgctttgagcccatcacaagtttcacgcggcagctcacttcgccaagccgatgatggcatgatcaccttgtccggtgggaaaatcacggattatcgaaaaatggcagcgggcgcgcttgctttgatccgccgcttgttggctgaacattttgcaaccgaaacacggaccgttgattccaaaaagctccaggtttcaggtgggcattttgacccgaccaacgttgacgatacgattgctttttacacgcggattggcatcgatgccggcttgccggaaaaagatgctgccgacttggccaatcgcttcggttcaaatgtcagccgggttgtcacctacacagatgggcaggcggctcctggactcagccttaaggaaaccatgagcctgcgctattcgatcaacgaggaaatgaccttgacaccagtggattacctattgcggcggaccaatgcaattctcttccatgccgagacccttaacgagcttaaacagccagtcgttgatgaaatggcacgcttattgggttgggatgacgcgactaaagcccagcaattggctgatcttaatcaggctatccgtgaaagccaattagcagacttgaagaagacgccagcatcaaccaatcctgcgtag

SEQ ID NO: 108693 - protein, 617 aa, Lactobacillus rhamnosus
MAFSKETRTQTIDQLKQTELDLLIVGGGITGAGVAIQAAASGLKTGLIEMQDFAEGTSSRSTKLVHGGIRYLKTFDVGVVADTVKERAVVQGIAPHIPRPFPMLLPVYQEAGSTFDMFSIKIAMDLYDRLANVEGSQYANYTVTKDEILQREPHLAADGLQGGGVYLDFVNNDARLVIENIKEAAELGGLMASRVQAIGVLHDDAGQVNGLQVKDLLDGSVFDIHAKLVINTTGPWSDKFKALDQAEDQTPTLRPTKGVHLVVDGSRLPVPQPTYMDTGLNDGRMFFVVPREGKTYFGTTDTDYHGDFNHPQVEQADVDYLLKVINKRYPQSHITLDDIEASWAGLRPLIANNGSSDYNGGGANTGKVSDDSFEALIRVVDDYEDNQATRADVEHAISRLETAHAEAALSPSQVSRGSSLRQADDGMITLSGGKITDYRKMAAGALALIRRLLAEHFATETRTVDSKKLQVSGGHFDPTNVDDTIAFYTRIGIDAGLPEKDAADLANRFGSNVSRVVTYTDGQAAPGLSLKETMSLRYSINEEMTLTPVDYLLRRTNAILFHAETLNELKQPVVDEMARLLGWDDATKAQQLADLNQAIRESQLADLKKTPASTNPA

SEQ ID NO: 108694 - DNA, 2085 bp, Neurospora crassa
  CDS (1)..(2085)
atgtcgaggctattgcgagcaaagaagctggtcgccccggcccttgtggccggtgtcgctggtggctccctctactacatgtataagccccgaaacatccccgggtacgaaggccccgttgtcccgccccctatcttcggcgccgacggcaccttcaagctcccccgcttccctcaggtcaagtctcgcgaccagcagattgccgatctaaaaaagagcaactcgggaaacaaggaggacgaatatgatgtgcttgttatcggagctggcgcaaccggtgccggtgtggctctcgatgccgcaactcgcggtctcaaggtcgccgttgttgagcgagacgacttcagttccgggacaagcagcaagagcaccaagctggtacacggtggtgtgcgttatctcgaaaaggccgtctggaacttggactacgcccagtatgagcttgtcaaggaggccctcaaggagcgcaagtacttcttgaagactgcgccccatctgagctcgtggctaccaatcatgttgccactcgaccagtggtggaaggttccttactactgggctggcaccaagttctacgatttcctggctggttccgagggcatcgagagctcatactttttgaccaagagcaaggccattgatgccttccccatgctcaaacagaccgacctcgttggcgccctcgtctactacgatggtgcccacaacgactcccgcatgaacgtctcgatcggtatgactgccgccctctacggtgctactgttgtaaaccacatggaggtcactggccttcagaagggcgagaacggaaagctctgcggtgctaccctcaaggaccttgtcactgagagagacggcaacgaggcgactcccttcaacatcaaggccaagtgcatcatcaactgcactggtcccttcacagacagcatccgtaagatggacgaccaggactgcaaggagattgtcgcccccgcctccggtgtgcacgtcatcctccccggttactacagccctggcaagatgggcctgatcgacccctccacctccgacggcagagtcatcttcttcctcccctggcaaggcaacaccattgccggtaccaccgacgagcctgcgaccattaccaagaacccccttcccgacgagaagtccatccagtggattctcaacgagatcagccactacctctcccccgacatcaacgtccgccgcggcgacgtcctggctgcctggtccggtctccgccctctcgtaagggaccccaaggccaagaacaccgagtcccttgtccgtaaccacctgatcgatatctccccctccggcctcatcacctgcgccggtggcaagtggaccacctaccgccaaatggccgaggagtgcgtcgacgccgccatcaaggagttcaacctgcccgtcaagcccatcgccaaccctcccctggtcagcggcactgagcacgtggaagacgatgccgtcctcgacggctcctgccagacgcaccgtgtccgcctgatcggcgctcatggcttcagccgcaccttgttcatccacctgatccagcactttggcgtcgagaccgaggtcgccaagcacttgaccgagagctacggcgaccgcgcctggaccgttgcttcgctgtgcaaggccaccaacaagcgcttccccgccaagggcgagcgcattgcagagctttacccctttgttgacggcgagatccgctacgcggtcaggcacgagtatgcccagacggctgtggacgtgctcgctcgtcgcacgagattggccttcttgaatgcgcaggcggcgctcgaggcgttgcccaaggttattgacatcatggctgatgagctcaagtgggatgcgaagaggaaggatgttgagtggaaggacaccgtcgccttcctcgagtcaatgggccttccccaaccgatgctcaccaccacccgccaacaagtcgagaagggcaagctggactggtccaactcgctcgagtggaagatgtactcgagacacgataagccggtcgacgagaaggagcgcaacgagcaggccgagattgccgggcgcgcggggactcatcgttaa

SEQ ID NO: 108695 - protein, 694 aa, Neurospora crassa
MSRLLRAKKLVAPALVAGVAGGSLYYMYKPRNIPGYEGPVVPPPIFGADGTFKLPRFPQVKSRDQQIADLKKSNSGNKEDEYDVLVIGAGATGAGVALDAATRGLKVAVVERDDFSSGTSSKSTKLVHGGVRYLEKAVWNLDYAQYELVKEALKERKYFLKTAPHLSSWLPIMLPLDQWWKVPYYWAGTKFYDFLAGSEGIESSYFLTKSKAIDAFPMLKQTDLVGALVYYDGAHNDSRMNVSIGMTAALYGATVVNHMEVTGLQKGENGKLCGATLKDLVTERDGNEATPFNIKAKCIINCTGPFTDSIRKMDDQDCKEIVAPASGVHVILPGYYSPGKMGLIDPSTSDGRVIFFLPWQGNTIAGTTDEPATITKNPLPDEKSIQWILNEISHYLSPDINVRRGDVLAAWSGLRPLVRDPKAKNTESLVRNHLIDISPSGLITCAGGKWTTYRQMAEECVDAAIKEFNLPVKPIANPPLVSGTEHVEDDAVLDGSCQTHRVRLIGAHGFSRTLFIHLIQHFGVETEVAKHLTESYGDRAWTVASLCKATNKRFPAKGERIAELYPFVDGEIRYAVRHEYAQTAVDVLARRTRLAFLNAQAALEALPKVIDIMADELKWDAKRKDVEWKDTVAFLESMGLPQPMLTTTRQQVEKGKLDWSNSLEWKMYSRHDKPVDEKERNEQAEIAGRAGTHR

SEQ ID NO: 108696 - DNA, 1536 bp, Thermus brockianus
  CDS (1)..(1536): transl_table=11
atggccgaccgggaagccctgtgggaacggctgaaggagccctgggacctcctcgtcctagggggaggggccacgggatcgggggtcctgtgggaggcgaccctaagggggctcaaggcggccttggtggaggccagggacttcgcctcggggaccagcagccgctccaccaaactcctccatgggggggtgcgctacctggagctggccctgaggcgcctggaccggaggcaactccgcctggtgatggacgccctccgggaacgcaaggtggttatggacctggccccccacctggcctaccccctccccctcctcaccccccttttccggcccctggagctcccctactacgggacgggcctcctcctctacgacctcctctcggggcaaaggcgccttgggcccacccgctacctccccccgaggggggtggcggaacttttccccgatctaccccccaccctggggggcatcctctactgggacggccagttccaggaccaccgcctggtcctggccctcctcctctccgccctaaggcgaggggccctggccctgaaccacgccgaggcccacgcctttctcctgaaagggggcagggtggtgggggcggtggtgcgggaccacctcacgggaagggaggtggaggtccacgccaaggcggtggtgaacgccacgggccccttcaccgacgctacccgccgcctcctggacccccacctgccccccctcctcaccccctccagcggggcccacctggtcctggactacccgctcaggacgggcctcctcctccccaggacccgggacggccgcgttctcttcctcctgccctaccggggaaaggccctcttgggcaccaccgaccggcccgccgaggccagcttctgccccttgcccaaggaggaggaggtggcctacctcctggaggaggtgaggccttacctgggggacctctccccccatatccgggcggtctggagcggccttaggcccctggtggggcggggggagacgcggcttttggtgcgggaccacctcatcgccgaggaaagggggctttacaccctcacggggggcaagtggaccaccttccgcctcatggcccaggacctcgtggaccgcttggaccgggacctgggcctcgggcttcccccctccccctcccacgccacccccctcctgggggctggccccaagccccccttggacctccccgagggggtggcggaacacctctaccgcacctacggcagggaggcgcaggcggtggcggccctgggggataggcccctcctgcccgggcgcccttacctggagggggaggtggtctacgccgtgcgggaggagcttgcccagaagcccctggacgtgctcgcccggcggatgggcctggcccttttggaccaggaggcggcgcgggaggccctgccccgggtggtggccctcatggcccccctcctgggctgggacgaggggagggcccgggcggagctggaggaggcccgggccgccttgcccgggctttgctaa

SEQ ID NO: 108697 - protein, 511 aa, Thermus brockianus
MADREALWERLKEPWDLLVLGGGATGSGVLWEATLRGLKAALVEARDFASGTSSRSTKLLHGGVRYLELALRRLDRRQLRLVMDALRERKVVMDLAPHLAYPLPLLTPLFRPLELPYYGTGLLLYDLLSGQRRLGPTRYLPPRGVAELFPDLPPTLGGILYWDGQFQDHRLVLALLLSALRRGALALNHAEAHAFLLKGGRVVGAVVRDHLTGREVEVHAKAVVNATGPFTDATRRLLDPHLPPLLTPSSGAHLVLDYPLRTGLLLPRTRDGRVLFLLPYRGKALLGTTDRPAEASFCPLPKEEEVAYLLEEVRPYLGDLSPHIRAVWSGLRPLVGRGETRLLVRDHLIAEERGLYTLTGGKWTTFRLMAQDLVDRLDRDLGLGLPPSPSHATPLLGAGPKPPLDLPEGVAEHLYRTYGREAQAVAALGDRPLLPGRPYLEGEVVYAVREELAQKPLDVLARRMGLALLDQEAAREALPRVVALMAPLLGWDEGRARAELEEARAALPGLC

SEQ ID NO: 108698 - DNA, 1668 bp, Bacillus subtilis
  CDS (1)..(1668): transl_table=11
atgatgaatcatcaattttcaagtcttgaaagagatcgcatgctgacagacatgacgaaaaaaacatatgacctatttattatcggaggaggaattacaggagccggaacagctcttgacgcggcatcaaggggaatgaaggtcgcactaagcgaaatgcaggactttgcggcgggaacatcaagccgatcaacgaagctggtacatggcggcttgcgctatttaaaacaatttgaagtgaaaatggtcgctgaggtaggaaaagagcgggcgattgtgtatgaaaacggcccgcatgtcactacaccggaatggatgctgcttccgtttcataaaggcggcacattcggttcatttacaacatctattgggttaagggtttatgacttccttgcaggtgtgaaaaagtcagaacgaagaagcatgctttcagcaaaagaaacgctgcaaaaagagcctttggtgaaaaaagacggcttaaaaggcggcgggtactatgtggaataccgcactgacgatgcgagactgaccatcgaagtcatgaaggaagcggttaaattcggggcagagcctgtgaattactccaaagtgaaggagcttctttacgaaaaaggcaaagccgtcggcgtattaattgaagatgtgctgacaaagaaagaatataaagtgtatgcgaaaaaaattgtcaatgctacaggcccttgggtcgatcagctcagagaaaaagaccattcgaaaaacggaaagcatttgcagcatacaaaaggcattcaccttgtatttgaccagtctgtctttccgctgaaacaggctgtatatttcgatacacctgatggccggatggtatttgcgattcctcgtgaaggcaaaacatacgtgggaacaacagacactgtttacaaagaggcgctggagcatccgcggatgacaacggaggatcgtgattatgtcatcaaatcaatcaattacatgttcccggaactgaatatcactgcgaatgacatcgaatccagctgggcggggctgcgtccgctgattcatgaagaaggcaaagatccttctgaaatttcacggaaagacgagatttggacatctgactcaggcctgatcaccattgccggcggaaaactgactggatacagaaaaatggcggacgacatcgttgatcttgtccgtgatcgcttaaaagaagagggcgaaaaggattttggaccatgtaaaacgaaaaacatgccaatctctggcgggcacgtcggcggttcgaaaaatcttatgtccttcgttaccgcgaaaacaaaagaaggaattgcagccggtttatcagaaaaagacgcaaaacagcttgcgatcagatacggctctaacgtagatcgcgtctttgaccgggtagaagcgctgaaagatgaggccgcgaaacgcaacattccggttcatattcttgctgaggcagaatacagtatagaagaagagatgactgcaacccctgctgacttctttgtccgcagaacgggacgtttattttttgatatcaattgggtaagaacatataaagatgccgttattgattttatgagcgagcgattccaatgggatgagcaggcgaaaaacaaacatacagaaaacctcaacaagcttttacacgatgcggtcgtaccgcttgagcaataa

SEQ ID NO: 108699 - protein, 555 aa, Bacillus subtilis
MMNHQFSSLERDRMLTDMTKKTYDLFIIGGGITGAGTALDAASRGMKVALSEMQDFAAGTSSRSTKLVHGGLRYLKQFEVKMVAEVGKERAIVYENGPHVTTPEWMLLPFHKGGTFGSFTTSIGLRVYDFLAGVKKSERRSMLSAKETLQKEPLVKKDGLKGGGYYVEYRTDDARLTIEVMKEAVKFGAEPVNYSKVKELLYEKGKAVGVLIEDVLTKKEYKVYAKKIVNATGPWVDQLREKDHSKNGKHLQHTKGIHLVFDQSVFPLKQAVYFDTPDGRMVFAIPREGKTYVGTTDTVYKEALEHPRMTTEDRDYVIKSINYMFPELNITANDIESSWAGLRPLIHEEGKDPSEISRKDEIWTSDSGLITIAGGKLTGYRKMADDIVDLVRDRLKEEGEKDFGPCKTKNMPISGGHVGGSKNLMSFVTAKTKEGIAAGLSEKDAKQLAIRYGSNVDRVFDRVEALKDEAAKRNIPVHILAEAEYSIEEEMTATPADFFVRRTGRLFFDINWVRTYKDAVIDFMSERFQWDEQAKNKHTENLNKLLHDAVVPLEQ

SEQ ID NO: 108700 - DNA, 1758 bp, Mycobacterium leprae
  CDS (1)..(1758): transl_table=11
gtgactgatctgatccaagcaccggagagcgagcagacatggccggcttctgcgttgggaccgcagcaacgtgcggcggcctgggagcggtttggcactgagcagttcgacgtggtggtcattggtggcggcgtagtggggtccgggtgtgcgctggatgctgccacgcgcggcctcaaagtggcgttggtcgaggcgcgggacttggcttcgggtacgtcgagccgctcgtcgaagatgtttcacggggggttgcgttaccttgagcaactcgagttcgggttggtgcgtgaggcgctctatgagcgtgagttgtcgttgaccacgttggcaccgcatctggtcaaaccgttgccgttcctgtttccgctaaccaaacgttggtgggaacgcccgtacatagctgccggcatcttcctgtatgatcgccttggtggcgctaaatcggttccggcgcaaaagcatttgactcgtgccggtgcgttgcgattaagtccgggcctaaaacgcagctccttgatcggtggtattcgctactacgacaccgtcgtcgacgacgcccggcacaccttgactgtagcgcgcaccgctgcgcattacggagcggtcgtgcgatgctccacccaggtggtcgcattgctgcgcgagggcgaccgagtgatcggcgtgcgggttcgcgattcggaggatggcgcggttactgagatccgcggccacgttgtggtcaacgctactggggtctggaccgacgaaattcaggcgttgtccaagcagcgtggacgattccaggtgcgcgtgtccaagggtgtgcacgtagtggtaccgcgggaccggatcgtcagtgacgtcgcgatgatcctgcgcaccaagaagtcggtgatgttcatcatcccgtggggtaaccactggatcatcggaacgaccgatactgattggaatctcgacctggcccatcccgcggccaccaaggcggatattgactacatcctgcagacggtcaatactgtgttggctaccccgttgacccacgccgacatcgatggggtgtatgctgggctacgcccgctcctcgccggggaaagtgatgacacttccaagttgacccgtgaacacgcggtcgcggtgccggtggcgggtctggtcgcgatcgccggcggcaagtacaccacgtaccgggtgatggccgccgacgcgattgacgccgcggttgcattcgttccggcccgggtagctccgtcgatcaccgagaaagtaggtttgctgggcgccgacggttactttgcgttgatcaatcaggtcgaacacgtcgccgcgttgcaaggtctgcacccctaccgggtgcgtcatctgctggaccgctacggcgcgcttatcggtgacgtcttggccttggcggctgaagcacccgacctgctcagtccgattcaggaagctccgggctatttgaaggtggaagcccgctacgctgtaaccgccgagggcgccttgcatctcgaggacatcttggcccgccggatgagagtctctatcgaatatccacaccgcggcgtcgcctgtgcccgggaggtggccgatgtggtcgctccggtgttgggttggacggccgaggatatcgatcgcgaggtggcgacttataatgcgcgggtggaggccgaggtactgtcgcaggcccagcccgacgacgtgtcggcggacatgttgcgagccagcgcacccgaggcgcgcaccaagatcatcgaaccggtgtcgctaacttga

SEQ ID NO: 108701 - protein, 585 aa, Mycobacterium leprae
MTDLIQAPESEQTWPASALGPQQRAAAWERFGTEQFDVVVIGGGVVGSGCALDAATRGLKVALVEARDLASGTSSRSSKMFHGGLRYLEQLEFGLVREALYERELSLTTLAPHLVKPLPFLFPLTKRWWERPYIAAGIFLYDRLGGAKSVPAQKHLTRAGALRLSPGLKRSSLIGGIRYYDTVVDDARHTLTVARTAAHYGAVVRCSTQVVALLREGDRVIGVRVRDSEDGAVTEIRGHVVVNATGVWTDEIQALSKQRGRFQVRVSKGVHVVVPRDRIVSDVAMILRTKKSVMFIIPWGNHWIIGTTDTDWNLDLAHPAATKADIDYILQTVNTVLATPLTHADIDGVYAGLRPLLAGESDDTSKLTREHAVAVPVAGLVAIAGGKYTTYRVMAADAIDAAVAFVPARVAPSITEKVGLLGADGYFALINQVEHVAALQGLHPYRVRHLLDRYGALIGDVLALAAEAPDLLSPIQEAPGYLKVEARYAVTAEGALHLEDILARRMRVSIEYPHRGVACAREVADVVAPVLGWTAEDIDREVATYNARVEAEVLSQAQPDDVSADMLRASAPEARTKIIEPVSLT

SEQ ID NO: 108702 - DNA, 1674 bp, Staphylococcus epidermidis
  CDS (1)..(1674): transl_table=11
atgtcattatctacattgaaaagggatcatattaaaaagaatttaagagacactgaatacgatgttgttatcgtaggtggcggtattacaggtgcaggtattgctttagatgcaagtaatcgtgggatgaaggtagctttagtagagatgcaagactttgcacaaggtacaagttcacgctcaactaaacttgtacacggtggtttaagatatttaaaacaactgcaagtaggggtagttgcagaaacaggtaaagaacgtgctattgtttatgaaaatggtccacatgtgacaacaccagaatggatgcttttacctatgcataaaggtggtacatttggtaaattctcaacttctattggactagctatgtacgatcgtctagctggtgtcaaaaaatccgaacgtaaaaaaatgttatctaagcaagaaacgttaaataaagaacctttagttaaacgtgatggattaaaaggcggtggctactatgtagaataccgtactgatgatgcgcgtttaactattgaagttatgaaaaaagctgctgaaaatggagcagaaatccttaattatacaaaatcagaacacttcacttatgattccaataagaaagtaaatggtattgaagtattggatatgattgatggcgaaacgtatgcgattaaagctaaaaaagttattaatgcttctggtccttgggttgatgaagtgagaagtggcgattatgcacgtaacaataagcaattaagattaactaaaggtgtacacgttgttatagatcaatctaaattcccattaggtcaagcagtttactttgataccgaaaaagacggacgcatgatttttgcgattccacgtgaaggaaaagcttatgtaggaacaactgacacgttttatgataatgaaaaagcaacacctttaacaacacaagaagatagagactacttaattaatgcaattaactatatgttcccaacagttaatgttaaagatgaagatattgaatcaacatgggctggtattcgtccgctaattcttgaaaaaggtaaagatccttctgaaatctcacgtaaagatgaagtttgggaaggtgaatctggattattaactatagcaggcggtaaattaactggttatcgtcatatggcactagaaattgttgatttattagctaaacgtttaaaacaagaatacggattgaaatttgaatcatgtgccacaaaaaatctaaaaatttccggtggtgacgttggcggaagcaaaaactttgaacactttgttgaacaaaaagttgatgcagctaaaggatttggaattgatgaagatgtggcacgtcgcttagcaagtaaatatggttcaaatgttgatcaactatttaatattgctcaaacggcaccatatcatgatagtaaattaccattagaaatttatgttgaattagtttatagtattcaacaagaaatggtttacaaaccaactgacttcttagtacgtcgttctggcaaattatactttaatattcaagatgtgttagattataaaaatgctgtgatagatgttatggcggatatgcttaattatagtgaaactcaaaaagaagcttatactgaagaagtagaagttgcgattgatgaggcacgtacaggtaatgatcaacctgcaactaaagcttaa

SEQ ID NO: 108703 - protein, 557 aa, Staphylococcus epidermidis
MSLSTLKRDHIKKNLRDTEYDVVIVGGGITGAGIALDASNRGMKVALVEMQDFAQGTSSRSTKLVHGGLRYLKQLQVGVVAETGKERAIVYENGPHVTTPEWMLLPMHKGGTFGKFSTSIGLAMYDRLAGVKKSERKKMLSKQETLNKEPLVKRDGLKGGGYYVEYRTDDARLTIEVMKKAAENGAEILNYTKSEHFTYDSNKKVNGIEVLDMIDGETYAIKAKKVINASGPWVDEVRSGDYARNNKQLRLTKGVHVVIDQSKFPLGQAVYFDTEKDGRMIFAIPREGKAYVGTTDTFYDNEKATPLTTQEDRDYLINAINYMFPTVNVKDEDIESTWAGIRPLILEKGKDPSEISRKDEVWEGESGLLTIAGGKLTGYRHMALEIVDLLAKRLKQEYGLKFESCATKNLKISGGDVGGSKNFEHFVEQKVDAAKGFGIDEDVARRLASKYGSNVDQLFNIAQTAPYHDSKLPLEIYVELVYSIQQEMVYKPTDFLVRRSGKLYFNIQDVLDYKNAVIDVMADMLNYSETQKEAYTEEVEVAIDEARTGNDQPATKA

SEQ ID NO: 108704 - DNA, 1662 bp, Synechocystis sp
  CDS (1)..(1662): transl_table=11
atgcgtaatttcccagaaatccaaaatacggcctatgacctaattgtgattgggggaggcattaacggggttggcacggcccgggacggagccctacggggcctaaaaaccctcctgatcgaaaaggatgatttcgccagtggtacgagtagttggtccacccgcttaatccatggcggcctgcgctatctggaatattttgaatttaatctggtgcgggaatccctgcgggagcgggaagttctgctccacaccgccccccatttggtccagcccctccagttgaccattccggtgtacgactggtcgagccgggcctattgggaaattcaggcgggcatgattctttacgacatcctcagttttgataaaaccctcccttcccataggatgttaagcccccaacagttccagcaactgttccgagcggcggagaaaaaaggcttaaaaggaggagcccaatattttgacggccaggtggaatatgcggaacggttagatttagaagtgaccctatcggcccaaaaggccggggcggccatgctcaattatgtggctgtgaaggggttggagaaaggggaaaataacctgattaccgccatccattgccaggatcaactgagcggagaaaaatttactgttaatagcgcccaggcgatcgtcattaataccactggcccctgggtagatgaagtttgtggcttagcccatcgagggggagaacccgttgccattgtccaagaaagaaaaattggtggcaccaagggcagtcatattgtggtggatcccttccctggagcccccgcttcagccttatatgtggaagcgtttgtggataaacggccctatttcatcattccctggttgggtaaatatctgattggcaccacggaccaccgctatgatggttccctcgacagggttaaagccagtgatgacgagattgattacctgattgcggaaactaaccgggtgatgccagcagctcagttaaccaggcaggatgtgcgtttcacctattccggggtgcgccctctgccctacaccgatggcaaaaaggccggcagtattacccgcaaccatattctttatgaccatagtcaagacggagttaataatttgatttccctaattggcggtaagttgaccacctatcgccaggtgggagaagaaatggtggataaggtttatggcaagctgagacgctctgctcctccctgtccaaccctgacccaacctttaccgggggcagaagcctatcccctgtccttggaaactgccatggataaatatggcaatcatttggagcgtcattctattcaacatttattttgcctttacggagccagggctggagacattttagccttagtccacggagcgccggagttgggggaaaggattattccttccttgccggatatcaaagcccaagttgtttttgcagtacaagcagaaatggcccacaccttggtggatatttgtcgacgacgtacggcgatcgccatggtgactaacgattatggctttagcgccctggccggcatttgccaaacgttaacagaccattgtggctggacccaggagcaatgtgacaagcaaattcaaaagtaccatgaatatatggagcaaaactgcattcccgactattgtctccactga

SEQ ID NO: 108705 - protein, 553 aa, Synechocystis sp
MRNFPEIQNTAYDLIVIGGGINGVGTARDGALRGLKTLLIEKDDFASGTSSWSTRLIHGGLRYLEYFEFNLVRESLREREVLLHTAPHLVQPLQLTIPVYDWSSRAYWEIQAGMILYDILSFDKTLPSHRMLSPQQFQQLFRAAEKKGLKGGAQYFDGQVEYAERLDLEVTLSAQKAGAAMLNYVAVKGLEKGENNLITAIHCQDQLSGEKFTVNSAQAIVINTTGPWVDEVCGLAHRGGEPVAIVQERKIGGTKGSHIVVDPFPGAPASALYVEAFVDKRPYFIIPWLGKYLIGTTDHRYDGSLDRVKASDDEIDYLIAETNRVMPAAQLTRQDVRFTYSGVRPLPYTDGKKAGSITRNHILYDHSQDGVNNLISLIGGKLTTYRQVGEEMVDKVYGKLRRSAPPCPTLTQPLPGAEAYPLSLETAMDKYGNHLERHSIQHLFCLYGARAGDILALVHGAPELGERIIPSLPDIKAQVVFAVQAEMAHTLVDICRRRTAIAMVTNDYGFSALAGICQTLTDHCGWTQEQCDKQIQKYHEYMEQNCIPDYCLH

SEQ ID NO: 108706 - DNA, 1830 bp, Enterococcus casseliflavus
  CDS (1)..(1830): transl_table=11
atgaccttttctcagaaagatcggaaggaaaccattcaagaaacggcaaagaccacctatgatgtgttgatcattggtggtgggattaccggcgcaggggttgccgttcaaacagcagcggctgggatgaagacggttcttttggaaatgcaagactttgccgaagggacgtcttcgcggtccacgaaactcgttcatggcggtattcgctatttgaaaacctttgacgtggaagtggtcgctgacaccgtgcgggaacgggcgatcgtccaacaaattgctccacatatcccgaaaccagatccgatgcttttaccgatttacgatgaaccgggggcaaccttctccttgttttctgttaaagtggcgatggatctttatgatcgcttagcgaatgtgacaggcagtaaatacgaaaattatctgttgacgaaagaagaggtcttagcacgcgaaccacagctgcaggcggaaaacttagttggtggcggagtctatcttgattttcgcaacaacgatgcccgcttggtgatcgaaaacatcaaacgagcacaagccgatggggcagcaatgatcagtaaggccaaagtcgtcggcatcttacatgatgagcaaggcatcatcaatggggtagaagtggaggatcaactgacaaacgagcgctttgaggttcacgccaaagtcgtgatcaacacgaccggaccttggtcagacatcgttcgtcaattagataagaatgatgagctgccaccacaaatgcgtccgacaaaaggcgtccatttagtggtcgatcgggaaaaactaaaagtaccgcaaccaacctattttgatactgggaaaaatgatggtcggatggttttcgtggtaccaagagaaaacaagacctattttggcacaaccgatacggactatacaggcgattttgcccatccgacggtcacacaagaagatgtcgattatctactgaccatcgtgaatgaacgctttccacatgcacagatcacccttgatgatatcgaagcgagctgggctggtctacgtccattgattacgaataatggtggttcggattacaatggtggtggtaaaggcaaattatctgatgaaagctttgagcagatcgttgaaagcgtcaaagaatatcttgcagatgagcggcagcgaccagttgtagaaaaagctgtaaaacaagcgcaagaacgagtagaagccagcaaagtggatccatcgcaagtttctcgcggcagcagtttggaacgctcaaaagacggactattgacgttggcaggcggaaaaatcaccgactatcgtttgatggcggaaggagcagtcaaacggatcaatgaattgctccaagaaagcggtgcttccttcgagttggtggattcaaccacgtacccagtttctggtggtgagcttgatgcagccaatgtagaggaagaattagcgaagctggctgaccaagcacaaaccgctgggttcaatgaagcagctgcgacgtatttggctcatctttatgggtcgaatcttccccaagtgttgaactacaagacgaagtttgagggcttagatgaaaaagaaagcactgccttgaactattccttacatgaagaaatggttctgacgcccgttgattatctattgcgtcggaccaaccatatcctatttatgcgagacaccttagatgatgtcaaagcgggtgtcgttgcagctatgaccgacttctttggctggagcgaagaagaaaaagcagcccatgtattagaattgaaccaagtgatcgcagaatcagatttaacagccttaaaaggaggaaaaaaagatgaatga

SEQ ID NO: 108707 - protein, 609 aa, Enterococcus casseliflavus
MTFSQKDRKETIQETAKTTYDVLIIGGGITGAGVAVQTAAAGMKTVLLEMQDFAEGTSSRSTKLVHGGIRYLKTFDVEVVADTVRERAIVQQIAPHIPKPDPMLLPIYDEPGATFSLFSVKVAMDLYDRLANVTGSKYENYLLTKEEVLAREPQLQAENLVGGGVYLDFRNNDARLVIENIKRAQADGAAMISKAKVVGILHDEQGIINGVEVEDQLTNERFEVHAKVVINTTGPWSDIVRQLDKNDELPPQMRPTKGVHLVVDREKLKVPQPTYFDTGKNDGRMVFVVPRENKTYFGTTDTDYTGDFAHPTVTQEDVDYLLTIVNERFPHAQITLDDIEASWAGLRPLITNNGGSDYNGGGKGKLSDESFEQIVESVKEYLADERQRPVVEKAVKQAQERVEASKVDPSQVSRGSSLERSKDGLLTLAGGKITDYRLMAEGAVKRINELLQESGASFELVDSTTYPVSGGELDAANVEEELAKLADQAQTAGFNEAAATYLAHLYGSNLPQVLNYKTKFEGLDEKESTALNYSLHEEMVLTPVDYLLRRTNHILFMRDTLDDVKAGVVAAMTDFFGWSEEEKAAHVLELNQVIAESDLTALKGGKKDE

SEQ ID NO: 108708 - DNA, 1830 bp, Lactococcus lactis subsp
  CDS (1)..(1830): transl_table=11
atggctttttctaaaaaaacaagacaagaagcaatcacaaaaattcaaaatgaagagatggatttactcgttatcggaggagggatcactggtgctggtttgacattacaagcggcggctgctggcatgaaagttgctgtacttgaaatgcaggatttctcagaagggacatcctcacgctcaacaaaactcgtgcatggtggcatccgttacctcaaaaacttcgatgtcgaagtcgtttccgatacagtttcagaacgcgctgttgttcaaggcattgcgccacatattcctaagccagatccgatgttacttcctatctacgatgatgaaggcaagacaacgtttgatatgttttctgtgaaaattgcgatggatttgtatgaccgtttggccggtgtggatgaagattcgccatatgccaactacactatctcaccagaagaagtcctgcgccgcgagccactcatcaagaaaaaaggtttgcaaggggctggagtctatcttgactaccgtaacaacgatgcccgcttggtgattgataacatcaaaaaagctgtggaagacggtgcccaagccataagcaagatgaaagtgattgattttatctatacggatggacaaatttctggtattcgtgcgcgtgatttgttgacagatcaagtcattgaagtcaaagctaaacttgtgattaacacaagtggaccttgggtagataagatccgttacctgaacttcactcgtcccatcgtgcccaaaatgcgtccaacaaaaggtgtccatcttgtagtagatgcggccaaattgcctgtaccacaaccaacttattttgatacaggcaaacacgataaacgcatggtctttgccattccacgtgaaaataaaacttattttggtacgacagatacggattatcatggcgactttaccgatccaaaagtaactcaagaagatgtagattacctcttggatgttattaatttccgttacccagaagcaaatattacgattaatgacatcgaagcttcatgggcaggattgcgtccattgttaggcggaaattctggatcagactataacggcggtgataatggtgcggtctctgaaaccagctttaacgctgtcgttgaggcggtgctccgctataaaaataaaacagcaacaaaagccgaagtggagcatttgttgaacaatatggaatcaagcctttccgaaaaaggagatgcaccatcttccgtttctcgtggcagctcacttgaacgcgagagcgatggtttgattactttagcgggtggtaaaatcacggactaccgtaaaatggcggcaggtgcgatggagcttatttgccaattgcttgaggaggactttggtttgaaatacgaacctattgactctaaaaaataccaaatctctggtggcgaatttgacccaactaaagttgaagaagttgttgctgaaaacatgaaagttggtgtcgctgcaggtcttacagaagaagaagcaaaatacattgctgacttttatggtatgaatgcactccaagtctttgcctatgcttctgaaatggaagcttatgaaggcttatctctagccgaatccgcacgtctttgctatgcgcttgaggatgaaatgatcttaacaccagtggactacttgcttcgtcgtaccaaccacatcttgtttatgcgtgaaggagtagatgctatcaaggtacatgttgtcaatgccatggcggacgaccttggctggtctgcagaagaaaaggcagaacaagaaaaagctttggaagaagcacttcgtgaatcggacttgtcggatttgaagaagtaa

SEQ ID NO: 108709 - protein, 609 aa, Lactococcus lactis subsp
MAFSKKTRQEAITKIQNEEMDLLVIGGGITGAGLTLQAAAAGMKVAVLEMQDFSEGTSSRSTKLVHGGIRYLKNFDVEVVSDTVSERAVVQGIAPHIPKPDPMLLPIYDDEGKTTFDMFSVKIAMDLYDRLAGVDEDSPYANYTISPEEVLRREPLIKKKGLQGAGVYLDYRNNDARLVIDNIKKAVEDGAQAISKMKVIDFIYTDGQISGIRARDLLTDQVIEVKAKLVINTSGPWVDKIRYLNFTRPIVPKMRPTKGVHLVVDAAKLPVPQPTYFDTGKHDKRMVFAIPRENKTYFGTTDTDYHGDFTDPKVTQEDVDYLLDVINFRYPEANITINDIEASWAGLRPLLGGNSGSDYNGGDNGAVSETSFNAVVEAVLRYKNKTATKAEVEHLLNNMESSLSEKGDAPSSVSRGSSLERESDGLITLAGGKITDYRKMAAGAMELICQLLEEDFGLKYEPIDSKKYQISGGEFDPTKVEEVVAENMKVGVAAGLTEEEAKYIADFYGMNALQVFAYASEMEAYEGLSLAESARLCYALEDEMILTPVDYLLRRTNHILFMREGVDAIKVHVVNAMADDLGWSAEEKAEQEKALEEALRESDLSDLKK

SEQ ID NO: 108710 - DNA, 1950 bp, Schizosaccharomyces pombe
  CDS (1)..(1950)
atgttttcaatcttcaaacgccgatctgttcaggccgctttggctgcttcgggtctagttggaggcgccgttttctactctgatttcattaaaagacccgctccttctcacttcaatccccaatttaccccgtttaccaaatcgttagcccctccgccatctcgtgaaacgcttttaaaaaacgtcgaagatatatcaaaattcgatgtcctcattatcggtggaggtgctaccggtacaggtgttgctgtcgatgccagcaccagaggacttaatgtttgtttgttagaaaaaactgattttgccagtgagacttcatcaaagtcgactaaaatggctcatggtggtgtgcgttatctagagaaagctgtattccaattgtctaaggctcaattagatttggttatcgaggctttaaatgagcgtgcaaatatgttgagaacggccccacatttgtgcacagtgttgcccatcatgatccctgtatacaaatggtggcaggttccatatttctttgttggttgtaaaatttacgactgggttgctggttctaagaacttgagagcttctaccattttctcaaaagagacaactgtggccattgctcccatgctcgacgattctaatctcaaggcttcatgcgtctaccatgatggctcctttaatgacactcgcatgaacaccacgctagcagttactgcaattgacaatggtgcaaccgttttgaattatatggaggttaaaaaactattaaaatcaaaagacaacaaacttgaaggtgtacttgccatcgaccgtgaaaccggtaaagaatatcaaattaaagccacttctgttgtcaatgctaccggtcccttttctgacaaaatcttagaaatggatgctgatccccaaggtgagccacccaagactgcccagtttcctagaatggttgtcccttctgccggcgttcatgtcgtcttgcccgaatactactgtcctcccaatataggaattctcgacccttcaacttcagataatcgtgtcatgttcttcttaccatggcagggtaaagttatagccggtaccacagataagcctttgagtagtgttcccactaatcccacaccatctgaagacgatatccagttgatattgaaggagctacaaaaataccttgtgttccctgttgatcgagaggatgtcttgtctgcatggtgcggtatccgacctttggttcgtgacccatccacggtccctcctggcaccgatcccactactggagagacgcagggtctagttcgttctcacttcattttcaagtctgataccggattacttacaatctcgggtggaaaatggacgacataccgtgaaatggcggaggagactgttaatgaactaatcaaggaccacgacttcggaaaggcattgaagccctgtcaaactaaaaaactcattttggtgggtggtgaaaactattataagaattattctgccagattgattcatgaatatcatattcccttaagactcgcaaagcatctgtcccacaactatggatctcgggccccattaattttggagttatattcgaaaaccgatttcaacaagctgcctgttacgttggctgacaaggaagtattcgctccatcttctgatgcctcgagtgataaaagcgtttcctatgcatcctttgatgaaccgtttactgttgcagaattaaagtattcgataaagtacgaatacactagaacacccaccgatttcttagcccgtaggacccgtttggcatttttggatgctagacaagctcttcaagccgttgctggtgttacacatgtcatgaaagaagaatttggttgggatgatgcgacaactgacaagcttgcccaagaagccagggattacattggaggaatgggtgtatcatctgaccgtttcgatgttaaacagttcgaagtcaaataa

SEQ ID NO: 108711 - protein, 649 aa, Schizosaccharomyces pombe
MFSIFKRRSVQAALAASGLVGGAVFYSDFIKRPAPSHFNPQFTPFTKSLAPPPSRETLLKNVEDISKFDVLIIGGGATGTGVAVDASTRGLNVCLLEKTDFASETSSKSTKMAHGGVRYLEKAVFQLSKAQLDLVIEALNERANMLRTAPHLCTVLPIMIPVYKWWQVPYFFVGCKIYDWVAGSKNLRASTIFSKETTVAIAPMLDDSNLKASCVYHDGSFNDTRMNTTLAVTAIDNGATVLNYMEVKKLLKSKDNKLEGVLAIDRETGKEYQIKATSVVNATGPFSDKILEMDADPQGEPPKTAQFPRMVVPSAGVHVVLPEYYCPPNIGILDPSTSDNRVMFFLPWQGKVIAGTTDKPLSSVPTNPTPSEDDIQLILKELQKYLVFPVDREDVLSAWCGIRPLVRDPSTVPPGTDPTTGETQGLVRSHFIFKSDTGLLTISGGKWTTYREMAEETVNELIKDHDFGKALKPCQTKKLILVGGENYYKNYSARLIHEYHIPLRLAKHLSHNYGSRAPLILELYSKTDFNKLPVTLADKEVFAPSSDASSDKSVSYASFDEPFTVAELKYSIKYEYTRTPTDFLARRTRLAFLDARQALQAVAGVTHVMKEEFGWDDATTDKLAQEARDYIGGMGVSSDRFDVKQFEVK

SEQ ID NO: 108712 - DNA, 1890 bp, Oryza sativa
  CDS (1)..(1890)
atggccacgtggcgcctccgccgcgcggccgccgccatcgccgcgtcctccgccgtcgtcgccgcgggcgcggcctggccgtccgcgtccgcttccgacccgtcccccgcggccctcgaggccgcgcggcggcgcgtggcccagccgggcgcggccccgccgccacgcgccgcgcagagggcggcgctggccgggtccacccccgcggatcccctcgacgtgctcgtcgtcggcggcggggccaccgggtgcggcgtcgcgctcgatgccgcaacccgcgggctccgcgtcggcctcgtggagcgcgaggacttctcctctgggacatcctcccgatccaccaaactcatccatggcggtgtgcgctatttggagaaggcagtattcaatcttgattatgggcagctgaaactcgtttttcatgctttgaaagaaagaaagcaggttattgaaaatgctccccacttatgccatgctttgccatgcatgactccttgctttaattggtttgaggttgtatactattggttcggcctgaaattctatgatatcgttgctggaagaaggctgctacatttgtcacgatattattctgtagatgaatcagttgaacttttcccaacccttgcaaaaaacagccatgatcgtagcctaagagggacagtggtatactatgacggtcaaatgaatgacagtcggctgaatgtgggcttggcatgcactgcagcggttgttggtgcagctattcttaattatgctgaagtggtatccctcattaaggatgaatctggagaaaggattattggtgcacggatccgtgatacgctatcaggtaaagaattcgatgcatttgcaaaggtggttgttaacgcagcaggaccgttctgtgactctgtgaggaagatggctaacaatgacgtagtgcccatgatcagtccaagcagtggagtgcacattgtacttcctgattattattcccctgatgggatggggctaattgtccctaaaaccaaggatggtagagttgtatttatgctgccatggttaggaaggacagtagctggtacaaccgactctagtacagcaataacaatgcttcctgaaccacatgaggatgagatacagttcatattagatgctatctgtgattatcttaacgttcaggtaaggcgttcagatgttctttctgcctggagtggtatacgtccactggctatggatccatcggcaaaaaatactgagagcatttccagagatcatgttgtatttgaagactacccaggactaataactatcactggtggaaaatggacaacttatagaagcatggctgaagatgctgttaatgcagccataaggtcaggtaatttgaagcctgccaatggctgtgtgactgatcatctgcatattcttggtggatatggttgggatcctgcttcgtttactgtccttgcacagaactataaacggatgaaaaggacatatggtgggaagatcattccaggtgcaatggacagtgctgtatcgaagcatctgtcacatgcatatggaactttggctacacaagtggcttcaattgcccagaatgaaggcttggggaagcgacttgctcatggatacccatttttggaggctgaagtagcatactgtgctcgccacgagtactgtgaatctgctgtggacttcattgcaaggagatgccgtcttgcatttcttgacacagatgctgctgggagagcattgcctcggatcatcgagattttagctctggaacgcaagtgggacaaggcaaggcagaagcttgaactacaaaagggtaaagatttcctggaaacattcaagtcatccaagaatgcacaattcagggatggcaaacataatggtcaatga

SEQ ID NO: 108713 - protein, 629 aa, Oryza sativa
MATWRLRRAAAAIAASSAVVAAGAAWPSASASDPSPAALEAARRRVAQPGAAPPPRAAQRAALAGSTPADPLDVLVVGGGATGCGVALDAATRGLRVGLVEREDFSSGTSSRSTKLIHGGVRYLEKAVFNLDYGQLKLVFHALKERKQVIENAPHLCHALPCMTPCFNWFEVVYYWFGLKFYDIVAGRRLLHLSRYYSVDESVELFPTLAKNSHDRSLRGTVVYYDGQMNDSRLNVGLACTAAVVGAAILNYAEVVSLIKDESGERIIGARIRDTLSGKEFDAFAKVVVNAAGPFCDSVRKMANNDVVPMISPSSGVHIVLPDYYSPDGMGLIVPKTKDGRVVFMLPWLGRTVAGTTDSSTAITMLPEPHEDEIQFILDAICDYLNVQVRRSDVLSAWSGIRPLAMDPSAKNTESISRDHVVFEDYPGLITITGGKWTTYRSMAEDAVNAAIRSGNLKPANGCVTDHLHILGGYGWDPASFTVLAQNYKRMKRTYGGKIIPGAMDSAVSKHLSHAYGTLATQVASIAQNEGLGKRLAHGYPFLEAEVAYCARHEYCESAVDFIARRCRLAFLDTDAAGRALPRIIEILALERKWDKARQKLELQKGKDFLETFKSSKNAQFRDGKHNGQ

SEQ ID NO: 108714 - DNA, 1896 bp, Brassica napus
  CDS (1)..(1896)
atgtcagtctcttccgtccgccgcttagccgtcgcagccgccgtaatcgccgccgcatccggcggtggcgccgtctaccactccccctccgtcgcctccagcgacagagccggcggcggtccggttctagattcgctgaagcgcacgatcggcgatccaaacgcctccgtaccgtcccgatccgctcaagagtctgctctcatcaaagccaccgcctctaatccgctcgacgtcctcgtcattggcggtggagccaccggctctggagtcgctctcgacgctgcgacacgtggactccgcgtaggtctcgtggagcgcgaggatttctcctcggggacgtcttcacgttcaacaaagctaatccatggaggagttcgttacttggagaaagctgtgttcaatctagactacggacagctaaagcttgtcttccacgcgctcgaggagcgtaaacagctcatcgagaacgcgccacatctctgccacgcgctcccgtgtatgacaccttgtttcgactggttcgaagtggtctactactggatggggctgaagatgtacgacttggtggcgggaccgcggttgttgcatctgtctaggtactactctgcgcaagagtctgctgagctcttccctactctcgcaaggaaagggaaagacaagagcttgaggggcactgttgtgtattacgacgggcaaatgaatgattcacgtctgaacgtggggttggcttgtactgctgcgttagctggtgctgcggttctcaaccacgctgaggttgtctcgcttattacagatgaggataccaagagaatagttggtgccagagttcgtaacaatctcacaggcaaagaatttgagagctatgcgaaagtagtagttaatgcggctggaccgttctgtgactccataaggaagatggttgatgaagatacaaagccgatgatatgtccaagcagcggtgtacacattgtgctccctgattactattcaccagaagggatgggattgatagtccctaaaactaaggatggtcgcgttgtgttcatgttaccgtggttgggaagaacggtagctgggactacagactctaacacgtcaatctctccgcttcctgaacctcatgaggatgagattcagtttatactggatgcaatcagtgactatcttaacattaaggttcgacgtactgatgttctctcggcttggagtggtatccgtccattggcaatggatccaacagcaaagagcacagagagtatctccagagaccatgttgtcttcgaggaaaaccctggtctggtcacaatcactggtggaaaatggacaacttatcgaagtatggcggaagatgcggttaatgcagcaatcaaatcaggaaagctgagtccaaccaatgaatgtgtaacgcagaagctacagattcttggttctcatggatgggaaccatcttctttcacagctcttgcgcagcaatacgtgcgcatgaagaaaacatatggtggtaaagtggttcctggagcaatggacacagctgctgcaaagcatttgtctcatgcatacggttcaatggctgaccgagtcgccaccatagctcaggaggagggtttggggaaacggttggcgcatggacatccgtttctggaagcagaggttgcgtactgtgcaaggcacgagtactgcgagtcagcggttgattttatagcgaggagatgtagaatagcgttcttggacacagacgcggcggcgagggcgttgcagcgtgtggtggagattctagcgagtgaacacaagtgggacaagtcgagggagaagcaggagatgcagaaggctaaagagtttcttcagacattcaagtcttccaaaaacgcacagtttcacgatggcaaacacaactga

SEQ ID NO: 108715 - protein, 631 aa, Brassica napus
MSVSSVRRLAVAAAVIAAASGGGAVYHSPSVASSDRAGGGPVLDSLKRTIGDPNASVPSRSAQESALIKATASNPLDVLVIGGGATGSGVALDAATRGLRVGLVEREDFSSGTSSRSTKLIHGGVRYLEKAVFNLDYGQLKLVFHALEERKQLIENAPHLCHALPCMTPCFDWFEVVYYWMGLKMYDLVAGPRLLHLSRYYSAQESAELFPTLARKGKDKSLRGTVVYYDGQMNDSRLNVGLACTAALAGAAVLNHAEVVSLITDEDTKRIVGARVRNNLTGKEFESYAKVVVNAAGPFCDSIRKMVDEDTKPMICPSSGVHIVLPDYYSPEGMGLIVPKTKDGRVVFMLPWLGRTVAGTTDSNTSISPLPEPHEDEIQFILDAISDYLNIKVRRTDVLSAWSGIRPLAMDPTAKSTESISRDHVVFEENPGLVTITGGKWTTYRSMAEDAVNAAIKSGKLSPTNECVTQKLQILGSHGWEPSSFTALAQQYVRMKKTYGGKVVPGAMDTAAAKHLSHAYGSMADRVATIAQEEGLGKRLAHGHPFLEAEVAYCARHEYCESAVDFIARRCRIAFLDTDAAARALQRVVEILASEHKWDKSREKQEMQKAKEFLQTFKSSKNAQFHDGKHN

SEQ ID NO: 108716 - DNA, 25 bp, Artificial sequence
  primer
atgttttcggtaacgagaagaagag

SEQ ID NO: 108717 - DNA, 25 bp, Artificial sequence
  primer
ttagacaccaaacgtcttgatgaag

SEQ ID NO: 108718 - protein, 696 aa, Artificial sequence
  consensus sequence
  Variant (2)..(5): Xaa in position 2 to 5 is any amino acid
  Variant (9)..(10): Xaa in position 9 to 10 is any amino acid
  Variant (12)..(12): Xaa in position 12 is any amino acid
  Variant (14)..(14): Xaa in position 14 is any amino acid
  Variant (16)..(16): Xaa in position 16 is any amino acid
  Variant (19)..(20): Xaa in position 19 to 20 is any amino acid
  Variant (23)..(26): Xaa in position 23 to 26 is any amino acid
  Variant (28)..(28): Xaa in position 28 is any amino acid
  Variant (30)..(31): Xaa in position 30 to 31 is any amino acid
  Variant (34)..(35): Xaa in position 34 to 35 is any amino acid
  Variant (40)..(40): Xaa in position 40 is any amino acid
  Variant (42)..(42): Xaa in position 42 is any amino acid
  Variant (45)..(45): Xaa in position 45 is any amino acid
  Variant (49)..(49): Xaa in position 49 is any amino acid
  Variant (53)..(59): Xaa in position 53 to 59 is any amino acid
  Variant (60)..(66): Xaa in position 60 to 66 is any or no amino acid
  Variant (68)..(72): Xaa in position 68 to 72 is any amino acid
  Variant (75)..(80): Xaa in position 75 to 80 is any amino acid
  Variant (81)..(81): Xaa in position 81 is any or no amino acid
  Variant (85)..(93): Xaa in position 85 to 93 is any amino acid
  Variant (95)..(106): Xaa in position 95 to 106 is any amino acid
  Variant (107)..(126): Xaa in position 107 to 126 is any or no amino acid
  Variant (128)..(130): Xaa in position 128 to 130 is any amino acid
  Variant (133)..(152): Xaa in position 133 to 152 is any amino acid
  Variant (153)..(164): Xaa in position 153 to 164 is any or no amino acid
  Variant (166)..(169): Xaa in position 166 to 169 is any amino acid
  Variant (170)..(178): Xaa in position 170 to 178 is any or no amino acid
  Variant (180)..(180): Xaa in position 180 is any amino acid
  Variant (182)..(183): Xaa in position 182 to 183 is any amino acid
  Variant (184)..(184): Xaa in position 184 is any or no amino acid
  Variant (186)..(186): Xaa in position 186 is any amino acid
  Variant (188)..(191): Xaa in position 188 to 191 is any amino acid
  Variant (192)..(192): Xaa in position 192 is any or no amino acid
  Variant (194)..(194): Xaa in position 194 is any amino acid
  Variant (196)..(203): Xaa in position 196 to 203 is any amino acid
  Variant (205)..(207): Xaa in position 205 to 207 is any amino acid
  Variant (209)..(223): Xaa in position 209 to 223 is any amino acid
  Variant (224)..(240): Xaa in position 224 to 240 is any or no amino acid
  Variant (242)..(242): Xaa in position 242 is any amino acid
  Variant (243)..(245): Xaa in position 243 to 245 is any or no amino acid
  Variant (247)..(260): Xaa in position 247 to 260 is any amino acid
  Variant (261)..(263): Xaa in position 261 to 263 is any or no amino acid
  Variant (266)..(266): Xaa in position 266 is any amino acid
  Variant (268)..(270): Xaa in position 268 to 270 is any amino acid
  Variant (272)..(279): Xaa in position 272 to 279 is any amino acid
  Variant (280)..(320): Xaa in position 280 to 320 is any or no amino acid
  Variant (322)..(322): Xaa in position 322 is any amino acid
  Variant (324)..(340): Xaa in position 324 to 340 is any amino acid
  Variant (341)..(346): Xaa in position 341 to 346 is any or no amino acid
  Variant (348)..(348): Xaa in position 348 is any amino acid
  Variant (350)..(351): Xaa in position 350 to 351 is any amino acid
  Variant (353)..(354): Xaa in position 353 to 354 is any amino acid
  Variant (356)..(360): Xaa in position 356 to 360 is any amino acid
  Variant (361)..(362): Xaa in position 361 to 362 is any or no amino acid
  Variant (367)..(385): Xaa in position 367 to 385 is any amino acid
  Variant (386)..(388): Xaa in position 386 to 388 is any or no amino acid
  Variant (390)..(401): Xaa in position 390 to 401 is any amino acid
  Variant (402)..(405): Xaa in position 402 to 405 is any or no amino acid
  Variant (407)..(412): Xaa in position 407 to 412 is any amino acid
  Variant (414)..(414): Xaa in position 414 is any amino acid
  Variant (418)..(427): Xaa in position 418 to 427 is any amino acid
  Variant (428)..(483): Xaa in position 428 to 483 is any or no amino acid
  Variant (485)..(492): Xaa in position 485 to 492 is any amino acid
  Variant (493)..(499): Xaa in position 493 to 499 is any or no amino acid
  Variant (502)..(505): Xaa in position 502 to 505 is any amino acid
  Variant (509)..(509): Xaa in position 509 is any amino acid
  Variant (511)..(511): Xaa in position 511 is any amino acid
  Variant (514)..(514): Xaa in position 514 is any amino acid
  Variant (517)..(525): Xaa in position 517 to 525 is any amino acid
  Variant (526)..(567): Xaa in position 526 to 567 is any or no amino acid
  Variant (569)..(587): Xaa in position 569 to 587 is any amino acid
  Variant (588)..(620): Xaa in position 588 to 620 is any or no amino acid
  Variant (623)..(652): Xaa in position 623 to 652 is any amino acid
  Variant (653)..(683): Xaa in position 653 to 683 is any or no amino acid
  Variant (685)..(690): Xaa in position 685 to 690 is any amino acid
  Variant (692)..(694): Xaa in position 692 to 694 is any amino acid
DXXXXGGGXXGXGXAXDAXXRGXXXXLXEXXDFXXGTSSXSXKLXHGGXRYLXXXXXXXXXXXXXXVXXXXXERXXXXXXXAPHXXXXXXXXXPXXXXXXXXXXXXXXXXXXXXXXXXXXXXXXXXGXXXYDXXXXXXXXXXXXXXXXXXXXXXXXXXXXXXXXPXXXXXXXXXXXXXLXGXXXYXDXXXXXDXRXXXXXXXXAXXXGXXXXXXXXXXXXXXXXXXXXXXXXXXXXXXXXGXXXXDXXXXXXXXXXXXXXXXXNAXGXXXDXXXXXXXXXXXXXXXXXXXXXXXXXXXXXXXXXXXXXXXXXXXXXXXXXGXHXXXXXXXXXXXXXXXXXXXXXXXDXRXXFXXPXXXXXXXGTTDXXXXXXXXXXXXXXXXXXXXXXLXXXXXXXXXXXXXXXXDXXXXXXGXRPLXXXXXXXXXXXXXXXXXXXXXXXXXXXXXXXXXXXXXXXXXXXXXXXXXXXXXXXXXXXXXXXXXXRXXXXXXXXXXXXXXXGLXXXXGGKXTXYRXMAXXXXXXXXXXXXXXXXXXXXXXXXXXXXXXXXXXXXXXXXXXXXXXXXXXXGXXXXXXXXXXXXXXXXXXXXXXXXXXXXXXXXXXXXXXXXXXXXXXXXXXXXYGXXXXXXXXXXXXXXXXXXXXXXXXXXXXXXXXXXXXXXXXXXXXXXXXXXXXXXXXXXXXXEXXXXXXDXXXRR

SEQ ID NO: 108719 - protein, 47 aa, Artificial sequence
  protein pattern
  Variant (2)..(2): Xaa in position 2 is Ala or Gly
  Variant (4)..(4): Xaa in position 4 is any amino acid
  Variant (5)..(5): Xaa in position 5 is Ser, Thr or Val
  Variant (7)..(11): Xaa in position 7 to 11 is any amino acid
  Variant (12)..(12): Xaa in position 12 is Asp, Glu or Gln
  Variant (13)..(13): Xaa in position 13 is Ala, Gly, Ser or Thr
  Variant (14)..(23): Xaa in position 14 to 23 is any amino acid
  Variant (25)..(26): Xaa in position 25 to 26 is any or no amino acid
  Variant (28)..(28): Xaa in position 28 is any amino acid
  Variant (29)..(29): Xaa in position 29 is Ala, Gly or Ser
  Variant (30)..(30): Xaa in position 30 is any amino acid
  Variant (35)..(35): Xaa in position 35 is any amino acid
  Variant (36)..(36): Xaa in position 36 is Ala or Ser
  Variant (37)..(37): Xaa in position 37 is Ser or Thr
  Variant (39)..(39): Xaa in position 39 is Leu or Met
  Variant (40)..(40): Xaa in position 40 is any amino acid
  Variant (44)..(44): Xaa in position 44 is Ile, Leu or Val
  Variant (47)..(47): Xaa in position 47 is Ile or Leu
GXGXXGXXXXXXXXXXXXXXXXXEXXDXXXGTSSXXXKXXHGGXRYX

SEQ ID NO: 108720 - protein, 20 aa, Artificial sequence
  protein pattern
  Variant (2)..(4): Xaa in position 2 to 4 is any amino acid
  Variant (5)..(5): Xaa in position 5 is any or no amino acid
  Variant (9)..(9): Xaa in position 9 is any amino acid
  Variant (11)..(12): Xaa in position 11 to 12 is any amino acid
  Variant (14)..(14): Xaa in position 14 is any amino acid
  Variant (17)..(19): Xaa in position 17 to 19 is any amino acid
  Variant (20)..(20): Xaa in position 20 is Ile, Leu, Met or Val
LXXXXGGKXTXXRXMAXXXX

SEQ ID NO: 108721 - protein, 15 aa, Artificial sequence
  protein pattern
  Variant (2)..(2): Xaa in position 2 is any amino acid
  Variant (3)..(3): Xaa in position 3 is Ile, Leu or Val
  Variant (5)..(11): Xaa in position 5 to 11 is any amino acid
FXXPXXXXXXXGTTD

SEQ ID NO: 108722 - protein, 11 aa, Artificial sequence
  protein pattern
  Variant (2)..(2): Xaa in position 2 is Ile or Val
  Variant (3)..(3): Xaa in position 3 is any amino acid
  Variant (4)..(4): Xaa in position 4 is Ala, Gly or Ser
  Variant (5)..(5): Xaa in position 5 is Ala, Ser, Thr or Val
  Variant (6)..(6): Xaa in position 6 is Phe, Trp or Tyr
  Variant (7)..(7): Xaa in position 7 is Ala, Ser, Thr or Val
  Variant (9)..(9): Xaa in position 9 is Gly, Ile, Leu or Val
DXXXXXXGXRP

SEQ ID NO: 108723 - DNA, 1110 bp, Saccharomyces cerevisiae
  CDS (1)..(1110)
atgaatcagagcgatagcagcttgatggatttaccactggagatacatttatcattactagagtacgtgcctaatgaacttcgtgctgtcaataaatacttctacgttttgcataaccacagctataaggagaagagtttggcgtggatagctgaggacaactatatatgggccgttgtcaaacattcattatgtttatatgtcaagagtttggacccacttcgacagcatgccagagaaatcattcaagaaacgaaggaaccaggttttaatgtgccactgtgcatgactaaatacatcgcagattcttggtatattgtatacaatgcgctgcaatatcctggaaagataattaatatgggatgggacaaatataccaaaagtcaagattcaaatggttctgattctaccagtaactttaatagtcggcccaaggaaagaactcttatgcagtcgttgacagctttacctgttaacttttggtccaggaggaaggacgagcctacaccggtaaacgtttggttttatgtaaaaaatgcgcacgttgccagatacataccgaaaattattacggaaataggcatatgcaactatgggccgaagcagatcgtggcaagtgcaggatatatcaacgaattgataacatctgaaggaatatactgtgttaacctaggccaccttcccaggctatacgatgagcaaatttttgaaggcactggaacgacacatcttcccctggaactgaaagctatcgacaggacagattcagatgtttgtatcaatggtgatttagttctactcggttatgactttattccatatcagatatcgaagccgtggttactctttagaatcgaacccgtaaatagcattgaagcaatcttcaactatagtgaatgttctttttcataccagtttgcatggagtttggcctgcttacaatctgaagagaaaatttcatttcctagagacacgataattgggcacggtttaccttacaagccatccaaattgataagaattttcgtctacaagcatccggaacaaaagcaagatcttggtcaagaaatagcattgcccaactggaataccccttatcttcgaagatga

SEQ ID NO: 108724 - protein, 369 aa, Saccharomyces cerevisiae
MNQSDSSLMDLPLEIHLSLLEYVPNELRAVNKYFYVLHNHSYKEKSLAWIAEDNYIWAVVKHSLCLYVKSLDPLRQHAREIIQETKEPGFNVPLCMTKYIADSWYIVYNALQYPGKIINMGWDKYTKSQDSNGSDSTSNFNSRPKERTLMQSLTALPVNFWSRRKDEPTPVNVWFYVKNAHVARYIPKIITEIGICNYGPKQIVASAGYINELITSEGIYCVNLGHLPRLYDEQIFEGTGTTHLPLELKAIDRTDSDVCINGDLVLLGYDFIPYQISKPWLLFRIEPVNSIEAIFNYSECSFSYQFAWSLACLQSEEKISFPRDTIIGHGLPYKPSKLIRIFVYKHPEQKQDLGQEIALPNWNTPYLRR

SEQ ID NO: 108725 - DNA, 24 bp, Artificial sequence
  primer
atgaatcagagcgatagcagcttg

SEQ ID NO: 108726 - DNA, 25 bp, Artificial sequence
  primer
tcatcttcgaagataaggggtattc

SEQ ID NO: 108727 - DNA, 741 bp, Arabidopsis thaliana
  CDS (1)..(741)
atggagggtggtgcgagtaatgaagtagcagagagcagcaagaagatagggagagggaagatagagataaagaggatagagaacactacgaatcgtcaagtcactttctgcaaacgacgcaatggtttactcaagaaagcttatgagctctctgtcttgtgtgacgctgaggttgctcttgtcatcttctccactcgaggccgtctctacgagtacgccaacaacagtgtgagaggaacaatagaaaggtacaagaaagcttgctccgacgccgttaaccctccgaccatcaccgaagctaatactcagtactatcagcaagaggcgtctaaactccggagacagattcgggacattcagaatttgaacagacacattcttggtgaatctcttggttccttgaactttaaggaactcaagaaccttgaaagtaggcttgagaaaggaatcagtcgtgtccgatccaagaagcacgagatgttagttgcagagattgaatacatgcaaaaaagggaaatcgagctgcaaaacgataacatgtatctccgctccaagattactgaaagaacaggtctacagcaacaagaatcgagtgtgatacatcaagggacagtttacgagtcgggtgttacttcttctcaccagtcggggcagtataaccggaattatattgcggttaaccttcttgaaccgaatcagaattcctccaaccaagaccaaccacctctgcaacttgtttga

SEQ ID NO: 108728 - protein, 246 aa, Arabidopsis thaliana
MEGGASNEVAESSKKIGRGKIEIKRIENTTNRQVTFCKRRNGLLKKAYELSVLCDAEVALVIFSTRGRLYEYANNSVRGTIERYKKACSDAVNPPTITEANTQYYQQEASKLRRQIRDIQNLNRHILGESLGSLNFKELKNLESRLEKGISRVRSKKHEMLVAEIEYMQKREIELQNDNMYLRSKITERTGLQQQESSVIHQGTVYESGVTSSHQSGQYNRNYIAVNLLEPNQNSSNQDQPPLQLV

SEQ ID NO: 108729 - DNA, 1143 bp, Eucalyptus globulus
  CDS (154)..(909)
cggccgcctctctctctctctctctctctctctctctggttcaagaacacaccaaagaagagagacccatgttaagctgttagtatctggagtcttattcttttcatatttttctccaaagcatcctcgtccccaaggtttttttgcggcagtatggagttcccgagtgaattttcagaggcctcttcacagaagagaatcggggggagagggaaaatagagatcaaacggatcgagaacacgacgaaccggcaggtcaccttttgtaaacgccggaacgggttgttgaagaaggcttatgagctatcggtgttgtgcgatgctgaagtggcgcttattgtcttctcgagccgtggcaggctctatgaatatgctaacaacagtgtcagaggaacaattgagaggtacaagaaagcaagcagtgattcctcacatccacagtccgtttctgaagtgaacactcagttttatcagcaagaagcatccaagcttcggagacagataagagaaatccaggtctcaaataggcatattctaggtgagggtataagtgatttgagcttcaaggatctcaagaatctcgagagcaaattagagaaatcgatcagccgagttagatcaaagaagaatgagatgctttttgccgagattgagtacatgcagaagagggaaattgagctgcaaaatgataacatgtatctgagagcaaagatagctgagaacgagagagcacaacagcagcagcagcaagggagtgatcatcacttcaacatgccgggatcgtcgtcggtgtacgaggcgctgccgtctcagcctgcatacgatcgcaacttcctgcaagtcaatgtcctggaaccaaatcaccaatcttattctcgatccgaccacactgccctccaactcgtctaattaaagctcagttaatatgtagcactagcaactggacgtattggcactctagattatgctttttaatatgctagagttagttgaaagaggaatcaatgaactggggagagacccgcatgatgagtttcgcctaaacagtggaagaactctctgatatttctcttcatcactcttcaaactcttctcatgaatcgtgttgtacaagggttattgcaatttttatatagtacttaa

SEQ ID NO: 108730 - protein, 251 aa, Eucalyptus globulus
MEFPSEFSEASSQKRIGGRGKIEIKRIENTTNRQVTFCKRRNGLLKKAYELSVLCDAEVALIVFSSRGRLYEYANNSVRGTIERYKKASSDSSHPQSVSEVNTQFYQQEASKLRRQIREIQVSNRHILGEGISDLSFKDLKNLESKLEKSISRVRSKKNEMLFAEIEYMQKREIELQNDNMYLRAKIAENERAQQQQQQGSDHHFNMPGSSSVYEALPSQPAYDRNFLQVNVLEPNHQSYSRSDHTALQLV

SEQ ID NO: 108731 - DNA, 806 bp, Lilium sp
  CDS (28)..(762)
gcgagactggagccggacaagggaaagatgggtaggggtaagatagagatcaagaggatcgagaacaccaccaaccggcaggtcaccttctgcaagcgccgcaatggcctgctcaagaaggcctatgagctctcagtgttgtgtgatgcagaggtcgctcttatcgtcttctccacccgcggccgtctctatgagtatgccaacaatagtgtgaaagggactatcgaacgttacaagaaagcaagcagtgatgcgttcaatacaggatctgtctcggaagctaatgcacagtactaccaacaagaatcatccaaactgcgtaatcaaattgttagcttgcagaatgcgcacaggagcatgttgggtgagtctattggctccatgggactcaaggaactgaaatacatggagaaaaagctcgaaaatggtatcaataaaataaggacaaagaagaatgagttgctatttgctgagattgagtacatgcagaaaagggaggcagagttgcagaacaatagtatgttccttcgtactaagattgctgaaaatgagaggtcacaacagcaacaaatggacatggagagatcacagcagcaacacatggacatggacagatcgcatcagcgccacttggaaatgctgcccacaacaagcgcgttcgaaaccatgccgacattcgattcgcggaacttcttcgatattaatctaattgaagcacatcaccactatcagcagcagcagactgccctccaactaggttaaatgtgatggaatgattggcaactaaagggcgcaactgaatcagg

SEQ ID NO: 108732 - protein, 244 aa, Lilium sp
MGRGKIEIKRIENTTNRQVTFCKRRNGLLKKAYELSVLCDAEVALIVFSTRGRLYEYANNSVKGTIERYKKASSDAFNTGSVSEANAQYYQQESSKLRNQIVSLQNAHRSMLGESIGSMGLKELKYMEKKLENGINKIRTKKNELLFAEIEYMQKREAELQNNSMFLRTKIAENERSQQQQMDMERSQQQHMDMDRSHQRHLEMLPTTSAFETMPTFDSRNFFDINLIEAHHHYQQQQTALQLG

SEQ ID NO: 108733 - DNA, 720 bp, Arabidopsis thaliana
  CDS (1)..(720)
atgggaaggggcaagatcgcgattaagaggatcaataactctacgagccgtcaggttacgttctcgaagcgaaggaatggattgttgaagaaagctaaggagcttgcgattctctgcgatgctgaggttggtgtcatcatcttctccagcaccggtaggctctacgatttctccagctccagcatgaaatcggtcatagagagatacagcgatgccaaaggagaaaccagttcagaaaatgatcccgcttcagaaattcaggaaatgtatatagtaactctggaaaagtatgcatattcagaagagcttgtacttgacaggcaaatgatgggggaggagctctctggactaagtgtagaagctttacagaatttggaaaatcagcttgaattgagccttcgtggcgttcgaatgaaaaaggatcaaatgttaatcgaagaaatacaagtacttaaccgagaggggaatctcgttcaccaagagaatttagacctccacaagaaagtaaacctaatgcaccaacagaacatggaactacatgaaaaggtttcagaggtcgagggtgtgaaaatcgcaaacaagaattctcttctcacaaatggtctagacatgagagatacctcgaacgaacatgtccatcttcagctcagccaaccgcagcatgatcatgagacgcattcaaaagctatccaactcaactatttttccttcattgcataa

SEQ ID NO: 108734 - protein, 239 aa, Arabidopsis thaliana
MGRGKIAIKRINNSTSRQVTFSKRRNGLLKKAKELAILCDAEVGVIIFSSTGRLYDFSSSSMKSVIERYSDAKGETSSENDPASEIQEMYIVTLEKYAYSEELVLDRQMMGEELSGLSVEALQNLENQLELSLRGVRMKKDQMLIEEIQVLNREGNLVHQENLDLHKKVNLMHQQNMELHEKVSEVEGVKIANKNSLLTNGLDMRDTSNEHVHLQLSQPQHDHETHSKAIQLNYFSFIA

SEQ ID NO: 108735 - DNA, 609 bp, Arabidopsis thaliana
  CDS (1)..(609)
atggtgagaggaaagatcgaaatcaagaagattgagaacgtgacaagtagacaagtcacgttttcgaagcgaaggagtggtctctttaagaaggctcatgagctttctgttctatgtgatgctcaagtggcagctatgatcttctctcagaaaggaagattatatgaattcgctagctccgatatcaggaacacgataaagcgatacgctgagtacaagagagagtattttgttgcagaaactcatcctatagagcaatacgtgcaggggctaaagaaggaaatggtgacaatggtgaaaaagattgaagtgcttgaagtccataaccggaagatgatgggacaaagtttggattcttgttcggtaaaagaactttcagagatagccacacagatagagaaaagccttcatatggttagattaagaaaggctaagttatatgaagatgagctacagaaactaaaagccaaggagagggaactcaaggacgagagagtcaggctttctctaaaggttggagaaagaccaatggggatgccgtcgggaagcaaagagaaagaggatgttgaaactgatctatttattggatttctgaagaaccgaccataa

SEQ ID NO: 108736 - protein, 202 aa, Arabidopsis thaliana
MVRGKIEIKKIENVTSRQVTFSKRRSGLFKKAHELSVLCDAQVAAMIFSQKGRLYEFASSDIRNTIKRYAEYKREYFVAETHPIEQYVQGLKKEMVTMVKKIEVLEVHNRKMMGQSLDSCSVKELSEIATQIEKSLHMVRLRKAKLYEDELQKLKAKERELKDERVRLSLKVGERPMGMPSGSKEKEDVETDLFIGFLKNRP

SEQ ID NO: 108737 - DNA, 771 bp, Arabidopsis thaliana
  CDS (1)..(771)
atggggagaggaaggattgagattaagaagattgagaatatcaacagtcgtcaagtcactttctctaagagacgaaacggtttgatcaagaaggctaaagagctttcgattctctgtgacgccgaggttgctcttatcatcttctccagcaccggcaagatttacgatttctccagcgtctgtatggagcaaattctttctagatatggatacactactgcgtccactgagcataaacaacaaagagaacaccaacttctaatttgtgcttcacatggaaatgaagctgtgttgcgaaatgatgattctatgaagggggaacttgaaagattacagcttgcaattgagagacttaagggtaaggagcttgaaggtatgagtttcccggatcttatttctcttgaaaaccagttgaacgagagcttgcatagtgtcaaggatcaaaagacacaaatcctgctcaaccagattgagagatccaggatacaggagaaaaaagcattggaagaaaaccaaatcttgcgcaaacaggttgagatgttggggagaggttcaggaccaaaagtgttgaatgaaaggcctcaagattctagcccagaagccgatcccgagagctcttcatcagaagaggatgagaatgacaacgaggagcaccattccgacacttccttgcagttggggttgtcgtcgacggggtattgcacaaagagaaagaagccgaagatcgaactggtctgcgataactctgggagtcaagtggcttctgattga

SEQ ID NO: 108738 - protein, 256 aa, Arabidopsis thaliana
MGRGRIEIKKIENINSRQVTFSKRRNGLIKKAKELSILCDAEVALIIFSSTGKIYDFSSVCMEQILSRYGYTTASTEHKQQREHQLLICASHGNEAVLRNDDSMKGELERLQLAIERLKGKELEGMSFPDLISLENQLNESLHSVKDQKTQILLNQIERSRIQEKKALEENQILRKQVEMLGRGSGPKVLNERPQDSSPEADPESSSSEEDENDNEEHHSDTSLQLGLSSTGYCTKRKKPKIELVCDNSGSQVASD

SEQ ID NO: 108739 - DNA, 663 bp, Arabidopsis thaliana
  CDS (1)..(663)
atggcgagagagaagataaggataaagaagattgataacataacagcgagacaagttactttctcaaagagaagaagaggaatcttcaagaaagccgatgaactttcagttctttgcgatgctgatgttgctctcatcatcttctctgccaccggaaagctcttcgagttctccagctcaagaatgagagacatattgggaaggtatagtcttcatgcaagtaacatcaacaaattgatggatccaccttctactcatctccggcttgagaattgtaacctctccagactaagtaaggaagtcgaagacaaaaccaagcagctacggaaactgagaggagaggatcttgatggattgaacttagaagagttgcagcggctggagaaactacttgaatccggacttagccgtgtgtctgaaaagaagggcgagtgtgtgatgagccaaattttctcacttgagaaacggggatcggaattggtggatgagaataagagactgagggataaactagagacgttggaaagggcaaaactgacgacgcttaaagaggctttggagacagagtcggtgaccacaaatgtgtcaagctacgacagtggaactccccttgaggatgactccgacacttccctgaagcttgggcttccatcttgggaatga

SEQ ID NO: 108740 - protein, 220 aa, Arabidopsis thaliana
MAREKIRIKKIDNITARQVTFSKRRRGIFKKADELSVLCDADVALIIFSATGKLFEFSSSRMRDILGRYSLHASNINKLMDPPSTHLRLENCNLSRLSKEVEDKTKQLRKLRGEDLDGLNLEELQRLEKLLESGLSRVSEKKGECVMSQIFSLEKRGSELVDENKRLRDKLETLERAKLTTLKEALETESVTTNVSSYDSGTPLEDDSDTSLKLGLPSWE

SEQ ID NO: 108741 - DNA, 624 bp, Arabidopsis thaliana
  CDS (1)..(624)
atggtgagagggaagatcgagatcaagaagattgagaacgtgacgagcagacaagtcacgttctcgaagcgaagaagcggtctatttaagaaggctcatgagctttcggttctatgcgatgctcaagtagccgccattgtcttttctcagagcggaagattacacgaatactctagctcccagatggagaagattatagatagatatggcaagtttagtaatgccttctatgtggcagagaggcctcaagtagaacgatacttgcaggagctgaagatggaaattgatagaatggtgaaaaagattgatctccttgaagttcatcaccgtaagctgttggggcaaggtttggattcgtgttcagtgacagaacttcaagagattgacactcaaattgagaaaagccttcgtattgtcaggtcaagaaaggctgagttatatgcagatcaactgaaaaagctaaaagaaaaggagagggagctcttgaacgagagaaaaaggctgcttgaagaggtaaatatgcaccactcatcaaagggtaatactgaaggtggtcacagaaccaaacattcatcagaggttgaaaccgacctatttatcggattgcccgtgactcggctataa

SEQ ID NO: 108742 - protein, 207 aa, Arabidopsis thaliana
MVRGKIEIKKIENVTSRQVTFSKRRSGLFKKAHELSVLCDAQVAAIVFSQSGRLHEYSSSQMEKIIDRYGKFSNAFYVAERPQVERYLQELKMEIDRMVKKIDLLEVHHRKLLGQGLDSCSVTELQEIDTQIEKSLRIVRSRKAELYADQLKKLKEKERELLNERKRLLEEVNMHHSSKGNTEGGHRTKHSSEVETDLFIGLPVTRL

SEQ ID NO: 108743 - DNA, 768 bp, Arabidopsis thaliana
  CDS (1)..(768)
atgggaaggggtagggttgaattgaagaggatagagaacaagatcaatagacaagtgacattctcgaaaagaagaactggtcttttgaagaaagctcaggagatctctgttctttgtgatgccgaggtttcccttattgtcttctcccataagggcaaattgttcgagtactcctctgaatcttgcatggagaaggtactagaacgctacgagaggtattcttacgccgagagacagctgattgcacctgactctcacgttaatgcacagacgaactggtcaatggagtatagcaggcttaaggccaagattgagcttttggagagaaaccaaaggcattatctgggagaagagttggaaccaatgagcctcaaggatctccaaaatctggagcagcagcttgagactgctcttaagcacattcgctccagaaaaaatcaactcatgaatgagtccctcaaccacctccaaagaaaggagaaggagatacaggaggaaaacagcatgcttaccaaacagataaaggagagggaaaacatcctaaggacaaaacaaacccaatgtgagcagctgaaccgcagcgtcgacgatgtaccacagccacaaccatttcaacacccccatctttacatgatcgctcatcagacttctcctttcctaaatatgggtggtttgtaccaagaagaagaccaaacggcgatgaggaggaacaatctggatctgactcttgaacccatttacaattaccttggctgttacgccgcttga

SEQ ID NO: 108744 - protein, 255 aa, Arabidopsis thaliana
MGRGRVELKRIENKINRQVTFSKRRTGLLKKAQEISVLCDAEVSLIVFSHKGKLFEYSSESCMEKVLERYERYSYAERQLIAPDSHVNAQTNWSMEYSRLKAKIELLERNQRHYLGEELEPMSLKDLQNLEQQLETALKHIRSRKNQLMNESLNHLQRKEKEIQEENSMLTKQIKERENILRTKQTQCEQLNRSVDDVPQPQPFQHPHLYMIAHQTSPFLNMGGLYQEEDQTAMRRNNLDLTLEPIYNYLGCYAA

SEQ ID NO: 108745 - DNA, 651 bp, Arabidopsis thaliana
  CDS (1)..(651)
atgggaagaggaaagatagaaataaagaggatagagaactcaacaaatcgacaagtgacgttttgcaaaagaagaaatggacttctgaagaaagcctatgagctttcggtcctttgcgatgcagaagttgcgctcattgttttctccactcgtggccgtctctatgaatacgccaataacaacataagatcaaccattgagaggtacaagaaagcttgttctgatagcaccaacactagcactgtccaagaaatcaatgccgcgtactatcaacaagaatctgctaagctgagacaacagatccaaacgattcaaaactccaacaggaatctgatgggagactctttgagttccttaagtgtcaaggaactaaaacaagttgagaatcgccttgagaaagctatctctaggatcaggtccaagaaggagattgagcttgacaatgagaacatctatctaagaactaaggtagcagaagtggagaggtatcaacaacaccatcatcaaatggttagtggttcagagattaatgcaattgaagctttagcctcacgcaattactttgctcatagcattatgactgctggttctggatctggtaatggaggttcttactctgatcccgacaagaaaattcttcatctcggataa

SEQ ID NO: 108746 - protein, 216 aa, Arabidopsis thaliana
MGRGKIEIKRIENSTNRQVTFCKRRNGLLKKAYELSVLCDAEVALIVFSTRGRLYEYANNNIRSTIERYKKACSDSTNTSTVQEINAAYYQQESAKLRQQIQTIQNSNRNLMGDSLSSLSVKELKQVENRLEKAISRIRSKKEIELDNENIYLRTKVAEVERYQQHHHQMVSGSEINAIEALASRNYFAHSIMTAGSGSGNGGSYSDPDKKILHLG

SEQ ID NO: 108747 - DNA, 774 bp, Arabidopsis thaliana
  CDS (1)..(774)
atgggaagagggaaagttgagctgaagaggatagagaacaagatcaatagacaagttacttttgcaaagagaagaaatggtttgctcaagaaggcttatgagctttctgtcctttgtgatgctgagattgctcttctcattttctctaaccgtggcaagctctacgaattctgcagcagccctagtggtatggcgaggacggttgataagtatagaaaacatagttatgcaacaatggatccaaatcaatcagctaaagacttgcaggataagtatcaagactacttgaagcttaaatcaagagttgagatccttcaacattcacaaaggcatttgctaggtgaagagctatccgagatggatgtgaatgagcttgagcatctcgaacgccaagtagatgcatcactaagacaaataagatctaccaaggctcggtctatgcttgatcaactatctgacctcaaaactaaggaggaaatgttattggaaaccaatagagatcttaggagaaagttggaggacagtgatgcagcacttactcaatcgttttggggaagttctgctgcagaacaacaacaacaacatcaacaacagcaacaaggcatgagctcttatcaatcaaaccctccaattcaggaagcaggtttcttcaagcctctacaaggcaatgtagcattgcaaatgagtcattacaatcacaatcctgcaaatgcaaccaactctgcaacaacatcacagaatgttaatggattcttccctggatggatggtctga

SEQ ID NO: 108748 - protein, 257 aa, Arabidopsis thaliana
MGRGKVELKRIENKINRQVTFAKRRNGLLKKAYELSVLCDAEIALLIFSNRGKLYEFCSSPSGMARTVDKYRKHSYATMDPNQSAKDLQDKYQDYLKLKSRVEILQHSQRHLLGEELSEMDVNELEHLERQVDASLRQIRSTKARSMLDQLSDLKTKEEMLLETNRDLRRKLEDSDAALTQSFWGSSAAEQQQQHQQQQQGMSSYQSNPPIQEAGFFKPLQGNVALQMSHYNHNPANATNSATTSQNVNGFFPGWMV

SEQ ID NO: 108749 - DNA, 633 bp, Arabidopsis thaliana
  CDS (1)..(633)
atggttagaggaaagatagagatgaagaaaatagaaaacgcaacgagtagacaagtgactttctcaaaaagaagaaatggtttgttgaagaaagcttatgagctctcagtactctgcgatgctcaactctctctcatcatcttctcccagagaggaaggctttatgaattctctagctctgatatgcagaagacgatcgaacgctaccgcaagtacacaaaagatcatgaaaccagcaatcacgactcacaaattcacttgcagcaattgaaacaagaagcaagccacatgataacaaagattgaactccttgagtttcacaagcggaagctattgggacaaggaattgcttcttgttctctagaagagcttcaagaaatcgatagtcaactccaaagaagtctgggaaaggtccgagaaagaaaggctcaattgttcaaggagcagttggagaaactaaaagcaaaggagaaacaattgttagaagagaacgtcaagttacatcaaaagaatgttattaatccatggagaggatcatcgactgatcagcagcaagagaaatacaaagttatagatttgaatttggaagttgaaactgacttattcatcggtttgccaaatagaaactgctag

SEQ ID NO: 108750 - protein, 210 aa, Arabidopsis thaliana
MVRGKIEMKKIENATSRQVTFSKRRNGLLKKAYELSVLCDAQLSLIIFSQRGRLYEFSSSDMQKTIERYRKYTKDHETSNHDSQIHLQQLKQEASHMITKIELLEFHKRKLLGQGIASCSLEELQEIDSQLQRSLGKVRERKAQLFKEQLEKLKAKEKQLLEENVKLHQKNVINPWRGSSTDQQQEKYKVIDLNLEVETDLFIGLPNRNC

SEQ ID NO: 108751 - DNA, 564 bp, Arabidopsis thaliana
  CDS (1)..(564)
atgggaagagggaaagttgagctgaagaggatagagaacaagatcaatagacaagttacttttgcaaagagaagaaatggtttgctcaagaaggcttatgagctttctgtcctttgtgatgctgagattgctcttctcattttctctaaccgtggcaagctctacgaattctgcagcagccctagtggtatggcgaggacggttgataagtatagaaaacatagttatgcaacaatggatccaaatcaatcagctaaagacttgcaggataagtatcaagactacttgaagcttaaatcaagagttgagatccttcaacattcacaaaggcatttgctaggtgaagagctatccgagatggatgtgaatgagcttgagcatctcgaacgccaagtagatgcatcactaagacaaataagatctaccaaggctcggtctatgcttgatcaactatctgacctcaaaactaaggaggaaatgttattggaaaccaatagagatcttaggagaaaggtagctatcggaatcttttaccgcaagaaactgaaaccatttgtcatttga

SEQ ID NO: 108752 - protein, 187 aa, Arabidopsis thaliana
MGRGKVELKRIENKINRQVTFAKRRNGLLKKAYELSVLCDAEIALLIFSNRGKLYEFCSSPSGMARTVDKYRKHSYATMDPNQSAKDLQDKYQDYLKLKSRVEILQHSQRHLLGEELSEMDVNELEHLERQVDASLRQIRSTKARSMLDQLSDLKTKEEMLLETNRDLRRKVAIGIFYRKKLKPFVI

SEQ ID NO: 108753 - DNA, 663 bp, Ipomoea batatas
  CDS (1)..(663)
atggtgagggggaagacgcagatgcggcgtatagagaacgccacaagcaggcaggtgactttctccaagaggagaaatggtctgctcaagaaggcctttgagctgtctgtgctgtgtgatgctgaggttgctcttatcatcttctctcccaggggcaagctctatgagtttgctagctcaagcatgagggagattatagagcgatatcgcaggcatacagcagatgttcaatctgagaacccatcagtggaacaagaacaggacatgcagcatttgcagcatgaaactgaatgcctggcaaagaaaatagattaccttgaagcatcgaagcggaggcttttgggggaagatttgggagcgtgtgccatggaagagttacaacagatagagcaacagctggagaggagcgtgaacatcatccgagctagaaagatggaagtctacgcagaacagattaagcggttaagagataaggaagaaagcctaaaagctgaaaatgcagtgctctgggataagtataatgggctgcagccacagcaagtctcaaacgaagggaatgagaaggagagcgcagagggcagtgaaaaatcagacgttgagactgaattattcattggactgccagagagcagggcaaagcctgtgctatctaatgaaaggtga

SEQ ID NO: 108754 - protein, 220 aa, Ipomoea batatas
MVRGKTQMRRIENATSRQVTFSKRRNGLLKKAFELSVLCDAEVALIIFSPRGKLYEFASSSMREIIERYRRHTADVQSENPSVEQEQDMQHLQHETECLAKKIDYLEASKRRLLGEDLGACAMEELQQIEQQLERSVNIIRARKMEVYAEQIKRLRDKEESLKAENAVLWDKYNGLQPQQVSNEGNEKESAEGSEKSDVETELFIGLPESRAKPVLSNER

SEQ ID NO: 108755 - DNA, 732 bp, Capsicum annuum
  CDS (1)..(732)
atgggtagagggaaagtagaattgaagagaattgataataaaataaatagacaagtgacttttgcaaagagaagaaatggactcctcaagaaagcttatgaactttctgttctttgtgatgctgaaattgctcttattattttctctagtcgtggcaagctttatgaattttgcagcagctcaagtatgtccaagacattggagagataccacaaacataattatggtgcacttgaaggaacccaaccatcagcagattcacagaacaactaccaagagtatttgaagcttaaaacaagagtggaagtgttacaacaatctcaaaggcatatgcttggagaggatttgggagaattgaacacaaaagacttggaacaacttgaacgtcaattggattcatcattgaggcaaataaggtcaactaagacacaacacatgtttgatcaacttgctgaacttcatcaaaaggaacaatctcttactgaaatgaacaaatctttgaagacaaagttggaagaacttggtgttgcctttcaaacatcatggcactctgggcctggggagcaaagtgtacaatatagacagcagcagcctgagggattttttcaacatgtggattgcaataatcatacagtgcctaatatgaggtacggatacgataatgtgccaccggaatatgcagccccatcaacccaagatgctcttggagttgtacctggatggatgctttga

SEQ ID NO: 108756 - protein, 243 aa, Capsicum annuum
MGRGKVELKRIDNKINRQVTFAKRRNGLLKKAYELSVLCDAEIALIIFSSRGKLYEFCSSSSMSKTLERYHKHNYGALEGTQPSADSQNNYQEYLKLKTRVEVLQQSQRHMLGEDLGELNTKDLEQLERQLDSSLRQIRSTKTQHMFDQLAELHQKEQSLTEMNKSLKTKLEELGVAFQTSWHSGPGEQSVQYRQQQPEGFFQHVDCNNHTVPNMRYGYDNVPPEYAAPSTQDALGVVPGWML

SEQ ID NO: 108757 - DNA, 729 bp, Elaeis guineensis var
  CDS (1)..(729)
atggtgcgggggaaagtggagctgaagagaatcgagaacaagatcaatcgccaggtgaccttcgcgaagcggcggaatgggctcctcaagaaggcctacgagctctccgtgctctgcgacgccgaggttgctctcatcatcttctccaaccgcgggaagctttacgagttctgcagcagctccagtatgatgaagacacttgaaaggtatcaaaaatgcaactatggtgctccggagactaatattatatcaagagagactcagagtagtcagcaggagtacttgaaactaaaagcacgtgctgaagccttacagagatcgcaaagaaatctcctcggtgaggacttgggcccactcagcagcaaggagcttgagcagcttgagcggcaacttgatgcatcgttaaagcaaatcagatcaacacggacccaatacatgcttgatcagcttgcagatcttcaacgaaaggaacaaatgctatgtgaggccaataaaagtctaaggcgaaggttggaggaaagtaaccaggctggtcagcagcaagtttgggatcccactgctcatgcagtaggctatggccggcagccacctcaaccacagagcgatggattctaccaacagatagatagtgaacctactctccaaatcgggtatcctccagaacaaataacaatcgcagcagcacccgggccaagtgtgaatacttatatgccaggatggcttgcataa

SEQ ID NO: 108758 - protein, 242 aa, Elaeis guineensis var
MVRGKVELKRIENKINRQVTFAKRRNGLLKKAYELSVLCDAEVALIIFSNRGKLYEFCSSSSMMKTLERYQKCNYGAPETNIISRETQSSQQEYLKLKARAEALQRSQRNLLGEDLGPLSSKELEQLERQLDASLKQIRSTRTQYMLDQLADLQRKEQMLCEANKSLRRRLEESNQAGQQQVWDPTAHAVGYGRQPPQPQSDGFYQQIDSEPTLQIGYPPEQITIAAAPGPSVNTYMPGWLA

SEQ ID NO: 108759 - DNA, 726 bp, Crocus sativus
  CDS (1)..(726)
atgggaagaggaagagttgagttgaagaggatcgagaacaaaatcaacagacaagtgaccttctccaagaggaggaatggccttctcaagaaggcttacgagctctcggtgctctgcgatgctgaggtggcattaatcatcttctccagccgcggcaaactctacgagttcggtagcgctggtacacctaaaacacttgagcgataccaacgttgttgttacacatctcaggactccaccattgctgatcgagaaacacagagctggtatcaggaagtatctaagttgaaggcaaaatttgagtctctccagcgctcccagaggcatttgctcggagaagaccttggaccattgagtgtgaaagaattgcaacaactagaacgccaacttgaatcttctctgtcacaagccaggcagagaaagacacagattatgctggaccaaatggaagaacttcgaaagaaggagcgccatcttggagaacttaataaccagcttaaaaacaagcttgagacagaaggaagcacatttagagccattcaaggatcctgggagtctaatggtggtgttggaaacaatgcattccctttccatccttctcaatccagcgccatggactgtgaacccactctccagattgggtatcatcaccttgttcaacctgaaactgtacttccaagaatttcggagggcgagaacaatttcatggtgggttgggttctttga

SEQ ID NO: 108760 - protein, 241 aa, Crocus sativus
MGRGRVELKRIENKINRQVTFSKRRNGLLKKAYELSVLCDAEVALIIFSSRGKLYEFGSAGTPKTLERYQRCCYTSQDSTIADRETQSWYQEVSKLKAKFESLQRSQRHLLGEDLGPLSVKELQQLERQLESSLSQARQRKTQIMLDQMEELRKKERHLGELNNQLKNKLETEGSTFRAIQGSWESNGGVGNNAFPFHPSQSSAMDCEPTLQIGYHHLVQPETVLPRISEGENNFMVGWVL

SEQ ID NO: 108761 - DNA, 726 bp, Brassica rapa subsp
  CDS (1)..(726)
atggcgagagaaaagattcagatcaggaaaatcgacaacgcgacggcgagacaagtaactttctccaaacgaagaagaggtcttttcaaaaaagctgaagagctctccgttctctgcgacgctgatgttgccctcatcgtcttctcttccaccggaaagctctttgagttttgtagctccagcatgagggaagtattagagaggcataatttgcagtcaaagaacttggagaagcttgatcagccatctcttgagttacagctggttgagaacagtgacaattcccggttgagcaaagaaattgcagacaagagccaccaactaaggcaaatgagaggagaggaacttcaaggacttaacatagaagagctgcaacagctggaaaaggcccttgaagctggtttgacgcgcgtgattgaaacaaagagtgagaagattatgagtgagatcagtgaccttcaaagaaagggaatgaaattgatggatgagaacaagcggctaaggcagcatggaacacaactaacagaagagaacgagcgactaggcaagcaaatatataataatatgcatgaaagatacggtggtgttgagtcggagaagaccgccgtgtacgaggaagggcagtcgtcagagtccattactaacgccggaaactccaccggcgctcctgttgactccgagagctccgatacctctcttaggctcggcttaccgtatggtggttag

SEQ ID NO: 108762 - protein, 241 aa, Brassica rapa subsp
MAREKIQIRKIDNATARQVTFSKRRRGLFKKAEELSVLCDADVALIVFSSTGKLFEFCSSSMREVLERHNLQSKNLEKLDQPSLELQLVENSDNSRLSKEIADKSHQLRQMRGEELQGLNIEELQQLEKALEAGLTRVIETKSEKIMSEISDLQRKGMKLMDENKRLRQHGTQLTEENERLGKQIYNNMHERYGGVESEKTAVYEEGQSSESITNAGNSTGAPVDSESSDTSLRLGLPYGG

SEQ ID NO: 108763 - DNA, 750 bp, Beta vulgaris
  CDS (1)..(750)
atggaattcccaacccaaacaatggaaggctctccatcaagccaaagaaagatgggaagaggtaaaattgagatcaagaggatagaaaacacaacgaaccgacaagttaccttctgcaagagaaggaatggattgctgaagaaagcctatgaattatcagtcttgtgtgatgctgaagttgctcttattgtcttttcaagccgaggccggctctatgagtatgctaatcatagctgcagtgtcaagggcacaattgataggtacaagaaagcatgctctgaccaatccggtgctggctcagttgctgaagccaatgctcagtattatcagcaagaagctgcaaagctgcggaaccaaattcgcactgcaacagagaacaacaggttgctttccaggcacatgatgggcgaagggctgagcagtttaagtatgaaggagctgaagaaccttgagactaaattggagcgcggtattagtagaattaggtccaaaaagaatgagcttctatttgctgagatcgagttcatgcagaaaagggagattgaactgcataacaacaatcagtttcttcgtgcaaggatttctgaaaatgagagagctcagcaaagcatgagcttgatgccgggaggcagtgattatgatcttgtcccgtctcagtcatttgattcgcggaattactttcaagtaaacgcgctccaacctagtagtcagtatgcccgccaagaccaaaccccgctccagttagtgtaa

SEQ ID NO: 108764 - protein, 249 aa, Beta vulgaris
MEFPTQTMEGSPSSQRKMGRGKIEIKRIENTTNRQVTFCKRRNGLLKKAYELSVLCDAEVALIVFSSRGRLYEYANHSCSVKGTIDRYKKACSDQSGAGSVAEANAQYYQQEAAKLRNQIRTATENNRLLSRHMMGEGLSSLSMKELKNLETKLERGISRIRSKKNELLFAEIEFMQKREIELHNNNQFLRARISENERAQQSMSLMPGGSDYDLVPSQSFDSRNYFQVNALQPSSQYARQDQTPLQLV

SEQ ID NO: 108765 - DNA, 720 bp, Asparagus virgatus
  CDS (1)..(720)
atggggagaggaagagttgagctgaagaggatcgagaacaagatcaacaggcaggtgaccttcgcaaagagaaggaatggactcctcaagaaagcctacgagctctccgtgctctgcgatgccgaggttgccctcatcatcttctccaatcgtggaaagctctatgagttctgcagcagctctagcatgctgaaaacacttgagagataccaaaagtgcagttatggagcaccagataccagtgtacaaataagggagagccagatgctgcagagtagtcatcaagagtacttgagactcaaagcacgtgttgaagctttgcaacgctcacaaaggaaccttcttggagaagatctcggtccattgagcagcaaggagcttgagcaacttgaaagacagcttgattcatcactgaagcaaattagatcgacacggacacaatacatgcttgaccagcttgctgatcttcaaagaagggaacaaatgctttgtgaggctaataggagtctgagaaaacggttggaagaaagcagccaggctaatcaacaacaagtatgggaggatgccaacgcaatgggatacaatagacagccaaatcaaccacagggagatcaattcttccatcctctcgagtgccaacccactttacaaattgggtttcagcctgatcaaatgcccggccccagcgtgagcaattacatgcctggatggctggcatga

SEQ ID NO: 108766 - protein, 239 aa, Asparagus virgatus
MGRGRVELKRIENKINRQVTFAKRRNGLLKKAYELSVLCDAEVALIIFSNRGKLYEFCSSSSMLKTLERYQKCSYGAPDTSVQIRESQMLQSSHQEYLRLKARVEALQRSQRNLLGEDLGPLSSKELEQLERQLDSSLKQIRSTRTQYMLDQLADLQRREQMLCEANRSLRKRLEESSQANQQQVWEDANAMGYNRQPNQPQGDQFFHPLECQPTLQIGFQPDQMPGPSVSNYMPGWLA

SEQ ID NO: 108767 - DNA, 732 bp, Asparagus virgatus
  CDS (1)..(732)
atggggagggggagagtggagctgaagaggatcgagaacaagatcaacaggcaggtgaccttcgccaagaggaggaacgggctcctcaagaaagcctacgagctctccgtcctctgcgacgccgaggtcgccctcgtcgtcttctccactcgaggcaagctctacgagttctgcagcagtcccagcatgctgaaaacactcgacagataccaaaaatgtagttatggagcaccagatactagtgtacaaatacgggagaatcagatgctacaaagtagccatcaagagtacttgaaacttaaagcacgagttgaggctttacagcgatctcaaaggaatcttcttggtgaagatcttgggccattgagcagcaaggagctcgagcaactcgaaaaacaacttgattcttcactgaggcaaattagatcaacacggacacaatacatgctcgatcagcttggtgatctgcaaagagaggaacaaatgttatgtgaggctaataggagtctgagaaaacggtatgtgcagttggaagaaacaagccagactaatcaacgacaagtctgggaggccaatgctaatgcaatgggatacaaccggcagccgagccaaccacaaggggaagagttcttccatcctctcgaatgccagcccactttgcaaattgggtttcaacctgaccaaatgcctggtcctagcgcgagcacttacatgcctggatggctacaatga

SEQ ID NO: 108768 - protein, 243 aa, Asparagus virgatus
MGRGRVELKRIENKINRQVTFAKRRNGLLKKAYELSVLCDAEVALVVFSTRGKLYEFCSSPSMLKTLDRYQKCSYGAPDTSVQIRENQMLQSSHQEYLKLKARVEALQRSQRNLLGEDLGPLSSKELEQLEKQLDSSLRQIRSTRTQYMLDQLGDLQREEQMLCEANRSLRKRYVQLEETSQTNQRQVWEANANAMGYNRQPSQPQGEEFFHPLECQPTLQIGFQPDQMPGPSASTYMPGWLQ

SEQ ID NO: 108769 - DNA, 732 bp, Asparagus officinalis
  CDS (1)..(732)
atggggagggggagagtcgagctgaagaggatcgagaacaagatcaacaggcaagtgaccttcgccaagaggaggaacgggctcctcaagaaagcctacgagctctccgttctctgcgacgccgaggtcgccctcgtcgtcttctccactcgaggcaagctctacgagttctgcagcagccccagcatgctgaaaacactcgacagataccaaaaatgtagttatggagcaccagataccagtgtacaaatacgggagaatcagatgctacaaagtagccatcaagagtacttgaaacttaaagcacgagttgaggctttacagagatctcaaaggaatcttcttggtgaagatcttgggccattgagcagcaaggagctcgagcaacttgaaaaacaacttgattcttcactgaagcaaattaggtctacacggacacaatacatgctcgatcagcttggtgatctgcaaagaaaggaacaaatgttatgtgaggctaataggagtctgagaaaacggtatgcgcagttggaagaaacaagccaggctaatcagcaacaagtctgggaggccaatgctaatgcaatgggatacagccggcagccgagccaaccacaaggggaagagttcttccatcctcttgaatgccagcccactttgcaaattgggtttcaacctgaccaaatgcctggccctagcgcgagcagtttcatgcctggatggctacaatga

SEQ ID NO: 108770 - protein, 243 aa, Asparagus officinalis
MGRGRVELKRIENKINRQVTFAKRRNGLLKKAYELSVLCDAEVALVVFSTRGKLYEFCSSPSMLKTLDRYQKCSYGAPDTSVQIRENQMLQSSHQEYLKLKARVEALQRSQRNLLGEDLGPLSSKELEQLEKQLDSSLKQIRSTRTQYMLDQLGDLQRKEQMLCEANRSLRKRYAQLEETSQANQQQVWEANANAMGYSRQPSQPQGEEFFHPLECQPTLQIGFQPDQMPGPSASSFMPGWLQ

SEQ ID NO: 108771 - DNA, 696 bp, Asparagus officinalis
  CDS (1)..(696)
atggggaggggacgagtggagctgaagaggatcgagaacaagatcaaccggcaggtgacgttcgcgaagaggaggagcgggttgttcaagaaggcccacgagctgtcggtgctctgcgacgccgaggttgctctcgtcgtcttctccaaccgaggcaggctctacgagttctgcagcagctccagcgtgcttaaaactattgagacatacagaaaatatagttatgctcaagcagttccagcaaatgagatacagccaaaaagttatgaagaatatttggggctgaaaggaagagttgagattctacaacgttcacaaagaaaccttctcggggaggacttgactccattaagcactaaggaacttgagcaactagaaaatcaagttgccatgtctctaaagcagataagactgacaaagacgcagttaatgcttgaccagttgtgcgatcttaaaaggaagcaacatgccctgcaggaagccagtagagacttggaaaagaagttgcacgaacccgattcgagaaatcccgtgggattttcatgggaaggtgtggtgggtgcgcggggatcaggctcgctgcctgattgcgatcctcgacgttcagacaggttcttccagccgttacggattggtagtagctccgtgtgcatggatcagtggaacgctggagacggacccaaaaccacgaactga

SEQ ID NO: 108772 - protein, 231 aa, Asparagus officinalis
MGRGRVELKRIENKINRQVTFAKRRSGLFKKAHELSVLCDAEVALVVFSNRGRLYEFCSSSSVLKTIETYRKYSYAQAVPANEIQPKSYEEYLGLKGRVEILQRSQRNLLGEDLTPLSTKELEQLENQVAMSLKQIRLTKTQLMLDQLCDLKRKQHALQEASRDLEKKLHEPDSRNPVGFSWEGVVGARGSGSLPDCDPRRSDRFFQPLRIGSSSVCMDQWNAGDGPKTTN

SEQ ID NO: 108773 - DNA, 630 bp, Glycine max
  CDS (1)..(630)
atggtgagaggaaagactcagatgaggcgcatagagaacgccacaagcaggcaagtcaccttctcaaagcggcgtaatgggttgctgaagaaggcctttgaactttctgttctttgtgatgctgaggttgctctcatcattttctctccaagaggaaagctttatgaatttgcaagctccagcatgcaggacacaattgaacgctaccgcaggcataacaggagtgctcaaacagtgaacagatctgatgaacaaaatatgcagcatttgaagcaagaaacagcaaacttgatgaagaagattgagcttcttgaggcttcaaaacggaagctcttgggagaaggtttggggtcatgctccttagaagaactgcaacagatagaacaacaattggaaaggagtgtaagcaatgttcgtgcaagaaagaatcaagtttacaaggaacaaattgatcaactaaaagagaaggaaagagctctatatgctgaaaatgctaggctgtgtgagcagtatggtatccagccacagccagcaacaaaggatccgaaagaaattcaaccctatgcagaaagcagtccaagttcagaagtggagactgaattgttcattggactacccaggtctatctag

SEQ ID NO: 108774 - protein, 209 aa, Glycine max
MVRGKTQMRRIENATSRQVTFSKRRNGLLKKAFELSVLCDAEVALIIFSPRGKLYEFASSSMQDTIERYRRHNRSAQTVNRSDEQNMQHLKQETANLMKKIELLEASKRKLLGEGLGSCSLEELQQIEQQLERSVSNVRARKNQVYKEQIDQLKEKERALYAENARLCEQYGIQPQPATKDPKEIQPYAESSPSSEVETELFIGLPRSI

SEQ ID NO: 108775 - DNA, 738 bp, Sinofranchetia chinensis
  CDS (1)..(738)
atggggagaggtagggttcagttgaagcggattgagaacaagatcaatcggcaagtgacgttctcgaaacgaaaaacaggattactgaagaaagctcatgagatctcagttctctgcgatgctgatgtcgctttgattgtcttctcaactaaaggaaagctctacgagtactccaccgaatccggcatggataggatacttgagaaatacgagagatattcttatgcagagcgagagcttgttgcaactgactctgaatcacagggaaactggccactggaatatacaaaacttaaggctaagattgaagttttacagaaaaaccagaggcactttatgggacaagaacttaactctatgagtttcaaagagcttcaaaatttagagcaacagcttgatactgctctgaagcagataagatcaaaaaggaaccaactcatgaatgaatcgatttctgagcttcagaaaaaggagaaggcattgcaagagcagaataaccagctaggaaagaagcttaaggagaaggagaagacactagcacagctggcgcattgggagcatccaaaccaaggccaaaactcgccatccttcctactatcacagacacttccctccctaaacattggtggtccttctcagacgagaggcagtggttgtgaagaggaaagaactcgacgaccagagacacgacccaacacactcctgccaccttggatgcttcgccacattaaccaatag

SEQ ID NO: 108776 - protein, 245 aa, Sinofranchetia chinensis
MGRGRVQLKRIENKINRQVTFSKRKTGLLKKAHEISVLCDADVALIVFSTKGKLYEYSTESGMDRILEKYERYSYAERELVATDSESQGNWPLEYTKLKAKIEVLQKNQRHFMGQELNSMSFKELQNLEQQLDTALKQIRSKRNQLMNESISELQKKEKALQEQNNQLGKKLKEKEKTLAQLAHWEHPNQGQNSPSFLLSQTLPSLNIGGPSQTRGSGCEEERTRRPETRPNTLLPPWMLRHINQ

SEQ ID NO: 108777 - DNA, 771 bp, Citrus sinensis
  CDS (1)..(771)
atgggaaggggtagggttcaattgaagaggatagagaacaagatcaatagacaagtgacattctcgaaaagaagagctggtcttttgaagaaagctcatgagatctctgttctctgtgatgctgaagttgctcttgttgtcttctcccataagggaaaactcttcgaatactccactgattcttgtatggagaagatacttgaacgctatgagaggtactcttacgccgaaagacagcttattgcacctgagtccgacgtcaatacaaactggtcgatggagtataacaggcttaaggctaagattgagcttttggagagaaaccagaggcattatcttggggaagacttgcaagcaatgagccctaaagagcttcagaatctggagcagcagcttgacactgctcttaagcacatccgcactagaaaaaaccaacttatgtacgagtccatcaatgagctccaaaaaaaggagaaggccatacaggagcaaaacagcatgctttttaaacagatcaaggagagggaaaaaatttttagggctcaacaggagcagtgggatcagcagaaccaaggccccaatatgcctccccctttgcccccgcagcagcaccaaatccagcatccttacatgctttttcatcagccatttccttttttcaacatgggtggtttgtatcaagaagatgatcctatggcaatgaggaggaatgatctcgaactgacttttgaacccgtttacaactgcaaccttgggtgtttcgccgcatga

SEQ ID NO: 108778 - protein, 256 aa, Citrus sinensis
MGRGRVQLKRIENKINRQVTFSKRRAGLLKKAHEISVLCDAEVALVVFSHKGKLFEYSTDSCMEKILERYERYSYAERQLIAPESDVNTNWSMEYNRLKAKIELLERNQRHYLGEDLQAMSPKELQNLEQQLDTALKHIRTRKNQLMYESINELQKKEKAIQEQNSMLFKQIKEREKIFRAQQEQWDQQNQGPNMPPPLPPQQHQIQHPYMLFHQPFPFFNMGGLYQEDDPMAMRRNDLELTFEPVYNCNLGCFAA

SEQ ID NO: 108779 - DNA, 741 bp, Gossypium hirsutum
  CDS (1)..(741)
atggtgtaccccaacgaatcccttgaagactctccccagaagaaaatggggagaggaaagatcgagatcaagcggatcgaaaacacgacgaaccgccaagttaccttttgtaagaggcgcaatggtttgctcaaaaaggcttatgagctatcggttctttgtgatgctgaggttgctttgattgtcttctccaaccgtggtcgactctatgagtatgccaacaatagtgttaaagcaacaattgagaggtacaaaaaggcttctgattcctccaatactgggtcagttgctgaagttaatgctcagttctatcagcaagaagctgacaaactccgaaatcaaatccggaatttgcagaatacaaacaggcacatgctgggggagtccgtagggggattgcctatgaaagagcttaagagcttggagactcgtttagaaaaaggaattagcagaatccgttccaaaaagaatgagctgttgtttgctgaaatagagtatatgcagaaaaaggaaattgacttgcataacaataaccaacttcttcgagccaagatagctgaaaacgagaggaagcaggagagcatgaatttgatgcccggaggttcaagtaataacttcgaggccatacattctcagccatatgactctcggaactacttccaagttgatgccttacaacccgccgccaattattacaaccctcagcagcagcaagaccagatagttcttcaactagtctaa

SEQ ID NO: 108780 - protein, 246 aa, Gossypium hirsutum
MVYPNESLEDSPQKKMGRGKIEIKRIENTTNRQVTFCKRRNGLLKKAYELSVLCDAEVALIVFSNRGRLYEYANNSVKATIERYKKASDSSNTGSVAEVNAQFYQQEADKLRNQIRNLQNTNRHMLGESVGGLPMKELKSLETRLEKGISRIRSKKNELLFAEIEYMQKKEIDLHNNNQLLRAKIAENERKQESMNLMPGGSSNNFEAIHSQPYDSRNYFQVDALQPAANYYNPQQQQDQIVLQLV

SEQ ID NO: 108781 - DNA, 675 bp, Gossypium hirsutum
  CDS (1)..(675)
atgggaagaggaaagatagagataaagaggatcgagaacaccacgaatcgtcaggttacgttttgcaagcgcaggaatgggctgctgaagaaagcatacgagctgtcagtcctttgtgatgcagaagttgctcttatcgtcttctccacccgtggccgcctctacgagtactccaacaacaacataagatcaacaatagagaggtacaagaaggcatgttccggtacctcaaacacaaataccgtcacggaaatcaatgctcagtattatcaacaagaatcagccaagttgaggcagcagattcaaatgctacagaattctagcaggcatctaatgggagattcgttgagttccttgacagtgaaggagttaaagcagctagagaatagacttgaacgagggattactagaatcagatcaaagaagcacgaaatgctgctagctgaaattgaatattttcagaaaagggaagttgagctggaaaatgaaagtgtatgtctccgagctaagattgcagagatagagagggttgaggaagcaaacatggtaacaggagcagagctgaatgctattcaagccttggcatctcgcaatttctttactccaaatgtgattgagagaggaactcccactccctactcccaccatgacaagaagattctccatcttgggtag

SEQ ID NO: 108782 - protein, 224 aa, Gossypium hirsutum
MGRGKIEIKRIENTTNRQVTFCKRRNGLLKKAYELSVLCDAEVALIVFSTRGRLYEYSNNNIRSTIERYKKACSGTSNTNTVTEINAQYYQQESAKLRQQIQMLQNSSRHLMGDSLSSLTVKELKQLENRLERGITRIRSKKHEMLLAEIEYFQKREVELENESVCLRAKIAEIERVEEANMVTGAELNAIQALASRNFFTPNVIERGTPTPYSHHDKKILHLG

SEQ ID NO: 108783 - DNA, 705 bp, Gossypium hirsutum
  CDS (1)..(705)
atggagttccctaatctagacccagaaagctcttcccagaaaaaaatgggaagaggcaaaatcgagattaagcggatcgagaacaccactaatcgacaagttaccttctgcaagcgccgcaatggactgctcaaaaaggcctatgaattatctgttctttgtgatgctgaggtggctctcatagtcttctccagccgtggccgtctctatgaatatgctaacaacagtgtgagagcaacaattgagagatacaagaaagcatgctcagatgcaacaactccagggtctgtggctgaagccaacattcagttctaccagcaagaagccaccaaactccgacgacaaattcgtgatgttcagaacatgaacaggcatatccttggagaggctctgagctcattgacctttaaggaactcaagaaccttgaaggcaggctggagaaaggcatttgtagaatcagatccaaaaagaacgaattactgtttgcagaaattggattcatgcaaaagagggaagttgaactgcagaacgataacatgtacctgcgagcaaaaatagctgaaaatgaaagagcgcaacaacaatcaaaccagctgatgcaagcagcctcctcctacaatcgcaactttctgccagtaaacctgctggaacccagtaataatgattactccaaccaagaccaaactcctcttcaacttgtataa

SEQ ID NO: 108784 - protein, 234 aa, Gossypium hirsutum
MEFPNLDPESSSQKKMGRGKIEIKRIENTTNRQVTFCKRRNGLLKKAYELSVLCDAEVALIVFSSRGRLYEYANNSVRATIERYKKACSDATTPGSVAEANIQFYQQEATKLRRQIRDVQNMNRHILGEALSSLTFKELKNLEGRLEKGICRIRSKKNELLFAEIGFMQKREVELQNDNMYLRAKIAENERAQQQSNQLMQAASSYNRNFLPVNLLEPSNNDYSNQDQTPLQLV

SEQ ID NO: 108785 - DNA, 630 bp, Persea americana
  CDS (1)..(630)
atggggagagggaagattgagataaagaggatcgagaactcgacgaatcggcaggtgacttactccaaaagaaggaacgggctgctcaagaaggccaaggagatcactgttctctgtgacgccgatgtttctcttgtaatcttctctgctactggaaagatgtccgagtactgcagctcttccgctacgatgataaagatgttggatcggtaccagaaggcatcagggaataggctgtgggatgccaagcatgagtatctgagcatggaggttgacaggataaagaaagagaatgatagtatgcagatcgaactcaggcacttgaagggtgaggatttgacatcattgcatcctaaggaacttatccatattgaggaagctctcgaaaacggtctcaccggtgttcgtgacaagcaggaggagctgttatcgatcctgaaaaagaacgaaaggatcttggaggaggaaaacatgcgcttgatgtacatgttgcatcatcatcatttggcaatagatggaaatgttagagacgtggagcagggttgtcagcagaaagaaagggattgttcttcccagatgcagtttgcctttcgtgttcaaccgatccaacccaatctgcaaaacaaataa

SEQ ID NO: 108786 - protein, 209 aa, Persea americana
MGRGKIEIKRIENSTNRQVTYSKRRNGLLKKAKEITVLCDADVSLVIFSATGKMSEYCSSSATMIKMLDRYQKASGNRLWDAKHEYLSMEVDRIKKENDSMQIELRHLKGEDLTSLHPKELIHIEEALENGLTGVRDKQEELLSILKKNERILEEENMRLMYMLHHHHLAIDGNVRDVEQGCQQKERDCSSQMQFAFRVQPIQPNLQNK

SEQ ID NO: 108787 - DNA, 672 bp, Persea americana
  CDS (1)..(672)
atggggcgtggaaagattgagattaagaggattgagaacacaaccaacaggcaggtgaccttctgcaagcgtcgaaacggtctcctcaagaaggcctatgaattgtctcttctgtgtgatgcagaagtagctctcatagtcttctccagccgcggtcgcctttacgagtatgcgaacaacagtgtcaagacaacaattgaaaggtacaagaaggcttccgcggacacctcaaacggtggatctaccacagaagtcaattctcaattttaccaacaggagtcttcaaaactgcgccaacaaattgggattttgcagaacgcaaacaggcatctgatgggcgaggctcttagctctatgactgtcaaggagctgaagcagttggaaactagattggagaaaggcatcagtagaatcagatctaaaaagaatgaattgctgttcgctgagatcgagtatatgcaaaagagggaggttgacttgcaaaatgataatttgtatctccgagctaagatagctgagaatgagagggctcagcagcacatgaacatgttaccggcacctgagtatgatgttatgccggcatttgactctcggaacttcctacaagtgaatctcttggaacccaataaccattactctcaccaggagcaaaccgccctccaactaggatga

SEQ ID NO: 108788 - protein, 223 aa, Persea americana
MGRGKIEIKRIENTTNRQVTFCKRRNGLLKKAYELSLLCDAEVALIVFSSRGRLYEYANNSVKTTIERYKKASADTSNGGSTTEVNSQFYQQESSKLRQQIGILQNANRHLMGEALSSMTVKELKQLETRLEKGISRIRSKKNELLFAEIEYMQKREVDLQNDNLYLRAKIAENERAQQHMNMLPAPEYDVMPAFDSRNFLQVNLLEPNNHYSHQEQTALQLG

SEQ ID NO: 108789 - DNA, 699 bp, Papaver somniferum
  CDS (1)..(699)
atgggtagaggtaagattgagatcaagaggattgagaactcaacaaacagacaagtgacttactcaaagaggaaaaatgggatcttgaagaaggctagagagatcacagttctttgtgatgccgatgtttctcttgttatcttctctagtactgggaaaatgaatgaatattgtagctctccgttgataaagcaattggataggtaccagaaagcttcagggaacaaattatgggatgctaagcatgagtatctcagtgctgaagtggatagagtcaagaaagagaacgacaacatgcagatcgagctcaggcacctgaaaggcgaggatctgacccccttgaacccaagagagctaataccaattgaagctgcccttgaggatggtcttgttggcgttaaggccaaaattaaggagcaccgtagagcacttgagaaaaaaactaggatgttagaggaggaaaataagcgcctcattgccaaactacaacaagtggaaattcatggaagaggggagatggacactggggcaaataacgggtataataatcagaaagcagcagatggaaccagggattacccgtctcataacgataatcatcatcaggtgccattcgccttccagatgcagccaattcagtctaatctcaccacggccaccaccaacaacaacaacaacaaataccagctactagattaa

SEQ ID NO: 108790 - protein, 232 aa, Papaver somniferum
MGRGKIEIKRIENSTNRQVTYSKRKNGILKKAREITVLCDADVSLVIFSSTGKMNEYCSSPLIKQLDRYQKASGNKLWDAKHEYLSAEVDRVKKENDNMQIELRHLKGEDLTPLNPRELIPIEAALEDGLVGVKAKIKEHRRALEKKTRMLEEENKRLIAKLQQVEIHGRGEMDTGANNGYNNQKAADGTRDYPSHNDNHHQVPFAFQMQPIQSNLTTATTNNNNNKYQLLD

SEQ ID NO: 108791 - DNA, 681 bp, Vitis vinifera
  CDS (1)..(681)
atggctagaggaaagattgagatcaagaggatagagaactcgacgaacaggcaggtcacctactccaagagacgaaatggtatcttcaagaaggccagtgagctcactgttctttgtgatgctaaggtttctatcatcatgctctccagtactggaaagctccatgaatacatcagcccttccactacaacgaaacaaatatttgatcagtaccagaacactctaggagtggatctatggagctatcactatgagagaatgcaagaaaacctgaagaaactgaaagatgtgaacaagaatctcaggaaggagattaggcagaggatgggtgaacatttgagcgatttgagcgttgaggaactgcgagatcttgaacaagagatggagagttctttgaagatggttcgtgataggaagtaccaggtgatcaataatcagattgaaactttcaagaaaaaggtaaggaatgtggaacaaatacacaaaaatctcctacatgaatttgatgcaagggacagagatcaatactatgggctagtggacaatggaggggattacgaatctgttcttggattctcaaatggaagctctccggtatttgccctaagcttgcagcctaacccgcctaatgatcttcactcgggtgtgggctctgatttgacctttactttgctcgagtag

SEQ ID NO: 108792 - protein, 226 aa, Vitis vinifera
MARGKIEIKRIENSTNRQVTYSKRRNGIFKKASELTVLCDAKVSIIMLSSTGKLHEYISPSTTTKQIFDQYQNTLGVDLWSYHYERMQENLKKLKDVNKNLRKEIRQRMGEHLSDLSVEELRDLEQEMESSLKMVRDRKYQVINNQIETFKKKVRNVEQIHKNLLHEFDARDRDQYYGLVDNGGDYESVLGFSNGSSPVFALSLQPNPPNDLHSGVGSDLTFTLLE

SEQ ID NO: 108793 - DNA, 738 bp, Prunus persica
  CDS (1)..(738)
atggggaggggaagagtggaactcaagaggatagagaacaagataaacaggcaagtcacatttgcaaagagaagaaatgggcttctgaagaaagcctatgagctctctattctctgtgatgctgaggttgctctcatcatcttctctaaccgtggcaagctctatgagttctgtagcagctctagcagcatactcaaaacactggaaaggtaccagaagtgcagttatggtcaagtggaagtcaacaaacctgccaaggaacttgagagcagctaccgcgagtacttgaaactgaaaggtcgatttgagtccctacaacgaactcagagaaaccttcttggagaagacttgggtcccttaaacacaaaggagcttgagcagcttgagcgtcaactggagtcctccttgaagcaagttaggtccactaagactcagtatatgctggaccaactttctgaccttcaaaataaggaacaaatgttaatagaagcaaacagggatttgtcattgaagttggatgacattagttcaagaaaccaaattagacaatcatgggaaggtggaaaccaggggggtatggcatatgggagccagcatgctcaatctcaagggttcttccagcccttggattgcaatcccaccttgcaaatagggtactctaatgtggggtcagagcagatgagtgccacaactcatgcccaacaagtcaacggtttcatccctggatggatgctgtga

SEQ ID NO: 108794 - protein, 245 aa, Prunus persica
MGRGRVELKRIENKINRQVTFAKRRNGLLKKAYELSILCDAEVALIIFSNRGKLYEFCSSSSSILKTLERYQKCSYGQVEVNKPAKELESSYREYLKLKGRFESLQRTQRNLLGEDLGPLNTKELEQLERQLESSLKQVRSTKTQYMLDQLSDLQNKEQMLIEANRDLSLKLDDISSRNQIRQSWEGGNQGGMAYGSQHAQSQGFFQPLDCNPTLQIGYSNVGSEQMSATTHAQQVNGFIPGWML

SEQ ID NO: 108795 - DNA, 669 bp, Triticum aestivum
  CDS (1)..(669)
atggtgcgggggaagacgcagatgaagcggatagagaacccgacgagccggcaggtgaccttctccaagcgccgcggcggcctgctgaagaaggccttcgagctctccgtcctctgcgacgccgaggtcgcgctcgtcgtcttctccccccgcggcaggctctacgaattcgccagctccagcatgaagaacacaattgaacgttataagacagtcacaaaggataatttgggcagacagacggtacagcaagatatagagaaagtaaaagctgatgctgagggcttgtcaaagaagcttgatgctcttgaagcttgcaaaagcaaacttttgggccaaaatttggaagaatgctctattgaagaactgcaaagcttagaggtcaaaattgaaagaagccttctaggcatcagggcaatgaagactcggcggttcgaagagcagctctctacgttgaggcagaaggagatgaagttgcggcaggacaatgaagaactatatagccagtgccagaaggaacagcactctgcgttggaggcggccgcgccccctgctccggcgaccttggcggcgctccctgctccagtgaccctggcggagcagggccagcaggtggtggatgtggagacggatctatttcttggattgcccggcaccggccgctcctga

SEQ ID NO: 108796 - protein, 222 aa, Triticum aestivum
MVRGKTQMKRIENPTSRQVTFSKRRGGLLKKAFELSVLCDAEVALVVFSPRGRLYEFASSSMKNTIERYKTVTKDNLGRQTVQQDIEKVKADAEGLSKKLDALEACKSKLLGQNLEECSIEELQSLEVKIERSLLGIRAMKTRRFEEQLSTLRQKEMKLRQDNEELYSQCQKEQHSALEAAAPPAPATLAALPAPVTLAEQGQQVVDVETDLFLGLPGTGRS

SEQ ID NO: 108797 - DNA, 756 bp, Vitis vinifera
  CDS (1)..(756)
  misc_feature (228)..(228): y is t or c
  misc_feature (297)..(297): w is a or t
  misc_feature (607)..(607): s is g or c
  misc_feature (632)..(632): r is g or a
atgcttcacctcttttggggctcaaccacggatttccaaaaccaatcgagggaggtctccccccagagaaaaatgggaagggggaagatcgagatcaagcggatcgaaaacaccactaaccggcaggttactttctgcaagcgccgcaacggcttactcaagaaggcctatgaattatctgtcctatgtgatgcagaggtagccctcatcgtcttctccagccgcggycgcctctacgaatatgccaacaacagcagtgttaaatcaacaattgagaggtataagaaggcaagcgcwgattcctccaacaccgggtccgtttctgaagccaatgctcagttctaccagcaagaatcctccaaactgcatcagcagattcgtaatttgcagaattcgaacaggcacatgctgggtgagtctctgggctccttgaatttcaaggacctcaagagcctggagattcggttagagaaaggcataagtagaatcagatccaaaaagaatgagctgttgtttgctgagatcgagtatatgcaaaagagggaaatagacttgcataatgataaccagtatctccgagcaaggatagccgagaatgagagaaacsaacagcagatgagcttgatgccagraggagctaactatgaactcatgccatctcagcagttcgactctagaaactatttccaactaaatggactgcaaccaaatcaatcatactctcgccaagaccaaccagctcttcaattagtgtaa

SEQ ID NO: 108798 - protein, 251 aa, Vitis vinifera
  misc_feature (211)..(211): The Xaa at location 211 stands for Glu, or Gly.
MLHLFWGSTTDFQNQSREVSPQRKMGRGKIEIKRIENTTNRQVTFCKRRNGLLKKAYELSVLCDAEVALIVFSSRGRLYEYANNSSVKSTIERYKKASADSSNTGSVSEANAQFYQQESSKLHQQIRNLQNSNRHMLGESLGSLNFKDLKSLEIRLEKGISRIRSKKNELLFAEIEYMQKREIDLHNDNQYLRARIAENERNZQQMSLMPXGANYELMPSQQFDSRNYFQLNGLQPNQSYSRQDQPALQLV

SEQ ID NO: 108799 - DNA, 732 bp, Vitis vinifera
  CDS (1)..(732)
atgggaagagggaaggtggagctgaagaggatcgagaacaagataaatcgacaggtgacatttgcaaaaagaaggaatggactgctgaagaaggcctatgagctttcagttttgtgtgatgctgaggttgcgctcatcattttctccaaccgtggcaagctttatgagttctgcagcggctctagcatgccagagacacttgagaggcatcaaagatgcagttacagtgcactggaagccagccaacctgcaaaggagacacagaacagttaccaggaatatctgaaactaaaatcaaaggtcgaggtcctgcaacgaactcagagaaattttctgggggaagatttggggcatttgggtacaaaggagcttgagcagcttgagcatcagctggacaagtcattgaagcaaatcagatcaacaaagacccaatttatgcttgatcaactgtctgatcttcaaagaaaggtacaaatcctaatggaagccaacaacgccttaaggaggaagttgggtgaaagcagtgcagaaagtggcctgggatcaacatgggaagctgccgcacataatctaccatataatcgcgagcctgttcagtcagaggactttttcgagcctctgcaatgcgatagcactttgcagattggttacaatcctgtgctgcgggttgagatgaacggagccagcacaacacaaaatgtcaatggattcatccctgggtggatggtttga

SEQ ID NO: 108800 - protein, 243 aa, Vitis vinifera
MGRGKVELKRIENKINRQVTFAKRRNGLLKKAYELSVLCDAEVALIIFSNRGKLYEFCSGSSMPETLERHQRCSYSALEASQPAKETQNSYQEYLKLKSKVEVLQRTQRNFLGEDLGHLGTKELEQLEHQLDKSLKQIRSTKTQFMLDQLSDLQRKVQILMEANNALRRKLGESSAESGLGSTWEAAAHNLPYNREPVQSEDFFEPLQCDSTLQIGYNPVLRVEMNGASTTQNVNGFIPGWMV

SEQ ID NO: 108801 - DNA, 705 bp, Dendrobium nobile
  CDS (1)..(705)
atggggaggggaaaaattgagatcaagaggatcgagaataccacgaaccgccaggtgaccttctgcaagcgtaggaatggtcttttaaagaaagcctacgaactttccgttctctgtgatgcagaaatagccctaattgtcttctccactcgaggtcgcctctacgagtactccaatcacagcataaaagcaaccattgaaaagtataagaaggcttgtgctgatagttcaaacccaggatctcttgtggaggttaactcacagcaatactatcaacaagaatcagcaaaactacgccaccaaattcagcttttacaaaattcaaacaggcatttaatgggggaaggtttgagttctcttactttaaaggagctcaagcaacttgaaaaccgacttgaaagaggcattacaagggtcagatcaaagaagcatgagctgctctttgcagaaattgagtatatgcagaaacgagaagtggagcttcaaaatgacaatatgtaccttagggccaagataaacgataatgaaagagcggagcatgcaaatatcgttcaagcagggactgattttgacacccttccaaacttcgactccaggaattactatcacttaaacatattggaaacagcacctcattactcacaccatcaagatcaaactgcccttcatcttgggtacgaaacaaaagctgatcattctgcatag

SEQ ID NO: 108802 - protein, 234 aa, Dendrobium nobile
MGRGKIEIKRIENTTNRQVTFCKRRNGLLKKAYELSVLCDAEIALIVFSTRGRLYEYSNHSIKATIEKYKKACADSSNPGSLVEVNSQQYYQQESAKLRHQIQLLQNSNRHLMGEGLSSLTLKELKQLENRLERGITRVRSKKHELLFAEIEYMQKREVELQNDNMYLRAKINDNERAEHANIVQAGTDFDTLPNFDSRNYYHLNILETAPHYSHHQDQTALHLGYETKADHSA

SEQ ID NO: 108803 - DNA, 633 bp, Carica papaya
  CDS (1)..(633)
atggggagagggaagattgagatcaagagaatagagaatttgagcaacaggcaggtcacctattcaaagagaagaaatgggattattaagaaggccaaggagattactgttctatgtgatgctcgagtttctctcattatttttgctagttctggcaagatgcatgagtattgtagcccttctacttctttgacaaatatgttggatgagtatcacaaagctggaaaaccaaggctgtgggatgctaagcatgaaaatctcaataatgaaattgagagagtcaagaaagagaatgacaacatgcagattgagctgaggcacttgaggggagaggatataacatctttgaatcacagagatctcatggccttagaggaaacccttgaaactggtctggctagtgttcgtaacaaacagatggaggtcctcaagatgatgagaaggaatgaaaagattttggaggaggagaataggcgtctcagttttgctctgcaacaacaggagatcgcgatagaaaatagcgcaagagagatggaaaacggatatcaacaaagaatgagagagtataacgcacacatgcctttcgcctttcgagtgcaacctattcaaccaaatttacaagacaggatttag

SEQ ID NO: 108804 - protein, 210 aa, Carica papaya
MGRGKIEIKRIENLSNRQVTYSKRRNGIIKKAKEITVLCDARVSLIIFASSGKMHEYCSPSTSLTNMLDEYHKAGKPRLWDAKHENLNNEIERVKKENDNMQIELRHLRGEDITSLNHRDLMALEETLETGLASVRNKQMEVLKMMRRNEKILEEENRRLSFALQQQEIAIENSAREMENGYQQRMREYNAHMPFAFRVQPIQPNLQDRI

SEQ ID NO: 108805 - DNA, 804 bp, Triticum aestivum
  CDS (1)..(804)
atggggcgcgggccggtgcagctgcggcggatcgagaacaagataaaccggcaggtgaccttctccaagcgccgcagcgggctgctgaagaaggcgcacgagatctccgtgctctgcgacgccgaggtcgcgctcatcgtcttctccaccaagggcaagctatacgagtactccagccaggacagtagcatggatgtgattcttgaacgttaccaacgttactcatttgaagaaagagctgtactggatccaagtattggaaaccaggcaaactggggagatgaatatggaagtttgaagataaaactcgatgcactccagaagagtcaaaggcaactcttgggtgaacaattggacccactcaccacaaaagaactccaacagttggaacaacagcttgatagttctttgaagcacataaggtcaagaaagaatcaacttctctttgagtctatatctgagcttcaaaagaaggagaagtcattaaaagatcagaatggcgtcctgcagaagcacctcgtagagacagaaaaggagaaaaataacgttttgtcaaatattcatcaccaagagcagttgaatggagcaacaaatatcaatcaccaggagcagctgaatggagcaacaacaagctcaccgtcacctacaccagcgacagcccaagattccatggcgactccaaatattgggccatatcaatctagagaatcaggaggggggaatccagaacctcagccgtctccagcacaagcaaacaacagcaatctaccaccgtggatgctctccaccatcagcaacagatga

SEQ ID NO: 108806 - protein, 267 aa, Triticum aestivum
MGRGPVQLRRIENKINRQVTFSKRRSGLLKKAHEISVLCDAEVALIVFSTKGKLYEYSSQDSSMDVILERYQRYSFEERAVLDPSIGNQANWGDEYGSLKIKLDALQKSQRQLLGEQLDPLTTKELQQLEQQLDSSLKHIRSRKNQLLFESISELQKKEKSLKDQNGVLQKHLVETEKEKNNVLSNIHHQEQLNGATNINHQEQLNGATTSSPSPTPATAQDSMATPNIGPYQSRESGGGNPEPQPSPAQANNSNLPPWMLSTISNR

SEQ ID NO: 108807 - DNA, 678 bp, Triticum aestivum
  CDS (1)..(678)
atgggtcgggggaaggtggagatgaggcggatcgagaacaagataagccggcaggtgacgttcgccaagcgccggaatgggctgctcaagaaggcctacgagctctcgctgctctgcgacgccgaggtcgccctcatcatcttctccggccgcggccgcctcttcgagttctcaagctcctcatgcatgtacaaaacacttgagagataccgtacctgcaactccaactcacaagaagcagcacctccgctagaaaatgaaattaattaccaggaatatttgaagctcaagaccagagttgaatttcttcaaagttcacaaagaaatattctcggtgaggatctgggcccacttagcatgaaggagcttgaccagatagagaaccaaatagatgcatccctcaagcatatcaggtcaaaaaagaatcaagtattactcgatcagctatttgaactgaaaagtaaggagcaagaattgcaggatgaaaacaatgacttgaggaagaagttgcaagataccaccagttgctgcggagacaatgcggtccatatgtcctggcaagacggagggcagtgtagctccagagtactacacccggagcatgatacctccatgcaaattgggtatcctcaggcctacatggaccagctgaacaaacagagatcacgtggcttctga

SEQ ID NO: 108808 - protein, 225 aa, Triticum aestivum
MGRGKVEMRRIENKISRQVTFAKRRNGLLKKAYELSLLCDAEVALIIFSGRGRLFEFSSSSCMYKTLERYRTCNSNSQEAAPPLENEINYQEYLKLKTRVEFLQSSQRNILGEDLGPLSMKELDQIENQIDASLKHIRSKKNQVLLDQLFELKSKEQELQDENNDLRKKLQDTTSCCGDNAVHMSWQDGGQCSSRVLHPEHDTSMQIGYPQAYMDQLNKQRSRGF

SEQ ID NO: 108809 - DNA, 732 bp, Trochodendron aralioides
  CDS (1)..(732)
atggggagaggtagagttcagctgaagcggatcgagaacaagatcaaccgtcaagtgacgttttcgaagcggagatcgggattgctgaagaaagctcatgagatctcagttctctgtgatgctgaggttgctttgatagtcttctccactaaagggaaactcttcgagtactccacggattccagcatggaaaggatcctcgaacgatatgagagatattcttacgcagagcgcgagcttgtcgcaattgatgctgaatcacagggaagctggtctctggaatacaccaaacttaaggctagatttgaggttttacagagaaaccaaaggcactttcttggagaagaccttggctccttgagcctcagagagcttcaaaatttcgagcagcagcttgattctgctcttaagctcatcaggtcaagaaagagccagctcatgtacgagtccatttccgagcttcagagaaaggagaaggcattgcagcagcaaaacaacttgctagcagagaagctcaaggagaagaaggcactggcccaacaggcgcattgggagcagggaaaccaagttcaaaacccatccaccttcctactaccacagtcacttccctctctgaacattagtggcacttaccaggcaagaggcaccgggggtgaagatgaaggatctcaaccacataaccgaaccaacacgctcatgccaccttggatgcttcgccacatgaatgaatag

SEQ ID NO: 108810 - protein, 243 aa, Trochodendron aralioides
MGRGRVQLKRIENKINRQVTFSKRRSGLLKKAHEISVLCDAEVALIVFSTKGKLFEYSTDSSMERILERYERYSYAERELVAIDAESQGSWSLEYTKLKARFEVLQRNQRHFLGEDLGSLSLRELQNFEQQLDSALKLIRSRKSQLMYESISELQRKEKALQQQNNLLAEKLKEKKALAQQAHWEQGNQVQNPSTFLLPQSLPSLNISGTYQARGTGGEDEGSQPHNRTNTLMPPWMLRHMNE

SEQ ID NO: 108811 - DNA, 669 bp, Prunus persica
  CDS (1)..(669)
atggggggaggaaagattgagatcaagaggatcgagaacaccacaaaccgtcaagtgaccttctgcaaacgaagaaatggactgctgaagaaagcttatgagctatccattctctgtgatgctgaagttgccctcattgtcttctccagtcgaggccgcctctacgagtactccaacaacaacagcataagaaacactatagagaggtacaagaaggcttgctcagatagctcaggttcaacctccattactgaaattaatgctcaatattatcaacaggaatcggcaaagctgaggcaacagattcaaatgctgcagaattccaacaggcacttaatgggagatgccttgagtactttgagtgtgaaagagctaaagcagctggagaataggcttgaacgaggcattaatagaatcaggtccaagaagcatgaaatgctgcttgcagaaattgagtacttgcagaaaaaggagatcgagctggaaaacgaaaatgtgtgtcttcgaactaagatttcagaagttgagaggcttcaacaagcaaacatggttgggccagagctgaatgcaatccaggcattagcttctcgcaatttctttagccaaaatatgatggagggtggagcaacctacccacagcaagacaagaagattctccatcttgggtaa

SEQ ID NO: 108812 - protein, 222 aa, Prunus persica
MGGGKIEIKRIENTTNRQVTFCKRRNGLLKKAYELSILCDAEVALIVFSSRGRLYEYSNNNSIRNTIERYKKACSDSSGSTSITEINAQYYQQESAKLRQQIQMLQNSNRHLMGDALSTLSVKELKQLENRLERGINRIRSKKHEMLLAEIEYLQKKEIELENENVCLRTKISEVERLQQANMVGPELNAIQALASRNFFSQNMMEGGATYPQQDKKILHLG

SEQ ID NO: 108813 - DNA, 696 bp, Sorghum bicolor
  CDS (1)..(696)
atggggagggggcgggttgagctgaagcggatcgagaacaagatcaaccgccaggtcaccttcgccaagcgccgcaacgggctgctcaagaaggcgtacgagctctccgtgctctgcgacgccgaggtcgcgctcatcatcttctccaaccgcggcaagctctacgagttctgcagcggacagagcatcacaaaaacacttgagaggtacgaaaagcatatgaggccagatactgctgtacagaacaaggagaacgagttagtccagagcagtcggaatgagtaccttaaactgaaagcaagggtggataatttacaaaggactcagaggaatttgcttggtgaagatctggggtcacttggtatcaaagagcttgagcagctcgagaagcaacttgattcatccttaaggcacataagatccacaaggacacaacatatgcttgatcagctcactgatcttcagaggagggagcaaatgctgtgtgaagcaaataagtgccttagaagaaagctggaggagaccagcaaccaggtgcatagcaagtgtggagcacggtgccaacttactcggctacgagcggccactcccccccacagcaggccccatcacatattggcaatggattgttctttcatcccctggaagctgcagcagagccaaccctgcagatcgggttcgctcctgaacatatga

SEQ ID NO: 108814 - protein, 231 aa, Sorghum bicolor
MGRGRVELKRIENKINRQVTFAKRRNGLLKKAYELSVLCDAEVALIIFSNRGKLYEFCSGQSITKTLERYEKHMRPDTAVQNKENELVQSSRNEYLKLKARVDNLQRTQRNLLGEDLGSLGIKELEQLEKQLDSSLRHIRSTRTQHMLDQLTDLQRREQMLCEANKCLRRKLEETSNQVHSKCGARCQLTRLRAATPPHSRPHHILAMDCSFIPWKLQQSQPCRSGSLLNI

SEQ ID NO: 108815 - DNA, 786 bp, Pinus radiata
  CDS (1)..(786)
atggggcggggtcgggttcagctgaggcgaatagaaaacaaaataaatcgacaagtcacgttttcgaagcgccggaacggactgctgaagaaggcgtacgagctatcagtgctgtgcgatgccgaagtggcgctaataattttctctaccagaggaaagctttacgagtttgccagttccagcatgaacaagacgttggaaagatacgaaaaatgttcatatgcaatgcaagataccacaggcgtttcggaccgggaagcacagaattggcaccaagaagttacaaagttgaagggtaaggttgagctcctgcagcgatcacaaaggcatttgttgggggaagatctgggtccgttaaatgttaaggagctacagcagcttgaacgtcagctggaggttgctctgacacatcttaggtcaaggaaaacgcaggtaatgctggaccagattgaggaacttcgccaaagggaacggttgctacatgaagtaaacaagtctctgcagaaaaagctttccgaaacagagggaagagatgtaataactggcatagagcaaacttctaatactaatactggtactaacggtccttgggattcttctatcacaaacactgcgtatgctctctcacaccctcaacaagattcaaattcaagcctccaccatgtggactgtgaacccacgctacagattggttatcagcctgtggctcctgaaagcatcgtccctcctcatcagccgccgcacaaccaaacgccgaaccaatacatgcaaggatggtgggtttga

SEQ ID NO: 108816 - protein, 261 aa, Pinus radiata
MGRGRVQLRRIENKINRQVTFSKRRNGLLKKAYELSVLCDAEVALIIFSTRGKLYEFASSSMNKTLERYEKCSYAMQDTTGVSDREAQNWHQEVTKLKGKVELLQRSQRHLLGEDLGPLNVKELQQLERQLEVALTHLRSRKTQVMLDQIEELRQRERLLHEVNKSLQKKLSETEGRDVITGIEQTSNTNTGTNGPWDSSITNTAYALSHPQQDSNSSLHHVDCEPTLQIGYQPVAPESIVPPHQPPHNQTPNQYMQGWWV

SEQ ID NO: 108817 - DNA, 666 bp, Pinus radiata
  CDS (1)..(666)
atggtgaggggaaagacccagatgaaaaggatcgagaacgacacgagcaggcaggttacgttttctaagcgcaggaatgggttactgaagaaagcttatgagctctctgtgctctgcgatgccgaagtgggacttataattttctcaccaagagggaaactatatgaattcgccagtcccagcatggaggagattttggaaaagtataaaaaacgttcgaaggaaaatggcatggctcagacaacgaaagagcaagatactcagtattccaaacattccaaacaaaagcttgcaaatatggaagaacagattaggattcttgaatcaacccaaagaaagatgttgggggaagggttggaatcgtgttcaatggcagaattaaataagttagagagccaagctgaacgaggattgagccatatacgggctcgaaagacggaaatattggttgaccaaatagaatgtcttaaaaggaaggaacgtctcttaagcgaggagaacgccttactcagtagaaagtgggttgatcgtcaatccgtggacggttccggttcaacatcatcttcaattggattgggaagcatcgagcagatcgaagttgagacacaattggttataagaccgccaaatgcacaggatcactgttctgtaaatagtggccattga

SEQ ID NO: 108818 - protein, 221 aa, Pinus radiata
MVRGKTQMKRIENDTSRQVTFSKRRNGLLKKAYELSVLCDAEVGLIIFSPRGKLYEFASPSMEEILEKYKKRSKENGMAQTTKEQDTQYSKHSKQKLANMEEQIRILESTQRKMLGEGLESCSMAELNKLESQAERGLSHIRARKTEILVDQIECLKRKERLLSEENALLSRKWVDRQSVDGSGSTSSSIGLGSIEQIEVETQLVIRPPNAQDHCSVNSGH

SEQ ID NO: 108819 - DNA, 645 bp, Pinus radiata
  CDS (1)..(645)
atgggaagggggaggattcggttgagaaagatagagagcgcgaccagcaggcaggttacgttttctaagcgcaaaaatgggttgctgaagaaagcttacgagctgtcggtgctctgcgatgtggaactgggacttattgttttgtcccccagagggaaggtccatgaattctctagtacctgcatgcagaaaatgttggaacgatacgagaagtgttcggaaggaagtaaaacaacaagtatagcaaaagaggaagatcccaaggctttaaaacgagaaattgcgaatatggaagaaaggattgagattcttgaacgcacgcaaagaaagatgttgggcgaggaactggcatcatgtgcattgaaggatttaaatcagttggagagccaggttgaacgaggcttgagaaatatacgagcgcgaaagagcgaaatattggtgactcaaatagagcaacttcaaagaaaggaacggatgtttagcgaagagaataattttctccgaaagcggattgtcgatccccattccgttttgacaactcctgcaagtggatctggaagcctccaaagaagtgaagtcgagactcaactggttatgagaccgcccagttcaaatgctgattttctttttaatagttctcattga

SEQ ID NO: 108820 - protein, 214 aa, Pinus radiata
MGRGRIRLRKIESATSRQVTFSKRKNGLLKKAYELSVLCDVELGLIVLSPRGKVHEFSSTCMQKMLERYEKCSEGSKTTSIAKEEDPKALKREIANMEERIEILERTQRKMLGEELASCALKDLNQLESQVERGLRNIRARKSEILVTQIEQLQRKERMFSEENNFLRKRIVDPHSVLTTPASGSGSLQRSEVETQLVMRPPSSNADFLFNSSH

SEQ ID NO: 108821 - DNA, 672 bp, Pinus radiata
  CDS (1)..(672)
atggtgaggggaaagacccagatgaagagaatcgagaacgcgaccagcaggcaagttacgctttcaaagcgccgcaacgggctgctgaagaaagcttacgagctctcggtgctctgcgatgctgaagtgggacttattgttttctcccccagtgggaagctctacgagttcgccagtaccagcatgcaaaaattgctggaaaaatatgaaatttgttcacaagaatgtggcacaagtgaatcaaacaaaaagcaagatccccagtgtctaaaacaagaaattgaaaatatggaaaaaagagttaggatacttcaatccacacaaagaaagatgttaggggagggcttggcactatgttcaataaaggaattaaatcagttggagggacaagttgaacgaggattgaaccatgtacgagcaacaaagactaaagtacttttggatgaaatagagaaacttaaacaaaaggaacatgtttttagagaagagaaagctttgctccataaaaagtcggttaatcttcgaggtgctaatggctgcacaataccttcaattggattgacaagcatagaacgcgtggaagttcagactcaactggtcatgagacctccacatgccacagagatggacgacaactttatggatgttgacaacgtgccactatctggatga

SEQ ID NO: 108822 - protein, 223 aa, Pinus radiata
MVRGKTQMKRIENATSRQVTLSKRRNGLLKKAYELSVLCDAEVGLIVFSPSGKLYEFASTSMQKLLEKYEICSQECGTSESNKKQDPQCLKQEIENMEKRVRILQSTQRKMLGEGLALCSIKELNQLEGQVERGLNHVRATKTKVLLDEIEKLKQKEHVFREEKALLHKKSVNLRGANGCTIPSIGLTSIERVEVQTQLVMRPPHATEMDDNFMDVDNVPLSG

SEQ ID NO: 108823 - DNA, 645 bp, Pinus radiata
  CDS (1)..(645)
atggcaaggggaaagacacaaatgagaaagatcgagagcgcgaccagcaggcaggttacgttttctaagcgcagaaatggattgctgaagaaagcttacgagatgtcggtgctctgcgatgcccaactgggacttattgttttctcccccagagggaaggtctatgaattctccagtacctgcatgcagaaaatgttggcacggtacgaaaatttttcagaaggaagtaaagcaacgagtacagcaaaagagcaagatgtccagggtttaaaacgacaaattgcgaatatggaagaaaggattgaaattcttgaatccatgcatagaaagatgttgggggatgagctggcatcatgcgcattgaaggatttgaatgagttggagagtcaggttgaacgaggtttgagaaatgtacgagcgcgaaagactgaaatattggtgactgaaatagagcaacttcaaagaaaggaatggatattaagcgaggagaatgctttcctcggcaaaaagttcgtgcatcctcattccgtttcgaaaactcctggaagtgaatcgggaagcatccaaaacagtgaagtcgagacgcaactggttatgagaccgccatgtacaaatgctcattttcttattaatagttctcattga

SEQ ID NO: 108824 - protein, 214 aa, Pinus radiata
MARGKTQMRKIESATSRQVTFSKRRNGLLKKAYEMSVLCDAQLGLIVFSPRGKVYEFSSTCMQKMLARYENFSEGSKATSTAKEQDVQGLKRQIANMEERIEILESMHRKMLGDELASCALKDLNELESQVERGLRNVRARKTEILVTEIEQLQRKEWILSEENAFLGKKFVHPHSVSKTPGSESGSIQNSEVETQLVMRPPCTNAHFLINSSH

SEQ ID NO: 108825 - DNA, 705 bp, Solanum tuberosum
  CDS (1)..(705)
atggcaagggagaagataaaaataaagaagatagataatataacagcaagacaagtgacattttcaaagaggcgaagagggctttttaagaaagctgaagagctttctgttctttgtgatgctgatgttgctcttatcattttctcttctactgggaagctatttgattttgctagcaccagcatgaaggatattcttggaaagtataagttgcagtcagctagccttgagaaagttgacgaaccttcccttgatttacagctagagaatagcctcaacatgagattaagcaagcaggtagctgataaaactcgtgagctcaggcagatgagaggtgaggaacttgaaggattgagtttagaagaattacaacaaattgagaaaagacttgaagctggtttcaaccgtgtgctagagattaagggtacacgaattatggatgaaattaccaaccttcaaagaaagggtgctgagctgatggaagaaaacaaacaattgaaacacaaaatggaaattatgaaagggaagttgccattactgactgacatggtgatggaagaaggccaatcatctgagtctataattacaaccaataatcctgatcaagatgactcctcaaatgcatctttgaagttaggtggtactactgcagttgaagatgattgctcaattacatctttaaagttagggctaccattcagctag

SEQ ID NO: 108826 - protein, 234 aa, Solanum tuberosum
MAREKIKIKKIDNITARQVTFSKRRRGLFKKAEELSVLCDADVALIIFSSTGKLFDFASTSMKDILGKYKLQSASLEKVDEPSLDLQLENSLNMRLSKQVADKTRELRQMRGEELEGLSLEELQQIEKRLEAGFNRVLEIKGTRIMDEITNLQRKGAELMEENKQLKHKMEIMKGKLPLLTDMVMEEGQSSESIITTNNPDQDDSSNASLKLGGTTAVEDDCSITSLKLGLPFS

SEQ ID NO: 108827 - DNA, 552 bp, Eucalyptus grandis
  CDS (1)..(552)
atggggagaggaagggtggagctgaagaggatcgagaacaagatcaacaggcaggtgacctttgcgaagagaaggaatggtcttttgaaaaaagcttacgagctttccgtgctttgcgatgcggaggttggtctcatcatcttctctaatagaggaaagctgtacgagttctgcagcagctcgagcatgctcaaaactctagagagatatcagaagtgcaactatggagccctggagccgaacgtgtccgcgagagaatccttggagttaagctgtcagcaggaatatttgagacttaaggcacgttacgaaggcctacagcgaactcaaaggaatcttctgggagaggaacttgggcagctatgcagcaaagaactcgagtccttggaaagacagctagatgggtcattgaagcagatcagatcacgaagaactcagtacatgttagatcaggtgactgatcttcaacatcgggaacaggtggtccacgaagcaaacaggaccttgaatcaacggttgatggaaggataccaagtgatgcgctccagttaa

SEQ ID NO: 108828 - protein, 183 aa, Eucalyptus grandis
MGRGRVELKRIENKINRQVTFAKRRNGLLKKAYELSVLCDAEVGLIIFSNRGKLYEFCSSSSMLKTLERYQKCNYGALEPNVSARESLELSCQQEYLRLKARYEGLQRTQRNLLGEELGQLCSKELESLERQLDGSLKQIRSRRTQYMLDQVTDLQHREQVVHEANRTLNQRLMEGYQVMRSS

SEQ ID NO: 108829 - DNA, 690 bp, Cucumis sativus
  CDS (1)..(690)
atggggagaggaaagatagagataaagagaatagagaacacaacaaatagacaagttacattctgtaagagaagaaatggacttttgaaaaaagcttatgaactctctgttctttgtgatgctgaagttgctctcattgtcttctccagccgtggccgtctctatgaatactccaataacagcatcaaaacaactattgagaggtacaagaaggcttgttctgatagctcagctactagctctgtcactgaactaaatactcaatattatcagcaagaatcggctaaactgcgtcaacagatacaaatgcttcagaattccaacagcaatcttgttaggcacttgatgggggactccttgagtgctcttactgtcaaagaactcaagcagcttgaaaataggcttgaaagaggcatcactagaatcagatcaaagaagcacgaaatgttgctagcagaaattgagtaccttcagaaaagggagattgagctggagaacgaaaatgtgtgtattagaaccaagatagcagaagtagagagggttcaacaagcaaacatggtatctggacaagaactgaatgcaatacaagcattggctaactctcgcaatttcttctctcccaatatcatggaacctgctggacctgtttcttactctcatcaagacaagaaaatgcttcatcttgggtga

SEQ ID NO: 108830 - protein, 229 aa, Cucumis sativus
MGRGKIEIKRIENTTNRQVTFCKRRNGLLKKAYELSVLCDAEVALIVFSSRGRLYEYSNNSIKTTIERYKKACSDSSATSSVTELNTQYYQQESAKLRQQIQMLQNSNSNLVRHLMGDSLSALTVKELKQLENRLERGITRIRSKKHEMLLAEIEYLQKREIELENENVCIRTKIAEVERVQQANMVSGQELNAIQALANSRNFFSPNIMEPAGPVSYSHQDKKMLHLG

SEQ ID NO: 108831 - DNA, 726 bp, Populus trichocarpa
  CDS (1)..(726)
atggaatatcaaaatgaatcccttgagagctcccccctgaggaagctgggaaggggaaaggtggagatcaagcggatcgagaacaccaccaatcgccaagtcactttctgcaaaaggcgcagtggtttgctcaagaaagcctacgaattatctgttctttgcgatgctgaggttgcactcatcgtcttctctagccgcggtcgcctttatgagtactctaacgatagtgtcaaatcaacaattgagaggtacaaaaaggcatctgcagattcttcaaacactgggtctgtttctgaagccaatgctcagtactaccagcaagaagctgccaagctgcgttcccaaattggtaatttgcagaattcaaacaggcatatgctgggtgaagcgcttagttcattgagtgtgaaggaacttaagagtttggaaatacgacttgagaaaggaataagcagaattcgttccaaaaagaatgagctgttgtttgcagaaatcgagtatatgcagaagagggaggttgacttgcacaacaataaccagcttctccgagcaaagatttcagagaatgaaagaaagcgacagagcatgaatttgatgccaggaggagcagactttgagatcgtgcagtctcaaccatatgactctcggaactattctcaagtgaatggattacagcctgcaagtcattactcacatcaagatcagatggcccttcagttagtttaa

SEQ ID NO: 108832 - protein, 241 aa, Populus trichocarpa
MEYQNESLESSPLRKLGRGKVEIKRIENTTNRQVTFCKRRSGLLKKAYELSVLCDAEVALIVFSSRGRLYEYSNDSVKSTIERYKKASADSSNTGSVSEANAQYYQQEAAKLRSQIGNLQNSNRHMLGEALSSLSVKELKSLEIRLEKGISRIRSKKNELLFAEIEYMQKREVDLHNNNQLLRAKISENERKRQSMNLMPGGADFEIVQSQPYDSRNYSQVNGLQPASHYSHQDQMALQLV

SEQ ID NO: 108833 - DNA, 717 bp, Populus trichocarpa
  CDS (1)..(717)
atggcataccaaaatgaaccccaagagagctctcccctgaggaagctggggaggggaaaggtggagatcaagcggatcgagaacaccaccaatcgccaagtcactttctgcaaaaggcggaatggtttgctcaagaaagcctatgaattatctgttctttgcgatgctgaggttgcactcatcgtcttctccagccgtggacgcctttatgagtactctaacaatagtgtcaaatctacaattgaaaggtacaaaaaggcatgtgcagattcttccaacaacgggtcagtttctgaagccaatgctcagttttatcagcaagaagctgccaagctgcgctcgcaaattggtaatttgcagaattcaaacaggaatatgctgggtgaatcacttagtgcattgagtgtgaaggaacttaagagcttggagataaaacttgagaaaggaattggtagaattcgttcgaaaaagaatgagctgttgtttgctgaaattgagtatatgcagaagagggagattgacttgcacaacaataaccagcttctccgagcaaagattgcagagaatgaaagaaagcgacagcacatgaatttgatgccgggaggtgtcaacttcgagatcatgcagtctcaaccatttgactctcggaactattctcaagttaatggattgccgcctgccaatcattaccctcatgaagaccagctcttcagttag

SEQ ID NO: 108834 - protein, 238 aa, Populus trichocarpa
MAYQNEPQESSPLRKLGRGKVEIKRIENTTNRQVTFCKRRNGLLKKAYELSVLCDAEVALIVFSSRGRLYEYSNNSVKSTIERYKKACADSSNNGSVSEANAQFYQQEAAKLRSQIGNLQNSNRNMLGESLSALSVKELKSLEIKLEKGIGRIRSKKNELLFAEIEYMQKREIDLHNNNQLLRAKIAENERKRQHMNLMPGGVNFEIMQSQPFDSRNYSQVNGLPPANHYPHEDQLFS

SEQ ID NO: 108835 - DNA, 696 bp, Papaver nudicaule
  CDS (1)..(696)
atgggtagaggtaagattgagatcaagaggattgagaactcaacaaacaggcaagtgacttactcaaagaggaaaaatgggatcttgaagaaagctaaagagattacaattctctgtgatgctcatgtttctcttgttatcttctctagtactgggaaaatgaatgaatattgcagctctccgttgataaagcaattagatagataccagaaagcttcagggaacaaattatgggatgctaagcatgagtatctcagtgctgaagtggatagagtcaagaaagagaacgacaacatgcagatcgaactcaggcacctgaaaggtgaggatctgacccccttaaatcccagagagctaatacccatagaaagtgcccttgacgatggtattgttggtgttaaggccaaaattaaggaacactatagagcacttaagaaaaggacaaggatgctagaggaggacaataagcgtcttcttaccagattatcacagcaacaaatggaaattcatgggagagtggagatggacactatggaaaataccgggtataataataataatcagaaagcagatggaaccagggattacccggctcacaatgataatcatcatcaggtgccatttggcttccaggtgccgccgatgcagcctaacctcaccactgtcaccaccaccaccaccaccaacaacaaataa

SEQ ID NO: 108836 - protein, 231 aa, Papaver nudicaule
MGRGKIEIKRIENSTNRQVTYSKRKNGILKKAKEITILCDAHVSLVIFSSTGKMNEYCSSPLIKQLDRYQKASGNKLWDAKHEYLSAEVDRVKKENDNMQIELRHLKGEDLTPLNPRELIPIESALDDGIVGVKAKIKEHYRALKKRTRMLEEDNKRLLTRLSQQQMEIHGRVEMDTMENTGYNNNNQKADGTRDYPAHNDNHHQVPFGFQVPPMQPNLTTVTTTTTTNNK

SEQ ID NO: 108837 - DNA, 687 bp, Papaver nudicaule
  CDS (1)..(687)
atgggtagaggaaagattgagatcaagagaatagagaatgcaacaaatagacaagttacttattcaaaaagaagatctgggattttgaaaaaagctaaagaacttacagttctttgtgatgctgaagtttctcttatcatgttttctagtactggaaaaatgactgaatacttaagtccttctcttaatggtaacacaaagagggtttatgacaagtatcaacaactctcaggaattagtctctggaattctcactatgagagtttgcaaaatgctttaaacaagcagaaggagattaacagaaggcttcggcgagaaataaggcagaggatgggagaagatctagatgaattgaccattgaggaattgcgcagtcttgagcaaaatttggaagcttcagttaaagtagtccgtgatcggaagtaccatgtgatcattactcagacggaaaccaccaggaaaaagctaaggaaccacaccgagcaaaaccatggtctcctccgtgaatttgaaccaatattagatgaagatccccactatgtaatagcccatcaagaggaagattatgaatctgcaattgaattggcacatggtggtccgaacatatttgcattccgtctgcaaccaagtcagcccaatcttcacaatggagggggatacaactgtcatgatctacgccttgcttga

SEQ ID NO: 108838 - protein, 228 aa, Papaver nudicaule
MGRGKIEIKRIENATNRQVTYSKRRSGILKKAKELTVLCDAEVSLIMFSSTGKMTEYLSPSLNGNTKRVYDKYQQLSGISLWNSHYESLQNALNKQKEINRRLRREIRQRMGEDLDELTIEELRSLEQNLEASVKVVRDRKYHVIITQTETTRKKLRNHTEQNHGLLREFEPILDEDPHYVIAHQEEDYESAIELAHGGPNIFAFRLQPSQPNLHNGGGYNCHDLRLA

SEQ ID NO: 108839 - DNA, 942 bp, Ceratopteris richardii
  CDS (1)..(942)
atggcaatgccatgttcagatatagacctgcttgacagtgacaatgataacgttgatgatcagcacattagtcttgagctgcgtcaggtgcatgaagatacagatgatggttcacacgatgaacccagagaactgagtcttcttaaccatgagagcaacctctgtaagattgtaaacagtaaggggaaaggcgcggaagccggcaacagcctgcttccgtctacagggacaagccggggaaaaattcagataaggcgcatagagaataccacaagcaggcaagtgaccttctccaagcgtaggaatggcttactcaagaaagcgcacgaactgtctgttctctgtgatgctgagatcgccctgatcatcttctccagcacaggaaaactctttgaatattcgagttcgaggggaataaaaaagattcttgagaggtataaaaggtgttcagggatactgcaagatgttggtggtacagttatacgtgacgtcgagtactggaagcaagaggctgagcgactaaaggagcgcctgacatacatggaggagatccagagaaacatgctgggagagagtctcggaagcctgcaaattaaggatctgcagaatcttgaagctaaactagactcagggttgtacaaaattcgaggggcaaagacgcagttgatggctaggcaagttcaagagctccagaagaaggaacagatactattgcaacaaaacgaggcattgagggccaagttagctgagctgtcatgcttgcaagctccagtgagtggacttaccactgctaccacatctcaagatgttcaagaatcatcaagcgggagaggatcacgacagcgtgaaactagcttgagtgcggcagagaccactttacagcttgcttcacacaatgagcagacgttcctcttacgagctgttccgcatatgcgtctgtag

SEQ ID NO: 108840 - protein, 313 aa, Ceratopteris richardii
MAMPCSDIDLLDSDNDNVDDQHISLELRQVHEDTDDGSHDEPRELSLLNHESNLCKIVNSKGKGAEAGNSLLPSTGTSRGKIQIRRIENTTSRQVTFSKRRNGLLKKAHELSVLCDAEIALIIFSSTGKLFEYSSSRGIKKILERYKRCSGILQDVGGTVIRDVEYWKQEAERLKERLTYMEEIQRNMLGESLGSLQIKDLQNLEAKLDSGLYKIRGAKTQLMARQVQELQKKEQILLQQNEALRAKLAELSCLQAPVSGLTTATTSQDVQESSSGRGSRQRETSLSAAETTLQLASHNEQTFLLRAVPHMRL

SEQ ID NO: 108841 - DNA, 741 bp, Malus domestica
  CDS (1)..(741)
atggggagaggaagagtggagctgaagaggatagagaacaagataaacaggcaagtcacatttgcaaagagaagaaatgggcttctgaagaaagcttatgagctctccgttctctgtgatgctgaggttgctctcatcatcttctccaaccgtggcaagctctatgagttttgcagcagctctagcatgctcaaaacactagacaggtaccaaaaatgcagttatggtgcagtggatcaagttaatagacctgcaaaggaacttgagagcagctatcgtgagtacatgaaactcaaaggtagatatgagtccctacaacgaactcagagaaaccttcttggtgaggacttgggtccattaaacacaaaggaacttgagcagcttgagcgtcaacttgagggctccttgaagcaagttaggtccactaagacccagtatatgctggaccaactttctgaccttcagaacaaggaacaactgttaatagaagccaacagggatttgacaatgaagttggatgaaattagttcaagaaatcaacttagacaatcatgggaaggtggtgaccagggtatggcatatgcaacccagcatcaccatgctcaatcccaaggattcttccagcctttagattgcaatcccactttgcaaatggggtactctgcagtggggtcagagcagatgagtgctacaactaatgcccagcaagtgaactgtttcatccctggatggatgctttga

SEQ ID NO: 108842 - protein, 246 aa, Malus domestica
MGRGRVELKRIENKINRQVTFAKRRNGLLKKAYELSVLCDAEVALIIFSNRGKLYEFCSSSSMLKTLDRYQKCSYGAVDQVNRPAKELESSYREYMKLKGRYESLQRTQRNLLGEDLGPLNTKELEQLERQLEGSLKQVRSTKTQYMLDQLSDLQNKEQLLIEANRDLTMKLDEISSRNQLRQSWEGGDQGMAYATQHHHAQSQGFFQPLDCNPTLQMGYSAVGSEQMSATTNAQQVNCFIPGWML

SEQ ID NO: 108843 - DNA, 720 bp, Malus domestica
  CDS (1)..(720)
atggggagaggtagagttcagcttaagcgcatagagaacaagatcaacaggcaggtgactttttccaaaagaagaactgggctgctgaagaaggctcatgagatctctgtcttgtgtgatgctcaggttgctttgattgtcttctccaacaagggcaagctctttgagtacgccacagattcatgcatggagcaaatcctcgaacgctatgaaagatactcttacgccgaaagacagctagtcgaaccagattttgagtcacagggtaactggacctttgaatattccagactaaaggctaaggctgaggttttgcaaagaaaccataggcactatttgggagaagacctggattccttgactctcaaggaaatccaaaatttggagcaacagcttgacaccgctcttaaacaaattcgattaagaaaaaaccaactcatgaatgaatccatctctgagcttcagagaaagagaaaggcgatacaggaggaaaataacttgctagcaaagaagataaaggagaaggagaaggctgcagctcagccccaggttcaaaactgggagcagcagaaccatggccttgacctgcttccacagccacttccatgtctaaacaatggggggacgcagcaagatgaattccttcaagtgaggaggaaccagctggacctgactctggaaccattatatgaatgccatctcggatgctttgctgcttga

SEQ ID NO: 108844 - protein, 239 aa, Malus domestica
MGRGRVQLKRIENKINRQVTFSKRRTGLLKKAHEISVLCDAQVALIVFSNKGKLFEYATDSCMEQILERYERYSYAERQLVEPDFESQGNWTFEYSRLKAKAEVLQRNHRHYLGEDLDSLTLKEIQNLEQQLDTALKQIRLRKNQLMNESISELQRKRKAIQEENNLLAKKIKEKEKAAAQPQVQNWEQQNHGLDLLPQPLPCLNNGGTQQDEFLQVRRNQLDLTLEPLYECHLGCFAA

SEQ ID NO: 108845 - DNA, 747 bp, Malus domestica
  CDS (1)..(747)
atgggcagaggcagagttgagctgaagaggatagagaataaaattaacaggcaagtgacctttgccaaaagaagaaatgggctgctcaagaaagcttatgagctctcagttctctgcgatgctgaggttgccctcattattttctctagccgtggcaagctctatgaattctgtagcagtttcagcatgatgaaaacgcttgaaaagtaccaaagttgcagttatggttccctggaagccaacctaccagccaacgagacccagaacagctatcaggactatttgatgttgaaggcaagagttgaggtcctccaacaatctcaaagaaaccttcttggggaagatttgtcccacctgaacacaaaggagcttgagcatcttgagcatcaattggagacctctttgaagcaaattaggtcaagaaagactcagtttattctcgatcagctttctgatcttcaaaacagggaacagatgctagttgaagctaacaaagccttgaagaggaagctggaagaaacaagtgtgcatgctccagaaggaatggcatgggaagctgctggccatggccccaacaacattcagcaaactcggcttccttcccactcagaagccttcttccatcccttggaaggaaacaactccagttcccaaattggatacacccatatgggttcagataatgaaatgaatgttggaaatccgggccagtatgttaatggatatattcctgggtggatgctttga

SEQ ID NO: 108846 - protein, 248 aa, Malus domestica
MGRGRVELKRIENKINRQVTFAKRRNGLLKKAYELSVLCDAEVALIIFSSRGKLYEFCSSFSMMKTLEKYQSCSYGSLEANLPANETQNSYQDYLMLKARVEVLQQSQRNLLGEDLSHLNTKELEHLEHQLETSLKQIRSRKTQFILDQLSDLQNREQMLVEANKALKRKLEETSVHAPEGMAWEAAGHGPNNIQQTRLPSHSEAFFHPLEGNNSSSQIGYTHMGSDNEMNVGNPGQYVNGYIPGWML

SEQ ID NO: 108847 - DNA, 624 bp, Malus domestica
  CDS (1)..(624)
atggggaggggaaagattgaaatcaagaggatcgagaacacgacgaatcggcaagtgaccttctgcaaacgaagaaatgggctgctgaagaaagcatatgaactatccattctctgtgatgctgaagttgccctcattgtcttctctactcgtggccgtctctacgagtactctaacaacaacagcataagaaacaccatagagaggtacaagaaggcatgttcagatagcacaggatcatcctctgttactgaaattaacgctcagaactctaacaggcacttaatgggagatgccttgagcactctgactgtgaaagaactaaagcaggtggagaataggcttgaacgaggcattactagaatcaggtccaagaagcatgaactgctgcttgcagagattgagtacttccagaaaaaggagattgagctggaaaacgaaaatgtttattttcgaactaaggtatcagaagtcgagaggcttcaacaagcaaacatggtttctgggtcagagatgaatgcaatccaggcattagcttctcgccatttctttagccagaatatgatcgagggtggagaagctaccttcccacagcaagacaagaagaacctccatcttgggtaa

SEQ ID NO: 108848 - protein, 207 aa, Malus domestica
MGRGKIEIKRIENTTNRQVTFCKRRNGLLKKAYELSILCDAEVALIVFSTRGRLYEYSNNNSIRNTIERYKKACSDSTGSSSVTEINAQNSNRHLMGDALSTLTVKELKQVENRLERGITRIRSKKHELLLAEIEYFQKKEIELENENVYFRTKVSEVERLQQANMVSGSEMNAIQALASRHFFSQNMIEGGEATFPQQDKKNLHLG

SEQ ID NO: 108849 - DNA, 732 bp, Malus domestica
  CDS (1)..(732)
atggggagggggagagtggagctgaagagaatagagaacaagattaacaggcaggtgactttctcaaagaggagaaatggtttattgaagaaagcctatgaactctctgtgctttgtgatgctgaggttggccttatcatcttctctagccgtggcaagctctatgagtttgccagcgctggtatgagcaaaacccttgaacgataccaacgttgctccttcactccacctgagaatagcattgaacgtgaaacacagagctggtaccaagaagtcacaaaactgaaagctaaatatgaatcccttcagcgaactcaaaggcatttgcttggtgaagatcttggaccactgagtgtgaaggagttgcaaaatcttgaaaaacaacttgaaggagctcttgcacaaaccagacaaaggaagacacagcttatgattgaacaaatggaggacctgcgcaaaaaggagcgtcaccttggagacctcaacaagcagctgagggtcaagcttgaggcagaagggcagaatctgaatgtcattcaaaacatgtggagctcagatgcagcggctggaagtagcaacttttctttgcattcttcacaaaccaaccccatggactgtacacctgaacctgtcatacaaatgggataccatcagtatcatcctgctgagggatcatctattccaaggagcttgactggtgagaccaacttcatccaaggatgggttctctga

SEQ ID NO: 108850 - protein, 243 aa, Malus domestica
MGRGRVELKRIENKINRQVTFSKRRNGLLKKAYELSVLCDAEVGLIIFSSRGKLYEFASAGMSKTLERYQRCSFTPPENSIERETQSWYQEVTKLKAKYESLQRTQRHLLGEDLGPLSVKELQNLEKQLEGALAQTRQRKTQLMIEQMEDLRKKERHLGDLNKQLRVKLEAEGQNLNVIQNMWSSDAAAGSSNFSLHSSQTNPMDCTPEPVIQMGYHQYHPAEGSSIPRSLTGETNFIQGWVL

SEQ ID NO: 108851 - DNA, 729 bp, Pinus resinosa
  CDS (1)..(729)
atggggcgagggcgcgtcgagctgaagcggatcgagaataagattaaccgtcaggtcacgttttcgaaacgccggaatggtctgctgaaaaaggcgtatgaactttcagtgttatgtgatgcagaggtagcactgataatattctcaagcagaggaaaactctatgagttcggaagcgccgggatgctcaagactctggagcggtatcaaaaatgttcatacgtattgcaagacgcgactgtatcggatcgggaggcacagaattggcatcaagaggttggcaaattaaaagccagagttgaacttttacaacgatcacaaaggcacttattaggcgaagacctaggtcccctgagtattaaggagctgcaacaactggaacgtcaacttgaggttgcactgacacatgttaggtcaagaaagactcaagtcatgttggaaatgatggatgaactacgaagaaaggagcgcattttacaagaagtaaacaaatctctgcgcaagaagttgcaggaggccgagggacaggcattcaatgccatgcaacctccccctcatgcatgggattcgcatgcagtagcaaataatgcatatgctatgcaacatccatcaaatgctgtggattgtgagcccacattgcagactggataccaatatgcccctcctgagtcaagcatgcctaggcacgagcaagcacaaaacaattacatgcaaggctggatggtataa

SEQ ID NO: 108852 - protein, 242 aa, Pinus resinosa
MGRGRVELKRIENKINRQVTFSKRRNGLLKKAYELSVLCDAEVALIIFSSRGKLYEFGSAGMLKTLERYQKCSYVLQDATVSDREAQNWHQEVGKLKARVELLQRSQRHLLGEDLGPLSIKELQQLERQLEVALTHVRSRKTQVMLEMMDELRRKERILQEVNKSLRKKLQEAEGQAFNAMQPPPHAWDSHAVANNAYAMQHPSNAVDCEPTLQTGYQYAPPESSMPRHEQAQNNYMQGWMV

SEQ ID NO: 108853 - DNA, 678 bp, Vitis vinifera
  CDS (1)..(678)
atgggtcgtgggaagattgagatcaagaggatagagaaccccaccaacaggcaggtcacctactccaagcgacgaaatggtattttcaagaaagcccaggagctcaccgttctttgtgatgctaaggtttcactcatcatgttctccaatactggaaaattccacgaatataccagtcctactataacgacgaaaaaggtctacgatcagtatcagaagactttagggattgatctttggagctctcactacgagagaatgcaagaaaacttgcgaaaactgaaagagatcaacaacaaattaaggagagagatcaggcaaagaatgggtgaagatttgggcgatctgagcattgaggacctgcgcggccttgagcagaagatggacgcttctttaggattagtacgcgaacggaagtaccacgtgatcaaaactcagaccgagacctacaggaaaaaggtcaggaacttggaagaacaacacggaaatctccttctcaactttgaagcaaaatgcgatgatccacattacggattagtggaaaatgatggagattatgaatcagcggtggcattcgcgaacggggcttccaacctctatgcttttcgcctgcatcaagcccaccctaatcttcaccatgatgggggatatggatcacatgatctgcgccttgcttga

SEQ ID NO: 108854 - protein, 225 aa, Vitis vinifera
MGRGKIEIKRIENPTNRQVTYSKRRNGIFKKAQELTVLCDAKVSLIMFSNTGKFHEYTSPTITTKKVYDQYQKTLGIDLWSSHYERMQENLRKLKEINNKLRREIRQRMGEDLGDLSIEDLRGLEQKMDASLGLVRERKYHVIKTQTETYRKKVRNLEEQHGNLLLNFEAKCDDPHYGLVENDGDYESAVAFANGASNLYAFRLHQAHPNLHHDGGYGSHDLRLA

SEQ ID NO: 108855 - DNA, 684 bp, Oryza sativa
  CDS (1)..(684)
atggggagagggaagattgccatcaagaggatcgacaacacgacgaaccggcaggtgaccttctcgaagcggcgcggcgggctgatgaagaaggcccgggagctggccatcctctgcgacgccgacgtcggcctcattgtcttctcctgcaccggccgcctctacgacttctccagctcaagcatgaaatcaataatagagcggtaccaggaggcaggagaggagcattgtcggttgctgaacccaatgtcagaggctaagttttggcagcgggaggttacaactttgaggcagcaagtgcaaaacttacaccacaacaacaggcaacttttgggagaggaaatctccaacttcacagttagagatctgcagcttctccagaaccaagttgagatgagcctacattccataagaaataaaaaggatcaacttttggcagaggagattctaaaactcaatgaaaaggggtctcttgttcaaaaggagaacagtgaacttcgcaagaagttcaacattgctcatcaacgcaacatagaattacacaagaagcttaactctggagaaagcacgtcaagtgagcaagttaccagaagctcaaaggatcccggagaatcgagtacaccccgtgattcacgtgtgtgtattgaccttgaattgagtcaaaaagaagttgaagatgaataa

SEQ ID NO: 108856 - protein, 227 aa, Oryza sativa
MGRGKIAIKRIDNTTNRQVTFSKRRGGLMKKARELAILCDADVGLIVFSCTGRLYDFSSSSMKSIIERYQEAGEEHCRLLNPMSEAKFWQREVTTLRQQVQNLHHNNRQLLGEEISNFTVRDLQLLQNQVEMSLHSIRNKKDQLLAEEILKLNEKGSLVQKENSELRKKFNIAHQRNIELHKKLNSGESTSSEQVTRSSKDPGESSTPRDSRVCIDLELSQKEVEDE

SEQ ID NO: 108857 - DNA, 687 bp, Zea mays
  CDS (1)..(687)
atggcgagggagcgacgggagataaagaggatagagagcgcggcggcgcggcaggtcacgttctccaagcgccgccgcggcctcttcaagaaggctgaggagctctccgtgctgtgcgatgccgacgtcgcgctcatcgtcttctcctccacgggaaagctctcccagttcgccagctccagtatgaatgagatcattgacaagtacagcacacattctaaaaacctggggaaagcagaacagccttcacttgacttgaacttagaacatagcaaatatgcaaatttgaatgagcaacttgtggaagcaagccttcgactcaggcagatgagaggtgaagaacttgagggattgagtgttgaagaactccagcaattggagaagaatctggaatctggtctgcatagggtgcttcaaacaaaggatcaacaattcttggaacagatcagcgacctcgaaaaaaagagtacacaactggcagaggagaacaggcaactgaggaatcaagtatcccacatacccccagttggcaagcaatcagttgctgatactgaaaatgttatcgctgaagatgggcaatcctctgaatcagtcatgactgcgttgcattctgggagttcacaggataatgatgatggttcggatgtctctctaaaattagggctgccttgtgttgcatggaagtga

SEQ ID NO: 108858 - protein, 228 aa, Zea mays
MARERREIKRIESAAARQVTFSKRRRGLFKKAEELSVLCDADVALIVFSSTGKLSQFASSSMNEIIDKYSTHSKNLGKAEQPSLDLNLEHSKYANLNEQLVEASLRLRQMRGEELEGLSVEELQQLEKNLESGLHRVLQTKDQQFLEQISDLEKKSTQLAEENRQLRNQVSHIPPVGKQSVADTENVIAEDGQSSESVMTALHSGSSQDNDDGSDVSLKLGLPCVAWK

SEQ ID NO: 108859 - DNA, 774 bp, Citrus unshiu
  CDS (1)..(774)
atgtgtagctcaagcaagttaccagcaaccatggagtttccaaaacaaaacccagaaagctcaagccaaagcaagaaaataggaagaggcaaaattgagataaagcggatcgagaacacaacaaacagacaagtcaccttctgtaaacgccgcaatggattgttgaagaaagcttatgaactgtctgtcttgtgtgatgctgaagttgctctcatcgtcttctctagccgtggccgcctttatgaatatgctaacaacagtgtcagagcaacaattgacaggtacaagaaagcatgtgccgattcttctaacccaggatctattactgaagctaacactcagttttaccagcaagaagccacaaaactacgaagacaaatccgggagattcagaatttgaacaggcacattctgggtgaggccctcagcactttaaactttaaggagctcaagaaccttgaggcaagacttgagaagggaatcggcagagtcagatccaagaagaacgaaatgttattagctgaaatcgagttcatggagaagagggaaattcagcttcaaaatgataacatgtacctgagagcaaggatatctgaaaatgagagagcacaacaagaacggcaatcagaaagcatgatgcagcaaggaggagggcatgtgtacgagcccgcggcttcacagccctatgaccgaaacttccttcctgtaaacctcttggaacccaatcaccagtacgctcgccaagacgatcagccccctcttcaacttgtttga

SEQ ID NO: 108860 - protein, 257 aa, Citrus unshiu
MCSSSKLPATMEFPKQNPESSSQSKKIGRGKIEIKRIENTTNRQVTFCKRRNGLLKKAYELSVLCDAEVALIVFSSRGRLYEYANNSVRATIDRYKKACADSSNPGSITEANTQFYQQEATKLRRQIREIQNLNRHILGEALSTLNFKELKNLEARLEKGIGRVRSKKNEMLLAEIEFMEKREIQLQNDNMYLRARISENERAQQERQSESMMQQGGGHVYEPAASQPYDRNFLPVNLLEPNHQYARQDDQPPLQLV

SEQ ID NO: 108861 - DNA, 735 bp, Citrus unshiu
  CDS (1)..(735)
atggggagaggaagggtgcagctgaagaggatagagaacaagatcaatagacaagtgactttctctaagcgaaggtctggtttattgaaaaaagcccatgagatctctgtgctttgtgacgctgaagttgctttgatcgtcttctccactaaaggcaaactctttgaatactctactgattcatgcatggaaagaatccttgaacgatatgagaggtattgttatgcggagaggcagcttcaagcaaatgagattgaaccaaatggaaactggacattggaatattccaagcttaaagctaggatggaggttttacaaagaaatcaaaagcatttcatgggagaggatcttgcagacttaagtctcaaagagcttcaaagtgtagagcagcagattgattctggtcttaaactcattcgatcaagaaagaaccaactcatgcttcaatccatttcagagcttcagaaaaaggacaagttattgaaagagcaaaacaacttgcttgcaaagaaggtaaaagaaaaggagaagctactgagccaagaggcgcagtgcagggaacagcagcagcagctaaatcatgactggaactcatccaatgttcatctaatgcagacattgaccaatagctcttaccaaatgggagggggcagcggagaggaggatgaggatactccgacaggacatcgagctaacgctctgctgcccgcttggatgcttcgtcaccttcattaa

SEQ ID NO: 108862 - protein, 244 aa, Citrus unshiu
MGRGRVQLKRIENKINRQVTFSKRRSGLLKKAHEISVLCDAEVALIVFSTKGKLFEYSTDSCMERILERYERYCYAERQLQANEIEPNGNWTLEYSKLKARMEVLQRNQKHFMGEDLADLSLKELQSVEQQIDSGLKLIRSRKNQLMLQSISELQKKDKLLKEQNNLLAKKVKEKEKLLSQEAQCREQQQQLNHDWNSSNVHLMQTLTNSSYQMGGGSGEEDEDTPTGHRANALLPAWMLRHLH

SEQ ID NO: 108863 - DNA, 738 bp, Citrus unshiu
  CDS (1)..(738)
atggcgtttccaaatgaattagcagcaggaagagaggaattatcaccaaagagaaaaatggggagaggaaagatcgagatcaagcggatcgaaaacacaacaaatcgccaagtgaccttctgcaagaggcgcaatggtttgctcaagaaagcttacgaattatctgttctttgtgatgctgagattgctcttatcgtcttctccagccgcggccgcctttatgagtattccaacaacagtgtgaaatcaacaattgacaggtacaagaaggccactgcagatacctcaaatactgggtctatctgtgaagcaaatgctcagttctaccaacaagaagctgccaagctgaggatacaaattagcaatatgcaaaattcaaacagaaacatgttgggtgaatcactaagtgggttaaatttcaaggaactcaagaacatggagactcgtttagagaaaggtattagcagaatccgatctaaaaagaatgagctgctgtttgcagaaattgagtacatgcagaagagggaagttgacttgcacaacagcaaccagcttctccgagcaaagatagccgagaatgaaagaggacagcagaacatgaatttgatgcaaggagggagtagctacgagattatacagtctcagccatttgattcccggagctatttccaagtcaatgcattacagcccaccaatcattacccacgccaggatcagatggcccttcagttagtttaa

SEQ ID NO: 108864 - protein, 245 aa, Citrus unshiu
MAFPNELAAGREELSPKRKMGRGKIEIKRIENTTNRQVTFCKRRNGLLKKAYELSVLCDAEIALIVFSSRGRLYEYSNNSVKSTIDRYKKATADTSNTGSICEANAQFYQQEAAKLRIQISNMQNSNRNMLGESLSGLNFKELKNMETRLEKGISRIRSKKNELLFAEIEYMQKREVDLHNSNQLLRAKIAENERGQQNMNLMQGGSSYEIIQSQPFDSRSYFQVNALQPTNHYPRQDQMALQLV

SEQ ID NO: 108865 - DNA, 732 bp, Arachis hypogaea
  CDS (1)..(732)
atgggaaggggaagggtagagttgaagagaattgagaacaagatcaacaggcaagtgacctttgcaaagagaagaaacgggcttctgaagaaggcgtatgagctttcagttctatgtgatgctgaggttgctctcatcatcttctccaataggggaaaactgtacgagttttgcagcagttcaagcatgctgaaaacactagagaggtgccagaaatgtaactatggagcaccggaaactaatgtgtcaactagggaagccttggaattaagcagtcaacaagaatacttgaagccgaaggcacgttatgaagccctacaaaggtcccagagaaacctgatgggagaagatcttggccctctaagcagcaaagagctggaatcactggaaaggcagctagattcgtcgttgaagctaatcagatccacaaggacccaattcatgctggatcagctatcggaacttcaacgtaaggaacacttgctaagtgaggctaacagggctctcagacaaaggcagttggaagggtatcaaataaatccaatgcagctgaatcctggtggtgttgatgatatggggtatgcccgccatccacctcaacctcagcccgatcctcttttccagcaattggattgtgagcctaccttacaaattggatatcagcctgatccagtatcagtggtgacggcaggcccaagcatgggcaattacatgggaggatggctaccatag

SEQ ID NO: 108866 - protein, 243 aa, Arachis hypogaea
MGRGRVELKRIENKINRQVTFAKRRNGLLKKAYELSVLCDAEVALIIFSNRGKLYEFCSSSSMLKTLERCQKCNYGAPETNVSTREALELSSQQEYLKPKARYEALQRSQRNLMGEDLGPLSSKELESLERQLDSSLKLIRSTRTQFMLDQLSELQRKEHLLSEANRALRQRQLEGYQINPMQLNPGGVDDMGYARHPPQPQPDPLFQQLDCEPTLQIGYQPDPVSVVTAGPSMGNYMGGWLP

SEQ ID NO: 108867 - DNA, 693 bp, Malus domestica
  CDS (1)..(693)
atggtgagaaagaaggttgagatgaaaagaattgagaataacacaagccgacaagtgaccttctcgaaacgtcgaaaggggttgttaaagaaagcttatgagctttcggttctttgcgatgctgaagttgcagtcatcgtcttctcgcaaaaaggcaggatctatgagttctccaggtctgacatgcaacggactataaatcgataccataaacatgaaaatggatcagggccgaccaacaaggttgaagtggaacaatatgtgcagcacttgaagcatgaatcagctattatagccaagaagatagagatcctagaagcttcccagcggaagcttttgggaaatgatctggattcttgccctgttgaagaactccaagagatcagtagccagctggagcgaagcttacgcagcataagtgagagaaaggctcaattatacacggagcagatggaacaacataaggcaagggagaggttcctgttacaagaggatgcacagttacgtgaagagtgttgtgcgaagccgtggatggagttttcacctcaagaaaaaagagcttctgcgtctgtaagcaatgaaaaagcaggagcttctgcttctgctccgataaactaccggagccaaagtagcatgagttctgaggtggacaccgatttgctcattggacagccaaatggtgcgcgctgttga

SEQ ID NO: 108868 - protein, 230 aa, Malus domestica
MVRKKVEMKRIENNTSRQVTFSKRRKGLLKKAYELSVLCDAEVAVIVFSQKGRIYEFSRSDMQRTINRYHKHENGSGPTNKVEVEQYVQHLKHESAIIAKKIEILEASQRKLLGNDLDSCPVEELQEISSQLERSLRSISERKAQLYTEQMEQHKARERFLLQEDAQLREECCAKPWMEFSPQEKRASASVSNEKAGASASAPINYRSQSSMSSEVDTDLLIGQPNGARC

SEQ ID NO: 108869 - DNA, 735 bp, Prunus persica
  CDS (1)..(735)
atggagttcccaaatcaagcacctgagagctcttcccaaagaaaaattggaagaggcaagattgagattaagcggatcgaaaacactacaaatcgacaagtcaccttctgcaagcgccgcaacggtttgcttaagaaagcctatgagttatctgttctgtgtgatgctgaagttgctcttattgtcttctctacccgtggccgcctgtatgagtatgctaacaacagcgttagagcaacgattgataggtacaaaaaagcatgtactgattctacgaatggtggatctgtttctgaagctaacactcagttttatcagcaggaatcatctaaattacgaagacagattcgcgaaatccagaactcaaacaggcatatactgggtgaagctcttagcactttgaacatcaaggaactcaagaacctagaaggaagactggagaaagggatcagcaggataagatccaaaaagaacgaaatgctgtttgctgaaatcgaatttatgcaaaagagggagatggagctgcaaaaccataacaattatctgagagcaaagatagctgaaaatgagagggcacaacagcagcaaacaaatatgattcaaggaacttcttatgatcagtcaatgccttcacagtcatacgacaggaacttcctccctgtaatcttggaggcgaataataataataataaccattactctcgccatgaccagacagctctccaacttgtttga

SEQ ID NO: 108870 - protein, 244 aa, Prunus persica
MEFPNQAPESSSQRKIGRGKIEIKRIENTTNRQVTFCKRRNGLLKKAYELSVLCDAEVALIVFSTRGRLYEYANNSVRATIDRYKKACTDSTNGGSVSEANTQFYQQESSKLRRQIREIQNSNRHILGEALSTLNIKELKNLEGRLEKGISRIRSKKNEMLFAEIEFMQKREMELQNHNNYLRAKIAENERAQQQQTNMIQGTSYDQSMPSQSYDRNFLPVILEANNNNNNHYSRHDQTALQLV

SEQ ID NO: 108871 - DNA, 639 bp, Vitis vinifera
  CDS (1)..(639)
atggggagagggaagattgagatcaagaggatcgagaactcaagcaacaggcaggtgacctactcaaagaggagaaatgggatcatgaagaaggccaaggagatcactgttctctgcgatgctcatgtctctcttgttatctttgctagctctggaaagatgcacgagtactgtagcccttctacaacgttgattgatatcttggataggtatcacaagcagtctgggaagaggctctgggatgcaaaacatgaaaatctcagcaatgaattggataggatcaaaaaggagaatgatagcatgcagattgaactcaggcacctgaagggggaggatatctcatctctgcaccacaaagaactcatggccattgaggatgcccttgagattggccttgcaagtgttcgcaacaaacagatggaattctacaagatggtcaagaaaaatcaacgaatcctggaggaggagaacaagcacctcaattacatcgtgcaccaccagggtatgcccatggaggcgggcaatgtgagagaggtggaaagtggatatcatcagagagctgtgagggactacaatccccagatgcctttcgccttccgggtgcagccaattcagccaaacttacaggagaggatataa

SEQ ID NO: 108872 - protein, 212 aa, Vitis vinifera
MGRGKIEIKRIENSSNRQVTYSKRRNGIMKKAKEITVLCDAHVSLVIFASSGKMHEYCSPSTTLIDILDRYHKQSGKRLWDAKHENLSNELDRIKKENDSMQIELRHLKGEDISSLHHKELMAIEDALEIGLASVRNKQMEFYKMVKKNQRILEEENKHLNYIVHHQGMPMEAGNVREVESGYHQRAVRDYNPQMPFAFRVQPIQPNLQERI

SEQ ID NO: 108873 - DNA, 687 bp, Misopates orontium
  CDS (1)..(687)
atggtgagaggaaagactcagatgaggcgtattgagaacgccacaagcagacaagtcaccttctcaaagagaagaaatggattgctcaaaaaagcctttgagctttcagttctttgtgatgctgaagttgcacttgtaatattttctccacgaggcaagctttatgaatttgcaagctcaagcatgcaggagacaatagaacgttaccagaagcacgctaaagaagttcaagctaataaccctccaacagaacataattttcagcacctaaagcatgaaacagttagtatgatgaagaagatagagcaactcgagacttcaaaacggaagcttcttggggaaggcctgggaacatgcaacatggaagaactgcagcagttagaacaacagttggaacgaagtgtcactagcatccgtgcaagaaagatgcaagtgtacatgcaacagattgagcaactgaaagaaaagggaaaagccctagctgctgagaatgccatgctgtctcagaaggttgggctgcaaccacaaggacaaacatcaaactcggacaaagcaacatgttcttttgagaaaacagagaaagcaacattgggaacttctacagaaattagtgaagtttcggatgtggagactgagttgttcattggacttcccgagacaagggctaagcgtccaccccaaaaatga

SEQ ID NO: 108874 - protein, 228 aa, Misopates orontium
MVRGKTQMRRIENATSRQVTFSKRRNGLLKKAFELSVLCDAEVALVIFSPRGKLYEFASSSMQETIERYQKHAKEVQANNPPTEHNFQHLKHETVSMMKKIEQLETSKRKLLGEGLGTCNMEELQQLEQQLERSVTSIRARKMQVYMQQIEQLKEKGKALAAENAMLSQKVGLQPQGQTSNSDKATCSFEKTEKATLGTSTEISEVSDVETELFIGLPETRAKRPPQK

SEQ ID NO: 108875 - DNA, 720 bp, Malus domestica
  CDS (1)..(720)
atggggagaggtagagttcagcttaagcgcatagagaacaagatcaacaggcaggtgactttttccaaaagaagaactgggctgctgaagaaggctcatgagatctctgtcttgtgtgatgctcaggttgctttgattgtcttctccaacaagggcaagctctttgagtacgccacagattcatgcatggagcaaatcctcgaacgctatgaaagatactcttacgccgaaagacagctagtcgaaccagattttgagtcacagggtaactggacctttgaatattccagactaaaggctaaagctgaggttttgcaaagaaaccataggcactatttgggagaagacctggattccttgactctcaaggaaatccaaagtttggagcaacagcttgacaccgctcataaacaaattcgattaagaaaaaatcaactcatgcatgaatccatcactgagcttcagagaaaggaaaaggcgatacaggagcaaaataacttgctagcaacgaagatgaaggagaaggagaaggctgcagctcagccccaggttcaaaactgggagcagcagaaccatgaccttgacctgcttccacagccccttccatgtcttaacattggggggacgcagcaagatgaattccttcaagtgaggaggaaccagctggaccttacactggaaccattttattcatgccatctcggatgctttgctgcttga

SEQ ID NO: 108876 - protein, 239 aa, Malus domestica
MGRGRVQLKRIENKINRQVTFSKRRTGLLKKAHEISVLCDAQVALIVFSNKGKLFEYATDSCMEQILERYERYSYAERQLVEPDFESQGNWTFEYSRLKAKAEVLQRNHRHYLGEDLDSLTLKEIQSLEQQLDTAHKQIRLRKNQLMHESITELQRKEKAIQEQNNLLATKMKEKEKAAAQPQVQNWEQQNHDLDLLPQPLPCLNIGGTQQDEFLQVRRNQLDLTLEPFYSCHLGCFAA

SEQ ID NO: 108877 - DNA, 735 bp, Nicotiana tabacum
  CDS (1)..(735)
atgggaagaggaagggtgcagttgaagagaattgagaacaaaattaataggcaagttactttctcaaaacgtcgatctggtttgcttaagaaagctcatgagatctctgtgctttgtgatgctgaggttggtttgattgttttttctacaaaaggcaaactctttgaatatgccactgattcttgcatggagaggatccttgaaagatacgaaagatactcatatgctgagaggcaacttgttgctactactgatcatagctgcccgggaagctggaccctggaacatgcaaaacttaaggctagacttgaggttttgcagagaaaccaaaggcattatacgggagaagatttggactcgttaagtacgaaggaacttcagaatttggaacaccagctggattctgctcttaaacacattcgctcaagcaagaaccaattgatgcatgagtctatttctgagcttcaaaaaaaggacaaagcactgcaggagcaaaacaaccagctttgcaagaaggtgaaggagagggagaaagagttggcccagcaaaatcagcgggagcagcagaaccaagaactcaactcaccttcatttatttttcaacagcaattggactctcctaaccttggggaagcatatcagagtactgcagaagaaaatggagaagtagaaggaggttcgcagcagcaaactgctaatactgtgatgcccccatggatgattcgccatctttaa

SEQ ID NO: 108878 - protein, 244 aa, Nicotiana tabacum
MGRGRVQLKRIENKINRQVTFSKRRSGLLKKAHEISVLCDAEVGLIVFSTKGKLFEYATDSCMERILERYERYSYAERQLVATTDHSCPGSWTLEHAKLKARLEVLQRNQRHYTGEDLDSLSTKELQNLEHQLDSALKHIRSSKNQLMHESISELQKKDKALQEQNNQLCKKVKEREKELAQQNQREQQNQELNSPSFIFQQQLDSPNLGEAYQSTAEENGEVEGGSQQQTANTVMPPWMIRHL

SEQ ID NO: 108879 - DNA, 666 bp, Plantago major
  CDS (1)..(666)
atggttcgaggaaagactcaaatgaggcgtatagaaaacgccacaagcagacaggtgaccttctccaagaggagaaatggtttgctcaagaaagcttttgagctttctgttctttgtgatgctgaagttgctctcattatcttctctcctagaggaaaactctatgaatttgccagttcaagcttgcaggacacaatagaacgttaccaaagtcacatcaaagaacttcaagctgaaaatccaccactggagcagaatacacagcaactgcagtatgaaacagctggtttgctcagaaagattgaacaacttgaggctgcaaagaggaagcttcttggggaaggcataggagcgtgctccttagaagagctgcagcagctggaaacgcagctggagcgtagtgttactagcatccgcaccagaaagacgcaactgtacaagcaacagattgagcaactgaaagaaaagactaaagctcttgctgctgaaaacgccagcatctgccagaagtatggactacaaccacaaaaaggaggaggagcaaaattgagtgaagagagaggaaatgcagcgtctgcagagatcagcgaagtttcagatgtggagactgacctgttcattggactgccagaaagcagggcgaacaaacattccctccagaagtga

SEQ ID NO: 108880 - protein, 221 aa, Plantago major
MVRGKTQMRRIENATSRQVTFSKRRNGLLKKAFELSVLCDAEVALIIFSPRGKLYEFASSSLQDTIERYQSHIKELQAENPPLEQNTQQLQYETAGLLRKIEQLEAAKRKLLGEGIGACSLEELQQLETQLERSVTSIRTRKTQLYKQQIEQLKEKTKALAAENASICQKYGLQPQKGGGAKLSEERGNAASAEISEVSDVETDLFIGLPESRANKHSLQK

SEQ ID NO: 108881 - DNA, 759 bp, Triticum aestivum
  CDS (1)..(759)
atggggaggggaaggattgagatcaagaggatcgagaacaccactagccggcaggtgaccttctgcaagcgccggaacgggctcctcaaaaaggcctacgagctctccgtcctgtgcgacgccgaggtggcgctcatcgtcttctccagccgcggccgcctctacgagtactccaacaacagtgtcaaggctacaattgacaggtacaagaaggcacatgcttgtggctcaacctctggggtacctctcatagaagtcaatgctcagcaatactaccagcaagaagctgcaaagctgcgccaccagatccagatgctgcaaagcactaacaagcacttggttggtgattctgttgggaacctgtcactcaaggagctgaagcaactcgaaagccggcttgagaaaggcattgcgaagatcagggccaggaagaatgagctcctatcttctgagatcaactacatggtcaaaagggagatagagcttcagagtgacagcattgatctcagaaccaagattgcggaggaggagcagcggttgcagcaggtgactatcgccaggccctcggtggcgccggagctgaaccctttcaccgcactggacatgaagtgcttcttccctgccaacctcttcgaggcggcggtgcatgcgcacgcgcaggcacaggctcaggctcaggctcaggcctcgcttcagctgaacctaggctaccagcagcttgctccaccgggcgccggcgatgtggctcatcagttctag

SEQ ID NO: 108882 - protein, 252 aa, Triticum aestivum
MGRGRIEIKRIENTTSRQVTFCKRRNGLLKKAYELSVLCDAEVALIVFSSRGRLYEYSNNSVKATIDRYKKAHACGSTSGVPLIEVNAQQYYQQEAAKLRHQIQMLQSTNKHLVGDSVGNLSLKELKQLESRLEKGIAKIRARKNELLSSEINYMVKREIELQSDSIDLRTKIAEEEQRLQQVTIARPSVAPELNPFTALDMKCFFPANLFEAAVHAHAQAQAQAQAQASLQLNLGYQQLAPPGAGDVAHQF

SEQ ID NO: 108883 - DNA, 693 bp, Triticum aestivum
  CDS (1)..(693)
atggtgcggggcaagacgcagatgaagcggatagagaacgcgacgagccggcaggtgaccttctccaagcgcaggaatgggctgctcaagaaggccttcgagctctccgtgctctgcgacgccgaggtcgcgctcgtcgtcttctcccctcgcggcaggctctacgagttcgccagcgccaccagcttgcagaaatcgattgaccgctataaggcttatacaaaggatactgttaataacaagacagtacagccagatatacagcaagtcaaagctgatgctctaagcttggcaaagaaacttgaagctcttgaagattcgaagcgaaagatcttgggcgaaaatttaggaggatgctctactgaagaactgcattttctggaaggaaaaattgagaagagtctccgcgttatcagaggaaagaagacccagctgctcgaacagcagatagctaaactgaaagagaaggagaggacgcttctcaaagacaacgaagacttgcgcggaaagcagcgcaaccttgaggcgcggctgttgcttcctgccccgaacagcgtggcacccctgcagccacgcggcgagccagcgccagagcaggagccggtacagagggacgaggacgtggagacggagctctacattgggttgcccggggttcgctgctccagccggcggtcaggtcaagccaaatag

SEQ ID NO: 108884 - protein, 230 aa, Triticum aestivum
MVRGKTQMKRIENATSRQVTFSKRRNGLLKKAFELSVLCDAEVALVVFSPRGRLYEFASATSLQKSIDRYKAYTKDTVNNKTVQPDIQQVKADALSLAKKLEALEDSKRKILGENLGGCSTEELHFLEGKIEKSLRVIRGKKTQLLEQQIAKLKEKERTLLKDNEDLRGKQRNLEARLLLPAPNSVAPLQPRGEPAPEQEPVQRDEDVETELYIGLPGVRCSSRRSGQAK

SEQ ID NO: 108885 - DNA, 684 bp, Triticum aestivum
  CDS (1)..(684)
atggggcgcggcaaggtggagctgaagcggatcgacaacaagatcagccggcaggtgacgttcgccaagcgccgcaacgggctgctcaagaaggcgtacgagctgtcggtgctctgcgacgccgaggtcgcgctcatcatcttctccacccgcggccgcctcttcgagttctccacatcctcatgcatgtacaagacactagagcggtaccgcagctgcaacttcaactccgaggcaactgcaactccggagactgaacaaagcaattaccaggagtacttgaagctgaagacaagagttgagttcctacagacaactcagagaaatcttcttggcgaggacttgggcccacttaacatgaaggaacttgagcagcttgagaaccaaattgagatatctctcaaacatatcagggcgacaaaaagccaacagtcacttgatcagctctttgagctcaagcgcaaggaacaacaactgcaagatgttaataaagacttacggaagaagatacaagaaactagtgtggaaaatgtgctgcaaatgtcttgccaggatgttggacctagtgggtctagtggccatgctaatcaagctaatcaacaggagtattttcatcatgattgtgacccttccctgcatatagggtatcaacgaaatttcctggatcagttgaacaaagaatga

SEQ ID NO: 108886 - protein, 227 aa, Triticum aestivum
MGRGKVELKRIDNKISRQVTFAKRRNGLLKKAYELSVLCDAEVALIIFSTRGRLFEFSTSSCMYKTLERYRSCNFNSEATATPETEQSNYQEYLKLKTRVEFLQTTQRNLLGEDLGPLNMKELEQLENQIEISLKHIRATKSQQSLDQLFELKRKEQQLQDVNKDLRKKIQETSVENVLQMSCQDVGPSGSSGHANQANQQEYFHHDCDPSLHIGYQRNFLDQLNKE

SEQ ID NO: 108887 - DNA, 822 bp, Triticum aestivum
  CDS (1)..(822)
atgatgagcatgatggccgatttgagctgcggagcttccggtgtgaccgcgaatgaccatcagctggccgctccggctccggaggactcggcggcggcggggagcgagaagatggggaggggccggatcgagatcaagcgcatcgagaacaccaccaaccggcaggtcaccttctgcaagcgccgcaacggcctcctgaagaaggcgtacgagctctcggtgctctgcgacgccgaggtggccctcatcgtcttctccagccgcggccgcctctacgagtactccaacaacagtgtgaaagctaccattgagaggtacaaaaaggccaacagtgacacatccaactctggcacggttgcagaagtcaatgcccagtgctaccagcaggagtcctccaagctgcgccagcagatcagtagcttgcaaaactcaaacagtaggtcgctggtgagggactctgtcagcaccatgaccctgagggattttaagcagctagaaggcaggctggagaaaggcatagccaagataagagctagaaagaatgagctgatgtatgctgaagttgagtatatgcagaagagggaaatggagctacagaatgataacatttacctgaggagcaaggtgtctgagaatgagaggggtcagcagccggtgaacatgatggcgtcagggtcggcgagcagcgaatacgatcacatggtctcaccgtatgattccagaaacttcctgcaggcgaacatcatgcagcagcagcagcagcattactcccaacagctgcagccaactgcccttcagctcggccagcagtacttcaactag

SEQ ID NO: 108888 - protein, 273 aa, Triticum aestivum
MMSMMADLSCGASGVTANDHQLAAPAPEDSAAAGSEKMGRGRIEIKRIENTTNRQVTFCKRRNGLLKKAYELSVLCDAEVALIVFSSRGRLYEYSNNSVKATIERYKKANSDTSNSGTVAEVNAQCYQQESSKLRQQISSLQNSNSRSLVRDSVSTMTLRDFKQLEGRLEKGIAKIRARKNELMYAEVEYMQKREMELQNDNIYLRSKVSENERGQQPVNMMASGSASSEYDHMVSPYDSRNFLQANIMQQQQQHYSQQLQPTALQLGQQYFN

SEQ ID NO: 108889 - DNA, 780 bp, Triticum aestivum
  CDS (1)..(780)
atggggaggggaagggtcgagctgaagcgcatcgagaacaagatcaaccggcaggtcaccttctccaagcgccgcaacggcctgctcaagaaggcctacgagctctccgtgctctgcgacgccgaggtggcgcttatcatcttctccagccgcggcaagctctacgagttcggcagcgccggcacaacaaaaacattggaaagataccaacactgctgctataatgctcaagattccaatggcgcactatctgaaactcagagctggtaccaggaaatgtcaaagctaaaggcaaaattcgaagctttgcagcgaactcagagacacttgcttggggaggacctaggaccgctcagcgtgaaagaactgcagcagctggagaaacagctagaatgttctctgtcactggccagacagcgaaagacacaacttatgatggagcaggtggaggaacttcggaggaaggagcgtcagctgggagacatcaacaggcaactcaagcacaagctcgacgctgaaggcagcaacagcaacaactacagggccatgcagcagatcacctgggctgccggcaccgtcgtggatgaaggcgccgccgcatatcacatgcagcagcagcagcagcagcaccctaatcattccgctgctatggactgtgaacccactctgcgaattgggtaccctcatcagttcgcggctcctgatcaggcagccaataatattccacggagcagcgcccccggaggggagaacgacttcatgctggggtgggttctctga

SEQ ID NO: 108890 - protein, 259 aa, Triticum aestivum
MGRGRVELKRIENKINRQVTFSKRRNGLLKKAYELSVLCDAEVALIIFSSRGKLYEFGSAGTTKTLERYQHCCYNAQDSNGALSETQSWYQEMSKLKAKFEALQRTQRHLLGEDLGPLSVKELQQLEKQLECSLSLARQRKTQLMMEQVEELRRKERQLGDINRQLKHKLDAEGSNSNNYRAMQQITWAAGTVVDEGAAAYHMQQQQQQHPNHSAAMDCEPTLRIGYPHQFAAPDQAANNIPRSSAPGGENDFMLGWVL

SEQ ID NO: 108891 - DNA, 666 bp, Triticum aestivum
  CDS (1)..(666)
atggggcgcggcaaggtggagctgaagcggatcgacaacaaaagcagccggcaggtgacgttcgccaagcgccgcaacgggctgctcaagaaggcgtacgagctgtcggtgctctgcgacgccgaggtcgcgctcatcatcttctccacccgcggccgcctcttcgagttctccacatcctcatgcatgtacaagactctagagcggtaccgcagctgtaacttcaactccgaggcaacttcaactccggagtccgaagattaccaggagtatttaaagctaaagacaagagttgacttcctacagacaactcagagaaatcttcttggcgaggacttgggcccacttaacatgaaggaacttgagcaactggagaaccacattgagatgtctctcaaacatatcagggcgacaaagagccagcagtcatttgatcagctcttcgagctcaagcgcaaggaacaacaactgcaagatgttaataaagacttacgaaagaagatacaagaaactagtgcggaaagtgttctacagatgttttgccaggatgttgatgttggacctagtggatctagtggccatgctaatcaagctaatcaacagcagcattttcatcctgattgtgacccttccttgcgtatgatcatgcttacctggaccacttga

SEQ ID NO: 108892 - protein, 221 aa, Triticum aestivum
MGRGKVELKRIDNKSSRQVTFAKRRNGLLKKAYELSVLCDAEVALIIFSTRGRLFEFSTSSCMYKTLERYRSCNFNSEATSTPESEDYQEYLKLKTRVDFLQTTQRNLLGEDLGPLNMKELEQLENHIEMSLKHIRATKSQQSFDQLFELKRKEQQLQDVNKDLRKKIQETSAESVLQMFCQDVDVGPSGSSGHANQANQQQHFHPDCDPSLRMIMLTWTT

SEQ ID NO: 108893 - DNA, 684 bp, Triticum aestivum
  CDS (1)..(684)
atggggcgcggcaaggtggagctgaagcggatcgacaacaagagcagccggcaggtgacgttcgccaagcgccgcaacgggctgctcaagaaggcgtacgagctgtcggtgctctgcgacgccgaggtcgcgctcatcatcttctccacccgcggccgcctcttcgagttctccacatcctcatgcatgtacaagactctagagcggtaccgcagctgtaacttcaactccgaggcaacttcaactccggagtccgaagattaccaggagtatttaaagctaaagacaagagttgacttcctacagacaactcagagaaatcttcttggcgaggacttgggcccacttaacatgaaggaacttgagcaactggagaaccacattgagatgtctctcaaacatatcagggcgacaaagagccagcagtcatttgatcagctcttcgagctcaagcgcaaggaacaacaactgcaagatgttaataaagacttacgaaagaagatacaagaaactagtgcggaaagtgttctacagatgttttgccaggatgttgatgctggacctagtggatctagtggccatgctaatcaagctaatcaacagcagcattttcatcctgattgtgacccttccttgcgtatgtggtatgatcatgcttacctggatcacttgaacaaggaatga

SEQ ID NO: 108894 - protein, 227 aa, Triticum aestivum
MGRGKVELKRIDNKSSRQVTFAKRRNGLLKKAYELSVLCDAEVALIIFSTRGRLFEFSTSSCMYKTLERYRSCNFNSEATSTPESEDYQEYLKLKTRVDFLQTTQRNLLGEDLGPLNMKELEQLENHIEMSLKHIRATKSQQSFDQLFELKRKEQQLQDVNKDLRKKIQETSAESVLQMFCQDVDAGPSGSSGHANQANQQQHFHPDCDPSLRMWYDHAYLDHLNKE

SEQ ID NO: 108895 - DNA, 744 bp, Triticum aestivum
  CDS (1)..(744)
atggggagggggagggtggagctgaagcggatcgagaacaagatcaaccgccaggtcacctttgccaagcgcaggaacggcctgctcaagaaggcctacgagctctccgtgctatgcgacgccgaggtcgcgctcatcgtcttctccaaccgcggcaagctctacgagttctgcagcacccagagcatgacgaagacactcgacaagtatcaaaaatgcagttatgcaggacctgaaactactgtgcagaacagagaaaatgagcaactgaaaaacagtcgcaatgagtacctgaaactaaaggcacgggttgataatttacagcgaacacaaaggaatttgcttggtgaagatcttgattcattaggcataaaagagctcgagagccttgagaagcaacttgattcgtccttgaagcacattcgaacaacaaggacacaacatatggttgaccaattgacagaactccagagaagggaacaaatgttttcggaggcgaataaatgtcttcgtataaaattggaggagagcaaccaagttcatgggcagcagctctgggagcacaacaacaatgtactgagctatgaacgtcagccggaagtgcagccgccgatgcacggcggcaatggattcttccacccccttgatgctgctggtgaacccacacttcacatagggtaccctcccgagtccctgagtaactcatgcatgactactttcatgccccgtggttgccttgagtga

SEQ ID NO: 108896 - protein, 247 aa, Triticum aestivum
MGRGRVELKRIENKINRQVTFAKRRNGLLKKAYELSVLCDAEVALIVFSNRGKLYEFCSTQSMTKTLDKYQKCSYAGPETTVQNRENEQLKNSRNEYLKLKARVDNLQRTQRNLLGEDLDSLGIKELESLEKQLDSSLKHIRTTRTQHMVDQLTELQRREQMFSEANKCLRIKLEESNQVHGQQLWEHNNNVLSYERQPEVQPPMHGGNGFFHPLDAAGEPTLHIGYPPESLSNSCMTTFMPRGCLE

SEQ ID NO: 108897 - DNA, 711 bp, Triticum aestivum
  CDS (1)..(711)
atgggtcgcggcaaggtagtgctgcagcggatcgagaacaagatcagccgccaggtgacgttcgccaagcgccgcaacggcctgctcaagaaggcttacgagctctccctcctctgcgacgccgaggtcgcgctcgtcctcttctcccacgccggccgcctctaccagttctcctcctcctccaacatgtttaagaccctcgagaggtaccagaggtacatttttgcttcccaagatgctgtcgcgccgatcagcgatgagatgcagaacaactatctggagtatatggagctgaaggcaagagttgaggttttgcaacactcacaaaggaatctcctaggtgaggatttggctccactgagcacaaccgagcttgaccagcttgagagtcaagtagggaagaccttgaggcaaataaggtcaagaaagactcaagtactgctagatgaattgtgcgacctgaagagaaaggagcaaatgttacaggatgcaaacatgaccctgaaaagaaagctgggcgagatccaggtggaggcgacgcctgatccacagcagcagcagcagcagatgtggcagggtgaccggggcgtgccgccccacacgcctccgcagccagagcacttcttccaggccctagaatgctatccttctctgcagccagtatttcgtggcacggatgtgaaccagccgccgcctgcatggatggcatag

SEQ ID NO: 108898 - protein, 236 aa, Triticum aestivum
MGRGKVVLQRIENKISRQVTFAKRRNGLLKKAYELSLLCDAEVALVLFSHAGRLYQFSSSSNMFKTLERYQRYIFASQDAVAPISDEMQNNYLEYMELKARVEVLQHSQRNLLGEDLAPLSTTELDQLESQVGKTLRQIRSRKTQVLLDELCDLKRKEQMLQDANMTLKRKLGEIQVEATPDPQQQQQQMWQGDRGVPPHTPPQPEHFFQALECYPSLQPVFRGTDVNQPPPAWMA

SEQ ID NO: 108899 - DNA, 735 bp, Triticum aestivum
  CDS (1)..(735)
atggggcgggggaaggtgcagctgaagcggatcgagaacaagatcaaccggcaggtgaccttctccaagcgccgctcggggcttctcaagaaggcgcacgagatctccgtgctctgcgacgccgaggtcggcctcatcatcttctccaccaggggaaagctctacgagttctccaccgagtcatgtatggacaaaattcttgaacggtatgagcgctattcttatgcagaaaaggttctcgtttcaagtgaatctgaaattcagggaaactggtgtcacgaatataggaaactgaaggcgaaggttgagacaatacagaaatgtcaaaagcatctcatgggagaggatcttgaatctttgaatctcaaggagttgcagcaactggagcagcagctggaaagctcactgaaacatatcagatccaggaagaaccaacttatgcacgaatccatttctgagcttcagaagaaggagaggtcactgcaggaggagaataaagttctccagaaggaactcgtggagaagcagaaggcccatgtggcgcagcaagatcaaactcagcctcaaaccagctcttcatcttcttccttcatgctgagggatgctccccctgccgcaaataccagcattcatccagcggcaacaggcgagagggcagaggatgcggcagtgcagccgcaggccccaccccggacggggcttccaccgtggatggtgagccacatcaacgggtga

SEQ ID NO: 108900 - protein, 244 aa, Triticum aestivum
MGRGKVQLKRIENKINRQVTFSKRRSGLLKKAHEISVLCDAEVGLIIFSTRGKLYEFSTESCMDKILERYERYSYAEKVLVSSESEIQGNWCHEYRKLKAKVETIQKCQKHLMGEDLESLNLKELQQLEQQLESSLKHIRSRKNQLMHESISELQKKERSLQEENKVLQKELVEKQKAHVAQQDQTQPQTSSSSSSFMLRDAPPAANTSIHPAATGERAEDAAVQPQAPPRTGLPPWMVSHING

SEQ ID NO: 108901 - DNA, 792 bp, Triticum aestivum
  CDS (1)..(792)
atggcgccgtcgtcgccgccggcggcggcggtggcgtccgagggagacgagcagcagcagcagatcgtggtggccgcggcggcggcggcggcggccaagaagggcggcgggaagaggggccggcgcgagatgcggcggatcgaggacgccaccagccggcaggtgaccttctccaagcgccggagcgggctgctcaagaaggccctcgagctgggcgtcctctgcgacgccgaggtcgccctcatcgtcttctccccccgcggccgcctctacgagtacgcctccgcgccagatttgcagaaaacgattgatcgctacctgaaccacacaaaaggtacatctaccaatgagaaaactgttgagcaaccagctgctggcgtccagatgtgtagatcggaagctacggccttgaagcacaagatagacgcaattgaggcataccagaggaagctatctggagaaggactggggtcctgtccggcccatgagctgcaagagctggagctgcagctggagaagagcctaagctgcatccggcaaaagaagcaacagaaaatgctggataaaatcttggagctgaaggagaaggagagaaagctgttgacggagaactcggtgctccgcgaggagtacaaggcgctgcctctgctagagctggccactgctgctgctgctgctgaaagatcgcctgacggcgccggagctgaagaagctgaggaggacgagcggcggcggcattacatggaagtggagactgagctggtcattggaaggcccgggtcgtctagctag

SEQ ID NO: 108902 - protein, 263 aa, Triticum aestivum
MAPSSPPAAAVASEGDEQQQQIVVAAAAAAAAKKGGGKRGRREMRRIEDATSRQVTFSKRRSGLLKKALELGVLCDAEVALIVFSPRGRLYEYASAPDLQKTIDRYLNHTKGTSTNEKTVEQPAAGVQMCRSEATALKHKIDAIEAYQRKLSGEGLGSCPAHELQELELQLEKSLSCIRQKKQQKMLDKILELKEKERKLLTENSVLREEYKALPLLELATAAAAAERSPDGAGAEEAEEDERRRHYMEVETELVIGRPGSSS

SEQ ID NO: 108903 - DNA, 669 bp, Triticum aestivum
  CDS (1)..(669)
atggtgcgggggaagacgcagatgaagcggatagagaacccgacgagccggcaggtgaccttctccaagcgccgcggcggcctgctcaagaaggccttcgagctctccgtcctctgcgacgccgaggtcgccctcgtcgtcttctccccccgcggcaggctctacgaattcaccagctccagcatgaagaacacaattgaacgttataagacagtcacaaaggataatatgagcagacagacggtacagcaagatatggagaaaataaaagctgatgctgaaggcttgtcaaagaagcttgatgctcttgaagcttgcaaaagcaaacttttgggtcaaaatttggaagaatgctctattgaagaactgcaaagcttagaggtcaaaattgaaaaaagccttctaggcatcagggcaatgaagactcggcggtttgaagagcagctctctacgttgaggcagaaggagatgacgttgcggcagcacaatgaagaactatatagccagtgccagaaggaacagcaccttgcgtcggaggcggcggcgccccctgctccggcgaccttggcggcgctccctgctccagtgaccctggaggagcagggccagcagatggtggatgtggagacgggtctatttcttggactgcccggcaccggccgcccctga

SEQ ID NO: 108904 - protein, 222 aa, Triticum aestivum
MVRGKTQMKRIENPTSRQVTFSKRRGGLLKKAFELSVLCDAEVALVVFSPRGRLYEFTSSSMKNTIERYKTVTKDNMSRQTVQQDMEKIKADAEGLSKKLDALEACKSKLLGQNLEECSIEELQSLEVKIEKSLLGIRAMKTRRFEEQLSTLRQKEMTLRQHNEELYSQCQKEQHLASEAAAPPAPATLAALPAPVTLEEQGQQMVDVETGLFLGLPGTGRP

SEQ ID NO: 108905 - DNA, 780 bp, Triticum aestivum
  CDS (1)..(780)
atggcgccgtcgtcgccggcggcggcggcggtggcggagggagacgagcagcagcagcagcagatcgtggcggcggcggcggcggccaagaagggcggcgggaagaggggccggcgcgagatgcggcggatcgaggacgccaccagccgccaggtgaccttctccaagcgccggagcgggctgctcaagaaggccttcgagctgggcgtcctctgcgacgccgaggtcgccctcatcgtcttctccccccgcggccgcctctacgagtacgcctccgcgccagatttgcagaaaacgattgatcgctatctgaaccacacaaaagggacatctgccaatgagaaaactgttgagcaaccagctgctggcgtccagatgtgtagatccgaagctaccgccttgaagcacaagatagacgcaattgaggcataccagaggaagctatctggagaaggactggggtcctgttcggcccatgagctgcaagagctggagctgcagctggagaagagcctaagctgcatccggcaaaagaagcaacagaaaatgctggataaaatcttggagctgaaggagaaggagagaaagctgttgacggagaacgtggtgctccgcgaggagtacaaggcgctgcctctgctagagctggccactgctgctgctgctgaaagatcgcctgacggcgccggagctgaagaagctgaggaggacgagcggcggctgcattacatggaagtggagactgagctggtcattggaaggcccgggtcgtctagctag

SEQ ID NO: 108906 - protein, 259 aa, Triticum aestivum
MAPSSPAAAAVAEGDEQQQQQIVAAAAAAKKGGGKRGRREMRRIEDATSRQVTFSKRRSGLLKKAFELGVLCDAEVALIVFSPRGRLYEYASAPDLQKTIDRYLNHTKGTSANEKTVEQPAAGVQMCRSEATALKHKIDAIEAYQRKLSGEGLGSCSAHELQELELQLEKSLSCIRQKKQQKMLDKILELKEKERKLLTENVVLREEYKALPLLELATAAAAERSPDGAGAEEAEEDERRLHYMEVETELVIGRPGSSS

SEQ ID NO: 108907 - DNA, 687 bp, Triticum aestivum
  CDS (1)..(687)
atggcgcgggagcggagggagataaagcggatagagagcgcggcggcgcggcaggtcaccttctccaagcgccgccggggcctcttcaagaaggccgaggagctctccgtcctctgcgacgccgacgtcgcgctcatcgtcttctcctccaccggcaagctctcccagttcgccagctccagtacgaatgagatcatcgacaagtacagcacgcattctaagaacctggggaaaacagaccagcctgctcttgacttgaacttagagcatagcaagtatgcaaatttgaacgatcagcttgcagaagctagtcttcgactaagacagatgagaggtgaggagcttgaggggttgagtgttgatgaactccagcagttggagaaaaacctagaaactggtctgcacagggtgcttcagacaaaagatcaacaattcttggaacagataaatgaactgcatcgaaagagttcacaactggcagaggagaacatgaaactaaggaaccaagtaggccagattccaacagctggcaagctagtggttgctgataccgaaaatgttgttgctgaagatgggcagtcctcggaatccgtcatgactgcattacactccggaagttcacaggataatgatgatggttccgatgtttccctgaaattaggattgccctgccttccgtggaagtaa

SEQ ID NO: 108908 - protein, 228 aa, Triticum aestivum
MARERREIKRIESAAARQVTFSKRRRGLFKKAEELSVLCDADVALIVFSSTGKLSQFASSSTNEIIDKYSTHSKNLGKTDQPALDLNLEHSKYANLNDQLAEASLRLRQMRGEELEGLSVDELQQLEKNLETGLHRVLQTKDQQFLEQINELHRKSSQLAEENMKLRNQVGQIPTAGKLVVADTENVVAEDGQSSESVMTALHSGSSQDNDDGSDVSLKLGLPCLPWK

SEQ ID NO: 108909 - DNA, 699 bp, Triticum aestivum
  CDS (1)..(699)
atggggagggggaagattgtgattgagaggatcgacaacccgacgaatcgtcaggtgaccttctccaagaggcgcggagggctgatgaagaaggcccgggagctcgccatcctctgtgacgccgatctcgcgctcatcgtcttctccagcaccggtcgcctctacgactttgcgagctccagcggaatggaggcaatactagagcggtaccaggaggcgaaagaggagcactacggggtgctgaatccaacatcagaggcaaagttatggcagagggaggttacaaccttgaggcagcaagtgcaaaacttacaacacaataataggcaactgttgggagaggagctatctggcaccactgctcgagatctgctgtttttggtgaaccaagttgagacgagcttacattccgtaagaaagaggaaggagcaacttatggctgcagagattcatgaactcaaccaaaagggatttcacattcaaaaggaaaatgtagaacttggcaaaaagttgggcattgctcatgagcacaaaatagagccgcagaaaaagctttctggggtcatgagaacgagtgagcagcaagccagcggaagcagctcaaaagctgctgccggattattattgtcgactagagcacgtgaaccaaggatttttattgaccttgagttgcggcagcagaagcatgaggatgaataa

SEQ ID NO: 108910 - protein, 232 aa, Triticum aestivum
MGRGKIVIERIDNPTNRQVTFSKRRGGLMKKARELAILCDADLALIVFSSTGRLYDFASSSGMEAILERYQEAKEEHYGVLNPTSEAKLWQREVTTLRQQVQNLQHNNRQLLGEELSGTTARDLLFLVNQVETSLHSVRKRKEQLMAAEIHELNQKGFHIQKENVELGKKLGIAHEHKIEPQKKLSGVMRTSEQQASGSSSKAAAGLLLSTRAREPRIFIDLELRQQKHEDE

SEQ ID NO: 108911 - DNA, 744 bp, Momordica charantia
  CDS (1)..(744)
atggggagagggcgagttgagctgaagagaatagagaacaaaataaaccgccaagtgacgttttcgaagcgccgaaacgggctgctcaaaaaggcctatgaactctcagttctctgcgacgctgaggtcgctctcatcatcttctccagccgtgggaagctctatgaatttggcagcgctggtacgaccaaaacattggagcgatatcaacgttgttgcttctctccacaggacaaccatattgagcgacaaacccagagttggttccaagagatctcgaaactgaaagttaaatatgaatctctatgtcgaacccaacggcatttgcttggggaagatcttggaccattgagtgtaaaggagctccaaaaccttgaaaagcaacttgaagcagcccttgcccaagctagacaaaggaagactcagatgatgattgatcagatggaagctctgcgcagaaaggagcggcaacttggggacctcaacaaagagctaaggctcaagcttgaggcagagggacagaatcttaaagccatccaaagtttctggagctctagctctgcagctgctggacatggcaacgacttcccattgcatcattctcaagccagccctatcgagtgccaacacgaacaacccgtcttacaaatcgggtatcagaattatttctcagcagaggggccatctgtccgaaagagcatgacaacatgtgagacaaacttcatacaaggatgggttatttga

SEQ ID NO: 108912 - protein, 247 aa, Momordica charantia
MGRGRVELKRIENKINRQVTFSKRRNGLLKKAYELSVLCDAEVALIIFSSRGKLYEFGSAGTTKTLERYQRCCFSPQDNHIERQTQSWFQEISKLKVKYESLCRTQRHLLGEDLGPLSVKELQNLEKQLEAALAQARQRKTQMMIDQMEALRRKERQLGDLNKELRLKLEAEGQNLKAIQSFWSSSSAAAGHGNDFPLHHSQASPIECQHEQPVLQIGYQNYFSAEGPSVRKSMTTCETNFIQGWVI

SEQ ID NO: 108913 - DNA, 747 bp, Cleome spinosa
  CDS (1)..(747)
atggggaggggtagggttgagctgaagaggatagagaacaagatcaacagacaagtgacgttcgctaagcgtcgaaacgggctgttgaagaaagcttatgaactctctgttctttgcgatgccgaggttgctctcatcatcttttccaaccgtggcaagctctacgagttctgcagctcctccaacatgctcaagacactcgaacggtaccagaagtgcagctacggctccattgaagtgaacaacagacctgcaaaagaactcgagaacagttacagggagtatctgaagctgaagtccagatatgagggtctgcatcgtcaacagagaaatctccttggagaggatttgggacctctgaactcaaaggagcttgagcagcttgagcgtcaactagacagctctcttaagcaagttcgctccattaagacacagtccatgcttgacgaactttctgatctccaaaacaaggaacaaatgttgcttgaagccaatagagccttgtcaatgaagctggaagaaatggtcggagcaagaactcatcaatttggaggggcatgggaagggagtgagcagaacgtttcgtacgggcaccaggcacagtcacagggactattccagcctcttgaatgcaatccgactttgcaaatcggatacaataatccggtgtgttcagagcagatggctgcaacaacacaagctcctgtccaagcgggtaacggctacatccctggttggatgctctga

SEQ ID NO: 108914 - protein, 248 aa, Cleome spinosa
MGRGRVELKRIENKINRQVTFAKRRNGLLKKAYELSVLCDAEVALIIFSNRGKLYEFCSSSNMLKTLERYQKCSYGSIEVNNRPAKELENSYREYLKLKSRYEGLHRQQRNLLGEDLGPLNSKELEQLERQLDSSLKQVRSIKTQSMLDELSDLQNKEQMLLEANRALSMKLEEMVGARTHQFGGAWEGSEQNVSYGHQAQSQGLFQPLECNPTLQIGYNNPVCSEQMAATTQAPVQAGNGYIPGWML

SEQ ID NO: 108915 - DNA, 747 bp, Cleome spinosa
  CDS (1)..(747)
atggggaggggtagggttgagctgaagaggatagagaacaagatcaacagacaagtgaccttcgctaagcgtcgaaacggtctgttgaagaaagcttatgaactctctgtcctttgcgatgccgaggttgctctcatcatcttctccaaccgcggcaagctctacgagttctgcagctcccccaacatgctcaagacacttgaacggtaccagaagtgcagctatggctccattgaagtgaacaacaaacctgccaaagaactcgagaacagctacagggagtatctgaagctaaagtccaggtttgagggtctgcaacgtcaacagagaaatctccttggagaggatttggggcctctgaactcaaaagagcttgagcagattgaacgtcaactagacggctctcttaagcaagttcgctccatcaagacacagtacatgatcgaccagctttctgagctccaaagcagggaacagatgttgcttgaagccaatagagccctttcaatgaagctggatgagatggttggagcacgaactcatcacattggaggggggtgggaagggagtgagcagaacgtgacgtatgggcaccagcctcagcctcaggggctgttccagcctcttgaatgcaatccgactttgcaaatcggatacaataacccagaatgcccagagcagatgactgcaacaacacaagcccctgcgcaagcaggaaatggttacatccccggttggatgctctga

SEQ ID NO: 108916 - protein, 248 aa, Cleome spinosa
MGRGRVELKRIENKINRQVTFAKRRNGLLKKAYELSVLCDAEVALIIFSNRGKLYEFCSSPNMLKTLERYQKCSYGSIEVNNKPAKELENSYREYLKLKSRFEGLQRQQRNLLGEDLGPLNSKELEQIERQLDGSLKQVRSIKTQYMIDQLSELQSREQMLLEANRALSMKLDEMVGARTHHIGGGWEGSEQNVTYGHQPQPQGLFQPLECNPTLQIGYNNPECPEQMTATTQAPAQAGNGYIPGWML

SEQ ID NO: 108917 - DNA, 726 bp, Medicago truncatula
  CDS (1)..(726)
atgggaagaggaagagttgagttgaagagaattgagaacaaaatcaacagacaagttaccttcgctaaacgaaggaacggtcttttgaaaaaagcttatgaactttctgttctttgtgatgctgaagttgctcttatcatcttctccaacagaggaaaactctatgagttttgtagcagttcaagcatgctgaaaacgctagagaggtatcagaaatgcaactatggtgcgcctgagactaatgtgtctgcacgagaagccttggagttaagcagtcaacaagaatatttgaagctgaaggcacgttatgaagcattgcaacgatcccagaggaaccttatgggagaagatcttggccctctgagcagcaaagagctcgagtcgcttgaaaggcagctagattcatccttgaagcaaataagatccacaaggacccaattcatgctggaccagctctctgatcttcaacgcaaggaacatatgctaagtgaggctaacaggtctctcagacaaaggctggaagggtatcaattgaatcaactccaaatgaatgcatgtgttgaagaaatgggctatggtcggcatccaagtcaaactcagggtgatggtctctatcaacagttggagtgtgagccaactttacaaattggctatcagccggatccagggtcagtctgtacggcaggaccaagcatgagtaattacatgggaggatggttaccatag

SEQ ID NO: 108918 - protein, 241 aa, Medicago truncatula
MGRGRVELKRIENKINRQVTFAKRRNGLLKKAYELSVLCDAEVALIIFSNRGKLYEFCSSSSMLKTLERYQKCNYGAPETNVSAREALELSSQQEYLKLKARYEALQRSQRNLMGEDLGPLSSKELESLERQLDSSLKQIRSTRTQFMLDQLSDLQRKEHMLSEANRSLRQRLEGYQLNQLQMNACVEEMGYGRHPSQTQGDGLYQQLECEPTLQIGYQPDPGSVCTAGPSMSNYMGGWLP

SEQ ID NO: 108919 - DNA, 696 bp, Momordica charantia
  CDS (1)..(696)
atgtcagattcacctcagaggaagatggggagggggaagattgagattaagaggatcgaaaatacaaccaatcgtcaagtcactttctgtaagagacgcaatgggctgctcaaaaaggcttatgaactttctgttctatgtgatgctgaggttgctctcatcgttttctccagccgtggccgcctttatgagtatgctaacaatagtgtgaaggcaacaattgatagatacaagaaggcctcctcagattcctccaacactggatctacttctgaagctaacactcagttttatcagcaagaagctgccaaacttcgagtccagattggtaatttgcagaactcaaacaggaacatgctgggtgagtccctaagttctttgagtgtaaaagatctgaaaagcctggagagtaaattagagaaaggaattagcagaattaggtccaaaaagaatgagctcctctttgctgaaattgagtatatgcggaaaagggaaattgatttgcacaacaacaatcagctgcttcgagccaagatagccgagagtgaaagaaatgccagcatgatagggggagatttcgagctgatgcaatctcatccgtacgatccaagggacttcttccaagtgaacggcttacaacataataataatcatcagtatccacgccaagacaacatggctcttcaattagtttaa

SEQ ID NO: 108920 - protein, 231 aa, Momordica charantia
MSDSPQRKMGRGKIEIKRIENTTNRQVTFCKRRNGLLKKAYELSVLCDAEVALIVFSSRGRLYEYANNSVKATIDRYKKASSDSSNTGSTSEANTQFYQQEAAKLRVQIGNLQNSNRNMLGESLSSLSVKDLKSLESKLEKGISRIRSKKNELLFAEIEYMRKREIDLHNNNQLLRAKIAESERNASMIGGDFELMQSHPYDPRDFFQVNGLQHNNNHQYPRQDNMALQLV

SEQ ID NO: 108921 - DNA, 750 bp, Diospyros kaki
  CDS (1)..(750)
atggggaggggaagagtggagctgaagaggatagagaacaagataaacaggcaggtgacgttcgcaaagaggaggaatgggttgctcaagaaggcttacgagctctctgttctgtgcgatgccgaggttgctctcatcatcttctccaatcgtggcaagctctatgagttctctagcatcaacaatatgcccaaaacacttgaaaggtaccaaaaatgcagctatggcacattggaagataaccgatcagccaaagagatggagcaaaatagctacagagagtacttgaaactgaaagctaaatatgaagaactgcaacattttcaaaggcaccttcttggcgaagaccttggccctctaaacctgaaggatcttgagcatcttgagcatcaactagagacttcattgaagcaaattaggtcaacaaagacccagtctatgcttgatcagctctgtgatcttcaaaacaaggaaaagatgtggattgaggctaacaaagctctggagagaaagctggatgagatttacagagagaatcagctgcaatcatcctggggcggcggcggcggcgagcaagggaacagttccttcaaccaccaccaccaccaccctcattctcaggccttcttccacccttttgattgcaatcccactttgcaaatagggtaccctgaagtatcaaaccagatgggtactgctgcaactcatgaacaaaacatgaatggattggttcctgagtggatgctctga

SEQ ID NO: 108922 - protein, 249 aa, Diospyros kaki
MGRGRVELKRIENKINRQVTFAKRRNGLLKKAYELSVLCDAEVALIIFSNRGKLYEFSSINNMPKTLERYQKCSYGTLEDNRSAKEMEQNSYREYLKLKAKYEELQHFQRHLLGEDLGPLNLKDLEHLEHQLETSLKQIRSTKTQSMLDQLCDLQNKEKMWIEANKALERKLDEIYRENQLQSSWGGGGGEQGNSSFNHHHHHPHSQAFFHPFDCNPTLQIGYPEVSNQMGTAATHEQNMNGLVPEWML

SEQ ID NO: 108923 - DNA, 675 bp, Malus domestica
  CDS (1)..(675)
atggcgagagagaaaattcagataaagaagatcgacaacgccacggcgaggcaggtgaccttttccaagaggagaagaggccttttgaagaaggccgaggagctctccgttctctgcgatgccgatattgctcttatcatattttcttccaccggaaagctctttgaatacgccagctctagtatgaaggaaattctagaaaggcacaacttgcattcaaagaatctcgagaaactagaacaaccatctcttcagctacagctagtggagaacagcaactacaccaggttgagcaaggaaattgcagcaaaaagtcatcaacttaggcagatgagaggagaagaaattcaaggactaaatttggaagaactccaacaattggagaagtcacttgaaactggcttgggccgcgtaatagagaaaaagagtgaaaaaatcatgaaagagatcggtgatcttcaaagaaatgggatgcaattgatggaagagaatgaacgattaagacagcaagtggcggagaaatctgatggccggaggcttgttcaggtcgattcagagaacatgtttacggaggagggtcaatcatcagagtctgtcaccaatccctgtaactcaaacaacggtcctcaagactacgacagctcagatacatctttaaaattggggtgcgtttaa

SEQ ID NO: 108924 - protein, 224 aa, Malus domestica
MAREKIQIKKIDNATARQVTFSKRRRGLLKKAEELSVLCDADIALIIFSSTGKLFEYASSSMKEILERHNLHSKNLEKLEQPSLQLQLVENSNYTRLSKEIAAKSHQLRQMRGEEIQGLNLEELQQLEKSLETGLGRVIEKKSEKIMKEIGDLQRNGMQLMEENERLRQQVAEKSDGRRLVQVDSENMFTEEGQSSESVTNPCNSNNGPQDYDSSDTSLKLGCV

SEQ ID NO: 108925 - DNA, 726 bp, Theobroma cacao
  CDS (1)..(726)
atggtgtaccccaatgaatcatgtgagacctctccccagaagaaaatgggaaggggaaagatcgagatcaagcggatcgaaaacacaacgaatcgtcaggttactttctgcaaaaggcgcaatggactgctcaaaaaggcctatgagttatcagttctttgtgatgctgaggttgctctgattgtcttctctagccgtggccgcctctatgagtatgctaataatagtgtcaaagcaacaattgagaggtacaaaaaaacttgtgcagattcctccaatactgggtcagtttctgaagctaatgctcagttctaccagcaagaagctgccaaactacgcgtgcaaattgggaatttgcagaattcaaacaggcatatgctaggcgagtcactcagcgcattgcctatgaaggatcttagaagcttggagaatcgtttagagaaaggaattagcagaatccgttccaaaaagaatgagctgctgtttgcagaaattgagtatatgcagaagagggaaattgacttgcataacaataaccaacttctccgagctaagatagctgagaatgagaggaagcagcagaacataaatttgatgccaggagggtctaactttgagatcatgcattctcagccatttgactctcggaactactttcaagtcaatgcattacaacccgccaatcattacccccaccaggatcagatggcccttcaattagtctaa

SEQ ID NO: 108926 - protein, 241 aa, Theobroma cacao
MVYPNESCETSPQKKMGRGKIEIKRIENTTNRQVTFCKRRNGLLKKAYELSVLCDAEVALIVFSSRGRLYEYANNSVKATIERYKKTCADSSNTGSVSEANAQFYQQEAAKLRVQIGNLQNSNRHMLGESLSALPMKDLRSLENRLEKGISRIRSKKNELLFAEIEYMQKREIDLHNNNQLLRAKIAENERKQQNINLMPGGSNFEIMHSQPFDSRNYFQVNALQPANHYPHQDQMALQLV

SEQ ID NO: 108927 - DNA, 768 bp, Malus domestica
  CDS (1)..(768)
atggggaggggaagggtgcagctgaagaggattgagaacaagatcaacaggcaggtgaccttctcaaagagaacgtcagggctgctgaagaaagctcatgagatttctgtactttgtgatgctgaggttgctttgattgtcttctctaccaaaggcaagctttttgagtactccactgattcctgcatggaaaggatcctggaaaggtacgaaagatactcacatgcagagaggcagcttcttgcaaatgataatgaatccactgggaactggactctggaacatgcaaagctcaaggctagggtggaggttttacaaagaaatcaaagtcattatatgggagaagatctccaaatcttaagtttccaagagcttcagaatttagagcaacagcttgattctgcactaaggcgcataaggtcaagaaagaaccaagtcatgtacgaatcgatttctgagctccagaagaaggataaggcattgcaggagcaaaacaacttgctggcaaagaatgtaaaggagaaggagaaagcagtaacttcacaggcacaattggaccatgcgcagaagcagagcttggactcctcctccacccttctaccacaggaattgcagtacttgaatttcagcaggtccaattaccaccaggctattagatcaagtaatggaatatcaggagataatcagcaggatggagatgaaactgcgactccacatagacctaacacgctgctgcctccttggatgctccgccaccttaatgaatag

SEQ ID NO: 108928 - protein, 255 aa, Malus domestica
MGRGRVQLKRIENKINRQVTFSKRTSGLLKKAHEISVLCDAEVALIVFSTKGKLFEYSTDSCMERILERYERYSHAERQLLANDNESTGNWTLEHAKLKARVEVLQRNQSHYMGEDLQILSFQELQNLEQQLDSALRRIRSRKNQVMYESISELQKKDKALQEQNNLLAKNVKEKEKAVTSQAQLDHAQKQSLDSSSTLLPQELQYLNFSRSNYHQAIRSSNGISGDNQQDGDETATPHRPNTLLPPWMLRHLNE

SEQ ID NO: 108929 - DNA, 978 bp, Taihangia rupestris
  CDS (1)..(978)
atgggaagagggagggttgagctgaagagaatcgagaacaagatcaacaggcaagtgacctttgcaaaacgaaggaacgggctattgaagaaagcttatgagctttccgttctttgcgatgcagaggttgctctcatcatcttctccaatagaggaaagctgtacgagttttgcagtagttcaagcatgctcaaaactcttgagaggtaccagaagtgcaactatagcacacctgagacacatgtatctacaggggaagctctggaattgagtagccaacaggagtatttgaggcttaaggcacgttatgaagccctacaaagaaaccaaaggaatcttcttggagaagatcttggtcctttgaacagcaaagagctcgaatcacttgaaaggcagctggatatgtcattgaagcagattagatcaacacggacacagtgcatgctggatcagctcacagatcttcagcgaaaggaacagatgcttaatgaagcaaacaggtccctaaaacaaaggttgtttgagggatacaatgtgaatcaactccatcaattccagctgaatgcaaatgctgaggatgtaggatatggtagacaccaacaagctcatcaacctcacagtgatgtcttctatcaccccttagagttggagccaacattacaaattgggtatcaccagagcgatccaatacaagttgtggcagcaggaccaagcgtgagcaatttcatggggaggatggttgccatgatcctcataaccagaagaagaagaagaagaagaagagagaactaccacggctgtgtgggtgaacccatggatgatgatccatggatccatgttatgatggattacatttcatcatcatcctgtatgtttatgttgtttgattatgttgttttatttgatgaatttgacaaaaataactatcttcaatttgtaatagtaggaaattatcccataattaactctccccattaa

SEQ ID NO: 108930 - protein, 325 aa, Taihangia rupestris
MGRGRVELKRIENKINRQVTFAKRRNGLLKKAYELSVLCDAEVALIIFSNRGKLYEFCSSSSMLKTLERYQKCNYSTPETHVSTGEALELSSQQEYLRLKARYEALQRNQRNLLGEDLGPLNSKELESLERQLDMSLKQIRSTRTQCMLDQLTDLQRKEQMLNEANRSLKQRLFEGYNVNQLHQFQLNANAEDVGYGRHQQAHQPHSDVFYHPLELEPTLQIGYHQSDPIQVVAAGPSVSNFMGRMVAMILITRRRRRRRRENYHGCVGEPMDDDPWIHVMMDYISSSSCMFMLFDYVVLFDEFDKNNYLQFVIVGNYPIINSPH

SEQ ID NO: 108931 - DNA, 750 bp, Taihangia rupestris
  CDS (1)..(750)
atgggaagaggacgggttgagctgaagagaatcgagaacaagatcaacaggcaagtgacctttgcaaaacgaaggaacgggctattgaagaaagcttatgagctttccgttctttgcgatgcagaggttgctctcatcatcttctccaatagaggaaagctgtacgagttttgcagtagttcaagcagcatgctcaaaactcttgagaggtaccagaagtgcaactatagcacacctgagacacatgtatctacaagggaagctctggaattgagtagccaacaggagtatttgaggcttaaggcacgttatgaagccctacaaagaaaccaaaggaatcttcttggagaagatcttggtcctttgaacagcaaagagctcgaatcacttgaaaggcagctggatatgtcattgaagcagattagatcaacacggacacagtgcatgctggatcagctcacagatcttcagcgaaaggaacagatgcttaatgaagcaaacaggtccctaaaacaaaggttgtttgagggatacaatgtgaatcaactccatcaattccagctgaatgcaaatgctgaggatgtaggatatggtagacaccaacaagctcatcaacctcacagtgatgtcttctatcaccccttagagttggagccaacattacaaattgggtatcaccagagcgatccaatacaagttgtggcagcagggccaagcgtgagcaatttcatgggaggatggttgccatga

SEQ ID NO: 108932 - protein, 249 aa, Taihangia rupestris
MGRGRVELKRIENKINRQVTFAKRRNGLLKKAYELSVLCDAEVALIIFSNRGKLYEFCSSSSSMLKTLERYQKCNYSTPETHVSTREALELSSQQEYLRLKARYEALQRNQRNLLGEDLGPLNSKELESLERQLDMSLKQIRSTRTQCMLDQLTDLQRKEQMLNEANRSLKQRLFEGYNVNQLHQFQLNANAEDVGYGRHQQAHQPHSDVFYHPLELEPTLQIGYHQSDPIQVVAAGPSVSNFMGGWLP

SEQ ID NO: 108933 - DNA, 732 bp, Dendrobium crumenatum
  CDS (1)..(732)
atggggagagggagagtggagctgaagcggattgagaacaagattaaccggcaagtaacctttgccaagcgccgtaacggcctcctcaaaaaggcctatgagctctccatcctctgcgatgcggaggtcgctctcatcatcttctccaaccgcggaaagctttacgagttctgcagcagctcaagtatgctgaagactttggagcggtaccaaaaatgcaattatgaaggtccagaaacaaatataatatcaagagagacccagagtagtcagcaggagtacttgaaacttaaagcccgagtagaggccttacaaagatcgcagaggaatttgcttggcgaggacctaggcccactgagtagcaaagagctcgaacacttggagaggcagctggacgcctctcttaaacagattagatcaacaaggacccagttcatgctcgaccagctagctgaccttcagcgaagggagcaaatgctatgcgaggccaataaagctctgaagagaaggttcgaggaaagcaatcagacagcccatcagcaagtctgggatcctagcactacgcatgctgttggatacggaaggcagccggctcagcaccatggcgatgcattctatcaccccttggaatgcgaaccgacactgcagattgggtatcattctgatataacgatggcaccaacgactgctccaaacgtcagtaattacatgccgcctggttggctcgtatga

SEQ ID NO: 108934 - protein, 243 aa, Dendrobium crumenatum
MGRGRVELKRIENKINRQVTFAKRRNGLLKKAYELSILCDAEVALIIFSNRGKLYEFCSSSSMLKTLERYQKCNYEGPETNIISRETQSSQQEYLKLKARVEALQRSQRNLLGEDLGPLSSKELEHLERQLDASLKQIRSTRTQFMLDQLADLQRREQMLCEANKALKRRFEESNQTAHQQVWDPSTTHAVGYGRQPAQHHGDAFYHPLECEPTLQIGYHSDITMAPTTAPNVSNYMPPGWLV

SEQ ID NO: 108935 - DNA, 672 bp, Dendrobium crumenatum
  CDS (1)..(672)
atggggagagggaagattgagataaagagaatagagaacacaacaaacagacaggtgactttctgcaagagaaggaatggactgctgaagaaagcttatgagctctctgttctctgcgacgctgaagtcgctctcatcgtcttctccagccgcggccgcctctatgagtattccaatagcagcacaaattcaaccatcgaacgctacaagaaggcaatcactaacagttcaaactctgttgtggaggttaattctcaacaatactatcagcaggaagcagcaaagttacgtcatcagatacaaattttgcataatacaaatagacaccctatgggtgagggtttgacttcgctgtccataaaggaacttaagcaactggagagcagacttgaacgaggcatcacaaggattagatcaaagaagcatgaaatgctgtttgcggaaattgagttcatgcaaaagagggaagaagatctgcagaatgaaaatatgtatctcagagccaagataacagaaaatgagagacaaacaaacatagacacaactgcatccgcacttgatactctttccacattcgattcaagaaactactaccctgtcaatatgttggaggcagcagcccattatcacaatcaagaccagactgcccttcaccttgggtatgataactaa

SEQ ID NO: 108936 - protein, 223 aa, Dendrobium crumenatum
MGRGKIEIKRIENTTNRQVTFCKRRNGLLKKAYELSVLCDAEVALIVFSSRGRLYEYSNSSTNSTIERYKKAITNSSNSVVEVNSQQYYQQEAAKLRHQIQILHNTNRHPMGEGLTSLSIKELKQLESRLERGITRIRSKKHEMLFAEIEFMQKREEDLQNENMYLRAKITENERQTNIDTTASALDTLSTFDSRNYYPVNMLEAAAHYHNQDQTALHLGYDN

SEQ ID NO: 108937 - DNA, 705 bp, Dendrobium crumenatum
  CDS (1)..(705)
atgatggagccaaaggaaaagatgggaagaggaaagatagagatcaagaggatagaaaacactacgaacaggcaagtcaccttctgtaagcgtcgtaatggcctcctcaaaaaggcttacgagctctccgttctctgtgatgctgaagtcgcccttgtcatcttctccagccgtggccggctctacgagtatgccaataacagtgtaaagggaactatcgagcgatacaagaaagctagtgctgataattccaattcaggatcaatatctgaaacaaatgctcagtattacctgcaagaagcctcaaaacttcgtcagcaaatcaccaacttacagaactcgaacaggaatctgatgggtgaggcactgagtaccatgagcttaagggacctgaagcaactggaaacaagactagagaaaggaatcaacaaaatcagatccaaaaagaatgaattgttatatgctgagattgagtacatgcagaagcgggagatggaactgcaaaatgataacatgtacctccgaaataagatagctgataatgaaagaacacagcagcagcatcatataaacatggtgccatcaacaagcactgagtatgaagtcatgcctccctttgattccagaaattttctacaagtaaatctaatggatcccagccatcactattctttacagcagcagactgccctccaagtaggctag

SEQ ID NO: 108938 - protein, 234 aa, Dendrobium crumenatum
MMEPKEKMGRGKIEIKRIENTTNRQVTFCKRRNGLLKKAYELSVLCDAEVALVIFSSRGRLYEYANNSVKGTIERYKKASADNSNSGSISETNAQYYLQEASKLRQQITNLQNSNRNLMGEALSTMSLRDLKQLETRLEKGINKIRSKKNELLYAEIEYMQKREMELQNDNMYLRNKIADNERTQQQHHINMVPSTSTEYEVMPPFDSRNFLQVNLMDPSHHYSLQQQTALQVG

SEQ ID NO: 108939 - DNA, 678 bp, Elaeis guineensis var
  CDS (1)..(678)
atggggagaggtagggtgcagctgaggcggatcgagaacaagataaaccggcaggtgacgttctcgaagcgccggtcggggctcccgaagaaagcccacgagatctccgtcctctgcgacgccgaggtcgccctcatcatcttctcgaccaagggcaagctctacgagtacgccaccgactcctgcatggaaaggattcttgaacgctatgaacgttacacctatgcagaaaaagcactaatttcatctggacccgaattgcagggtaactggtgccatgaatttggcaaactcaaagctaaggttgaggctttacaaaaaagccaaaggcatctcatgggtgagcaacttgagcccttgaatctcaaagaactccagcaactagagcaacagcttgaaagttctttaaagcatataagaaccagaaagtgccaactcatgtttgaatccatctctgagcttcagaaaaaggaaaagtcactgcagggagcagaacaagatgctggagaaggagctcatgggagaagcaagaaggtggagggcactaaaccagccaggcccttgggagcaacaagggccgccgcaaaacaaactcattcattccccaaccttccttcctggattcggagaactctctcccccaccctggaaatatttggggaccttaccaatggttag

SEQ ID NO: 108940 - protein, 225 aa, Elaeis guineensis var
MGRGRVQLRRIENKINRQVTFSKRRSGLPKKAHEISVLCDAEVALIIFSTKGKLYEYATDSCMERILERYERYTYAEKALISSGPELQGNWCHEFGKLKAKVEALQKSQRHLMGEQLEPLNLKELQQLEQQLESSLKHIRTRKCQLMFESISELQKKEKSLQGAEQDAGEGAHGRSKKVEGTKPARPLGATRAAAKQTHSFPNLPSWIRRTLSPTLEIFGDLTNG

SEQ ID NO: 108941 - DNA, 678 bp, Elaeis guineensis var
  CDS (1)..(678)
atggcgagggagaagattcagataaggaagatagacaacgcgacggcgaggcaggtgaccttctccaagaggaggagggggctcttcaagaaggccgaggaactcgccatcctctgcgacgccgacgtcgccctcatcatcttctcctccaccggcaagctttttgagttctcgagctcaagtatgaaggagatccttgaaaagcacagtctgcattcaaagaatctacagaaagtagaaccaccatcgcttgacttgaatctagagaatagcaactacacaagattggacaaacaggttgcggaagcaagccttcagctcagacagatgagaggagaagagctccagggattaaccatgcaagagctgcagcagctagaaaaaaatcttgaaacagggttaagctgtgtgctggaaagaaagggtcaacaaattatggagcagatcaatcatcttcaacaaaagggaatgcatctgatggaagaaaatgagcgactgagaaagcaggtggtggagatggccagagcagggagacgtgtgctgactgattcggaaaatgttatgtatgaggatgggcagtcatcggagtcggttactaatgcttcacaattggtagtgccaccgaactatgacgacagctccgacacatccctcaaattgggggttgccggtccataa

SEQ ID NO: 108942 - protein, 225 aa, Elaeis guineensis var
MAREKIQIRKIDNATARQVTFSKRRRGLFKKAEELAILCDADVALIIFSSTGKLFEFSSSSMKEILEKHSLHSKNLQKVEPPSLDLNLENSNYTRLDKQVAEASLQLRQMRGEELQGLTMQELQQLEKNLETGLSCVLERKGQQIMEQINHLQQKGMHLMEENERLRKQVVEMARAGRRVLTDSENVMYEDGQSSESVTNASQLVVPPNYDDSSDTSLKLGVAGP

SEQ ID NO: 108943 - DNA, 726 bp, Elaeis guineensis var
  CDS (1)..(726)
atggggagggggagagttgaactgaagaggatcgaaaacaagatcaaccgccaggtaaccttctccaagcgccgcagcggcctgctcaagaaggcctatgagctctccgtcctctgcgacgccgagattgcactcatcatcttctccagccgcggcaagctctacgagttcggcagcgttggcacaagcaaaactttagagcgatatcaacgttgttgctatacatcccaggattctaattttgctgatcaggagacacagaactggtaccaggagatggcgaagttgaaggcaaagtttgagtctctgcagcgctcccagaggcatttgctgggggaagaccttggaccattgactgtgaaagaactgcaacaacttgaacgtcaacttgagtctgctctgtcacaagctaggcaaagaaaggctcagataatgctggaccagatggaagaacttcggaaaaaagaacgccatcttggagaaataaataagcagcttaaggacaggcttgacgcagaaagtgcctcttttagagccattcaaggatcttgggcttctgatggagtagtaaccaacaatgcattctccttgcagccatctcaatccaacgacatggattgtgaacccactctacaaatagggtttccgcagcttgttcctccagaagcagccataacgaggaacacaggcggagagaacaattttatgctaggttgggttctttga

SEQ ID NO: 108944 - protein, 241 aa, Elaeis guineensis var
MGRGRVELKRIENKINRQVTFSKRRSGLLKKAYELSVLCDAEIALIIFSSRGKLYEFGSVGTSKTLERYQRCCYTSQDSNFADQETQNWYQEMAKLKAKFESLQRSQRHLLGEDLGPLTVKELQQLERQLESALSQARQRKAQIMLDQMEELRKKERHLGEINKQLKDRLDAESASFRAIQGSWASDGVVTNNAFSLQPSQSNDMDCEPTLQIGFPQLVPPEAAITRNTGGENNFMLGWVL

SEQ ID NO: 108945 - DNA, 678 bp, Elaeis guineensis var
  CDS (1)..(678)
atggggagggggaagatagagatcaagaagatagagaatcctaccaacaggcaggtgacctactccaagaggaggacggggatcatgaagaaggctaaggagctgacggtgctttgcgatgctgaggtctcgcttatcatgttctccagcaccggcaagttctccgagtattgcagccccctttccgacaccaagaccatatttgatcgctaccagcaggtgtcagggatcaacctgtggagcgcccaatacgagaaaatgcaaaacactttgaaccatctgagggagatcaaccagaacctccgcagagaaataaggcagcggatgggtgaagatctcgacagtttgggcatccatgaactgcgcggtcttgagcaaaatttagatgaggctttgaaggttgttcgtcacagaaaataccatgtgatcaccacgcagacggatacctacaagaaaaagttgaagaactctaatgaagctcacaaaaatttactgcatgaacttgaaatgaaggacgagcacccagtttatggttttgtggatgatgaccctagcaactacgcaggtgcactggctcttgccaatggggcttcccacatgtatgctttccgtgttcagccgagccagccgaatctccatcgaatggggtttggctcccatgacctgcgccttgcttga

SEQ ID NO: 108946 - protein, 225 aa, Elaeis guineensis var
MGRGKIEIKKIENPTNRQVTYSKRRTGIMKKAKELTVLCDAEVSLIMFSSTGKFSEYCSPLSDTKTIFDRYQQVSGINLWSAQYEKMQNTLNHLREINQNLRREIRQRMGEDLDSLGIHELRGLEQNLDEALKVVRHRKYHVITTQTDTYKKKLKNSNEAHKNLLHELEMKDEHPVYGFVDDDPSNYAGALALANGASHMYAFRVQPSQPNLHRMGFGSHDLRLA

SEQ ID NO: 108947 - DNA, 675 bp, Elaeis guineensis var
  CDS (1)..(675)
atgggtcgaggaaagatcgagatcaagaggatagagaacacgaccaaccggcaggtgaccttctgcaagcgccgcaacggcctgctcaaaaaggcctacgagttgtccgtgctctgcgacgcggaggtcgccctcatcgtcttctcgagccgcggccgcctctacgaatacgccaacaacagtgtgaaagctaccatcgagaggtataaaagagcatgcactgatacctccaactctggatctgtttctgaagctgattctcagtattatcaacaagagtcaaccaaactgcgtcagcaaataatcagccttcagaattcgaacaggaatttgatgggagagtctcttggctctatgagccctagggacctgaagcaactggagggtaggttggaaaagggcataaacaaaataaggacaaaaaagaatgagttgctatttgctgaaattgaatacatgcagaaaagggaggtggagctgcaaaatgccaacatgtatctaaggaacaagattgctgagaatgagagagcacagcaacagatgaatatgttaccccagacaactgaatatgaggtcatggctccgtacgattcaaggaacttccttcaagtgaatctcatgcaaagcaatcagcattactctcatcagcagcagacgactctcccactaggatga

SEQ ID NO: 108948 - protein, 224 aa, Elaeis guineensis var
MGRGKIEIKRIENTTNRQVTFCKRRNGLLKKAYELSVLCDAEVALIVFSSRGRLYEYANNSVKATIERYKRACTDTSNSGSVSEADSQYYQQESTKLRQQIISLQNSNRNLMGESLGSMSPRDLKQLEGRLEKGINKIRTKKNELLFAEIEYMQKREVELQNANMYLRNKIAENERAQQQMNMLPQTTEYEVMAPYDSRNFLQVNLMQSNQHYSHQQQTTLPLG

SEQ ID NO: 108949 - DNA, 726 bp, Amborella trichopoda
  CDS (1)..(726)
atggggagaggaagggtggagctgaagcgaatcgagaacaagatcaacaggcaagtgaccttctccaagaggaggaacggtttgctcaagaaggcgtatgagctctctgtgctttgcgatgccgaggtcggactgatcatcttctccagccgcggaaagctttacgagttcggaagcgccggtctgagcaaaaccctcgagaggtaccagaggtgttgttacaccccacaagacaatagtgccactgatcgtgaaacacagaattggtctcaagaattgtcaaaattgaaggcaaaatatgagactctacaacgatcacaaagacatttgcttggggaagaccttggacctctgagtgtcaaggaactacaacaacttgaacgacaacttgaagtcgctctttctcaggccaggcaaagaaagacacaaatattgatggatcaaatggaagagcttcgcaggaaggagcggcgcctcggagacataaataagcagctcaagagcaagctggagtcagatggtcaaggctctttcagaggcattcaagggacatgggaatctggcactgtagttgggaacaacgcatttgctgtcaacccttcgcatgctaaccccattgattgtgaacctaccttacaaattgggtaccatcactttgtttcccctgaatcaatccctaggactgggcctgctgagagtaactttgttcaaggttgggtcctataa

SEQ ID NO: 108950 - protein, 241 aa, Amborella trichopoda
MGRGRVELKRIENKINRQVTFSKRRNGLLKKAYELSVLCDAEVGLIIFSSRGKLYEFGSAGLSKTLERYQRCCYTPQDNSATDRETQNWSQELSKLKAKYETLQRSQRHLLGEDLGPLSVKELQQLERQLEVALSQARQRKTQILMDQMEELRRKERRLGDINKQLKSKLESDGQGSFRGIQGTWESGTVVGNNAFAVNPSHANPIDCEPTLQIGYHHFVSPESIPRTGPAESNFVQGWVL

SEQ ID NO: 108951 - DNA, 672 bp, Amborella trichopoda
  CDS (1)..(672)
atgggaaggggaaagattgagatcaagcgcatagagaacacaactaataggcaggtgaccttttgcaaacggcgcaatgggctactcaagaaagcctatgaattatctgttctctgtgatgctgaagttgcacttattgtcttttcaagtcgaggtcgactgtacgaatatgcaaataacagcgtgaaaacaacaattgataggtacaagaaggcatgcgctgatagctctcactccggaactgtttcagaggccaattctcaatattaccaacaagaagctgcaaaacttcgcaatcaaatccaggttttaacgaatacaaacaggcagttgatgggtgactccgttggttcaatgactgttaaggagctcaggacattggagaacaaattggaaaagggaattagtaaaattagatcaaaaaagaatgagctactattcgctgaaatcgactacatgcagaatcgggaacttgaactacagaaagacaacatgcttctccgagctaagatagctgaaaatgaaagggcacaacacatgaacatgttgccagggccagaatatgatgtattgccaccatttgactctcggaactacctccaagttaacctattagaaccgaaccatcataactactcgcatcaggagcaaacagcacttcaactcggataa

SEQ ID NO: 108952 - protein, 223 aa, Amborella trichopoda
MGRGKIEIKRIENTTNRQVTFCKRRNGLLKKAYELSVLCDAEVALIVFSSRGRLYEYANNSVKTTIDRYKKACADSSHSGTVSEANSQYYQQEAAKLRNQIQVLTNTNRQLMGDSVGSMTVKELRTLENKLEKGISKIRSKKNELLFAEIDYMQNRELELQKDNMLLRAKIAENERAQHMNMLPGPEYDVLPPFDSRNYLQVNLLEPNHHNYSHQEQTALQLG

SEQ ID NO: 108953 - DNA, 681 bp, Nuphar advena
  CDS (1)..(681)
atgggaagaggtaagatcgagatcaagcgcatagagaacacgactaaccggcaggttaccttctgcaagcgccggagcgggctgctcaagaaggcttacgagttgtcggtgctctgcgatgccgaggtctccctcatcatcttctccagccgtggccgtctttatgagtattcaaacaacagtgttaaggcaacaattgataggtacaagaaagcatgtgcggacagttcgaactcgggaactgtttctgaagcaaacgcacagtattaccaacaagaagcatataaactacgccagcaaatcagtaaaatacaacaagataacaggcaaatgctgggtgaaggtatcaatgaaatgtctgtaagagatctcaagactttagagggaaaattggagaaaagcattggcaaaataagatccaaaaagaatgatttgctgaatagtgaaatccagtacatgcagaaaatgggtgatgatctgcaggaagagaatatgtatcttagagcaaagattagtgagaatgaaagggcgcatcagcaacagcacataagcatgatggctgggccatcagagtatgagttgctaccaacgaccttccagcatgtcaatctattggaaccctcccaccaccattactcgcaccaagaaaggacggcactgcaacttggaagagatttctaa

SEQ ID NO: 108954 - protein, 226 aa, Nuphar advena
MGRGKIEIKRIENTTNRQVTFCKRRSGLLKKAYELSVLCDAEVSLIIFSSRGRLYEYSNNSVKATIDRYKKACADSSNSGTVSEANAQYYQQEAYKLRQQISKIQQDNRQMLGEGINEMSVRDLKTLEGKLEKSIGKIRSKKNDLLNSEIQYMQKMGDDLQEENMYLRAKISENERAHQQQHISMMAGPSEYELLPTTFQHVNLLEPSHHHYSHQERTALQLGRDF

SEQ ID NO: 108955 - DNA, 732 bp, Glycine max
  CDS (1)..(732)
atggcttttccagacccatccatgtcagtttctccacagaggaagatgggaagggggaagattgagatcaagaggattgagaacactaccaatcgccaagtcacattctgcaagcgcaggaacggcttgctcaagaaagcatatgaattatctgtgctttgtgatgcagaggttgctctcattgttttctctagccgtggacgcctctatgaatatgctaataacagtgtcaaagcaaccatcgagaggtacaaaaaagcaagttcagattcgtctggcgctggatctgcttctgaggctaatgctcagttttaccagcaagaagcagataaacttcgtcaacaaattagtaacctgcagaataacaacaggcaaatgatgggtgattctttgggctctctgactgccaaggatctcaaaaatctggagactaaattagaaaaaggaattagtaggattcgttcaaaaaagaacgagctgctatttgctgaaattgagtacatgcaaaagagggagatagacttgcacaacaacaaccagcttcttcgagcaaagatagctgaaagtgagaggaaccaccataacatggctgtgttgcctggaggctcaaactatgactctatgcagtcttctcagcaacaatttgactctcgtggctacttccaagtcactggattacaacccaataatcagtatgcacggcaagatcagatgtcccttcaattagtatga

SEQ ID NO: 108956 - protein, 243 aa, Glycine max
MAFPDPSMSVSPQRKMGRGKIEIKRIENTTNRQVTFCKRRNGLLKKAYELSVLCDAEVALIVFSSRGRLYEYANNSVKATIERYKKASSDSSGAGSASEANAQFYQQEADKLRQQISNLQNNNRQMMGDSLGSLTAKDLKNLETKLEKGISRIRSKKNELLFAEIEYMQKREIDLHNNNQLLRAKIAESERNHHNMAVLPGGSNYDSMQSSQQQFDSRGYFQVTGLQPNNQYARQDQMSLQLV

SEQ ID NO: 108957 - DNA, 771 bp, Impatiens balsamina
  CDS (1)..(771)
atggctgatttgccaagtgaatccatggagcttcttgatatatctggacagagaaagaacggcagaggaaagattgagattaagaggattgagaacaccaccaatcgacaggtgaccttctgcaaacgtaggaatggattgttgaagaaagcctatgaattatccgttctttgcgatgctgaggtggcacttgtcgtcttctctagccgtggtcgtctctacgagtatgctaataacagtgttagggggacaattgaaaggtacaagaaagcatcctcggacactccgaataccgctggctctgttgctgaagcaaatgctcaattttaccaacaagaatcctccaaattgcgacagcaaattggcaatttgcaaaattcaaataggcaaatcctcggggaatcgttgagttctatgaatcttagagatcttaagagtctcgaaagtcgtttagagagaagcattagcaaaattcgctccaaaaagaatgagctgttatttgctgagattgacttcatgcaaaaacgggaagtggatttgcataacaacaatcaattcctaagagctaagatatccgagagcgagagagcccaacaacaacagcaacatcaacaaactcagatcaacttaatgcccggaggatcaaactatgagctcgtccaatctcaggcacaaacatctttcgataatagaaacttcttccaggttactgcgttgcaacctgataatcagtattctcgtgatgatcagactccttttcaactcgtttaa

SEQ ID NO: 108958 - protein, 256 aa, Impatiens balsamina
MADLPSESMELLDISGQRKNGRGKIEIKRIENTTNRQVTFCKRRNGLLKKAYELSVLCDAEVALVVFSSRGRLYEYANNSVRGTIERYKKASSDTPNTAGSVAEANAQFYQQESSKLRQQIGNLQNSNRQILGESLSSMNLRDLKSLESRLERSISKIRSKKNELLFAEIDFMQKREVDLHNNNQFLRAKISESERAQQQQQHQQTQINLMPGGSNYELVQSQAQTSFDNRNFFQVTALQPDNQYSRDDQTPFQLV

SEQ ID NO: 108959 - DNA, 729 bp, Solanum lycopersicum
  CDS (1)..(729)
atgggtacagggaaagtagaattgaagagaattgagaacaaaataaatagacaagttacctttgcaaagagaagaaatggactcctaaagaaagcttatgaactttctatactttgtgatgctgaaattgctcttattattttctctagtcgtggcaagctttatgaattttgcagcaattcaagtatgtccaagacattggagagataccacagatacaattatggtacacttgaaggaacccaaacttcatcagattcacagaacaactaccaagagtatttgaagcttaaaacaagagtggaaatgttacaacagtctcaaaggcatttgctaggtgaggatttgggacaattgggcacaaaagacttggaacagcttgaacgtcaattggcttcatcattgaggcaaattaggtcaacaaagacacaacacattcttgatcaacttgctgaacttcaacaaaaggaacaatctcttactgaaatgaacaaatctttgagaataaagttggaagaacttggtgttacctttcaaacatcatggcattgtggtgagcaaagtgtacaatatagacatgaacagccttctcatcatgagggattttttcaacatgtaaattgcaataatacattgcctataagttacggatacgataacgtacaacccgaaaatgcagcaccatcaacacatgatgctactggagttgtacctggatggatgctttga

SEQ ID NO: 108960 - protein, 242 aa, Solanum lycopersicum
MGTGKVELKRIENKINRQVTFAKRRNGLLKKAYELSILCDAEIALIIFSSRGKLYEFCSNSSMSKTLERYHRYNYGTLEGTQTSSDSQNNYQEYLKLKTRVEMLQQSQRHLLGEDLGQLGTKDLEQLERQLASSLRQIRSTKTQHILDQLAELQQKEQSLTEMNKSLRIKLEELGVTFQTSWHCGEQSVQYRHEQPSHHEGFFQHVNCNNTLPISYGYDNVQPENAAPSTHDATGVVPGWML

SEQ ID NO: 108961 - DNA, 699 bp, Taihangia rupestris
  CDS (1)..(699)
atgggtaggggaaagatcgaaatcaagaggatcgaaaacaccaccaaccgccaagtgaccttttgcaaaaggcgcaatggcttgctcaagaaggcctatgagctctctgtgctctgtgatgctgaggttgctctcatagttttctctaaccgtggccgtctctatgagtattcaaacaacagtgttagagaaacgatcgaacgatacaagaaggcgtgtgcagatacttcaaataatggatctgtctctgaagccactactcagtactatcagcaagaagctgccaaactgcgcaaccagataactgctttgcagaacaataacaggaattatatggctgaggggttggggaatatgtctgtcaaagaactcaagaatgtagagtctaaacttgagaaagcaattggcaagatcaggtccaagaagaatgagctcttgttttccgaaatagaatacatgcaaaagagggaacttgacttgcacaacaataaccagatcctccgagcaaagattgctgagaatgagaggcaccagcaaagcataaatgctattgcaggaggaggaggagcgcatggaagctatgagataatgcagtcggctcagtcatttcatgaggctcgcaactactttcaagtgaatgcgctgcagcctaatcatcagtactcgcgccatgatcagatttctcttcagttagtttga

SEQ ID NO: 108962 - protein, 232 aa, Taihangia rupestris
MGRGKIEIKRIENTTNRQVTFCKRRNGLLKKAYELSVLCDAEVALIVFSNRGRLYEYSNNSVRETIERYKKACADTSNNGSVSEATTQYYQQEAAKLRNQITALQNNNRNYMAEGLGNMSVKELKNVESKLEKAIGKIRSKKNELLFSEIEYMQKRELDLHNNNQILRAKIAENERHQQSINAIAGGGGAHGSYEIMQSAQSFHEARNYFQVNALQPNHQYSRHDQISLQLV

SEQ ID NO: 108963 - DNA, 729 bp, Antirrhinum majus
  CDS (1)..(729)
atgggaagagggagagttgagctgaagagaatagagaacaagatcaacaggcaagtgacttttgcaaaacgaaggaatgggcttttgaagaaagcttatgagctatctgttctatgtgatgctgaggttgccctcatcatcttctccaatagaggaaagctgtacgagttttgcagtagcactagcatgctgaatacactggaaaggtatcaaaagtgcaactatggacctccagagactaatgtatccacaagggaagcactggaactgagtagtcagcaggagtatttgaaacttaaagcacgctatgaagctctacagcgttcacaaaggaatcttcttggtgaggatcttggtcctctgaacagcaaagagcttgaatcacttgagaggcagcttgatatgtcactcaagcaaattcgatcaacacggactcaagcaatgctggataccctcacagatcttcagagaaaggaacacgccctcaatgaagctaacagaagtttgaaacatcggttgatggatggaagtcaaataagtctccaatggaacccaaatgctgaagatcatgtgggctatggaagacaaccatctcaaccgtcggctgatggattttatcatcctctggaatgtgaacccactctgcatattgggttccagtctgatcaaataacggttgcaggagctgggcctagtgtgaataactacatctcaggctggcttccatga

SEQ ID NO: 108964 - protein, 242 aa, Antirrhinum majus
MGRGRVELKRIENKINRQVTFAKRRNGLLKKAYELSVLCDAEVALIIFSNRGKLYEFCSSTSMLNTLERYQKCNYGPPETNVSTREALELSSQQEYLKLKARYEALQRSQRNLLGEDLGPLNSKELESLERQLDMSLKQIRSTRTQAMLDTLTDLQRKEHALNEANRSLKHRLMDGSQISLQWNPNAEDHVGYGRQPSQPSADGFYHPLECEPTLHIGFQSDQITVAGAGPSVNNYISGWLP

SEQ ID NO: 108965 - DNA, 732 bp, Antirrhinum majus
  CDS (1)..(732)
atgggaagagggagagttgagttgaagagaatagagaacaagatcaacaggcaagtgacttttgctaaacgaaggaatgggcttttgaagaaagcttatgagctatctgttctttgtgatgctgaggttgctctcatcatcttctccaatagaggaaagctgtacgagttttgcagtaactctggcaccatgctcaaaacactggaaaggtatcagaagtgcaactatggagctcctgaggctaatgtatccaccagggaggcactggaactgagtagtcagcaggagtatttgaagcttaaagcacgctatgaagccctgcagcgttcacaaaggaaccttcttggtgaggatctaggtccattaaacagcaaggagcttgaatcattggagaggcagcttgatatgtccctcaaacagatccgatcaacacggacccaggcaatgctggacaccctcacagatcttcagcgaaaggagcatgccctcaatgaagctaacaggagtctaaaacaccggttgatggagggaagtcagataagtcttcagtggaacccaaatgcacatgatatgggttatggaagacaagctgcagctcaacctcagggtgatggattctttcatcctctggaatgtgaacctactctacaaatggggttccagtctgaaataacagttggagcagcagggcctagtgtgaataactacaacatgacggggtggctgccctga

SEQ ID NO: 108966 - protein, 243 aa, Antirrhinum majus
MGRGRVELKRIENKINRQVTFAKRRNGLLKKAYELSVLCDAEVALIIFSNRGKLYEFCSNSGTMLKTLERYQKCNYGAPEANVSTREALELSSQQEYLKLKARYEALQRSQRNLLGEDLGPLNSKELESLERQLDMSLKQIRSTRTQAMLDTLTDLQRKEHALNEANRSLKHRLMEGSQISLQWNPNAHDMGYGRQAAAQPQGDGFFHPLECEPTLQMGFQSEITVGAAGPSVNNYNMTGWLP

SEQ ID NO: 108967 - DNA, 798 bp, Brassica napus
  CDS (1)..(798)
atggatcgtgggaaaatagagataaagaggatcgagaatgcgaatagcagacaagttactttctccaagaggcgtgctggtttgctcaagaaggctcatgagctctctgttctttgcgactctgaggttgccgtcatcgtcttctccaagtccggcaagctcttcgagttctcaagtactggcatgaagcgaaccgttttgagatacgagaactaccaacgttcttcagatgctcctctgattaaatataaaccagagaaccaggaggaggattgtacagaggtggactttttaaagaatgagatctcaaagcttcaagagaaacatttacaaatgcaaggtaagggcttgaatgctctgtgcttgaaagagctgcaacaccttgaacagcaactaaatgtctcgttgatatctgtgagagagcgaaaagaactattgttgactaaacaaattgaagaatcacgtatcagggaacagagagcagagctggaaaacgagaccttacgtagacaggttcaagaacttagaaattttctcccgtccatcaaccaaaactatgttccatcctacatcacatgcttcgctatagatcccaagaactcccccgtgaacaactctggcttggacgacactaattacagtctccagaagaccaattcagacacaacattgcagttggggttgccgggagaagcacaggctagaaggaggagtgaagcaaatagagagagcccatcaagtgattcagtaacaacgagcaccaccaaagcaactccacaaaggatcaatctagtttag

SEQ ID NO: 108968 - protein, 265 aa, Brassica napus
MDRGKIEIKRIENANSRQVTFSKRRAGLLKKAHELSVLCDSEVAVIVFSKSGKLFEFSSTGMKRTVLRYENYQRSSDAPLIKYKPENQEEDCTEVDFLKNEISKLQEKHLQMQGKGLNALCLKELQHLEQQLNVSLISVRERKELLLTKQIEESRIREQRAELENETLRRQVQELRNFLPSINQNYVPSYITCFAIDPKNSPVNNSGLDDTNYSLQKTNSDTTLQLGLPGEAQARRRSEANRESPSSDSVTTSTTKATPQRINLV

SEQ ID NO: 108969 - DNA, 756 bp, Brassica oleracea
  CDS (1)..(756)
atgggaaggggtagggttgaaatgaagaggatagagaacaagatcaaccgacaagtgacgttttcgaaaagaagagctggtcttttgaagaaagcccatgagatctcgatcctttgtgatgctgaggtttcccttattgtcttctcccataaggggaaactgttcgagtactcgtctgaatcttgcatggagaaggtactagaacactacgagaggtactcttacgccgagaaacagctaaaagttccagactctcacgtcaatgcacaaacgaactggtcagtggaatatagcaggcttaaggctaagattgagcttttggagagaaaccaaaggcattatctgggcgaagatttagaatcaatcagcataaaggagctacagaatctggagcagcagcttgacacttctcttaaacatattcgctcgagaaaaaatcaactaatgcacgagtccctcaaccacctccaaagaaaggagaaagaaatactggaggaaaacagcatgcttgccaaacagataagggagagggagagtatcctaaggacacatcaaaaccaatcagagcagcaaaaccgcagccaccatgtagctcctcagccgcaaccgcagttaaatccttacatggcatcatctcctttcctaaatatgggtggcatgtaccaaggagaatatccaacggcggtgaggaggaaccgtctcgatctgactcttgaacccatttacaactgcaaccttggttactttgccgcatga

SEQ ID NO: 108970 - protein, 251 aa, Brassica oleracea
MGRGRVEMKRIENKINRQVTFSKRRAGLLKKAHEISILCDAEVSLIVFSHKGKLFEYSSESCMEKVLEHYERYSYAEKQLKVPDSHVNAQTNWSVEYSRLKAKIELLERNQRHYLGEDLESISIKELQNLEQQLDTSLKHIRSRKNQLMHESLNHLQRKEKEILEENSMLAKQIRERESILRTHQNQSEQQNRSHHVAPQPQPQLNPYMASSPFLNMGGMYQGEYPTAVRRNRLDLTLEPIYNCNLGYFAA

SEQ ID NO: 108971 - DNA, 729 bp, Castanea mollissima
  CDS (1)..(729)
atggtgtacccgaaccaatccatgtcgctctctccccagaggaagattgggcgggggaagatggagatgaagaggatcgaaaacaccaccaatcgtcaagtcaccttctgtaagagacgcaatggtctgctcaaaaaggcttatgagttgtctgttctgtgtgatgctgaggttgcactcatcgtcttctctacccgtggccgcctttacgagtatgctaacaacagtgtgaaatcaaccattgagaggtacaagaaggcatgtgcagattcctccaatactggttctgttgctgaagccaacactcagttctaccagcaagagtctgctaaactgcgtgcgcaaattggaaacttgcagaattcaaaacaggcaaatgatggggagtctttgagcaatttgactgtaaaagagctcaagagcttggagattaaattagagagaggaattagcagaattagatccaaaaagaatgagctcttgtttgcagaaattgagtatatgcagaaaagggaagttgaattgcataacaataaccagcttctccgagcaaagatagccgagaatgagagaaaccagcagaacttgaatgtgatgccagcaggaggtgggagctatgagctcatgcaaactcagcaatatgattctcgaaactttttccaagtaaatgcattacaacccaatcatcagtacccacgtgaagaccagatgtctcttcaattagtttaa

SEQ ID NO: 108972 - protein, 242 aa, Castanea mollissima
MVYPNQSMSLSPQRKIGRGKMEMKRIENTTNRQVTFCKRRNGLLKKAYELSVLCDAEVALIVFSTRGRLYEYANNSVKSTIERYKKACADSSNTGSVAEANTQFYQQESAKLRAQIGNLQNSKQANDGESLSNLTVKELKSLEIKLERGISRIRSKKNELLFAEIEYMQKREVELHNNNQLLRAKIAENERNQQNLNVMPAGGGSYELMQTQQYDSRNFFQVNALQPNHQYPREDQMSLQLV

SEQ ID NO: 108973 - DNA, 675 bp, Elaeis guineensis var
  CDS (1)..(675)
  misc_feature (185)..(185): y is t or c
  misc_feature (376)..(376): y is t or c
  misc_feature (595)..(595): r is g or a
atgggtcggggaaagatcgaaatcaagaggatagagaacacaaccaaccggcaggtgaccttctgcaagcgccgcaatggcctgctcaaaaaggcctatgaattgtccgtgctctgcgacgctgaggttgctctcatcatcttctcgagccgtggccgcctctacgagtatgccaacaatagtgygaaagctactatcgagaggtacaaaaagcatgtacttgatacctctaactctggatctgtctctgaagctgattcccagtattatcaacaagaatcattgaaactgcgccagcaaataaccagcctacagaattcaaacagaaatttgatgggagattctcttggctctatgagccttagggacctgaagyaactggagggaaggttggaaaagggcataaacaaaataagaactaagaagaatgagttgctatttgctgaaattgaatacatgcagaaaagggagacggagctgcaaaatgccaacatgtacctaaggaacaagatagccgagaatgagggagcacaacaacagatgaatatgttacccgctacgactgaatatgaggtcatgccgccatatgattcarggaacttcctgcaagtgaatctaatgcaaagcaatcagcattactctcaccagcagcagacagctctccaactaggatga

SEQ ID NO: 108974 - protein, 224 aa, Elaeis guineensis var
  misc_feature (62)..(62): The Xaa at location 62 stands for Ala, or Val.
  misc_feature (126)..(126): The Xaa at location 126 stands for Stop, or Gln.
  misc_feature (199)..(199): The Xaa at location 199 stands for Arg, or Gly.
MGRGKIEIKRIENTTNRQVTFCKRRNGLLKKAYELSVLCDAEVALIIFSSRGRLYEYANNSXKATIERYKKHVLDTSNSGSVSEADSQYYQQESLKLRQQITSLQNSNRNLMGDSLGSMSLRDLKXLEGRLEKGINKIRTKKNELLFAEIEYMQKRETELQNANMYLRNKIAENEGAQQQMNMLPATTEYEVMPPYDSXNFLQVNLMQSNQHYSHQQQTALQLG

SEQ ID NO: 108975 - DNA, 630 bp, Elaeis guineensis var
  CDS (1)..(630)
  misc_feature (406)..(406): r is g or a
  misc_feature (569)..(569): s is g or c
atggtgcgagggaagacacaggtgagacggatcgagaacgccaccagccggcaggtaacgttttccaagcgccggaatgggcttcttaagaaggccttcgagctctccgtcctctgcgacgccgaggtcgcccttatcgtcttctcccctagagggaagctctacgagttctccagctccagctccagcatggaaaagacgatcgatcgttacataatgcatgcaaaagatgttaacatcaacaagaaatcaagagagcataatgcacaacagttgaagtctgatgctgcaagcttgatgaagaagattgaacggcttgaagcttctaaaagaaagctcttgggtgaaaatttagaatcatgtgcaattgaggagctgcatgatctagagctccagttagagcaargcctaagcagcatcagaaatcggaaatatcaaatgctcgaagagcaaatctgtcggctaaaagaaaaggaaaagatcctcactgcttcgatacaagaaaagttaaatgcagaacctcggctacagctatgtgctcctgctgtttctgatgattatgatagtcsgaatacagatgtagagacagagctggtaattggtaggccagggacttgcaaggtcaagtga

SEQ ID NO: 108976 - protein, 209 aa, Elaeis guineensis var
  misc_feature (136)..(136): The Xaa at location 136 stands for Gly, or Ser.
  misc_feature (190)..(190): The Xaa at location 190 stands for Arg, or Pro.
MVRGKTQVRRIENATSRQVTFSKRRNGLLKKAFELSVLCDAEVALIVFSPRGKLYEFSSSSSSMEKTIDRYIMHAKDVNINKKSREHNAQQLKSDAASLMKKIERLEASKRKLLGENLESCAIEELHDLELQLEQXLSSIRNRKYQMLEEQICRLKEKEKILTASIQEKLNAEPRLQLCAPAVSDDYDSXNTDVETELVIGRPGTCKVK

SEQ ID NO: 108977 - DNA, 624 bp, Elaeis guineensis var
  CDS (1)..(624)
atggggaggggaagggtggagctgaagagaatcgagaacaagatcaatcgccaggtgaccttcgcgaagcggcggaatgggctcctcaagaaggcctacgagctctccgtgctctgcgacgccgaggttgctctcatcatcttctccaaccgcgggaagctttacgagttctgcagcagctccagtatgatgaagacacttgaaaggtatcaaaaatgcaactatggtgctccggagactaatattatatcaagagagactcagagtagtcagcaggagtacttgaaactaaaagcacgtgctgaagccttacagagatcgcaaagaaatctcctcggtgaggacttgggcccactcagcagcaaggagcttgagcagcttgaggggcaacttgatgcatcgttaaagcaaatcagatcaacacggacccaatacatgcttgatcagcttgcagatcttcaacgaaaggaacaaatgctatgtgaggccaataaaagtctaaggcgaaggttggaggaaagtaaccaggctggtcagcagcaagtttgggatcccactgctcatgcagtaggctatggcggcagccacctcaaccacagagcgatggattctaccaacagatag

SEQ ID NO: 108978 - protein, 207 aa, Elaeis guineensis var
MGRGRVELKRIENKINRQVTFAKRRNGLLKKAYELSVLCDAEVALIIFSNRGKLYEFCSSSSMMKTLERYQKCNYGAPETNIISRETQSSQQEYLKLKARAEALQRSQRNLLGEDLGPLSSKELEQLEGQLDASLKQIRSTRTQYMLDQLADLQRKEQMLCEANKSLRRRLEESNQAGQQQVWDPTAHAVGYGGSHLNHRAMDSTNR

SEQ ID NO: 108979 - DNA, 684 bp, Nicotiana tabacum
  CDS (1)..(684)
atggctcgtgggaagatccagatcaagagaatagagaaccaaacaaacagacaagtcacttattctaagagaagaaatggacttttcaagaaagctaatgaactcactgttctttgtgatgctaaagtttctataattatgatttcaagtaccggcaaacttcatgaatttataagtccctctgtcacgaccaagcagttgttcgatctgtatcaaaagactgttggagttgatctttggaactcccactatgagaaaatgcaagagcagttgaggaagctaaaggatgttaataggaatctccgaagagagatcaggcaaaggatgggagaaagcctaaacgatctgaactatgagcagttggaagagctcaatgaaaatgtggacaattctctgaagcttattcgtgaaagaaagtataaagtgattggcaatcagattgatacatacaagaagaaggtcaggaatgtggaagaaatacatagaaatctattgcttgaatttgatgcaagacaagaggatccatatggattggttgagcaagaaggggactataactctgtgcttggattcccaaatggagggccgcgcatattagccttacgccttcaaccaaaccaccagccaaatcatcatcttcacagtggaggaggctccgatatcactacttttgctctagcttga

SEQ ID NO: 108980 - protein, 227 aa, Nicotiana tabacum
MARGKIQIKRIENQTNRQVTYSKRRNGLFKKANELTVLCDAKVSIIMISSTGKLHEFISPSVTTKQLFDLYQKTVGVDLWNSHYEKMQEQLRKLKDVNRNLRREIRQRMGESLNDLNYEQLEELNENVDNSLKLIRERKYKVIGNQIDTYKKKVRNVEEIHRNLLLEFDARQEDPYGLVEQEGDYNSVLGFPNGGPRILALRLQPNHQPNHHLHSGGGSDITTFALA

SEQ ID NO: 108981 - DNA, 660 bp, Nicotiana tabacum
  CDS (1)..(660)
atggtgagaggaaaaactcagatgaggcgtatagaaaacgcaacaagcaggcaagttactttctctaaacgcagaaatggtttgctaaagaaagcatttgagctttcagtactatgtgatgcggaggttggattagttatattttctccaagaggaaagctctatgaatttgccagctctagcatgcaggagataatagagcgatataagaggcatactaaagacaaagttcaacctgaaaaccaagttggggaacagaatctgcagcatatgcagcatgcggcagcaagtttgatgaagaagatagagcttcttgaagaatctaaaaggaaactcttaggagaaggtctgcagtcctgttcccttgtagaactacaacagatagaaaaacaattggagcggagtgtcagtaccatccgagcacgaaagattcaagtttttaaggaacaaattgaacgactaaaagaaaaggagaaaatccttgcttctgaaaatgcaatactgagggagaagtttggtggccttcaacagagacaaggctcaagtggagaaaaggaaggtgaagctctttgtacagagagtagtgaaaaatcagatgtggagactgaattgttcatcggaccacccgagtgcagaataaggcgtcccttacagaattaa

SEQ ID NO: 108982 - protein, 219 aa, Nicotiana tabacum
MVRGKTQMRRIENATSRQVTFSKRRNGLLKKAFELSVLCDAEVGLVIFSPRGKLYEFASSSMQEIIERYKRHTKDKVQPENQVGEQNLQHMQHAAASLMKKIELLEESKRKLLGEGLQSCSLVELQQIEKQLERSVSTIRARKIQVFKEQIERLKEKEKILASENAILREKFGGLQQRQGSSGEKEGEALCTESSEKSDVETELFIGPPECRIRRPLQN

SEQ ID NO: 108983 - DNA, 786 bp, Picea abies
  CDS (1)..(786)
atggggcggggtcgagtccagctgaggcgaatagagaacaaaataaatcgacaagtcacgttttcgaagcgcaggaacggactgctgaagaaggcgtacgagctctcggtgctgtgcgatgcagaagtggcgctaataattttctccaccagaggaaagctttacgagtttgccagttccagcatgaacaagaccttggaaagatacgaaaaatgttcatatgcaatgcaagatactacaggcgtctcggaccgagaagcacagaattggcaccaagaagttacaaagctgaagggtaaggttgagctccttcagcgatcacagaggcatttgttgggggaagatcttggtccactaaatgttaaggagctacaacaacttgaacgtcaactcgaagttgctctggcacatcttaggtcaagaaaaacgcaggtgatgctggaccagattgaggagcttcgccaaagggaacggttgctacatgaagtaaacaagtctctgcagaaaaagctttcagaaacagagggaagagatgtaataactggcatagagcagacttctaatactaatactggtactaacgggccttgggattcttctatcacaaacaccgcatatgctctctcacaccctcaacaaaactcaaatgcaagcctccaccatgtggactgtgaacccacactgcagattggatatcagcctgtgcctcctgaaagcatcggccctcctcatcagcctcagcacaaccaaacgcagaatcaatacatgcaagggtggtgggtttga

SEQ ID NO: 108984 - protein, 261 aa, Picea abies
MGRGRVQLRRIENKINRQVTFSKRRNGLLKKAYELSVLCDAEVALIIFSTRGKLYEFASSSMNKTLERYEKCSYAMQDTTGVSDREAQNWHQEVTKLKGKVELLQRSQRHLLGEDLGPLNVKELQQLERQLEVALAHLRSRKTQVMLDQIEELRQRERLLHEVNKSLQKKLSETEGRDVITGIEQTSNTNTGTNGPWDSSITNTAYALSHPQQNSNASLHHVDCEPTLQIGYQPVPPESIGPPHQPQHNQTQNQYMQGWWV

SEQ ID NO: 108985 - DNA, 744 bp, Petunia integrifolia
  CDS (1)..(744)
atggtgtttcctaatcaagaatttgagtcatcatcttctcagaggaaatcaggaagaggaaaaattgaaattaagaggatcgaaaatactacgaatcgacaagttactttttgcaagcgtagaaatggtcttttgaaaaaggcttatgaactatctgtgctttgtgatgctgaagttgcccttattgttttctctagccgtggccgtctctatgaatatgccaacaacagtgttagggcgactattgataggtacaagaaacaccatgctgattccacaagtacaggatctgtttctgaagctaatacgcagtattaccagcaagaagcagcaaaactgcgacgacaaattcgagatatacagacttataacaggcaaattgttggagaggcattgagcagtttaagcccaagggacctcaagaatctggaaggcaagcttgagaaggccatcggtagagttcgttccaaaaagaatgaattgctcttctcagaaatagagctcatgcaaaagagggagattgagatgcagaacgccaacatgtaccttcgagcaaagattgctgaggtagagagagcaacacagcaaatgaacttgatgcctggaggaggatctgaataccagcaacagcccatgagcagtacttctcagccttatgatgctcgcaacttcctgcctgtaaatctgctcgaacctaatcctcattactctcgtcaggaccaaactgctctacagcttgtctga

SEQ ID NO: 108986 - protein, 247 aa, Petunia integrifolia
MVFPNQEFESSSSQRKSGRGKIEIKRIENTTNRQVTFCKRRNGLLKKAYELSVLCDAEVALIVFSSRGRLYEYANNSVRATIDRYKKHHADSTSTGSVSEANTQYYQQEAAKLRRQIRDIQTYNRQIVGEALSSLSPRDLKNLEGKLEKAIGRVRSKKNELLFSEIELMQKREIEMQNANMYLRAKIAEVERATQQMNLMPGGGSEYQQQPMSSTSQPYDARNFLPVNLLEPNPHYSRQDQTALQLV

SEQ ID NO: 108987 - DNA, 738 bp, Pinus radiata
  CDS (1)..(738)
atgggaagagggaaagtagagctgaagaggatagagaacaaaatcaacaggcaagtaacatttgcgaagagaagaaatgggcttctcaagaaagcttatgagctctctgttctctgtgatgctgaggttgcgctcatcattttctccaaccgtggcaagctctatgaattctgcagcagttctagcatgatgaaaacaattgagaagtaccagaagtgcagctatggttcacttgagaccaactgctccatcaatgagatgcagaacagctaccaggattatttggagctaaaagcaagagtggaggtcctccaacgatctcagagaaacctccttggggaagagttgggtcccctaaactcgaaggagctggagcaacttgagcaccagttggagaattctctgaagcaaattcggtctgcaaagacccaattcatgtttgatcaactggctcatcttcagcacaaggaacaaatgctggttgaagctaacagagaattaaggaagaagttggaagagagcaatacaagaatccctctccgccttggatgggaagctgaggatcacaataacatttcatacaggcgccttcccacgcagtcgcaaggattgatcttccagcccttaggcggctacccgaacatgcagatcgggtacaatcctgcaggctcgaatgaattgaatgtttcgcctgccgaccaacatcccaacggattcattcccggatggatgctctga

SEQ ID NO: 108988 - protein, 245 aa, Pinus radiata
MGRGKVELKRIENKINRQVTFAKRRNGLLKKAYELSVLCDAEVALIIFSNRGKLYEFCSSSSMMKTIEKYQKCSYGSLETNCSINEMQNSYQDYLELKARVEVLQRSQRNLLGEELGPLNSKELEQLEHQLENSLKQIRSAKTQFMFDQLAHLQHKEQMLVEANRELRKKLEESNTRIPLRLGWEAEDHNNISYRRLPTQSQGLIFQPLGGYPNMQIGYNPAGSNELNVSPADQHPNGFIPGWML

SEQ ID NO: 108989 - DNA, 720 bp, Antirrhinum majus
  CDS (1)..(720)
atggaatttcctaatcaagattctgagtcattgaggaaaaatgggagagggaaaattgagatcaagaggatcgagaacattacgaatcgacaggtcaccttctgcaaacgtagaaatggactactgaagaaggcttacgagttatcggtgttgtgtgatgccgaagttgccctcgtcgtcttctcgagccgtggaaggctctatgaatatgctaacaacagtgttagggcaactattgagagatacaagaaagctagtgctgattcctcaaattctgtgtcaacatctgaagctaacactcaattttaccagcaagaggccaacaaactgcgccggcaaataagagagatacagacttcaaacaggcaaatgcttggtgagggtgttagcaatatggctttgaaagatctgaagagcacagaagccaaagttgaaaaagccatcagcagaatccgttccaagaagaatgagttactgtttgcagagatagagcacatgcagaagagggagcttgagctgcacaatgctaacatgttcctacgtgcaaagatagctgagggtgagagggcacaacagcagatgaacttgatgcctggttctgactaccagccgatgacttcacagtcgtacgatgttcggaacttccttccaatgaacctcatggaacctaatcagcagcaatactctcgccacgatcaaacggctctccagcttgtttga

SEQ ID NO: 108990 - protein, 239 aa, Antirrhinum majus
MEFPNQDSESLRKNGRGKIEIKRIENITNRQVTFCKRRNGLLKKAYELSVLCDAEVALVVFSSRGRLYEYANNSVRATIERYKKASADSSNSVSTSEANTQFYQQEANKLRRQIREIQTSNRQMLGEGVSNMALKDLKSTEAKVEKAISRIRSKKNELLFAEIEHMQKRELELHNANMFLRAKIAEGERAQQQMNLMPGSDYQPMTSQSYDVRNFLPMNLMEPNQQQYSRHDQTALQLV

SEQ ID NO: 108991 - DNA, 747 bp, Silene latifolia
  CDS (1)..(747)
atggagttttcaagccaaattacaagggaagaaggctcaccatcaagccaaaggaaattagggagaggtaaaatcgagattaagcgtatcgaaaacacgacaaatcgtcaagttaccttctgtaagaggagaaatggattgcttaagaaagcctatgaattatctgtactttgtgatgctgaagttgcccttattgttttctcaagccgcggccgtctctatgaatatgctaatcatagcgtcaagggtaccatagaccggtacaagaaagccagctccgacaactctggtgccagctctgctgctgaagccaatgctcagtactatcaacaagaagctgctaaattgaggaaccagatccgtacagtaacagagaataacaggcatttgatgggtgaaggcctaagcagtctaaacatgaaggatcttaagagccttgagaataaacttgaaagaggaattagccgaatccgatctaaaaagaatgagctgctgtttgctgagattgagttcatgcagaaaagggaagtagaactgcacaacaacaaccagtatcttagagcaaagatagcagaaaatgagagagcacaacaaagtatgagcttgatgccaggtggaagcagtgagtatgagctggcaccgccacctcagtcattcgactcccggaattacttccaagtcaatgctcttcaacccaataatacccactactctcgcccagaccagacaactctccagcttaactaa

SEQ ID NO: 108992 - protein, 248 aa, Silene latifolia
MEFSSQITREEGSPSSQRKLGRGKIEIKRIENTTNRQVTFCKRRNGLLKKAYELSVLCDAEVALIVFSSRGRLYEYANHSVKGTIDRYKKASSDNSGASSAAEANAQYYQQEAAKLRNQIRTVTENNRHLMGEGLSSLNMKDLKSLENKLERGISRIRSKKNELLFAEIEFMQKREVELHNNNQYLRAKIAENERAQQSMSLMPGGSSEYELAPPPQSFDSRNYFQVNALQPNNTHYSRPDQTTLQLN

SEQ ID NO: 108993 - DNA, 687 bp, Solanum tuberosum
  CDS (1)..(687)
atggctcgtggtaagatccagatcaagaaaatagaaaaccaaacaaataggcaagtgacttattcaaagagaagaaatgggctattcaagaaggctaatgaacttacagttctttgtgatgctaaagtttcaattgttatgatttctagtactggaaaacttcatgagtttataagtccctctatcacgaccaacaatttgttcgatctgtaccaaaagactattggagttgatatttggacttctcactatgagaaaatgcaagagcagctgaggaagttaaaggatgttaataggaatctacgaaaagagatcaggcagaggatgggagaaagcctaaatgatctgaactttgaacagttggaagagctcatggaaaatgtggacaattctctgaagcttattcgtgaaagaaagtataaggtgattggcaatcagattgaaacttacaggaagaaggttaggaatgtggaagaaatacatagaaatctcctgcttgaatttgatgcaagacaagaggatccatatggtggattagttgagcaagaaggagactacaattccgtgcttggattccccactggagggcatcatatattagccttaggccttcaaccaaacaacaatcatcatcatcatcttcacagtggaggtggctctgatattactacttttgctctaggttga

SEQ ID NO: 108994 - protein, 228 aa, Solanum tuberosum
MARGKIQIKKIENQTNRQVTYSKRRNGLFKKANELTVLCDAKVSIVMISSTGKLHEFISPSITTNNLFDLYQKTIGVDIWTSHYEKMQEQLRKLKDVNRNLRKEIRQRMGESLNDLNFEQLEELMENVDNSLKLIRERKYKVIGNQIETYRKKVRNVEEIHRNLLLEFDARQEDPYGGLVEQEGDYNSVLGFPTGGHHILALGLQPNNNHHHHLHSGGGSDITTFALG

SEQ ID NO: 108995 - DNA, 768 bp, Zea mays
  CDS (1)..(768)
atggggaggggacgagttgagctcaagcggatcgagaacaagatcaaccgccaggtcaccttctccaagcgccgcaacggcctgctcaagaaggcctacgagctctccgtgctctgcgacgccgaggtcgcgctcatcatcttctccagccgcggcaagctctacgagttcggcagcgccggcataacaaaaactttagaaaggtaccaacattgctgctacaatgctcaagattccaatggcgcactctctgaaactcagagctggtaccaggaaatgtcaaaactgagggcaaaattcgaggccttgcagcgcactcagaggcacttgcttggggaggaacttggcccactgagtgtgaaggagttgcagcagctagagaaacagctcgaatgtgctttgtcacaggcaagacagagaaagacacaacttatgatggagcaagtggaagagctccgcagaaaggagcgacacctgggagaaatgaacaggcaactcaaacacaagcttgaagctgaaggttgtagcaactacagaaccctgcagcatgcagcctggccagctcccggcagcaccatggtggagcatgacggcgccacctatcatgtgcatccaacaactgctcaatcggttgcaatggactgtgaacccactctgcaaatcgggtaccctcctcatcaccagtttctgccttccgaggcagccaataatatcccaaggagcccccctggaggcgagaacaacttcatgctgggatgggttctttga

SEQ ID NO: 108996 - protein, 255 aa, Zea mays
MGRGRVELKRIENKINRQVTFSKRRNGLLKKAYELSVLCDAEVALIIFSSRGKLYEFGSAGITKTLERYQHCCYNAQDSNGALSETQSWYQEMSKLRAKFEALQRTQRHLLGEELGPLSVKELQQLEKQLECALSQARQRKTQLMMEQVEELRRKERHLGEMNRQLKHKLEAEGCSNYRTLQHAAWPAPGSTMVEHDGATYHVHPTTAQSVAMDCEPTLQIGYPPHHQFLPSEAANNIPRSPPGGENNFMLGWVL

SEQ ID NO: 108997 - DNA, 768 bp, Zea mays
  CDS (1)..(768)
atggggaggggacgcgtcgagctgaagcggatcgagaacaagatcaaccgccaggtcaccttctccaagcgccgcaacggcctgctcaagaaggcctacgagctctccgtgctctgcgacgccgaggtcgcgctcatcatcttctccggccgcggcaagctctacgagttcggcagcgccggcgtaactaaaactttagaaaggtatcaacattgctgctacaatgctcaagattccaacaatagtgcactctctgaatctcagagctggtaccaggaaatgtcaaaactgagggcaaaattcgaggccttgcagcgcactcagaggcacttgcttggcgaggaccttgggccactgagtgtgaaggaattgcagcagctagagaaacagctagaatgtgctttgtcacaggcaagacagagaaagacgcaagttatgatggagcaagtggaagagcttcgcagaacggagcgtcacctgggagaaatgaacaggcaactcaaacacaagctcgaagctgaaggctgtagcaactacacaaccttgcagcatgccgcctgctggccagctcccggcggcaccatcgtggagcatgacggcgccacctatcaagtgcatccgcctgcccactcagttgctatggactgtgaacccactctgcaaatcgggtaccctcatcaccagtttccgccccctgaggcagtcaataatatcccaaggagcgccgccacaggcgagaacaacttcatgctgggatgggttctttga

SEQ ID NO: 108998 - protein, 255 aa, Zea mays
MGRGRVELKRIENKINRQVTFSKRRNGLLKKAYELSVLCDAEVALIIFSGRGKLYEFGSAGVTKTLERYQHCCYNAQDSNNSALSESQSWYQEMSKLRAKFEALQRTQRHLLGEDLGPLSVKELQQLEKQLECALSQARQRKTQVMMEQVEELRRTERHLGEMNRQLKHKLEAEGCSNYTTLQHAACWPAPGGTIVEHDGATYQVHPPAHSVAMDCEPTLQIGYPHHQFPPPEAVNNIPRSAATGENNFMLGWVL

SEQ ID NO: 108999 - DNA, 762 bp, Rumex acetosa
  CDS (1)..(762)
atggagttctcaaatgagctaagcagggatatggaagatggatctccacagaggaaaatggggagaggaaagattgagatcaagcggatcgaaaacgtgacgaaccgccaagtaaccttctgcaagcgtaggaatggtctgctaaagaaagcatatgaattgtctgttctttgtgatgctgaggttgctctgattgtcttctcaagccgcggtcgcctctatgaatacgccaaccacagtgtgaaagcaaccattgagaggtacaagaagacgtgctccgactccactggtgttacttccgtggaggaggcaaatgcccagcaagaagcagccaagctgaggaaccagatccgaaccttgcagaatcaaaccagaaacacaagcaggaacctgatgggcgaaggcctgaccagcatgaatatgaaggacctgaagaaccttgaaacccgcctcgagaaaggaatcagcagggtccgtgccaagaagaatgagcttctgtttggtgagatcgagttcatgcaaaagaaggaaattgaactgcacaacaacaatcagtttctgcgcgccaagatagcagagagtgagaggagccagcagagcatgaaccttatgcccgggagcagcagtggtgagcagcactacgagctgatgcctcagtcccaagcgggccctttcgactctcgcaacttcttccaggtcagcgatctccagccagacgaacgctactcttgccagaaccagactccactgcagctagtgtaa

SEQ ID NO: 109000 - protein, 253 aa, Rumex acetosa
MEFSNELSRDMEDGSPQRKMGRGKIEIKRIENVTNRQVTFCKRRNGLLKKAYELSVLCDAEVALIVFSSRGRLYEYANHSVKATIERYKKTCSDSTGVTSVEEANAQQEAAKLRNQIRTLQNQTRNTSRNLMGEGLTSMNMKDLKNLETRLEKGISRVRAKKNELLFGEIEFMQKKEIELHNNNQFLRAKIAESERSQQSMNLMPGSSSGEQHYELMPQSQAGPFDSRNFFQVSDLQPDERYSCQNQTPLQLV

SEQ ID NO: 109001 - DNA, 678 bp, Petunia hybrida
  CDS (1)..(678)
atgggaagaggaaagatagagataaagaggattgagaacaacacaaataggcaggtgacgttctgcaaaaggagaaatggattgctgaaaaaggcatatgaactatcagttctgtgtgaagctgagattgctcttattgttttctccacccgtggccgcgtctatgagtactctaacaacaacataagggcaatcatagatcgatataagaaggcaacggtagaaacctctaatgctttcaccactcaagagctcaatgcccagttttaccaacaagagtcgaaaaaacttcgtcaacagatacagttgatccagaattcaaataggcatctggttggtgaaggactaagctctttgaatgtaagggagctgaaacagttggagaatagacttgaaagaggcattgctagaattaggtcaaaaaagcatgagatgatactggctgaatctgaggatttgcagaagagggagattcaactggaacaggagaatgcattcctcagatcaaagatagcagaaaacgagaggcttcaggaactgagcatgatgcctgctggtgggcaggagtacaatgcaattcagcaatatttggcaagaaacatgcttcaacttaatatgatggaaggggtgccttcctatccattgccctctgacaagaagtccctcgaccttgagtaa

SEQ ID NO: 109002 - protein, 225 aa, Petunia hybrida
MGRGKIEIKRIENNTNRQVTFCKRRNGLLKKAYELSVLCEAEIALIVFSTRGRVYEYSNNNIRAIIDRYKKATVETSNAFTTQELNAQFYQQESKKLRQQIQLIQNSNRHLVGEGLSSLNVRELKQLENRLERGIARIRSKKHEMILAESEDLQKREIQLEQENAFLRSKIAENERLQELSMMPAGGQEYNAIQQYLARNMLQLNMMEGVPSYPLPSDKKSLDLE

SEQ ID NO: 109003 - DNA, 756 bp, Prunus persica
  CDS (1)..(756)
atgggaagaggtagagttgagctgaagaggatagagaataaaattaacaggcaagtgacttttgccaagagaagaaatgggctgctcaagaaagcttatgagctctcagttctctgcgatgctgaggttgccctcataattttctccagccgtggcaaactttatgaattctgcagcagtatgagcatgctgaaaacgcttgaaaagtaccaaaggtgcagctatggctccctggaagccaacagaccagtcaatgagacccagaacagctatcaggaatatctgaagctgaaagctagagtggaggtcctccaacaatctcaaagaaaccttcttggggaagatttggccccactgaacacaaaggagcttgagcagcttgagcatcaactggaggcatccttgaaccaaattaggtcaacaaagactcagtttatgcttgatcagctttgtgatctccagaacaaggaacaaatgctagttgaagctaacaaagccttgaggaggaagctggaagaaactagtgggcaagcgccacctctattggcatgggaagctgctggccatggcaacaacaatgttcagcatactggccttcctcatcatcctcactcacaaggcttcttccatccattgggaaacaactccacttcccaaattggatacacccccttgggttcagatcatcatgaacaaatgaatgttggaaatcatggccaacatgtgaatggattcattcctgggtggatgctttga

SEQ ID NO: 109004 - protein, 251 aa, Prunus persica
MGRGRVELKRIENKINRQVTFAKRRNGLLKKAYELSVLCDAEVALIIFSSRGKLYEFCSSMSMLKTLEKYQRCSYGSLEANRPVNETQNSYQEYLKLKARVEVLQQSQRNLLGEDLAPLNTKELEQLEHQLEASLNQIRSTKTQFMLDQLCDLQNKEQMLVEANKALRRKLEETSGQAPPLLAWEAAGHGNNNVQHTGLPHHPHSQGFFHPLGNNSTSQIGYTPLGSDHHEQMNVGNHGQHVNGFIPGWML

SEQ ID NO: 109005 - DNA, 708 bp, Musa acuminata
  CDS (1)..(708)
atgggaaggggtaagattgagatcaagaggatcgagaacaccacaaaccgccaagtgacgttctgcaagcgccggaatgggctgctgaagaaagcctacgaactgtctgtgctttgcgatgccgaggtcgccctaatcgtgttctccagccgcggcaggctatatgagtacgccaataacaacataaaatcaacgatcgagaggtacaagaaggcatgcgctgacagttcgagttcggatgccattgtggacgtcaattctcagcactactatcagcaagaatctgccaaacttcgccaccagatccaggtattacagaatgcgaatcggcacttgatgggcgacgctttaagctctcttaatgtaaaggagctcaagcaactagaaaaccgacttgaaagaagcatcacaaggatcagatcgaagaagcatgagctgctgtttgcagaaatcgagtatatgcagaaaagggaagtggagcttcagagtgacaacatgtaccccagagccaagatagcagagaacgaacgagtgcagcaactgagcatcgtggaagccggcgcggagtacgatgctattccaggagcattcgactccaggaactactaccacgcgaacatattggaggcagcagctcactactcgcatcaccaggaccagacagccctgcagctcggctatgagaccaaggcggattcagcggcgtga

SEQ ID NO: 109006 - protein, 235 aa, Musa acuminata
MGRGKIEIKRIENTTNRQVTFCKRRNGLLKKAYELSVLCDAEVALIVFSSRGRLYEYANNNIKSTIERYKKACADSSSSDAIVDVNSQHYYQQESAKLRHQIQVLQNANRHLMGDALSSLNVKELKQLENRLERSITRIRSKKHELLFAEIEYMQKREVELQSDNMYPRAKIAENERVQQLSIVEAGAEYDAIPGAFDSRNYYHANILEAAAHYSHHQDQTALQLGYETKADSAA

SEQ ID NO: 109007 - DNA, 735 bp, Musa acuminata
  CDS (1)..(735)
  misc_feature (28)..(28): m is a or c
  misc_feature (30)..(30): r is g or a
  misc_feature (48)..(48): y is t or c
  misc_feature (51)..(51): s is g or c
  misc_feature (63)..(63): y is t or c
  misc_feature (72)..(72): s is g or c
  misc_feature (73)..(73): m is a or c
  misc_feature (81)..(81): r is g or a
  misc_feature (84)..(84): s is g or c
  misc_feature (105)..(105): s is g or c
  misc_feature (108)..(108): s is g or c
atggggaggggaagggtggagctgaagmgratcgagaacaagatcaaycgscaggtgaccttygcgaagcgsmggaatggrctsctcaagaaggcctacgagctstcsgtgctctgcgacgccgaggtcgccctcatcgtcttctccaaccgcgggaagctctacgagttctgcagcagctccagtatgttgaggacactagagaggtaccaaaagtgcaattatggtgcaccagaaacaaatatcatatcaagggagactcagagtagtcagcaagagtatttgaagcttaaggcgcgcgttgatggcttgcagcgatcacaaagaaatctgctgggtgaagatctggggccacttaacatcaaggaacttgagcagcttgagcgccaacttgatgcatcgttaagacaaataagatcaacaaggacacaatacatgcttgaccagcttggagatctccaaagactgggaacaaatgctatgtggagcttaataaagccctggaagataagattggaggaaagcagtgaggcggatcagcaacagctgtgggatcccaacactcatgctgtagcttacgggcggcagcagcctcaaccacagggcgacggcttcttccaattcatagactgtgaacctactcttcagattgggtaccatccagatcaaatggcgatcgcagcagcagcagcagcagctcctggtccaagttacatgcccgggtggcttgcatga

SEQ ID NO: 109008 - protein, 244 aa, Musa acuminata
MGRGRVELKRIENKINRQVTFAKRRNGLLKKAYELSVLCDAEVALIVFSNRGKLYEFCSSSSMLRTLERYQKCNYGAPETNIISRETQSSQQEYLKLKARVDGLQRSQRNLLGEDLGPLNIKELEQLERQLDASLRQIRSTRTQYMLDQLGDLQRLGTNAMWSLIKPWKIRLEESSEADQQQLWDPNTHAVAYGRQQPQPQGDGFFQFIDCEPTLQIGYHPDQMAIAAAAAAAPGPSYMPGWLA

SEQ ID NO: 109009 - DNA, 729 bp, Hyacinthus orientalis
  CDS (1)..(729)
atggggagagggagagtggagctgaagaggatagagaacaagatcaacaggcaggtgacgttctccaagcggaggaacgggctgctgaagaaggcctacgagctgtcggtgctctgcgacgccgaggtcgccctcatcgtcttctccagccgcggcaagctctacgagttcggcagcgccggtacgggtaaaacactggagcgataccaacgatgctgttacacttctcaagatgctagtattgctgaccgtgaagcacagagctggtaccaagaagtctccaaattgaaggcaaaattcgagtccctacagcgctcccagagacatttgcttggagaagaccttggtccactgagtgtgaaagaattgcaacagttggaacgtcaaatggaatctgccctgtctcaggctcggcaaagaaagcagacacagataatgctggaccagatggaagaacttcggaagaaggagcgtcatctcggagagatcaataaacatcttaaatctaggctcgaggctgaaggcgcgacattcagagcaattcaaggctcatgggagtctactgcagcaattcaaggaaatgcattctccgtgcatccttctcaatccagggccatggactgtgaacccactctgcagatagggtatcatcatcttgttcaacctgaagaagctatcccaaggaacacagtcggggagaacaatttcatgcttggttgggttctttag

SEQ ID NO: 109010 - protein, 242 aa, Hyacinthus orientalis
MGRGRVELKRIENKINRQVTFSKRRNGLLKKAYELSVLCDAEVALIVFSSRGKLYEFGSAGTGKTLERYQRCCYTSQDASIADREAQSWYQEVSKLKAKFESLQRSQRHLLGEDLGPLSVKELQQLERQMESALSQARQRKQTQIMLDQMEELRKKERHLGEINKHLKSRLEAEGATFRAIQGSWESTAAIQGNAFSVHPSQSRAMDCEPTLQIGYHHLVQPEEAIPRNTVGENNFMLGWVL

SEQ ID NO: 109011 - DNA, 651 bp, Pisum sativum
  CDS (1)..(651)
atggtgagaggaaaaactcagatgaaacgtattgagaatgcaacaagcagacaagttacattttcaaagagaagaaatggtttgttgaagaaagcttttgaactatctgttctttgtgatgctgaagttgctcttatcatcttttctccaagaggaaaactttatgagttttctagctcctgcatgcaggacacgattgaacggtaccgtagaaataccagaagtgctcaaccattgcaaagatcagatgaacaaaatatgcagaatttgaagcaagaaacagcaagtttgatgaagaagattgaacttctcgaagcctcgaaacggaaactcatgggagaaggtttaggttcatgctccttagaagaacttcaacagatagaacaacagttggaaaagagtgtaagcactgttagagcagaaagaatcaggttttacaagaatcaaattgagcaacttaaagaaaaggaaaaagtcttacttgctgaaaattcaaggctctctaagcagccgcagccgcaactactgcaactaccaccaccgccaccgccaaatgatcatccgagagaaaatcaaccgtacgcagaaagcagcagtccgagctcagatgtggtgactgaattgttcattggcctacacaggtctagttga

SEQ ID NO: 109012 - protein, 216 aa, Pisum sativum
MVRGKTQMKRIENATSRQVTFSKRRNGLLKKAFELSVLCDAEVALIIFSPRGKLYEFSSSCMQDTIERYRRNTRSAQPLQRSDEQNMQNLKQETASLMKKIELLEASKRKLMGEGLGSCSLEELQQIEQQLEKSVSTVRAERIRFYKNQIEQLKEKEKVLLAENSRLSKQPQPQLLQLPPPPPPNDHPRENQPYAESSSPSSDVVTELFIGLHRSS

SEQ ID NO: 109013 - DNA, 672 bp, Lotus japonicus
  CDS (1)..(672)
atggggagggggaagattgagatcaagaggattgagaacacaactaatcgccaggtgacattctgcaagagaagaaacgggcttctgaagaaagcttatgagctatcagtgctgtgtgatgctgaagttgccctcattgtcttctccagccgtggccgcctctatgaatattcaaacaacaacatcaggtcaactatagagaggtacaaaaaggcttgttcagatcattcaagtacgagcactaccacagaaattaatgctcagtactatcaacaagaatctgccaagctgcgacaacaaattcagatgctgcaaaattcaaacaggcacttaatgggtgatgccttaagcaccctgacggtgaaggagcttaagcaacttgagaacaggcttgaaaggggaatcactagaattagatccaagaaacatgagatgctactagctgaaattgaatacttccagaaaagggagattgaactggaaaatgaaaatctttgccttcggactaagataactgatgttgagaggattcagcaagtaaacatggtttctggacaagagctgaatgccattcaggcattagcttctcgtaactttttcaatccacccatgattgaagatggaacttcctaccctcagcagcctgataagaagatccttcatcttgggtaa

SEQ ID NO: 109014 - protein, 223 aa, Lotus japonicus
MGRGKIEIKRIENTTNRQVTFCKRRNGLLKKAYELSVLCDAEVALIVFSSRGRLYEYSNNNIRSTIERYKKACSDHSSTSTTTEINAQYYQQESAKLRQQIQMLQNSNRHLMGDALSTLTVKELKQLENRLERGITRIRSKKHEMLLAEIEYFQKREIELENENLCLRTKITDVERIQQVNMVSGQELNAIQALASRNFFNPPMIEDGTSYPQQPDKKILHLG

SEQ ID NO: 109015 - DNA, 732 bp, Lotus japonicus
  CDS (1)..(732)
atggggagaggaagagtggagctgaagagaattgagaacaagatcaacaggcaagtgaccttcgctaaacgcaggaacggactattgaagaaagcttatgaactttccgttctttgcgatgcggaggttgctctcatcatcttctccaatagaggaaaactgtacgagttttgcagcagttcaagcatgctgaaaacgctagaaaggtaccagaaatgtaactatggtgcgccggaagctaatgtgtctacacgggaagccttggagttaagcagccaacaggaatacttgaagctgaaagcacgttatgaagccctacaacgctcccagaggaaccttatgggggaagatctaggccctctaaacagcaaagagctggagtcacttgagaggcagctagattcatccttgaagcaaataagatctacaaggacccaattcatgctggatcagctctctgatcttcaacgtaaggaacacatgctaagcgaggctaacaggtctctcagacaaaggcagctggaagggtaccaactaaactcactgcaactgaatcccggtgttgaagacatgggatatggccgccatccagctcaaactcatggtgatgccttctatcattcaatagaatgtgagccgaccttacaaattggttaccagcctgatccagtgtcagtggtgacggcaggcccgagcatgaataataattacatggcaggatggctgccatag

SEQ ID NO: 109016 - protein, 243 aa, Lotus japonicus
MGRGRVELKRIENKINRQVTFAKRRNGLLKKAYELSVLCDAEVALIIFSNRGKLYEFCSSSSMLKTLERYQKCNYGAPEANVSTREALELSSQQEYLKLKARYEALQRSQRNLMGEDLGPLNSKELESLERQLDSSLKQIRSTRTQFMLDQLSDLQRKEHMLSEANRSLRQRQLEGYQLNSLQLNPGVEDMGYGRHPAQTHGDAFYHSIECEPTLQIGYQPDPVSVVTAGPSMNNNYMAGWLP

SEQ ID NO: 109017 - DNA, 720 bp, Solanum macrocarpon
  CDS (1)..(720)
atggcaagggagaagataaaaataaagaagatagataacataacagcaaggcaggtgacattttcaaagaggagaagagggcttttcaagaaagctgaggagctttctgttctttgtgatgctgatgttgctctcatcattttctcagctactggaaaactatttgattttgctagcacaagcatgaaggatattcttggaaaatataagttgcagtcagctagccttgaaaaagttgagcaaccttcccttgacttacagctagagaatagcctcaacatgagattaaacaaggagatagctgataaaactcgtgaactcaggcagatgagaggtgaggaacttgaaggattgagtttagaagaattacaacaaattgagaaaaaacttgaagctggattcaaccgtgttcttgagattaagagtacacgaattatgggtgaaattaccaaccttcaaagaaagggtgctgagctgatggaagaaaacaaacaattgaaacaaaaaatggaaattatgaagaaaggaaagttacccttagtgacagagatggtgatggaagatggccaatcatctgagtctataattacatccaataatgtttgtagtagtaatagtggccctcctcctgatcaagatgattcctcaaaaataggtggtaatgcagtagaagatgattgctcaattacatctttgaagttggggctaccattcagctag

SEQ ID NO: 109018 - protein, 239 aa, Solanum macrocarpon
MAREKIKIKKIDNITARQVTFSKRRRGLFKKAEELSVLCDADVALIIFSATGKLFDFASTSMKDILGKYKLQSASLEKVEQPSLDLQLENSLNMRLNKEIADKTRELRQMRGEELEGLSLEELQQIEKKLEAGFNRVLEIKSTRIMGEITNLQRKGAELMEENKQLKQKMEIMKKGKLPLVTEMVMEDGQSSESIITSNNVCSSNSGPPPDQDDSSKIGGNAVEDDCSITSLKLGLPFS

SEQ ID NO: 109019 - DNA, 669 bp, Solanum macrocarpon
  CDS (1)..(669)
atggtgagacaaaaaatccagatcaagaagatagacaacttgacagcaaggcaagtgacattttcaaagagaagaagagggcttttcaagaaagctcaagaactttcaactctttgtgatgctgatattggacttattgttttttctgctactggaaaactttttgagtattcaagctccagtatgatgcaactgattgagaagcacaagacgcagtcagaaagggataatatgaatggttcagaacagctgaaatcttctaatcttcagagcgagaagaaaacctatgcaatgcttagcagggagttagtggagaagaatcgggagttaaggcaactacatggagaagagctgcaaggacttggcttggatgaattaatgaaattggagaaattagtcgagggaggaataagtcgtgtcctcaaaattaagagtgacaagtttacgagagagatcagttccctcaagaaaaaggaagctcaactccaggaagagaattcacagttgaaacaccaatcacaagcaagattaaatgaagaaggtcaaaatgcaattgagcaaggacattcagcagactccatcaccaataatcgcagcttagtcagtagtcatcaggactacgatgactcggatactagcctcaagctaggtttgggttttccttattga

SEQ ID NO: 109020 - protein, 222 aa, Solanum macrocarpon
MVRQKIQIKKIDNLTARQVTFSKRRRGLFKKAQELSTLCDADIGLIVFSATGKLFEYSSSSMMQLIEKHKTQSERDNMNGSEQLKSSNLQSEKKTYAMLSRELVEKNRELRQLHGEELQGLGLDELMKLEKLVEGGISRVLKIKSDKFTREISSLKKKEAQLQEENSQLKHQSQARLNEEGQNAIEQGHSADSITNNRSLVSSHQDYDDSDTSLKLGLGFPY

SEQ ID NO: 109021 - DNA, 726 bp, Pisum sativum
  CDS (1)..(726)
atggagctaccaaatgaaggtggagaaggatcttctcaaaagaaattaggaagaggaaaaatcgaaatcaagaggatcgagaacactacaaatagacaagtcaccttttgcaaacgccgcaacggattgctgaagaaagcttatgaattatcagttctttgtgatgctgaagttgctctcgttgtcttctcgacccgcggccgcttgtatgagtatgctaacaacagtgttagagcaactattgaaaggtacaaaaaagcatgtgctgcttctactaatgcagaatctgtatctgaagctaatacccagttttaccagcaagagtcatcaaaattgagaagacagattcgagatattcagaatctaaatagacacatccttggtgaagctcttggatctttgagtctgaaggaactaaagaatcttgaaggtagattggagaaaggtttaagcagagttagatctagaaagcatgagactttgtttgctgatgtggagttcatgcaaaagcgggaaattgagctgcaaaaccataacaactatctacgagctaagatagctgaacatgaaagagctcaacaacagcaacaaaatttgatgccggaaacaatgtgtgagtctttaccttcacagacctatgacagaaacttctttcctgtaaatcttctcggatcggatcagcaggagtattcgcgtcaagaccaaaccgctcttcagcttgtgtga

SEQ ID NO: 109022 - protein, 241 aa, Pisum sativum
MELPNEGGEGSSQKKLGRGKIEIKRIENTTNRQVTFCKRRNGLLKKAYELSVLCDAEVALVVFSTRGRLYEYANNSVRATIERYKKACAASTNAESVSEANTQFYQQESSKLRRQIRDIQNLNRHILGEALGSLSLKELKNLEGRLEKGLSRVRSRKHETLFADVEFMQKREIELQNHNNYLRAKIAEHERAQQQQQNLMPETMCESLPSQTYDRNFFPVNLLGSDQQEYSRQDQTALQLV

SEQ ID NO: 109023 - DNA, 732 bp, Pisum sativum
  CDS (1)..(732)
atgagttttccaaatgaatccatgcctgattctcctcagagaaagattggaaggggaaagattgagatcaagaggattgaaaacacaacaaatcgccaagttaccttctgcaaacgtagaaatggcttgcttaagaaggcatatgagttatctgtgctttgtgatgcagaagttgctcttatagtcttttcgactcgtggccgtctctatgaatatgcaaataacagtgtgaaagcttctattgagaggtataagaaagcatgttctgatacttctggtgctaaatcagcttctgagactaatgctcagtattatcagcaagaagccgcgaaactgcgagtgcaaatcagtaatttgcagaatcataacaggcaaatgatgggtgaagctttgagcaatatgaacggtaaggaactcagaaacctcgagagtaaattagaaaaaggaattagccgaattcgctccaagaagaatgaaatgctatttgcagaaattgagtacatgcagaaaagggagatagagttgcataatagcaatcaggctcttagagcaaagatctcagaaaatgatcagaggaacaaccataatgttaatgtgttgcatggaggcacaaacttcgagtgcatccaacctcagcagcaattcgactctcgcagttacttccaagtgaatgaattacaacctaataatcagtatgccaggcaggaccagatgtctcttcaatttgtctga

SEQ ID NO: 109024 - protein, 243 aa, Pisum sativum
MSFPNESMPDSPQRKIGRGKIEIKRIENTTNRQVTFCKRRNGLLKKAYELSVLCDAEVALIVFSTRGRLYEYANNSVKASIERYKKACSDTSGAKSASETNAQYYQQEAAKLRVQISNLQNHNRQMMGEALSNMNGKELRNLESKLEKGISRIRSKKNEMLFAEIEYMQKREIELHNSNQALRAKISENDQRNNHNVNVLHGGTNFECIQPQQQFDSRSYFQVNELQPNNQYARQDQMSLQFV

SEQ ID NO: 109025 - DNA, 750 bp, Pisum sativum
  CDS (1)..(750)
atgggaagaggaagagttgagttgaagaggatagaaaacaagataaacagacaagtaacatttgcaaagagaagaaatggtcttcttaaaaaagcttatgaactttctgttctctgtgatgctgaggttgctcttatcatcttctctactcgtggaaaactctatgagttttgcagcacttctaacatgctcaaaactcttgataggtaccagaaatgcagttatggagctgtagaggttagcaaacctgcgaaagaactcgagagtagctaccgggaatacttgaagctgaagcaacgatttgagaatcttcaacgaacacagagaaatcttttaggggaagatttaggtccattgagttctaaagatcttgagcagcttgaaaggcaattggattcatctctgaagcatgttaggtcaacaaagacacaattcatgctggatcaattagctgatcttcaaaataaggaacatatgttggtagaagcaaacagatccttgtcaatgaagttggacgaaataaactcgcgaaatcagtacaggcaatcatgggaagcaggcgatcaaagcatgcaatacggcgaccaacagaatgcgcactctcagagcttcttccagcaactagattgcaatccaaccttgcaaatcggttcggattataggtacaacaatgtagcatcagatcagatagcttccacaagtcaagctcaacaacaagtgaatggatttgttcctggatggatgctttga

SEQ ID NO: 109026 - protein, 249 aa, Pisum sativum
MGRGRVELKRIENKINRQVTFAKRRNGLLKKAYELSVLCDAEVALIIFSTRGKLYEFCSTSNMLKTLDRYQKCSYGAVEVSKPAKELESSYREYLKLKQRFENLQRTQRNLLGEDLGPLSSKDLEQLERQLDSSLKHVRSTKTQFMLDQLADLQNKEHMLVEANRSLSMKLDEINSRNQYRQSWEAGDQSMQYGDQQNAHSQSFFQQLDCNPTLQIGSDYRYNNVASDQIASTSQAQQQVNGFVPGWML

SEQ ID NO: 109027 - DNA, 732 bp, Pisum sativum
  CDS (1)..(732)
atgggaagagggaaggttgttcttgagagaatacagaacaagatcaatcgacaagttacattctcaaagagaagaagtggtttgctcaagaaagcattcgaactttctgtgctttgtgatgctgaagttgctcttatcatcttctccagccttggcaagctttttcaatacagttccactgacttgaacaaaatcattgagaagtatcgtcaatgttgcttcaacaacatgtctgagaatggtgacttggaagaacatgaatcacagggcttatacgaggagcttttgatgctaagagttaagcatgaatctcttgcccagactcaaaggaattttttgggagaagaactcaatacactaagcataaaagatttgcagaatattgaaaaacaactagagagaacgcttgcacaagctcgaaagcaccaaatccagaaactgatgacacgagttgatgaattacgcagagaggttcacaaggtggaggaggttaacaaacagttagaatccaaggaaaaaggtttaagcaccaatatttgtgatgattctactgatttaaccatctccaacaacaacaatatcgttaccaatttgcatgatgcacaagtcagtgagtttgaatatggtcagtttcggcaccaacaagctggttcaaaaggacgggcaacatatacaaggattgaccgaggccagagtagtcgcaacaagaacaatggatggatgaatatttga

SEQ ID NO: 109028 - protein, 243 aa, Pisum sativum
MGRGKVVLERIQNKINRQVTFSKRRSGLLKKAFELSVLCDAEVALIIFSSLGKLFQYSSTDLNKIIEKYRQCCFNNMSENGDLEEHESQGLYEELLMLRVKHESLAQTQRNFLGEELNTLSIKDLQNIEKQLERTLAQARKHQIQKLMTRVDELRREVHKVEEVNKQLESKEKGLSTNICDDSTDLTISNNNNIVTNLHDAQVSEFEYGQFRHQQAGSKGRATYTRIDRGQSSRNKNNGWMNI

SEQ ID NO: 109029 - DNA, 711 bp, Pisum sativum
  CDS (1)..(711)
atggggagaggaagggtgcaattgaagaggattgagaacaagatcaataggcaagtgacattttcaaagagaagatgtggtctgttgaagaaagctcatgagatctctgtgctctgtgatgctgaggttgctcttattgtcttctccaacaaaggaaaactctatgaatattcaagcgatccctgtatggaaagaattctagaacgatatgaaaggtattcatatgcggagaggcaacatgttccaaatgatcagccccaaaatgaaaattggattatagaacatgcaaagttgaaggcaaggttggaagtcatacagaaaaatcaaaggaattttatgggtgaagaacttgatggcttaagtatgaaagagcttcagaatttggagcatcaacttgattcagctctcaaacagattagatcaagaaagaaccaagttgtgtatgaatccatttcagagctccaaaaaaaggataaggcccttcaagaaaaaaacaatctgctcacaaaaaagataaaggagaaagagaaggcattagccaactttgagctacacaatgatgatatggatctagattctgcacttgtacctcaaccattggagacaccgaatattggatgttcccctcaagatagaggtgataatgaaggaagccaaactcaatctaatgcccttcttccaccatggatgcttcgtcctataaatgactag

SEQ ID NO: 109030 - protein, 236 aa, Pisum sativum
MGRGRVQLKRIENKINRQVTFSKRRCGLLKKAHEISVLCDAEVALIVFSNKGKLYEYSSDPCMERILERYERYSYAERQHVPNDQPQNENWIIEHAKLKARLEVIQKNQRNFMGEELDGLSMKELQNLEHQLDSALKQIRSRKNQVVYESISELQKKDKALQEKNNLLTKKIKEKEKALANFELHNDDMDLDSALVPQPLETPNIGCSPQDRGDNEGSQTQSNALLPPWMLRPIND

SEQ ID NO: 109031 - DNA, 690 bp, Ginkgo biloba
  CDS (1)..(690)
atgggccgaggaaagatagagatcaagaggatcgagaacaccaccaataggcaagtcaccttttccaaacgtagaggtggccttctcaagaaagcgcacgagctttctgtgctgtgtgatgctgaactcggcctcattattttctccagcacagggaagctctttgagtactccagcgctacttccagcatgagaaagattatagagaggtaccagaaagtgtctggagcgcggctgtccgagtttgataaccagcatttgttctgtgagatgacgagaatcaagaacgaaaacgaaaagcttcaaactagcatcaggcatatgttgggtgaagacctgacctctttgacaatgaccgagttacatcaccttgaacagcagctggaagtcgcagcaaatcgtgttcgaacaagaaagaatcagctgatgcttcagcaattagataatctgcgaagaaaggagcgacttctggaggagcaaaacagccatctgtgcaggctacttgccgaacatcaagctgcagtggaaggtgtggtggcagagcccatgatcgacttcggtgtgttctgccaatccgaagctcgaaatcctcttcatttgacagcgcagtcgatgcaaggcttccgtctccagccaacacagccaaacctgcaggaaagtggaatgcaacgaccagcactacagctctga

SEQ ID NO: 109032 - protein, 229 aa, Ginkgo biloba
MGRGKIEIKRIENTTNRQVTFSKRRGGLLKKAHELSVLCDAELGLIIFSSTGKLFEYSSATSSMRKIIERYQKVSGARLSEFDNQHLFCEMTRIKNENEKLQTSIRHMLGEDLTSLTMTELHHLEQQLEVAANRVRTRKNQLMLQQLDNLRRKERLLEEQNSHLCRLLAEHQAAVEGVVAEPMIDFGVFCQSEARNPLHLTAQSMQGFRLQPTQPNLQESGMQRPALQL

SEQ ID NO: 109033 - DNA, 732 bp, Ginkgo biloba
  CDS (1)..(732)
atggggcgaggacgcgtagagttgaagcggatcgagaacaagataaaccgtcaggtcacgttttcaaaacgcaggaatggactcttgaaaaaggcttacgagctctccgtcttgtgcgatgccgaggttgcgctcataattttctccagcaggggcaaagtctatgagttcggcagcgccggcatgacaaagacattggagagataccaaaagtgttcatatgtattacaagatgtgaatgtttcagatcgagaggcacagaactggcaccaagaggttggaaagttaaaggcaaaggttgagcttttacaacggtcacaaaggcatttactaggtgaagaccttggtccattaagtgttaaggagttgcaacaacttgagagacaacttgaggttgcactaacacatgttagatcaagaaagactcaggttatgttggacctcatggatgagctacgaaaaaaggaacgtctcttacaggaagtaaacaagtccctgcgcaagaagctttcagaggcggaggaacagcgtgcattcagtgctatgcaagatcctgggtcatgggactcaaatgcagtagcgaataatgcatatgctatgccaccaaatcaatcaaatgctgtggattgcgagcccactttacagattgggtatcaatatgcccctcctgaaacaagtatgcctcgcgccgatcagacagagaacaactacatgcaaggctggatggtttga

SEQ ID NO: 109034 - protein, 243 aa, Ginkgo biloba
MGRGRVELKRIENKINRQVTFSKRRNGLLKKAYELSVLCDAEVALIIFSSRGKVYEFGSAGMTKTLERYQKCSYVLQDVNVSDREAQNWHQEVGKLKAKVELLQRSQRHLLGEDLGPLSVKELQQLERQLEVALTHVRSRKTQVMLDLMDELRKKERLLQEVNKSLRKKLSEAEEQRAFSAMQDPGSWDSNAVANNAYAMPPNQSNAVDCEPTLQIGYQYAPPETSMPRADQTENNYMQGWMV

SEQ ID NO: 109035 - DNA, 759 bp, Ginkgo biloba
  CDS (1)..(759)
atgggacgaggtcgagtccagctgaggcgcatcgagaacaaaataaatcgccaagtcacgttttcgaagcggcgaaatggactgttaaagaaggcttacgaactttctgtgttgtgcgacgccgaagtggcattgattgtcttctccaccagaggcaaactctacgagttcgccagttccagcatgaacaagacgctcgagaggtatgaaaagtgctcgtatgcagtgcaagatacaaatgtctcaaaccgggaagcacagaattggcatcaagaggttacaaaactgaagtctaaggttgagctcctacaacagtcacaaaggcatctgttgggggaagatcttggcccactcagtgtgaaggagctccagcaacttgaacgacagctggagattgcactgaatcatgttaggtcgagaaagagtcaagttatgatggacttgattgatgagcttcggaaaaaggaaaggctgctacaggaagtgaacaaatctctgcacaagaagctttcagaatcagagggacgaaatgcaacccatgatatgcggcatcctaccgacgataatggaccttggaacccatctgtaaacggtggatatgccctcccatcgacccagcaaaacaccaacctccaccctgtggattgtgaaccgacactacaaattgggtatcagtctgttcctcgtgaaagcattgagcctccacaggagcaaactcacaaccagccccaggataactacacggggtggtgggtttga

SEQ ID NO: 109036 - protein, 252 aa, Ginkgo biloba
MGRGRVQLRRIENKINRQVTFSKRRNGLLKKAYELSVLCDAEVALIVFSTRGKLYEFASSSMNKTLERYEKCSYAVQDTNVSNREAQNWHQEVTKLKSKVELLQQSQRHLLGEDLGPLSVKELQQLERQLEIALNHVRSRKSQVMMDLIDELRKKERLLQEVNKSLHKKLSESEGRNATHDMRHPTDDNGPWNPSVNGGYALPSTQQNTNLHPVDCEPTLQIGYQSVPRESIEPPQEQTHNQPQDNYTGWWV

SEQ ID NO: 109037 - DNA, 729 bp, Persea americana
  CDS (1)..(729)
atggggagaggaagggtggagctgaagaggattgagaacaagatcaacaggcaagtgacctttgccaaacggagaaacggacttcttaagaaagcttacgagctttccgttctctgcgatgctgaggttgctctcatcatcttctccaatagaggaaagctctatgagttctgcagcagctctagcatgctgaaaacgctcgagaggtatcagaaatgcaactatggtgcacctgagacaactgtttcaacaagagaaactcagagcagtcaccaggagtatttgaaactcaaggcacgtgttgaagctttacagcgatcacaaagaaatctgctgggcgaagacttgggccctctgacgagcaaggagctcgacactcttgaaaaacagttggatgcatctttgaagcagatcagatcaacaaggactcagtacatgctcgatcaacttgcagatctccaacgaagggaacaaatgcttagtgaagccaacaagaacctgaaaaggaggttggaggaaggaatgcaggcaaatccccaagtttgggatcctaatgggcatccggttacatatggacgacaacaagccccaccacagagcgatggattcttccatcccttggatacgtgtgaacccactctccatatcgggtaccagccagctgatcaaataacgattgccgcacctggaccgagtgtgaataactacatgccaggatggcttgcatga

SEQ ID NO: 109038 - protein, 242 aa, Persea americana
MGRGRVELKRIENKINRQVTFAKRRNGLLKKAYELSVLCDAEVALIIFSNRGKLYEFCSSSSMLKTLERYQKCNYGAPETTVSTRETQSSHQEYLKLKARVEALQRSQRNLLGEDLGPLTSKELDTLEKQLDASLKQIRSTRTQYMLDQLADLQRREQMLSEANKNLKRRLEEGMQANPQVWDPNGHPVTYGRQQAPPQSDGFFHPLDTCEPTLHIGYQPADQITIAAPGPSVNNYMPGWLA

SEQ ID NO: 109039 - DNA, 714 bp, Persea americana
  CDS (1)..(714)
atgggaagaggaagggttgagttgaagcggatcgagaacaagatcaacaggcaagtgacctttgccaaaagaagaaatggtctcttgaagaaagcttacgagctttcggttctctgcgatgctgaagtcgctctgatcgtcttctccactagagggaagctctatgagttctgcagcaccgctagcatgctgaaaacactagagaggtatcagaagtgcaactatggtgcccctgagacgactgtatcgtcaagagaattacagagcagtcaccaggaatatatgaaacttaaggcgcgggtcgaagctttacaacgatcacaaagaaatcttttgggcgaggacttgggccctttaactgggaaggaactagacacacttgaaaagcagttggatgtatctttgaagcatatcagatcaacacggactcagtacatgctcgatcaacttggagatcttcaacgaagggagcatatgcttagtgaagctaacaagagcctaagaagaaggttggaagaaggaatgcaggaaaacccaaaccatgcatgggatccaaatggatatgtccgacaacaagccccaccacagagtgacggattcttccatcccatagagtgcgaacccactctccaaattgggtaccagtctagtcaaatcacaatcgctgcacccggacccaatgtgaataactacatgccgggatggcttgcatga

SEQ ID NO: 109040 - protein, 237 aa, Persea americana
MGRGRVELKRIENKINRQVTFAKRRNGLLKKAYELSVLCDAEVALIVFSTRGKLYEFCSTASMLKTLERYQKCNYGAPETTVSSRELQSSHQEYMKLKARVEALQRSQRNLLGEDLGPLTGKELDTLEKQLDVSLKHIRSTRTQYMLDQLGDLQRREHMLSEANKSLRRRLEEGMQENPNHAWDPNGYVRQQAPPQSDGFFHPIECEPTLQIGYQSSQITIAAPGPNVNNYMPGWLA

SEQ ID NO: 109041 - DNA, 714 bp, Acorus americanus
  CDS (1)..(714)
atggggaggggaagagttgagttgaagaggatagagaataatatcaacagacaggtgaccttcgcaaaacgaaggaatggactcctcaagaaggcttatgagctctctgtcctctgcgacgccgaggtcgccctcatcatcttctccaaccgaggcaggctctttgagttctgcagcagctccagcatgctcaagacactggacaggtatcaaaaatgtagttttcatgcagcagaatctagtgctccatcaagggaattacagagcagttaccaggaatacttaaaattgaaagcaaaagtggaagctttgcaacgttcacagaggaaccttcttggggaagacttgggcccattaaacagtaaagaacttgagcaacttgagagccagcttgagatgtccttaaagcaagttagatcaaccaagactcaatacatgcttgaccagctttgtgatctgaaaaggaaggaacaaatgttgcaggaagctaataaatctttaaagagaaagttggatgaatataattctgaaaatccccttcaactatcatgggacaatggtggctcaaatgttccttatggacgccagccgactcattccgaggacttcttccaacctctgtctgtcgatccatcactccatattgggtatcaggtaaatgctgcagccacaggacaaaatgtcaatggtttcattccaggatggatgacttga

SEQ ID NO: 109042 - protein, 237 aa, Acorus americanus
MGRGRVELKRIENNINRQVTFAKRRNGLLKKAYELSVLCDAEVALIIFSNRGRLFEFCSSSSMLKTLDRYQKCSFHAAESSAPSRELQSSYQEYLKLKAKVEALQRSQRNLLGEDLGPLNSKELEQLESQLEMSLKQVRSTKTQYMLDQLCDLKRKEQMLQEANKSLKRKLDEYNSENPLQLSWDNGGSNVPYGRQPTHSEDFFQPLSVDPSLHIGYQVNAAATGQNVNGFIPGWMT

SEQ ID NO: 109043 - DNA, 729 bp, Liriodendron tulipifera
  CDS (1)..(729)
atggggagaggaagggtagaactgaagcggatcgagaacaaaatcaacaggcaagtaacattcgccaaacgcagaaacggccttctcaagaaagcctacgagctctctgttctctgcgatgctgaggttgctctgatcatcttctccaacagaggaaagctgtacgagttctgcagcacctccagcatgttcaagacactagagcgatatcagaagtgcaactacggagcaccagaggcagctgtgacaacaagagagattcagagcagtcatcaagagtatttgaaacttaaagcacgtgtagaggccctacaacgttcacaaagaaatcttctgggtgaggacctgggcccgttgaacggcaaggagcttgacacacttgaaaggcagctagacgtgtcactgaaacagataagatccactcggacccagtacatgcttgaccagctcacagatcttcaaagaagggaacaaatgcttagtgaagctaacaaggccctgaaaagaaggctggatgaaggaatgcaggcaaatccacaccaaggatggaatcacaatccacatgcaatggagtacgtccggcaacagggcccaccacaaggcgatggatttttccatccattagactgtgaacctactctccaaatcgggtaccagaccgatcaaataacgatgagcactgcacctgggcccagtttgaataactacatgccggggtggctcgcatga

SEQ ID NO: 109044 - protein, 242 aa, Liriodendron tulipifera
MGRGRVELKRIENKINRQVTFAKRRNGLLKKAYELSVLCDAEVALIIFSNRGKLYEFCSTSSMFKTLERYQKCNYGAPEAAVTTREIQSSHQEYLKLKARVEALQRSQRNLLGEDLGPLNGKELDTLERQLDVSLKQIRSTRTQYMLDQLTDLQRREQMLSEANKALKRRLDEGMQANPHQGWNHNPHAMEYVRQQGPPQGDGFFHPLDCEPTLQIGYQTDQITMSTAPGPSLNNYMPGWLA

SEQ ID NO: 109045 - DNA, 726 bp, Eschscholzia californica
  CDS (1)..(726)
atgggaagaggaagagttgagttgaagagaatagagaacaagattaacagacaagtaacgtttgcaaaacgtagaaatggacttttgaagaaagcttatgaactttctgttctttgtgatgctgaagttgctctcatcatcttctctaatagaggaaaattgtacgagttttgtagtagttccagcatgttcaaaaccctagaacgatatcaaaagagcaactatggagcaccagaaacaaatgtgtctgtaagagagagccaggagcatagcagtcaccaggagtatttgaaacttaaagcacgagttgaggccttgcaacgatcacaaaggaatcttctgggcgaggatttgggacctttaagtgggaaggaactcgaatcgcttgaaagacagcttgatatgtcactaaagcaaattagatcaactcggacccagtatatgctcgatcagcttaccgatcttcaacgaagagaacaaatgttgagtgatgctaacaagaccttaaggagaaggttggaagaaggaactgtaacatgtcatcaatgggagcaaaacatgcagtacggtcagcagcaagctcatgcacagggtgaaggtttcttccatcccattgaatgcgaaccaacgctccagatggggtaccagcaagatcaaataacagtagcagcagcagcaggaccaagtatgaccatgaatagttacatgccaggaccaggatggtag

SEQ ID NO: 109046 - protein, 241 aa, Eschscholzia californica
MGRGRVELKRIENKINRQVTFAKRRNGLLKKAYELSVLCDAEVALIIFSNRGKLYEFCSSSSMFKTLERYQKSNYGAPETNVSVRESQEHSSHQEYLKLKARVEALQRSQRNLLGEDLGPLSGKELESLERQLDMSLKQIRSTRTQYMLDQLTDLQRREQMLSDANKTLRRRLEEGTVTCHQWEQNMQYGQQQAHAQGEGFFHPIECEPTLQMGYQQDQITVAAAAGPSMTMNSYMPGPGW

SEQ ID NO: 109047 - DNA, 732 bp, Amborella trichopoda
  CDS (1)..(732)
atgggaagaggtagagttgagctcaagaggatagagaacaagatcaacaggcaggtgacctttgcgaagaggaggaatggtcttttgaagaaggcttatgaactctctgttctctgtgatgctgaggttgccctaatcattttctccaatagagggaagctttacgagttttgtagcacctctagcatggtgaagacattagagaggtaccaaaaatgcaactatggagcattagaaactaatgtaccgaccagggagacacagagcagctatcaagaatatttaaagctgaaagcgagggtggagtctctacaacgatcccagaggaaccttcttggtgaagacttgggccccttaagttcaaaagagcttgaacaacttgagcagcaactggagatgtctttgaagcagataaggtctactaagacacaatgcatgtttgatcaacttgctgaccttaggaggagggaactagctctccaagagaccaacaaagctttgaaacgtaagttggagggagcaagcgcttcaaaccccccacaacttgcatgggaaaacaatggacagaacattcattataatcgccaaccagctcatactgaaggcttcttccatcccctggaatgtgattcgacattgcaaattggataccatccatcgtgccctgatcagatgcctgtggccgcacctgtgcagaatgtcaatgcatttctccctggttggttagtatga

SEQ ID NO: 109048 - protein, 243 aa, Amborella trichopoda
MGRGRVELKRIENKINRQVTFAKRRNGLLKKAYELSVLCDAEVALIIFSNRGKLYEFCSTSSMVKTLERYQKCNYGALETNVPTRETQSSYQEYLKLKARVESLQRSQRNLLGEDLGPLSSKELEQLEQQLEMSLKQIRSTKTQCMFDQLADLRRRELALQETNKALKRKLEGASASNPPQLAWENNGQNIHYNRQPAHTEGFFHPLECDSTLQIGYHPSCPDQMPVAAPVQNVNAFLPGWLV

SEQ ID NO: 109049 - DNA, 735 bp, Aegilops tauschii
  CDS (1)..(735)
atggggcgcgggaaggtgcagctgaagcggatcgagaacaagatcaaccggcaggtgaccttctccaagcgccgctcggggctgctcaagaaggcgcacgagatctccgtgctctgcgacgccgaggtcggcctcatcatcttctccaccaagggaaagctctacgagttctccaccgagtcatgtatggacaaaattcttgaacggtatgagcgctactcttatgcagaaaaggttctcgtttcaagtgaatctgaaattcagggaaactggtgtcatgaatataggaaactgaaggcgaaggttgagacaatacagaaatgtcaaaagcatctgatgggagaggatcttgaatctttgaatctcaaggagttgcagcaactggagcagcagctggaaagctcactgaaacatatcagatccaggaagaaccaacttatgcacgaatccatttctgagcttcagaagaaggagaggtcactgcaggaggagaataaagttctccagaaggaactcgtcgagaagcagaaggcccaggcggcgcaacaagatcagactcagcctcaaacaagctcttcttcttcttccttcatgatgagggatgctccccctgccgcagctaccagcattcatccagcggcggcaggcgagagggcaggggatgcggcagtgcagccgcaggccccaccccggacggggcttccactgtggatggtgagccacatcaacggctga

SEQ ID NO: 109050 - protein, 244 aa, Aegilops tauschii
MGRGKVQLKRIENKINRQVTFSKRRSGLLKKAHEISVLCDAEVGLIIFSTKGKLYEFSTESCMDKILERYERYSYAEKVLVSSESEIQGNWCHEYRKLKAKVETIQKCQKHLMGEDLESLNLKELQQLEQQLESSLKHIRSRKNQLMHESISELQKKERSLQEENKVLQKELVEKQKAQAAQQDQTQPQTSSSSSSFMMRDAPPAAATSIHPAAAGERAGDAAVQPQAPPRTGLPLWMVSHING

SEQ ID NO: 109051 - DNA, 735 bp, Triticum turgidum
  CDS (1)..(735)
atggggcgcgggaaggtgcagctgaagcggatcgagaacaagatcaaccggcaggtgaccttctccaagcgccgctcggggctgctcaagaaggcgcacgagatctccgtgctctgcgacgccgaggtcggcctcatcatcttctccaccaagggaaagctctacgagttctccaccgagtcatgtatggacaaaattcttgaacggtatgagcgctactcttatgcagaaaaggttctcgtttcaagtgaatctgaaattcagggaaactggtgtcacgaatataggaaactgaaggcgaaggttgagacaatacagaaatgtcaaaagcatctgatgggagaggatcttgaatctttgaatctcaaggagttgcagcaactggagcagcagctggaaagctcactgaaacatatcagatccaggaagaaccaacttatgcacgaatccatttctgagcttcagaagaaggagaggtcactgcaggaggagaataaagttctccagaaggaactcgtcgagaagcagaaggcccaggcggcgcaacaagatcagactcagcctcaaacaagctcttcttcttcttccttcatgatgagggatgctccccctgccgcaactaccagcattcatccagcggcatcaggagagagggcagaggatgcggcagtgcagccgcaggccccaccccggacggggcttccactgtggatggttagccacatcaacggctga

SEQ ID NO: 109052 - protein, 244 aa, Triticum turgidum
MGRGKVQLKRIENKINRQVTFSKRRSGLLKKAHEISVLCDAEVGLIIFSTKGKLYEFSTESCMDKILERYERYSYAEKVLVSSESEIQGNWCHEYRKLKAKVETIQKCQKHLMGEDLESLNLKELQQLEQQLESSLKHIRSRKNQLMHESISELQKKERSLQEENKVLQKELVEKQKAQAAQQDQTQPQTSSSSSSFMMRDAPPAATTSIHPAASGERAEDAAVQPQAPPRTGLPLWMVSHING

SEQ ID NO: 109053 - DNA, 732 bp, Glycine max
  CDS (1)..(732)
atgggaaggggaagagtggagttgaagagaattgagaacaagatcaacaggcaagtgacctttgcaaaacgaaggaacgggcttttgaagaaagcttatgagctttccgttctttgtgatgccgaggttgctctcatcatcttctccaatagaggaaagcagtacgagttttgcagcggttcaagcatgctcaaaacgctggagaggtaccagaaatgcaactatggagcgcctgaggacaatgtggcaacaaaggaagccttggtattggagttaagcagtcaacaagaatacttgaggctgaaagcacgttatgaagctctacaacgttctcaaaggaaccttatgggagaagatcttggccctctaagcagcaaagagcttgaatcacttgaaaggcagctagattcgtctttgaagcaaatcagatcaataaggacccaattcatgctggatcagctttctgatctacaacgtaaggaacactttctaggtgagtcaaacagagatctcagacaaaggttggaagagtttcaaataaatccactccaactgaatcccagtgctgaagatatggggtatggacgccatccaggtcagccccaaggccatgctctctttcaaccattggagtgtgagccaaccttacaaattggatatcatcctgatccagtatcagtggtgacagaaggcccaagcatgaataattacatggcaggatggttaccatga

SEQ ID NO: 109054 - protein, 243 aa, Glycine max
MGRGRVELKRIENKINRQVTFAKRRNGLLKKAYELSVLCDAEVALIIFSNRGKQYEFCSGSSMLKTLERYQKCNYGAPEDNVATKEALVLELSSQQEYLRLKARYEALQRSQRNLMGEDLGPLSSKELESLERQLDSSLKQIRSIRTQFMLDQLSDLQRKEHFLGESNRDLRQRLEEFQINPLQLNPSAEDMGYGRHPGQPQGHALFQPLECEPTLQIGYHPDPVSVVTEGPSMNNYMAGWLP

SEQ ID NO: 109055 - DNA, 705 bp, Elaeis guineensis var
  CDS (1)..(705)
atggggagggggaaggtggagctgaaaaggattgagaacaagataaacaggcaggttacctttgcaaagcgacggaacggattgctgaagaaggctaacgagctctctgtcctctgcgacgccgaggtcgccctcatcatcttctccagcagcggccgccgcttcgagttctgcagctgctccagcgtgcttaagacaatcgagaggtaccaaacatacaactatgctgcatcagaagttgttgccccaccaagcgagacacagaacacttatcaggaatatgcgaagctgaaggcaagagttgagtttctgcaacgttcgcatagaaatctcctaggtgaggacttggacccattaagtacaaatgaacttgagcaacttgagaatcaagtagagaagtctttaaagcagatcagttcagcaaaggaacaagtgttgcaagaagtaaatagagaactaaaaagaaagttacaagaagccattccatataatcccctccagtggtcatggataaatggtggtggcaatggtgctggtggtgcatccgatggcccttgtaatcacgagtctgctctatcagaggaattcttccagccattggcatgccaccctctacaagttgggtaccatgccatgcacatagaccagtcaaacaaaggagatatgacacacaattataatagctactttcctgaatggatgtga

SEQ ID NO: 109056 - protein, 234 aa, Elaeis guineensis var
MGRGKVELKRIENKINRQVTFAKRRNGLLKKANELSVLCDAEVALIIFSSSGRRFEFCSCSSVLKTIERYQTYNYAASEVVAPPSETQNTYQEYAKLKARVEFLQRSHRNLLGEDLDPLSTNELEQLENQVEKSLKQISSAKEQVLQEVNRELKRKLQEAIPYNPLQWSWINGGGNGAGGASDGPCNHESALSEEFFQPLACHPLQVGYHAMHIDQSNKGDMTHNYNSYFPEWM

SEQ ID NO: 109057 - DNA, 753 bp, Elaeis guineensis var
  CDS (1)..(753)
atggggaggggaagggtggagctgaagaggatcgagaacaagataaacaggcaggtgacgttcgccaagcggcggaacgggttgctgaagaaggccttcgagctctccgtcctctgcgacgccgaggtcgccctcatcattttctccagccgcggccgcctcttcgaattctgcagcagctccagcatgcttaagacactcgaaaggtaccaaagatgcaattatagtgcatcagaagctgctgctccgtcaagtgagatacagaacacttaccaagagtacgtgaggctgaaggcaagagttgagtttctgcagcactcacagagaaatctccttggtgaggacttggacccactaagtacaaatgaacttgatcaacttgagaatcaactagagaaatctttaaagcagatcagatcagcaaagacccaatcaatgctcgatcagctttgtgatcttaaaagaagggaacaagagatgcaggaaacaaacagatcactaaacaggaagttgcgagaagcagcttcacaaaatcccctccaattgacatgggcaaatggtagtggtgatcatgctgctggttcatcaaatggcccttgtaatcgtgaggctgctctatcaaggggattcttccagccattggcatgtcaccctcctgagcaaattgggtaccatcctgtgaatatagaccagccaaacggaggagctatgtctcacgattccaatggctaccttcctgcatggatgggatga

SEQ ID NO: 109058 - protein, 250 aa, Elaeis guineensis var
MGRGRVELKRIENKINRQVTFAKRRNGLLKKAFELSVLCDAEVALIIFSSRGRLFEFCSSSSMLKTLERYQRCNYSASEAAAPSSEIQNTYQEYVRLKARVEFLQHSQRNLLGEDLDPLSTNELDQLENQLEKSLKQIRSAKTQSMLDQLCDLKRREQEMQETNRSLNRKLREAASQNPLQLTWANGSGDHAAGSSNGPCNREAALSRGFFQPLACHPPEQIGYHPVNIDQPNGGAMSHDSNGYLPAWMG

SEQ ID NO: 109059 - DNA, 729 bp, Elaeis guineensis var
  CDS (1)..(729)
atggggagaggaagggtggagctgaagaggatcgagaacaagatcaatcgccaggtaaccttcgcgaagcggcggaacgggcttctcaagaaagcctacgagctctccgtgctctgcgacgccgaggtcgcccttatcgtcttctccaaccgcgggaagctctatgagttctgcagcagctccagtatgttgaagacactagaaaggtaccaaaaatgcaactatggtgcaccagagactaatattgtgtcaagggaaactcagactagtcagcaagagtacttaaaacttaaagcacgtgttgaagcattacagagatcacagagaaatctccttggtgatgacttagggccactcagcagcaaggagcttgagcagcttgagcggcaactagatgcatcattgaagcaaatcagatccacaaggacccaatacatgctcgatcaacttgcagatcttcaacgaagggaacaaatgctctgtgaggccaataaaagtctaaagcaaaggttggaggaaagcaaccaggctactcagcagcaagtttgggatcccaatgctcctgcagtgggctatggccggcagccacctcaaccacagggagatggattctaccaacagatagagtgcgatccaactctccatatcgggtatcctccagaacaaataacgattgctgcagcgcctgggcctagcgtgagtaattacatgccaggatggcttgcgtga

SEQ ID NO: 109060 - protein, 242 aa, Elaeis guineensis var
MGRGRVELKRIENKINRQVTFAKRRNGLLKKAYELSVLCDAEVALIVFSNRGKLYEFCSSSSMLKTLERYQKCNYGAPETNIVSRETQTSQQEYLKLKARVEALQRSQRNLLGDDLGPLSSKELEQLERQLDASLKQIRSTRTQYMLDQLADLQRREQMLCEANKSLKQRLEESNQATQQQVWDPNAPAVGYGRQPPQPQGDGFYQQIECDPTLHIGYPPEQITIAAAPGPSVSNYMPGWLA

SEQ ID NO: 109061 - DNA, 702 bp, Elaeis guineensis var
  CDS (1)..(702)
atggggagagggagggtgcagctgaagaggatcgagaacgagataaacaggcaggtgacgttctcgaaacgccggtcggggctgctgaagaaggcgcacgagatctcggtgctctgtgacgccgaggtcgccgtcgtcgtcttctctaccaagggcaagctctacgagtactccaccgactccagcatggaaaagattcttgaacgttaccggcaatattcaaatgcggaaaaagctcttgcacaaggagatcctgggccacagggaagctggttacatgaatttggtgaactgaaatctaaggttgaggctctacaaaaatgtcaaaggcatctgatgggagaacaacttgactccttagcgcttaaagaacttcaacaactggagcaacggcttgagagtgctttgagacatataagatcgagaaagaaccaacttctatttgattcaattgctgagcttcggagaaaggagaagtcattgcaagagcagaattgcatactggagaaaaggctcgtggagagtagtgccggggctcagaacgaacatccacactgcgaacgacaaagccaacctcggacaagctcttcgtcaccacttcccttcctagtaactgactctttccccaccctacacgtcagatcgaatcaagctagaggcactagtttgcctgcatggatgcttcgccacgtgagtgggtag

SEQ ID NO: 109062 - protein, 233 aa, Elaeis guineensis var
MGRGRVQLKRIENEINRQVTFSKRRSGLLKKAHEISVLCDAEVAVVVFSTKGKLYEYSTDSSMEKILERYRQYSNAEKALAQGDPGPQGSWLHEFGELKSKVEALQKCQRHLMGEQLDSLALKELQQLEQRLESALRHIRSRKNQLLFDSIAELRRKEKSLQEQNCILEKRLVESSAGAQNEHPHCERQSQPRTSSSSPLPFLVTDSFPTLHVRSNQARGTSLPAWMLRHVSG

SEQ ID NO: 109063 - DNA, 753 bp, Elaeis guineensis var
  CDS (1)..(753)
atggggagagggagggtgcagctgaggcggatcgagaacaagataaaccggcaggtgacgttctcgaagcgccggtcggggctcctgaagaaagcccacgagatctccgtcctctgcgacgccgaggtcgccctcatcatcttctcgaccaagggcaagctctacgagtacgccaccgactcctgcatggaaaggattcttgaacgctatgaacgttacacctatgcagaaaaagcactaatttcatctggacccgaattgcagggtaactggtgccatgaatttggcaaactcaaagctaaggttgaggctttacaaaaaagccaaaggcatctcatgggtgagcaacttgagcccttgaatctcaaagaactccagcaactagagcaacagcttgaaagttctttaaagcatataagaaccagaaagtgccaactcatgtttgaatccatctctgagcttcaaaaaaaggaaaagtcactgcaggagcagaacaagatgctggagaaggagctcatggagaagcagaaggtgaaggcactaaaccagcaggcaccttgggagcagcaaggcccgccgcagacaagctcatcatccccaacctccttcctgatcggagactctctccccaccctgaatattgggacataccaatgtagcggaaatgaacatggggaggaagcagcacaaccccaggttcgtataggaaacagcctgttaccaccttggatgcttagccacttgaacgggtag

SEQ ID NO: 109064 - protein, 250 aa, Elaeis guineensis var
MGRGRVQLRRIENKINRQVTFSKRRSGLLKKAHEISVLCDAEVALIIFSTKGKLYEYATDSCMERILERYERYTYAEKALISSGPELQGNWCHEFGKLKAKVEALQKSQRHLMGEQLEPLNLKELQQLEQQLESSLKHIRTRKCQLMFESISELQKKEKSLQEQNKMLEKELMEKQKVKALNQQAPWEQQGPPQTSSSSPTSFLIGDSLPTLNIGTYQCSGNEHGEEAAQPQVRIGNSLLPPWMLSHLNG

SEQ ID NO: 109065 - DNA, 546 bp, Pisum sativum
  CDS (1)..(546)
atgggaagaggtaagattgagatcaagaggattgaaaactcaagcaacagacaagttacctattcaaagagaaagaacggtattcttaagaaagcaaaggaaataagtgttctctgtgatgctcaagtttctcttattctctttggtgcttctggaaagatgcatgaatacatcagtccctccaccacgttgattgatgttcttgacagataccaaagagcttctggaaaaactctctgggatgctaaacatgagaaccttagcaatgaaattgatagaattcaaaaggagaatgacagcatgcaaattgaactcaggcacttgaagggagaggacattacttcactgaattacaaagagcttatgtcccttgaggatgcccttgaaaatggcctcactggtgttagagacaaaaagatggaagtgcataggatgttcaagagaaatggaaagattttggaggatgaaaataaggaactcaactttcttctgcaacaacatttggcattggaaggtgttggaaacatgcatggacaatggatttaa

SEQ ID NO: 109066 - protein, 181 aa, Pisum sativum
MGRGKIEIKRIENSSNRQVTYSKRKNGILKKAKEISVLCDAQVSLILFGASGKMHEYISPSTTLIDVLDRYQRASGKTLWDAKHENLSNEIDRIQKENDSMQIELRHLKGEDITSLNYKELMSLEDALENGLTGVRDKKMEVHRMFKRNGKILEDENKELNFLLQQHLALEGVGNMHGQWI

SEQ ID NO: 109067 - DNA, 759 bp, Glycine max
  CDS (1)..(759)
atggctcgaggaaagatccagatcaagaggatagagaacaccaccaaccgccaggtcacttattctaaacgacggaatggccttttcaagaaggccaacgagctcaccgttctatgcgatgccaaggtttctattattatgttctccagcactgggaaactccacgagtacatcagcccctccacctcaacaaagcagttcttcgatcagtaccagatgactctaggagtcgatctctggaactctcattacgagaatatgcaagagaacttgaagaaactcaaagatgtgaataggaatcttcgtaaggagattaggcagaggatgggagattgtctgaacgatctgggcatggaagatctcaagctccttgaggaagaaatggacaaggccgccaaggttgttcgtgaacgtaagtataaggtgataacaaatcagattgacacccaaaggaaaaagtttaataacgagaaagaagtgcacaacagactcctgcgtgacttggatgcaagagcagaagatccacgttttgcattgatagataatggaggggagtacgagtctgtgatcggattctcaaatttaggtccacgcatgttcgcattgagcctacagccaagccatcctagtgcccaaagcggagcagcaggctctgatcttaccacttaccctttacttttctggtacgcaagcttaagcagctcgatctcttcatcaatcagaaataccacattcactcaaatttcaataagaatatga

SEQ ID NO: 109068 - protein, 252 aa, Glycine max
MARGKIQIKRIENTTNRQVTYSKRRNGLFKKANELTVLCDAKVSIIMFSSTGKLHEYISPSTSTKQFFDQYQMTLGVDLWNSHYENMQENLKKLKDVNRNLRKEIRQRMGDCLNDLGMEDLKLLEEEMDKAAKVVRERKYKVITNQIDTQRKKFNNEKEVHNRLLRDLDARAEDPRFALIDNGGEYESVIGFSNLGPRMFALSLQPSHPSAQSGAAGSDLTTYPLLFWYASLSSSISSSIRNTTFTQISIRI

SEQ ID NO: 109069 - DNA, 747 bp, Arabidopsis thaliana
  CDS (1)..(747)
atgggaagaggaagagtagagctgaagaggatagagaacaaaatcaacagacaagtaacgtttgcaaagcgtaggaacggtttgttgaagaaagcttatgaattgtctgttctctgtgatgctgaagttgctctcatcatcttctccaaccgtggaaagctctatgagttttgcagctcctcaaacatgctcaagacacttgatcggtaccagaaatgcagctatggatccattgaagtcaacaacaaacctgccaaagaacttgagaacagctacagagaatatctgaagcttaagggtagatatgagaaccttcaacgtcaacagagaaatcttcttggggaggatttaggacctttgaattcaaaggagttagagcagcttgagcgtcaactggacggctctctcaagcaagttcggtccatcaagacacagtacatgcttgaccagctctcggatcttcaaaataaagagcaaatgttgcttgaaaccaatagagctttggcaatgaagctggatgatatgattggtgtgagaagtcatcatatgggaggatgggaaggcggtgaacagaatgttacctacgcgcatcatcaagctcagtctcagggactataccagcctcttgaatgcaatccaactctgcaaatggggtatgataatccagtatgctctgagcaaatcactgcgacaacacaagctcaggcgcagccgggaaacggttacattccaggatggatgctctga

SEQ ID NO: 109070 - protein, 248 aa, Arabidopsis thaliana
MGRGRVELKRIENKINRQVTFAKRRNGLLKKAYELSVLCDAEVALIIFSNRGKLYEFCSSSNMLKTLDRYQKCSYGSIEVNNKPAKELENSYREYLKLKGRYENLQRQQRNLLGEDLGPLNSKELEQLERQLDGSLKQVRSIKTQYMLDQLSDLQNKEQMLLETNRALAMKLDDMIGVRSHHMGGWEGGEQNVTYAHHQAQSQGLYQPLECNPTLQMGYDNPVCSEQITATTQAQAQPGNGYIPGWML

SEQ ID NO: 109071 - DNA, 765 bp, Gossypium hirsutum
  CDS (1)..(765)
atgggtagggggaaaatagagattaagagaatagagaatgctaatagcaggcaagtcacattctccaagagacgtgctggcttgctcaagaaggctaaggaactcgccattctctgtgatgctgaggttgctgtcatcattttctccaataccggcaagctctttgagttttccagctctggcatgaataaaacaatttctagatacaagtctgctcaaggttctccagagattgctcaagtggaacataaagcagagaagcaagactctaaggaggcagaccatctgaaggatgaaatagcgaagctacaaatgaaacagttacagctgctgggtaagaacttgaccagcatgagcctgaaagagcttcagctcctagaacagcaacttaatgaagggttgttatcagtgaaggagaagaaggaacaattgctcatgcaacaattagagcaatcaagattacaggagcagcgagctatgcttgagaatgaaactttacgcagacaggttgaggagctacgaggtttctttccaacaactgatcacccgatccaaccctatcttgaatgctatcctgttgaaaggaagaattctctcatgagccacagcattcccagtccagatttgacctgtaattgcactgttgaaaagggagattcagacactaccttgtatttggggttgccaagtgattatcacaagagaaagaaacctgaaatagaaagccactccaatgagtcagagagccagttggggctgctgtga

SEQ ID NO: 109072 - protein, 254 aa, Gossypium hirsutum
MGRGKIEIKRIENANSRQVTFSKRRAGLLKKAKELAILCDAEVAVIIFSNTGKLFEFSSSGMNKTISRYKSAQGSPEIAQVEHKAEKQDSKEADHLKDEIAKLQMKQLQLLGKNLTSMSLKELQLLEQQLNEGLLSVKEKKEQLLMQQLEQSRLQEQRAMLENETLRRQVEELRGFFPTTDHPIQPYLECYPVERKNSLMSHSIPSPDLTCNCTVEKGDSDTTLYLGLPSDYHKRKKPEIESHSNESESQLGLL

SEQ ID NO: 109073 - DNA, 732 bp, Prunus persica
  CDS (1)..(732)
atggcctatgaaaacaaatccatgtctctggactctccccaaagaaaattgggtaggggaaagatcgagatcaagcggatcgaaaacacaacaaaccgtcaagtcaccttctgcaaaaggcgcaatgggttgctcaagaaggcctatgaactctctgtactctgtgatgcagaggttgctctcatagtcttctctaaccgtggccgactttatgagtatgccaacaacagtgttaaagaaacaattgagaggtacaagaaggcatgcgcagagtctacaaataccggatctgtttccgaagccagtacccagtactaccaacaagaagctgcgaaactgcgcgctcagacagggaatttgcagaactcaagcaggcatatgatgggcgagtcattgagttctatgaatatgaaagacctgaagaatctggagagtaaactagagaaaggaatcaacagaatcagatccaagaagaatgaactcttgtttgccgaaattgagtacatgcagaaaagggaaattgacttgcataacaacaaccagctcctacgagcaaagatagctgagaatgagaggagccagcaaaacataaatgtgatggctggagggggaagttatgagatcatgcagtctcagccatatgactctcggaactattttcaagtgaatgcattacaacccaatcatcagtacaattcacgccaagatccgatggcccttcaattagtttaa

SEQ ID NO: 109074 - protein, 243 aa, Prunus persica
MAYENKSMSLDSPQRKLGRGKIEIKRIENTTNRQVTFCKRRNGLLKKAYELSVLCDAEVALIVFSNRGRLYEYANNSVKETIERYKKACAESTNTGSVSEASTQYYQQEAAKLRAQTGNLQNSSRHMMGESLSSMNMKDLKNLESKLEKGINRIRSKKNELLFAEIEYMQKREIDLHNNNQLLRAKIAENERSQQNINVMAGGGSYEIMQSQPYDSRNYFQVNALQPNHQYNSRQDPMALQLV

SEQ ID NO: 109075 - DNA, 708 bp, Glycine max
  CDS (1)..(708)
atgggtcgagggaaaatcgagatcaaaagaatcgacaatgccagcagcaggcaagtcacgttctcgaagcggaggaccgggttgttcaagaaggctcaggaactttccattctctgtgacgccgaggttgccgtcatagttttctccaacaccggcaagctcttcgagttttccagttccggtatgaagcgaacactttcaagatacaacaaatgccttggttctacagatgctgctgtagcagaaattaagacacagaaggaagattctaagatggtggagattctaagagaggaaattgcaaagctagaaacaaagcaattacagctggtgggtaaggatctgacaggattgggtttaaaggaattgcagaacttagagcagcaacttaatgaggggttattgtctgtcaaggcgagaaagctagagcaatctagagttcaggaacaacgggttatgttggagaatgaaactttgcgaagacagattgaggagcttcggtgtctgtttccacaatcagaaagcatggtcccattccaataccaacatactgaaggaaagaatacttttgtagatactggtgccagatatctcaacttggccaataactgtggaaatgagaaagggagttcagacacatcatttcatttggggttgcctgctggtgttcaagaggaaggcccccaagaaagaaaccttttcaaatga

SEQ ID NO: 109076 - protein, 235 aa, Glycine max
MGRGKIEIKRIDNASSRQVTFSKRRTGLFKKAQELSILCDAEVAVIVFSNTGKLFEFSSSGMKRTLSRYNKCLGSTDAAVAEIKTQKEDSKMVEILREEIAKLETKQLQLVGKDLTGLGLKELQNLEQQLNEGLLSVKARKLEQSRVQEQRVMLENETLRRQIEELRCLFPQSESMVPFQYQHTEGKNTFVDTGARYLNLANNCGNEKGSSDTSFHLGLPAGVQEEGPQERNLFK

SEQ ID NO: 109077 - DNA, 735 bp, Gentiana triflora
  CDS (1)..(735)
atgggtagagggaaagtagagttgaagagaattgagaacaaaataaaccggcaggtcacttttgctaagagaagaaatgggctgctaaaaaaagcttatgaactatctgttctctgtgatgctgaggtcgctcttatcatcttttctaaccgtggaaagctctatgaattctgcagtggatctagcactactgaaacggttgaaagataccaaaggtacacttatggattacaggatgccggccatccaagtgacgaccctcagaatagctaccaagaatatgtgaagcttaaagcgagagtcgaggtccttcaaggttatcacaggaactttcttggagaagatttgggaagtttgagttgcaaggagcttgaacacctagagcatcaagtggagacttctttgaaacaagtcagatcaaccaagacaagctttatgctggatcaagttgcagatcttcaaagaaaggaagaaatgctggctgaagagaacaaagccttaagaggaaagttggatgaaagggcaaatcaagttccactcagattatcatgggaaggcagacaacaagcacctactggctataacaatgtccctgcacacactcaaggattctttcagcccttgggactaaactctactttgcaaatgggatacaatcaaggaggtgcggaaggaaattacaatgttcatgcaggcaacaacatcaatggatttatgcccggcttcatgaactaa

SEQ ID NO: 109078 - protein, 244 aa, Gentiana triflora
MGRGKVELKRIENKINRQVTFAKRRNGLLKKAYELSVLCDAEVALIIFSNRGKLYEFCSGSSTTETVERYQRYTYGLQDAGHPSDDPQNSYQEYVKLKARVEVLQGYHRNFLGEDLGSLSCKELEHLEHQVETSLKQVRSTKTSFMLDQVADLQRKEEMLAEENKALRGKLDERANQVPLRLSWEGRQQAPTGYNNVPAHTQGFFQPLGLNSTLQMGYNQGGAEGNYNVHAGNNINGFMPGFMN

SEQ ID NO: 109079 - DNA, 750 bp, Gentiana triflora
  CDS (1)..(750)
atggattatcctcctagacaagaattcgactcgtcttcgtcgaggaaatcaggcagaggaaagattgagatcaagaggatagaaaacgctacgaatcaacaagtcactttctgcaagcgcagaagtggcatactcaagaaagcttatgaattatctgttctttgtgatgctgaagttgctcttattgtcttctcaacccgtggtcgcctttatgaatatgctagcagcagtgttagaggaactattgaaaggtataagaaagcttgtgctgataccaccaattctggatctatttccgaagccaacactcagttttatcagcaacaatccaacaagctgcggaaagatatcaaagagattcaaaaggcaaacaggaacatgcttggggaaggagtagaatcaatacagccaaaagacttgaagaaaattgaaggaaaccttgagagagccattggcaaaatccgcaccagaaaaaatgaactattgtttgctgagatagagctcatgcagaagagagagatggaactgcagaatgccaacttgtaccttcgagctaagatagctgaaaatgagagagccaccacagatcctcatatgaacttaatgccagcatctgcatctgaatatcatcatcatcaatccatggcttcacattcatttgatgatgttagaagcttcatccctgtcaacctactcgaacctaatcagcattattctcgccaggatcccaccgcccttcaactcgtctaa

SEQ ID NO: 109080 - protein, 249 aa, Gentiana triflora
MDYPPRQEFDSSSSRKSGRGKIEIKRIENATNQQVTFCKRRSGILKKAYELSVLCDAEVALIVFSTRGRLYEYASSSVRGTIERYKKACADTTNSGSISEANTQFYQQQSNKLRKDIKEIQKANRNMLGEGVESIQPKDLKKIEGNLERAIGKIRTRKNELLFAEIELMQKREMELQNANLYLRAKIAENERATTDPHMNLMPASASEYHHHQSMASHSFDDVRSFIPVNLLEPNQHYSRQDPTALQLV

SEQ ID NO: 109081 - DNA, 759 bp, Gentiana triflora
  CDS (1)..(759)
atggatagtcaaaatcaagaaattgaatcatctaattctaggaaaagtggtagaggaaagattgagatcaagagaattgagaacaaaaccaacagacaagttactttctgcaaacgcagaagtggtttactcaagaaagcttatgaattatctgtgctttgtgatgctgaggttgctcttattgttttctctagcagtggtcgcctttatgaatatgccaacaacagtgccaagggaactattgagaggtacaagaaagcttgtggtgattccacaagtgcaggatcagtttctgaagcaaacatccagttctatcagcaagaagcaaaccagttaaggaaaaacataagagatatacagagttcaaacagacacattcttggagaaggattagatgaattaagctttaagcaaatcaagaatttggaaggaagggttgagaaaggaattgctcgtgttcgtagcagaaagaatgagttgttggctgctgagattgagctcatgaaaaagagggagattgaactacaaaatgccaacctatacctgagagctaagcagataacagaaaatgatcagcagagagtacaggcagaacaacagcaaatgaacttcatgccagcatctgattaccaaactaataataataatattgcctcagagcctaattatcaagaagttcacaacttcatcccagttaactttctggaccataatcaacattattcctctcaagatcccactgcccttcaatttgtttaa

SEQ ID NO: 109082 - protein, 252 aa, Gentiana triflora
MDSQNQEIESSNSRKSGRGKIEIKRIENKTNRQVTFCKRRSGLLKKAYELSVLCDAEVALIVFSSSGRLYEYANNSAKGTIERYKKACGDSTSAGSVSEANIQFYQQEANQLRKNIRDIQSSNRHILGEGLDELSFKQIKNLEGRVEKGIARVRSRKNELLAAEIELMKKREIELQNANLYLRAKQITENDQQRVQAEQQQMNFMPASDYQTNNNNIASEPNYQEVHNFIPVNFLDHNQHYSSQDPTALQFV

SEQ ID NO: 109083 - DNA, 804 bp, Alpinia hainanensis
  CDS (1)..(804)
atggagcataaagcagatcaagatcgattattagggttcaagggcggtaagctggagccaccggtggcagcggtggggaggatgggccgggggaagatcgagatcaagcggatcgagaacacgaccagccggcaagtgaccttctgcaagcgccgcaacggcctacttaagaaggcctacgagttgtcgctcctgtgcgatgctgaggtcgcacttgtcgtcttctcctgccgcggccgcctctacgagtatgccagcagcagtgtgaaatcaactattgagaagtacaagaaagcatgcaaagataccaccaacgatgggtttgtttcggaagcgaatgctcagtactaccagcaagaagcatcgaaactacgacaacaaatcaacagcatacaaatttcaaacaggaacctgatgggcgaatccctccactccatgaacctaagggatcttaaacagcttgagagtagattggagaaaggtatcggcaaaataagaaacaaaaagaatgaactgttgtttgctgaaatcgagtacatgcagagaagggagatggagcttcagagtgataatatatttctaaggaacaagatcgccgagactgatagggtgcaccaacagatgagcatgttgccatccaccggtgcaacggtggcatacgaggccatgcctacatattactcagggaactttatgcaatgcaagaatcgcagccaaaccaacatttatcctcaacaacgacaaaggacatttacttcaactccgatgagatctaaacatggagcttgggtactccgaggatga

SEQ ID NO: 109084 - protein, 267 aa, Alpinia hainanensis
MEHKADQDRLLGFKGGKLEPPVAAVGRMGRGKIEIKRIENTTSRQVTFCKRRNGLLKKAYELSLLCDAEVALVVFSCRGRLYEYASSSVKSTIEKYKKACKDTTNDGFVSEANAQYYQQEASKLRQQINSIQISNRNLMGESLHSMNLRDLKQLESRLEKGIGKIRNKKNELLFAEIEYMQRREMELQSDNIFLRNKIAETDRVHQQMSMLPSTGATVAYEAMPTYYSGNFMQCKNRSQTNIYPQQRQRTFTSTPMRSKHGAWVLRG

SEQ ID NO: 109085 - DNA, 726 bp, Vitis vinifera
  CDS (1)..(726)
atgggaagaggtagagttcagctgaagcgcatagagaacaagatcaatcgccaagtcaccttctccaagaggaggactgggttgctgaagaaagctcatgagatctcggtcttgtgtgatgcagaggttgctttgattgtcttctccactaaaggaaagctgtttgagtactcaactgattcttgcatggagaagatccttgatcgctatgaaagatattcttatgcagagaggcagctgactgcaactgatcctgaatcacagggaaactggtcccttgagtactccaaacttaaggcaaagattgagcttttacaaagaagccaaaggcactttttgggggaagatctggattcactgagtctgaaagagctccaaaatttggaacagcagcttgataccgctcttaaacacattcgatcaagaaaaaaccagctaatgtatgagtcaatttctgaacttcagaggaaggaaaaggcaatgcaggagcaaaataacatgctagctaaggagatcaaggagaaggagaagactgtggcacagcagacacattgggagcagcaaaaccatggtcttaatacatcatccttcctactgccacagcagcttccctgtctaaacatgggtgggacttaccagggagaagcacatggagcaaggaggaatgagctggaccttacgcttgaaccaatatatccctcccaccttggatgcttcacgacgtga

SEQ ID NO: 109086 - protein, 241 aa, Vitis vinifera
MGRGRVQLKRIENKINRQVTFSKRRTGLLKKAHEISVLCDAEVALIVFSTKGKLFEYSTDSCMEKILDRYERYSYAERQLTATDPESQGNWSLEYSKLKAKIELLQRSQRHFLGEDLDSLSLKELQNLEQQLDTALKHIRSRKNQLMYESISELQRKEKAMQEQNNMLAKEIKEKEKTVAQQTHWEQQNHGLNTSSFLLPQQLPCLNMGGTYQGEAHGARRNELDLTLEPIYPSHLGCFTT

SEQ ID NO: 109087 - DNA, 732 bp, Citrus sinensis
  CDS (1)..(732)
atgggaagaggtagggttcagctgaagagaatagagaacaagatcaatcgccaagttaccttttccaaacggagagctggcttcttgaagaaagctcatgagatctctgtgttatgtgatgctgaagttgctgttattatcttctctcacaaagggaagctctttgaatactccactggctcttgcatggaaaagatactggaacgctatgagaggtacgcctatgctgagagacagctgattgcccctgatcctgaatcacagcgtaactggcccctggagtgcaacaaccttaaggctaagatagatcttctgcagaaagaccaaaggcactatttgggagaagatttagagtctctgtccctcaaagacatccaacagttggagcaacagctggacaccgctctcaaacacatcagatcaagaaaaaatcaacttatgcaagagtccatctctgagcttcagaaaaaagaaaagtctatagaggagcaaaacaacttgctggtaaagcagattaaggagagagagaaggctgcagcgcaacaagctcagtgggggaatcaaattcaaaaccaggttcccaacacattatcctttctacttccacagccacctccttgcttaagacttggcggtgcctaccaggaacaggcatcggagatgaggaggaacgagcttaacctcacccttgaacccgtatgttcgtgtagccttggatgctttgctggatga

SEQ ID NO: 109088 - protein, 243 aa, Citrus sinensis
MGRGRVQLKRIENKINRQVTFSKRRAGFLKKAHEISVLCDAEVAVIIFSHKGKLFEYSTGSCMEKILERYERYAYAERQLIAPDPESQRNWPLECNNLKAKIDLLQKDQRHYLGEDLESLSLKDIQQLEQQLDTALKHIRSRKNQLMQESISELQKKEKSIEEQNNLLVKQIKEREKAAAQQAQWGNQIQNQVPNTLSFLLPQPPPCLRLGGAYQEQASEMRRNELNLTLEPVCSCSLGCFAG

SEQ ID NO: 109089 - DNA, 738 bp, Akebia trifoliata
  CDS (1)..(738)
atgtgtattttaattacagattttccaaatcgatcatccaacaattctccccaaagaaaaatgggtagaggaaagattgaaattaagcggatcgaaaacacaactaatcgtcaggtcaccttttgtaagcgtcgcaatggattactcaagaaggcttatgaattatctgtactttgcgatgccgaagtagctctcgtcgtcttctccaatcgcggtcgcctttatgagtactccaacaatagtgtcaaaacaacaattgagaggtacaagaaggcttgtgtagattcctccaattctgggtctgtttcagaagccaatgcccagttctaccagcaagaatccttaaaattgcgccaacagatagggaatttgcaaaacttaaacagacacttgatgggtgaggctctcggcagtatgtctattaaggagctaaagcaactagaaactagaatagagaagggaatcagtagaatcagatcgaaaaagaatgaattgttgtttgcggagatcgagtatatgcagaagagggaaattgacttgcagaacgataacatgtacctccgtgctaagatagcggagaacgagagagcgggacaacatatgaacctgatgccagggaatgaatacgaggtcatgtcttctgcaccatttgactctcgaaacttcctccaagtaaatctattggaacccaataaccattactcgcatacggatcaaacagccctccaacttggttga

SEQ ID NO: 109090 - protein, 245 aa, Akebia trifoliata
MCILITDFPNRSSNNSPQRKMGRGKIEIKRIENTTNRQVTFCKRRNGLLKKAYELSVLCDAEVALVVFSNRGRLYEYSNNSVKTTIERYKKACVDSSNSGSVSEANAQFYQQESLKLRQQIGNLQNLNRHLMGEALGSMSIKELKQLETRIEKGISRIRSKKNELLFAEIEYMQKREIDLQNDNMYLRAKIAENERAGQHMNLMPGNEYEVMSSAPFDSRNFLQVNLLEPNNHYSHTDQTALQLG

SEQ ID NO: 109091 - DNA, 690 bp, Akebia trifoliata
  CDS (1)..(690)
atgcagaaaagggaaggagatatggggagaggaaagattgagataaagagaattgagaacactacgaaccgtcaggtgaccttctgcaaaaggaggaatggactcctgaagaaagcttatgaattatctgttctctgtgatgctgaagttgctctcatcgtcttctcaagtcgtggacgcctctacgaattctccaacagcagcataaaatcgacaatagaaaggtacaagaaggcgtcggctgatagttcaaacacaacctccattatagaggcaaatgctcattactatcaacatgaagcaacaaagctgcggcaacaaatacaaaacctacaaattgcaaatagacagcttatgggtgattcattgagttctctaacagtgaaagagttgaaacaacttgaaaacagacttgagagaggcctcacaagaatcagatcaaagaagcaagagataatgttcgcagaaattgaatacatgcagaaaagggaagtagagctgcaaaaagagaatatgtacctccgtgcaaagattgcagaaaacgagaatgcacagcaaacaagcatggtaccagctcaagaattcgacgcaatccagacctttgattctcgcaattatttccaaatgaacatgttggagggaggggccgcctactcacacgctgatcagaccgctctccatcttggataa

SEQ ID NO: 109092 - protein, 229 aa, Akebia trifoliata
MQKREGDMGRGKIEIKRIENTTNRQVTFCKRRNGLLKKAYELSVLCDAEVALIVFSSRGRLYEFSNSSIKSTIERYKKASADSSNTTSIIEANAHYYQHEATKLRQQIQNLQIANRQLMGDSLSSLTVKELKQLENRLERGLTRIRSKKQEIMFAEIEYMQKREVELQKENMYLRAKIAENENAQQTSMVPAQEFDAIQTFDSRNYFQMNMLEGGAAYSHADQTALHLG

SEQ ID NO: 109093 - DNA, 729 bp, Akebia trifoliata
  CDS (1)..(729)
atggggagaggaagagttgggttgaggaggatcgagaacaagattaacaggcaagtcaccttcgccaaacgtagaaatggacttttgaagaaagcttacgagctttccgttctttgtgatgccgaggttgctctcataatcttctccaatagaggaaaactgtacgagttctgcagtagctccagcatgttcaagactcttgaacgatatcagaaatgcaactttggagcaccagagccgaatgtatccacaagggaggccctggagcatagtagccaccaggagtacttgaaacttaaagcacgagtcgagggcctacaacgatcccaacggaaccttctgggtgaagatttgggacccctaagcggaaaggagcttgaaaccctcgagaggcaacttgatatgtcactcaagcagattcgatcgactcggactcagtacatgcttgatcagctctctgattatcaaagaagggaacaaatgcttagcgaagctaacaaggccttgagaagaaggttagaggaaggaagccaaccaaatccacaccaatgggacccaaatgtgcaggttgtgaactttggtcgacagcaggctccagcacagggtgaagggttcttccagcacatagagtgtgaacccaccctacacatcgggtaccagccggatcaaataactgtggctgcagctgggccaagtatgaataattacatgcaaggatggataggttga

SEQ ID NO: 109094 - protein, 242 aa, Akebia trifoliata
MGRGRVGLRRIENKINRQVTFAKRRNGLLKKAYELSVLCDAEVALIIFSNRGKLYEFCSSSSMFKTLERYQKCNFGAPEPNVSTREALEHSSHQEYLKLKARVEGLQRSQRNLLGEDLGPLSGKELETLERQLDMSLKQIRSTRTQYMLDQLSDYQRREQMLSEANKALRRRLEEGSQPNPHQWDPNVQVVNFGRQQAPAQGEGFFQHIECEPTLHIGYQPDQITVAAAGPSMNNYMQGWIG

SEQ ID NO: 109095 - DNA, 741 bp, Dendrocalamus latiflorus
  CDS (1)..(741)
atggggagggggaaggtggagctgaagcggatcgagaacaagataagccggcaggtgacgttcgccaagaggaggaacgggctgctcaagaaggcgtacgagctctcgctgctgtgcgacgccgaggtcgcgctcatcatcttctccggtcgcggccggctcttcgagttctcaagctcgtcatgcatgtacaaaacactcgagagataccgcacctgcaacaacaactcactggaagcaaatgctccggtggaaaatgaaattaattaccaggaatatttgaagctgaagaccagagttgagtttcttcaaaccacacaaagaaatcttcttggggaggatctgggcccacttagcatgaaggagcttgagcagcttggtaaccaaatagagacatccctcaaacaaatccggtcaagaaagaatcaagtattacttgatcagctatttgatctgaaaagtaaggagcgagaattgcagggtcttaacaaagatttgaggaagaagtgccagctgcaagaaaccagtggagagaatgcactacatatttcctggcaagatgtagggcatagtagctccagtgggcatgctattgaaccttatcaggaattcgttcaacacccagaaaatgaatattccatgcaaattgggtatcaacagacctacatggaccagctgaacaacgaaggcatggctgttcaagaccctaatggacacactggatatgcaggttggatgtga

SEQ ID NO: 109096 - protein, 246 aa, Dendrocalamus latiflorus
MGRGKVELKRIENKISRQVTFAKRRNGLLKKAYELSLLCDAEVALIIFSGRGRLFEFSSSSCMYKTLERYRTCNNNSLEANAPVENEINYQEYLKLKTRVEFLQTTQRNLLGEDLGPLSMKELEQLGNQIETSLKQIRSRKNQVLLDQLFDLKSKERELQGLNKDLRKKCQLQETSGENALHISWQDVGHSSSSGHAIEPYQEFVQHPENEYSMQIGYQQTYMDQLNNEGMAVQDPNGHTGYAGWM

SEQ ID NO: 109097 - DNA, 735 bp, Dendrocalamus latiflorus
  CDS (1)..(735)
atgggtaggggtaaggttgagctgaagcggatcgagaacaagataagccggcaggtgacgttcgccaagaggaggaacgggctgctcaagaaggcgtacgagctctcgctgctgtgcgacgccgaggtcgcgctcatcatcttctccggccgcggccggctcttcgagttctcaagctcgtcatgcatgtacaaaacactcgagagataccgcacctgcaacaacaactcactggaagcaaatgctccggtggaaaatgaaattaattaccaggaatatttgaagctgaagaccagagttgagtttcttcaaaccacacaaagaaatcttcttggggaggatctgggcccacttagcatgaaggagcttgagcagcttggtaaccaaatagagacatccctcaaacaaatccggtcaagaaagaatcaagtattacttgatcagctatttgatctgaaaagtaaggagcaagaattgcaggatcttaacaaagatttgaggaagaagctgcaagaaaccagtggagagaatgcactacatatttcctggcaagatgtagggcatagtagctccagtgggcatgctattgaaccttatcaggaattcgttcaacacccagaaaatgaatattccatgcaaattgggtatcaacagacctacatggaccagctgaacaacgaaggcatggctgttcaagaccctaatggacacactggatgtgcaggttggatgtga

SEQ ID NO: 109098 - protein, 244 aa, Dendrocalamus latiflorus
MGRGKVELKRIENKISRQVTFAKRRNGLLKKAYELSLLCDAEVALIIFSGRGRLFEFSSSSCMYKTLERYRTCNNNSLEANAPVENEINYQEYLKLKTRVEFLQTTQRNLLGEDLGPLSMKELEQLGNQIETSLKQIRSRKNQVLLDQLFDLKSKEQELQDLNKDLRKKLQETSGENALHISWQDVGHSSSSGHAIEPYQEFVQHPENEYSMQIGYQQTYMDQLNNEGMAVQDPNGHTGCAGWM

SEQ ID NO: 109099 - DNA, 735 bp, Dendrocalamus latiflorus
  CDS (1)..(735)
atggggaggggtaaggtggagctgaagcggatcgagaacaagataagccggcaggtgacgttcgccaagaggaggaacgggctgctcaagaaggcgtacgagctctcgctgctgtgcgacgccgaggtcgcgctcatcatcttctccggccgcggccggctcttcgagttctcaagctcgtcatgcatgtacaaaacactcgagagataccgcacctgcaacaacaactcactggaagcaaatgctccggtggaaaatgaaattaattaccaggaatatttgaagctgaagaccagagttgagtttcttcaaaccacacaaagaaatcttcttggggaggatctgggcccacttagcatgaaggagcttgagcagcttggtaaccaaatagagacatccctcaaacaaatccggtcaagaaagaatcaagtattacttgatcagctatttgatctgaaaagtaaggagcaagaattgcaggatcttaacaaagatttgaggaagaagctgcaagaaaccagtggagagaatgcactacatatttcctggcaagatgtagggcatagtagctccagtgggcatgctattgaaccttatcaggaattcgttcaacacccagaaaatgaatattccatgcaaattgggtatcaacagacctacatggaccagctgaacaacgaaggcatggctgttcaagaccctaatggacacactggatatgcaggttggatgtga

SEQ ID NO: 109100 - protein, 244 aa, Dendrocalamus latiflorus
MGRGKVELKRIENKISRQVTFAKRRNGLLKKAYELSLLCDAEVALIIFSGRGRLFEFSSSSCMYKTLERYRTCNNNSLEANAPVENEINYQEYLKLKTRVEFLQTTQRNLLGEDLGPLSMKELEQLGNQIETSLKQIRSRKNQVLLDQLFDLKSKEQELQDLNKDLRKKLQETSGENALHISWQDVGHSSSSGHAIEPYQEFVQHPENEYSMQIGYQQTYMDQLNNEGMAVQDPNGHTGYAGWM

SEQ ID NO: 109101 - DNA, 741 bp, Dendrocalamus latiflorus
  CDS (1)..(741)
atgggcagggggaaggtggagctgaagcggatcgagaacaagatcaaccggcaggtgaccttcgccaagcgccgcaacggcctgctcaagaaggcgtacgagctctccgtcctctgcgacgccgaggtcgcgctcatcatcttctccaaccgcggcaagctctacgagttctgcagcggccagagcatgaccaaaacactggagaggtaccaaaagtgcagttacagtggaccagatactgcaatacaaaacaaggagaatgagttagtgcagagcagtcgcaatgagtatctcaaactgaaagcacgcgtggataatttacagagaactcaaaggaatttgcttggtgaagatcttgggtcactcggcatcaaagagcttgatcagcttgaaaaggcacttgattcatccttaaggcacataagatccacaaggacacagcatatggttgatcagctcaccgatctccagaggagggaacaaatgctgtgtgaagcaaataagtgccttagaagaaaactcgaggagagccaggtgcatggacaagtgtgggagcacggcgccaacctacttgctggctacgatcagcggcagtccccgcagcaggcgccaccgcacgccggcaacggattctttcatcccctggacgctgccgccgagcctacgctgcagattgggtttactcctgagcagattaataactcatgcgtgaccggcttcatgccgacatggctaccttga

SEQ ID NO: 109102 - protein, 246 aa, Dendrocalamus latiflorus
MGRGKVELKRIENKINRQVTFAKRRNGLLKKAYELSVLCDAEVALIIFSNRGKLYEFCSGQSMTKTLERYQKCSYSGPDTAIQNKENELVQSSRNEYLKLKARVDNLQRTQRNLLGEDLGSLGIKELDQLEKALDSSLRHIRSTRTQHMVDQLTDLQRREQMLCEANKCLRRKLEESQVHGQVWEHGANLLAGYDQRQSPQQAPPHAGNGFFHPLDAAAEPTLQIGFTPEQINNSCVTGFMPTWLP

SEQ ID NO: 109103 - DNA, 741 bp, Dendrocalamus latiflorus
  CDS (1)..(741)
atggggaggggtaaggtggagctgaagcggatcgagaacaagatcaaccggcaggtgaccttcgccaagcgccgcaacggcctgctcaagaaggcgtacgagctctccgtcctctgcgacgccgaggtcgcgctcatcatcttctccaaccgcggcaagctctacgagttctgcagcggccagagcatgaccaaaacactggagaggtaccaaaagtgcagttacagtggaccagatactgcaatacaaaacaaggagaatgagttagtgcagagcagtcgcaatgagtatctcaaactgaaagcacgtgtggataatttacagagaactcaaaggaatctgcttggtgaagatcttgggtcactcggcatcaaagagcttgatcagcttgaaaagcaacttgattcatccttaaggcacataagatccacaaggacacagcatatggttgatcagctcaccgatctccagaggagggaacaaatgctgtgtgaagcaaataagtgccttagaagaaaactcgaggagagccaggtgcatggacaagtgtgggagcacggtgccaacctacttgctggctacgatcagcggcagtccccgcagcaggcgccaccgcacgccggcaacggattctttcatcccctggacgctgccgccgagcctacgctgcagattgggtttactcctgagcagattaataactcatgcgtgaccggcttcatgccgacatggctaccttga

SEQ ID NO: 109104 - protein, 246 aa, Dendrocalamus latiflorus
MGRGKVELKRIENKINRQVTFAKRRNGLLKKAYELSVLCDAEVALIIFSNRGKLYEFCSGQSMTKTLERYQKCSYSGPDTAIQNKENELVQSSRNEYLKLKARVDNLQRTQRNLLGEDLGSLGIKELDQLEKQLDSSLRHIRSTRTQHMVDQLTDLQRREQMLCEANKCLRRKLEESQVHGQVWEHGANLLAGYDQRQSPQQAPPHAGNGFFHPLDAAAEPTLQIGFTPEQINNSCVTGFMPTWLP

SEQ ID NO: 109105 - DNA, 741 bp, Dendrocalamus latiflorus
  CDS (1)..(741)
atgggcagggggaaggtggagctgaagcggatcgagaacaagatcaaccggcaggtgaccttcgccaagcgccgcaacggcctgctcaagaaggcgtacgagctctccgtcctctgcgacgccgaggtcacgctcatcatcttctccaaccgcggcaagctctacgagttctgcagcggccagagcatgaccaaaacactggagaggtaccaaaagtgcagttacagtggaccagatactgcaatacaaaacaaggagaatgagttagtgcagagcagtcgcaatgagtatctcaaactgaaagcacgtgtggataatttacagagaactcaaaggaatctgcttggtgaagatcttgggtcactcggcatcaaagagcttgatcagcttgaaaagcaacttgattcatccttaaggcacataagatccacaaggacacagcatatggttgatcagctcaccgatctccagaggagggaacaaatgctgtgtgaagcaaataagtgccttagaagaaaactcgaggagagccaggtgcatggacaagtgtgggagcacggtgccaacctacttgctggctacgatcagcggcagtccccgcagcaggcgccaccgcacgccggcaacggattctttcatcccctggacgctgccgccgagcctacgctgcagattgggtttactcctgagcagattaataactcatgcgtgaccggcttcatgccgacatggctaccttga

SEQ ID NO: 109106 - protein, 246 aa, Dendrocalamus latiflorus
MGRGKVELKRIENKINRQVTFAKRRNGLLKKAYELSVLCDAEVTLIIFSNRGKLYEFCSGQSMTKTLERYQKCSYSGPDTAIQNKENELVQSSRNEYLKLKARVDNLQRTQRNLLGEDLGSLGIKELDQLEKQLDSSLRHIRSTRTQHMVDQLTDLQRREQMLCEANKCLRRKLEESQVHGQVWEHGANLLAGYDQRQSPQQAPPHAGNGFFHPLDAAAEPTLQIGFTPEQINNSCVTGFMPTWLP

SEQ ID NO: 109107 - DNA, 741 bp, Dendrocalamus latiflorus
  CDS (1)..(741)
atgggaagggggaaggtggagctgaagcggatcgagaacaagatcaaccggcaggtgaccttcgccaagcgccgcaacggcctgctcaagaaggcgtacgagctctccgtcctctgcgacgccgaggtcgcgctcatcatcttctccaaccgcggcaagctctacgagttctgcagcggccagagcatgaccaaaacactggagaggtaccaaaagtgcagttacagtggaccagatactgcaatacaaaacaaggagaatgagttagtgcagagcagtcgcaatgagtatctcaaactgaaagcacgtgtggataatttacagagaactcaaaggaatctgcttggtgaagatcttgggtcacgcggcatcaaagagcttgatcagcttgaaaagcaacttgattcatccttaaggcacataagatccacaaggacacagcatatggttgatcagctcaccgatctccagaggagggaacaaatgctgtgtgaagcaaataagtgccttagaagaaaactcgaggagagccaggtgcatggacaagtgtgggagcacggtgccaacctacttgctggctacgatcagcggcagtccccgcagcaggcgccaccgcacgccggcaacggattctttcatcccctggacgctgccgccgagcctacgctgcagattgggtttactcctgagcagattaataactcatgcgtgaccggcttcatgccgacatggctaccttga

SEQ ID NO: 109108 - protein, 246 aa, Dendrocalamus latiflorus
MGRGKVELKRIENKINRQVTFAKRRNGLLKKAYELSVLCDAEVALIIFSNRGKLYEFCSGQSMTKTLERYQKCSYSGPDTAIQNKENELVQSSRNEYLKLKARVDNLQRTQRNLLGEDLGSRGIKELDQLEKQLDSSLRHIRSTRTQHMVDQLTDLQRREQMLCEANKCLRRKLEESQVHGQVWEHGANLLAGYDQRQSPQQAPPHAGNGFFHPLDAAAEPTLQIGFTPEQINNSCVTGFMPTWLP

SEQ ID NO: 109109 - DNA, 750 bp, Dendrocalamus latiflorus
  CDS (1)..(750)
atggggagggggaaggtcgagctgaagcgcatcgagaacaagatcaaccggcaggtcaccttctccaagcgccgcaacggcctcctcaagaaggcctacgagctgtcggtgctctgcgacgccgaggtcgcgctcatcatcttctccagccgcggcaagctctacgagttcggcagcgccggcataagtaagacattagaaagatatcaacactgctgctacaatgctcaggacaacaatgcactgtctgaaactcagatctggtaccaggaaatgtcgaagctaagggcaaaattcgaagctttgcagcgcactcagaggcatttactcggggaggatcttggaccgctcagcgtaaaagaactgcagcagctggagaaacagctagaatgtgctctgtcacaggcaagacagcgaaagacacaacttatgatggagcaagtggaggaacttcgcaagaaggagcgtcagttgggagaaattaacaggcaactcaagcacaagctcgaggctgaaggtagcagcaactatagagccatgcatcgggcctcctgggctcctggcaccgtcgtggatgaaggcgccgcatatcatgagcagcagcctcctcactccgctgctctggactgtgaaccacccactctgcaaattgggtatccgcaccaatttatgcctcctgaggcggccaacattccaagaagcgccccagccggaggggagaacaacttcatgctggggtgggttctttga

SEQ ID NO: 109110 - protein, 249 aa, Dendrocalamus latiflorus
MGRGKVELKRIENKINRQVTFSKRRNGLLKKAYELSVLCDAEVALIIFSSRGKLYEFGSAGISKTLERYQHCCYNAQDNNALSETQIWYQEMSKLRAKFEALQRTQRHLLGEDLGPLSVKELQQLEKQLECALSQARQRKTQLMMEQVEELRKKERQLGEINRQLKHKLEAEGSSNYRAMHRASWAPGTVVDEGAAYHEQQPPHSAALDCEPPTLQIGYPHQFMPPEAANIPRSAPAGGENNFMLGWVL

SEQ ID NO: 109111 - DNA, 687 bp, Dendrocalamus latiflorus
  CDS (1)..(687)
atggggagggggaaggttgagctgaaacggatcgagaacaagatcagccggcaggtgacgttcgcgaagcggcgtaacggcctgctgaagaaggcgtacgagctgtcggtgctctgcgacgccgaggtcgccctcatcatcttctccagccgcggccgcctcttcgagttctccacatcctcatgcgtgtacaagacactagagcgataccgcagcagcaactacaactcatccgaagcatctgctccaatggagactgacttgagtaattaccaggagtacttgaagttaaagacaagagttgagttcctacaaaccactcagagaaatattcttggtgaagacttgggtccacttagcatgaaagagcttgagcaacttgagagccaaattgagatatccctcaagcatatcaggtcgacaaagaaccagcagttacttgatcagctctttgagctcaagcgtaaggaacagcaactgcaagatgttaacaaagacttaagaaggaagatacaagaaactagtgaagaaaatgtgctgcatatgccttgccatggtgttgggcctagtgggtcttgcggccttgctaatgaagctaaccaagaacttcttcaccctgcagtttgtgatccttcaatgcatatagggtatcatcaagcttacttggaccacttgagcaatgaatga

SEQ ID NO: 109112 - protein, 228 aa, Dendrocalamus latiflorus
MGRGKVELKRIENKISRQVTFAKRRNGLLKKAYELSVLCDAEVALIIFSSRGRLFEFSTSSCVYKTLERYRSSNYNSSEASAPMETDLSNYQEYLKLKTRVEFLQTTQRNILGEDLGPLSMKELEQLESQIEISLKHIRSTKNQQLLDQLFELKRKEQQLQDVNKDLRRKIQETSEENVLHMPCHGVGPSGSCGLANEANQELLHPAVCDPSMHIGYHQAYLDHLSNE

SEQ ID NO: 109113 - DNA, 735 bp, Dendrocalamus latiflorus
  CDS (1)..(735)
atgggcaggggtaaggtggagctgaagcggatcgagaacaagataagccggcaggtgacgttcgccaagaggaggaacgggctgctcaagaaggcgtacgagctctcactgctgtgcgacgccgaggtcgcgctcatcatcttctccggccgcggccggctcttcgagttctcgagctcgtcatgcatgtacaaaacactcgagagataccgcacctgcaacaacaactcactggaagcaaatgctccggtggaaaatgaaattaattaccaggaatatttgaagctgaagaccagagttgagtttcttcaaaccacacaaagaaatcttcttggggaggatctgggcccacttagcatgaaggagcttgagcagcttggtaaccaaatagagacatccctcaaacaaatccggtcaagaaagaatcaagtattacttgatcagctatttgatctgaaaagtaaggagcaagaattgcaggatcttggcaaagatttgaggaagaagctgcaagaaaccagtggagagaatgcactacatatttcctggcaagatgtagggcatagtagctccagtgggcatgctattgaaccttgtcaggaattcgttcaacacccagaaaatgaatattccatgcaaattgggtatcaacagacctacatggaccagctgaacaacgaaggcatggctgttcaagaccctaatggacacactgggtatgcaggttggatgtga

SEQ ID NO: 109114 - protein, 244 aa, Dendrocalamus latiflorus
MGRGKVELKRIENKISRQVTFAKRRNGLLKKAYELSLLCDAEVALIIFSGRGRLFEFSSSSCMYKTLERYRTCNNNSLEANAPVENEINYQEYLKLKTRVEFLQTTQRNLLGEDLGPLSMKELEQLGNQIETSLKQIRSRKNQVLLDQLFDLKSKEQELQDLGKDLRKKLQETSGENALHISWQDVGHSSSSGHAIEPCQEFVQHPENEYSMQIGYQQTYMDQLNNEGMAVQDPNGHTGYAGWM

SEQ ID NO: 109115 - DNA, 681 bp, Crocus sativus
  CDS (1)..(681)
atggggagggggaagatcgagatcaagcggatagagaacacgaccaatcggcaggtgaccttctgtaagcgccgcaatggtcttctcaagaaagcctatgaattgtcggtgctctgtgacgctgaggtggccctcatcgtcttctccacccgaggccgactctatgagtatgccaacaacagtgtgaaagggaccatcgatcggtacaagaaagcatgcaccgatacatccaacagtggaaccgtctctgaagcaaattctcagtactaccagcaagaagcttccaaacttctacaacaaattgcacaattgcagaactcaaacaggaatttgatgggtgaatcactcagtaccatgagtcctagagaactgagacagctagagggaaagctggaaaaaggcatcaacaaaataagagctaaaaagaatgagttgttatatgctgaaattgaatacatgcaaaaaagggaaatggagctgcagaatgataatatgtatctcaggaataagatatctgaaaatgagagggcgcagcaacacatgaacatgttgccatcagcgacggcaactgagtatgaggccatgcctccattcgactcccgaagcttccttcaagcgaacttggtggaccccaatcaccattactctcatcagcagcagactgccctccaactagggtaa

SEQ ID NO: 109116 - protein, 226 aa, Crocus sativus
MGRGKIEIKRIENTTNRQVTFCKRRNGLLKKAYELSVLCDAEVALIVFSTRGRLYEYANNSVKGTIDRYKKACTDTSNSGTVSEANSQYYQQEASKLLQQIAQLQNSNRNLMGESLSTMSPRELRQLEGKLEKGINKIRAKKNELLYAEIEYMQKREMELQNDNMYLRNKISENERAQQHMNMLPSATATEYEAMPPFDSRSFLQANLVDPNHHYSHQQQTALQLG
